United States Patent Application Publication US 2009/0307807 A1 - sequence listing, part 2

SEQ ID NO: 6234 - DNA, 482 bp, Glycine max
tagctacacacacccctctcataactaagctcaccttcttgagaagcttccttaagaagattcctaaagaagctagagcttagctacacatacctctctaatagctaagctcacctccttgagatgagaagctagaacttagctacacaccccctataatagctaagctcacccccatgacaaaaaacatgaaaatacaaaaaaaggtccttactacaaagactactcaaaatgccccgaaatacaaggctaaaaccctatactactagaatggccaaaatacaaggcccaaacgaaggaaaaacctattctaatatttacaaagataagcgggctcatacttagcccatgggctcgaaatctaccctaaggctcatgagaaccctagggcctacccttggatctctagcccaatctacttggagtcttctacccaatgcccttgcgggataggatggcatcagtacctggatctttacatt

SEQ ID NO: 6235 - DNA, 417 bp, Glycine max
agcttcaagaaaaagatggcctcatttaatttcttatttccagaagggaattctatcaatagacctccaatctttaatggagagggttaccactactggaaaacccgaatgcaaatttttatcgaggcaatagatctaaatatctgggaagccattgaaatagggccttatatacccaccacagtagaaagagtttcaatagatggtagttcatcaagtgaaagcataaccatagaaaaacctagagatagatggtctgaagaggatagaaaacgagtacaatacaacctaaaagccaaaaacataataacatctgccctaggaatggatgaatatttcagagtttcaaattgcaagagtgctaaggaaatgtgggacactcttcgattaacacatgaaggaactacagatgttaaa

SEQ ID NO: 6236 - DNA, 294 bp, Glycine max
  unsure (1)..(294): unsure at all n locations
agnnctgtgataatgtntaggcgtacattatgtatattatccttcataagggaaaggaaaataggatataaattatggatgttatcatgttgatgctatttgtgttttcatttcaaaacttatcatggacttgtgtaaatgtcttattgaatttggacttgtgttatcaactttaatacttcaattattattttggattttggagtatgaaataaactttcttaatcaaataatgttaggtatatggtaatatataatanatacatatattattttgaattttttatatatact

SEQ ID NO: 6237 - DNA, 465 bp, Glycine max
ggtatgccactggttccaacctctccatgatctgaaatggttcatataagcgtttggcgagcttcaaatgagtggaacccttcatcgttgtttgtctataaggtcgtagtttaactaagacccaatctccgatattgaagttgtgatctcggcgatgctcatctgctatgttcttcatgcgtgcttgggccttcatcaatttttgcttaagtaacgcgattacttcctccctttgactgagccactcatccactgcttctatctgcgtagaaccttcgacttagcgagggtaattgggaggttttcatccaaaggtgacttcgaacggagttaacccagtggttgagtgaacggaggtgttgcatgaccactccgcccacagcagataacgtccccatgtcaagggtttgcgatgaacacaggcgcgtaggtattgctccaccacacgattagccacctccgtct

SEQ ID NO: 6238 - DNA, 375 bp, Glycine max
  unsure (1)..(375): unsure at all n locations
tgagcttggctcattacatgtcataggctatntttaaaggctctgcttggcttacataaaagcctaacttggcctacgagcctatttaaaagcctgcttaaagacgtctttaactaattaattgttttaaaacctagtaaaataataactaagaaagaaaacttataaaatctgcgataagtaatgtacaaatccaaagataattgataaacaaaatcatatgtgaattcaacttatttaaacacagagtatatcataagataatgaaaaaaaaaacgcgtaatattaaaaaatatatggattagagatgatttatactaatatagacaaataaaaatatttaaattgtctgaaaatgtttttacaaaacattct

SEQ ID NO: 6239 - DNA, 482 bp, Glycine max
tttgcagataatgtcaaggctccaccaattctgttgtatgtgttgtccgcaccatggccattatgaatgtgggggcatagatatgattggggaaattaagtccaaagcttcgaatgggcatcatttcatcctagtcgctattgattacttcactaagtgggtggaatccacttcatatgctaatgtgactagaaatatgggggttaggttcacaaaaaaggagataatttgcatatatgtgttgtggagcaaaatcatcaatgacaatgccaccaacctgaataataagatgatgcatgagttgtgtggggatttcaagatccaacaccataattcgactccttatcgacccaagatgaatgatgcagttgaggccgccaacaagaatatcaagaagatcattcaatagatgacagtgacatacatagattagcacgagatgttgccattcgcattgcatggatatcgaacttctgtgcata

SEQ ID NO: 6240 - DNA, 422 bp, Glycine max
ctgccacatagaatacccctgcaaggacatacccctcatgtgtgaaaatctctttgccaaccaagtaatcaacaaagtaacttatcatatatggaccaacatacgagacaagagtagtgacaccagcaaacacagcgttacaagccgcctccttccagaaggatttgagaagtgcccaagccaacgaaggctgcccggataggttttcagccttcaacctctcccaattagaattcaaaaccttataatttgtcttggatcggtctttcggcgcaacaaggggaatgtccttaagctcaagcggcctttttgccccaatggaaagaagtggattcaaccaagacaaaatggccaagctaaaaagtccagcatcactataaggagtaaccttgagacacccgggatcctcatcaacaagcaat

SEQ ID NO: 6241 - DNA, 316 bp, Glycine max
tcaatatctttctaacagtaatgagtaaagaacttggcctttttagcataaactctttcataaacacatcttcgagaaaaatataagaagctaaaatgaaatgggtttctcccataagctaaaataaactaatgtacttcaagttttggagaagttaaatgagagaggctttataaaagctatgcccttaagtggattttacctatgagagaggtcttttaattcatttaccttcttatttatcatcattaaaggctcatcatggaaagtttatcaaacatcaactcactatgactatgttgcttcaaatgtagtg

SEQ ID NO: 6242 - DNA, 275 bp, Glycine max
tgagaatggagaattgcactaagcaatcactacgcatagcttcaatctcgaaagtggaggacacatgaacgaatacgcaattcatgggtctccgaaaagattgagaatggagaattgcactaagcaatcactacgcatagctccaaactcgatggtggaggacacatgaatgataacgcaattcatggtgctccgaaaagatggagaatggagaattgcactaagctatcactacgcatagctccaaactcgaatgtggaggacacatgaacgat

SEQ ID NO: 6243 - DNA, 436 bp, Glycine max
  unsure (1)..(436): unsure at all n locations
agctntgagcanaatcaaacgagcaataactttgactcggatgtccgaatgaatcccgtaatacatcaagacgcatctaattgataacggaagctntgaccaaattcaaacgacaataactntctactcggatgtctgaatgtgccccgtagatatcaagacgctattatatgaaaaccgatgctcgtagcaaattcaaagaacaataaatntttacttggatgtccgattgtgtcccgtagtatatcaagacgcttgaaatttagaacagaagctctgagcaaaatcaaacgacaataacttttaactcggatgtccgatggaatctcgtaatatatcgagactcacgaaattgaaaatagaagctttgagaaaattcaaacgacaataattttgtactcatgtctaactgtgtcccgtaatatatcgagacact

SEQ ID NO: 6244 - DNA, 483 bp, Glycine max
  unsure (1)..(483): unsure at all n locations
tcaagaataatggtctcatcanattatttattntctgttaggatttctataaataggccttctatttttaatggtgtgggttaccattattggaaaacttgcatgcaaatttttatagaggcaatagatctgaatatttgggaagccatataaatagggccctgcattccaactatggtggcaagaaatacaaccatagaaaaacctatggaagaatggagtaaggaggaaaaaagattagttcaatacaatttaaaagccaaaaatataattacatctgctttaggaatggatgagtactttagggtatcaaattgtaaaagtgcaaaagatatgtgggataccctacaagtaacacatgaaggtacaacagatgtaaaaagatctatgataaatacattgactcatgaatatgaattatntagaatgaatccatatgagagcatacatgacatgcaaaaaagttcacacatataattaatc

SEQ ID NO: 6245 - DNA, 426 bp, Glycine max
  unsure (1)..(426): unsure at all n locations
agctntacaacagatgtcactctattctctagttttcaaagggatatgtaacaaggaaacataagtatattcaccaggaaaacattgttgtggaaggagaatgtagtgctatgattcataagatccttccacccaagcataaagaccctaggagtgtaaccattccttgttcaattggagaagtcactgtgggaaaggctcttattgacctgngagtcagtattaacttaatgccactctccatgtgcaaaaggttgggagagttggagatcatgcccactaggatgactttacaacttgttgaccactccattaccaaaccatatggagtaattgaagatgtgttggtcagagtaaaacatattatcttcccgacagactttgtgggtatggatatctatgaagatatgacattcatgaatattg

SEQ ID NO: 6246 - DNA, 479 bp, Glycine max
  unsure (1)..(479): unsure at all n locations
cgcagggatattagcttaaaatgcttacaattagtttaccatggaattatgatttaggctttnttggggtatctgagcttgatggttcagctttcctcttaattcccaaaaaatgctctacctgaatcaattaaaaaaaaaattttaacagaaaaatgcaaagctattccacaaaagcactttttctaaagcttaaacacgtcctaaattacctttcgatcaccaagttaaacattattaacattaaacattaaacatagttacttacttcttagcatgccaaaatcactttttgccataatcaatttaaatttttttaaaataggttcttaatgcagccataagtcaactctcttacatcatctttggtcaatttccttctctcaaattcaaactcaagttttgaaatgggttgagtggatggttcacagtcatgttcgccaagccagtgaagtaaggatcagataatgcctgatatc

SEQ ID NO: 6247 - DNA, 406 bp, Glycine max
cacctgccgcatgcaagcttgtagggttaaagtctcactatttgtatgtgctcatgcaacaattgttagccgtggctatacgagacatcttgccaaacaaagtcatgttaacgataactcggctgtgctttttcttccatgctatatgtagcaaagtcattgatcctgtcaagtttgatgagttggaaaatgaggccgcaattatactgtgccaattgtagatgtatttttcccctactttctttgacatcatgattcacttaattgtgcatctggtcagagaaatcaaatggtgtgatcctgtttatctacggtggatgtacccggttgagcgatacatgatgatcttataagggtatatcaagaatctatatcatccataagcatatatcgttgagaagtacat

SEQ ID NO: 6248 - DNA, 419 bp, Glycine max
  unsure (1)..(419): unsure at all n locations
agcttattcgagcctgtgatgagcagcagcattgtttggaacttacatacttatacatccaatatgatgagtttgataatgctgcaaccactgtaatgaatcactcttctgaagcatgggaccacatgcaattcaaagatattataattaaggttgcaagtgtggagctctactataaagctgttcacttctacttgcaagaacattctgatantttaaatgatcttcttaatgtacttgccctacgtgtggaccacacccgtgttgtggatataatgcggaaggtctgtatgtctcagtctgttttctaatgtgttaagtcttaatcttatnttggtgaggttaatataccgttcgaaaataatttatgcaatattcttatttgttgcttgatttttatggtttttaagctggccaca

SEQ ID NO: 6249 - DNA, 405 bp, Glycine max
ctttatagaaggttcgttcctaatttctctacaattgcatcacctctcaatgagccggtgaagaagaatgtggcatttatttggggtgaaaaacaagagcaagcctttgctttgctcaaagaaaagcttactaaggcacctgttctagctcttcctaatttttctaaaacttttgagctagaatgtgatgcctctggagtgggagttggagctgtattgttacaaggtgggcaccttattgcttattttagtgaaaaacttcatagcgccaccctcaatcacttaagtacatttgagggcaaagcaagtttaacaagaggcatgcaaaatgggtagagtacctagagcaatttccataggttatcaaatacaaaaagggaacaacaaatgtggtagctgatgccc

SEQ ID NO: 6250 - DNA, 409 bp, Glycine max
acctgcgagctgcaagcttgctcctctcttacacctgcagatgtattctagtttctcacacgagattttatgttgagtaaagctcgatccagcgatctcttttgggaagctgtttggcctcttctgttagcaaaaggctggcgttctgaacagcctatagatcaagttgtttgtggatcaaaacaatctttggtttttcttgtacctggcgttaacaaatgttcaagaaggaaactgataaaaggtgaccactactttgattctataagtgatgttttgaataaagtaacatctgaccctgtgcttcttgagactgaaagtcaagcaactgacggcagtgtatatagggaaaaaacataatacaacgagacctatagggtgtgccaaatatggaacaagttcattacct

SEQ ID NO: 6251 - DNA, 474 bp, Glycine max
  unsure (1)..(474): unsure at all n locations
tcagataaaccatagaatctggcgataggtgcagattntttattcatggccagttgggttaccaggttaaccaaggcatctagtttaccttcaagcttcttagtctcacctgatgaattcgtggctatttcatgcactcctctaatgaaaatagcatcacttctggcactaaattgctaggagtttgaagccatcttctcaattaaatttctggcttcagcaggggtcatgtctctaagggctccaccactagaagcatctatcatacttctctccatcttgctaagtccttcataaaaatattggagaagaagctgctctaaaatctggtggtgagggcaaatggcacataatttcttaaatctctcccaatattcatataggctctctccactgagttgtctaatacctgaaatatcctttctgatggtcgtggtcctggaagcatgngaaaagttttctaagaatactctc

SEQ ID NO: 6252 - DNA, 480 bp, Glycine max
  unsure (1)..(480): unsure at all n locations
cgcttgcatatcctntgataaaccttcgatagtatctcagtgaggcctaagaaacctcttagctgcttgatattgagtggtgtaggccactctagaactgcctgcaccttagtagcatccatagcaactccttcacctgaaactatatgtcccaagtactctatctccaatacaccaaaagagcatttagacaacttagcaaacaaaacattttctttcaatactttgaatacaacctctagatggcataagtgttcatgccatgtggaactatataccaatatatcatcaaaaaacactaacacatatttccttatagcatgttggaaaatatggttcatgaaacactgaaaagaagtcggagcattggttaaaccagatggcattattgtgcaaaattttgactatgatatggcaaaattgccttattggccagaatttgtttattgttgcagcgaaaatttctttatctgctggtta

SEQ ID NO: 6253 - DNA, 366 bp, Glycine max
  unsure (1)..(366): unsure at all n locations
agcttataacaatatatttgtctactcaccttttttttcattttcctactgcaacctctcttcttcactctaatgacagtaaaaaaattgtgacaaactccgtaaaaaaaagtgaaaaatgaagatttgtcatagatgaaaagggataaaaacttgggtggttatgggataaagaaaaagcacggcaagaacgggctttggaaccatttccaaaagctcttcatctaagccataaacgtcacagcattctgcctcatcctctcgaagcccaagcccccaaaggaattgcaaatcacccaaatcattatacaacttcaattctttcgacgatacctttgcactngtcattgccctccttttatactc

SEQ ID NO: 6254 - DNA, 436 bp, Glycine max
  unsure (1)..(436): unsure at all n locations
ctaagctgcttctacatggatgacctcctttaaagttcccaacaaaacactcactatcctaagagaaaattgcctaaaattattacacaaaaatggaagtagggtgacctattggaggctcccaacttacttccaatgaaaggcctttttgttacaaaatttgaaagcaaagcaaattgccaattacaaaaagaaagtcctcaattgtggtggctattctctctttagtgtttcactcaattgtggtggctaaaccaatagagttttaacaagaaaaattntcaaggattattcaacaattaaagcaatgaaaagcacacaaaagcaggctaggacccaaagagaaacctagaatggctctagagtagagtagaanaaccaaaaaaaagactgaagaaacctctagttttgacacttttgtttcacaataatttca

SEQ ID NO: 6255 - DNA, 426 bp, Glycine max
  unsure (1)..(426): unsure at all n locations
agctntgatgttgttagttgtcatttcaatgtctcatagtgtcatcttgttggaatttgagaagaagatcaataaaatcttggtcctctacttcggctccatcttcttttgcaattntcttcttttcttgatgctctcttatgatgttttctaagaccttgtccacctgcttgtgtaacttcttcaatttggccatctttccagttatgaaatataaaaatggaattgaaggaaacacgtcagcaaggtcaaatcctcccccggattctacgatttttcggatcaaagacacaacaaactcatcttgctccttgtatatgccaccaaatgctaccctggaaatagaggcacatatcaatgagaaaanttgactggtgagattgattggggaacctgctgcttcgcgaatggagttgataaactttg

SEQ ID NO: 6256 - DNA, 486 bp, Glycine max
ctaacactgatgactgtcccaacatagccacagagtatggaatcataagcatagcaactgttctgctcttcaaaaatggagaaaagaaagcgtaattggtgcagttcccaagtccaccttgtccgcagcagtggataaatatgttgatgtctaaaactggaaaggaaaaaaaatgttataataaggaaacgcttgatcataaattatagaccatctttcattttatggttttcaacacttcaaaaaagtactttgttgtatccacatcttttataacattttgtaaagattacattgtataaattcccgatggagggaaatcttcagtccttcttctcttctctgttgttccttctgccatccattgcaattcacttcccattttcgattactgaaccaataatctatcttgcaatgttaatttgaaaccataactccaggtttgtgagtaaattgaaattccaatgtcttcatgggcctttctag

SEQ ID NO: 6257 - DNA, 476 bp, Glycine max
ctaagctatgctgcaacatttatatagacctcctcagcagcaaaaccaactttagcagaataattatgacctttcaagcaatagatacaatccaggttggaggaatcatccaaatttgagatggacaagtcctccacaacaacaacagtctgttcctcctttccaggatgctgctggtccaagcaagccatatgttcctcctccaatacagcagcagtcacaataaagacaacaagagactgaggctcctcctcaaccttacttagaagagttagtgaggcaaatgaccatccacaatatgcaatttcagcaagagacaagagcctccatttagagtctgacatatcatatggggcagatggctactcagatgaaccaagctcagtcccaaaattctgacaaattgtcttcacaaaatgtgcaaaattcgaaaaatgtgagtgccatcaccttgaggtctggcaaccaaattcaag

SEQ ID NO: 6258 - DNA, 427 bp, Glycine max
  unsure (1)..(427): unsure at all n locations
agcttactctcttcaggcactactatgtcgtttttatctgttacatttacttcaccagggttgtcgtttatgccttggagactattacctcctatcgttattcttggaccagtgtggttgctgctgagttggccacccttgctttctatttgtttactggctacaagttcaagccagaggctcacaattcgtattttgtcatcgatgacgaagaggaataggctgccgcagaggccttgaagcttgaagatgaatttgaattgtaatttctttcanaatacaaacatagttgttgaacaagttggtaccatgctcagcaatgctctcacgtttcatctcaacagccagtagaaatttgcatgttacattgtatgggtatagtcattattcatgaatcattgtgctatattttgtgttctggactcat

SEQ ID NO: 6259 - DNA, 341 bp, Glycine max
  unsure (1)..(341): unsure at all n locations
agctntacaacagatgtcactctattttatattttcaaaggatatgctaacaaggaaacatatgtatattcaccaggaaaacattgttgtggaaggaaattgtcgcgctatgattcaaaagatccttccacccaagcataaagaccctaggagtgtaaccattccttgttcaattggagaagtcactgcgggaaaggctcttattgacctgggagtcaatattaacttaatgccactctccatgtgcaaaaagttgggagagttggggatcatgcccactaagatgactttacaacttgttgacccctccattaccagaccatatggagtaattgaagatg

SEQ ID NO: 6260 - DNA, 465 bp, Glycine max
tggagtggtgaaccacctgattactcaggattgaatgtgtttgtatcactggcctttgctcatgttaaacaaggaaagcttgatgcaagggctgtaaagtgtgtgttcattggctatcctgaaggagttaaagggtacaaactgtggaacctggtgagtcaaaatgtattatcagtagggatgtaacctttgatgagagcagaatggcaatgctgagtaaggatcagaaggataacagctcaagtaatgagagtactaaatttgaggtgaagcatttagagttttttgatcatgtcagtggagatactattgatcacactattcaagcagtaattggtgataatgaagaattggctactaagcatgacttgtccaattatcaattggctagagatagagcaaaaagggtgataaagcctacaaagaggtatggtcatgctgacattatctgctatgccttgaatg

SEQ ID NO: 6261 - DNA, 425 bp, Glycine max
agcttgtcccacttcaatgacatctttcttattgagattatccttaggtggaagcctcattttaacgatccttcaaacaaaaagtataaccttggaggggacattcaactcccaaataaaggagtacttgttgggaataaatatgtatatccaaaatccaatccatcatattatcaattttagtaaaaaattattctttattgtattatcatatatattgcttcattaaattgttaatttgacaagtctttgattaaaattagaggtttgttatcatgataaagaatatgatgataagaaataagtcctttataattttaatctaaattgttcttgatcgtaagattattgtgaataggaaatcaataatccgaatagattaatatatatgtaatgatctctattggataaagaataataaattt

SEQ ID NO: 6262 - DNA, 446 bp, Glycine max
ataagatccctggctttgatgataatataggggtccctagtcttcctgttgtttgaaacagtcatggaaccctcaacctgtgcattgtcaaaatcgaaggcgaagttagggtttttgattgaaactagaggaggaaaaagagaatgagtaacagagtaaggtagttacgaggttgagttcgcaagcaacaccgaactccttgagtgaggatttgaccatgggccaagcttcttggaggtacttttcgcggtactgagggaagagagtggagaaggagctaacttcaagcatgccgccgtcgttccacgaagggtcgaacttgttgatcttccagtggtcgatgtttgggtcgtcgtcccatggctttggcttgtcgtgctttccctttcgcttctccttctgctcaagtgatcgaggttcttcttctacgccattctcctcgtctg

SEQ ID NO: 6263 - DNA, 454 bp, Glycine max
  unsure (1)..(454): unsure at all n locations
gtcacctgcggcatgcaagcttagccctagaggggatggaccttttcatgttttggagaggatcaataacaatgcctataggttggacctcccagaagagtatggagtcagcaccacttttaacatttctgatttaactcctnttgtaggtggagctgatattgaggaggaggaactaacagatttgaggtcaaatcctcttcaaggggaaggggatgatgcaatcctccctaggaagggaccaatcactataaccatgagcaagaggctccaagaagattgggctatagctgctgaagaaggccctagggttctcatgaaccttagggtagatntttgagcccatgggccaaggttgggtccaattatctttgtacatattagactaggatgtcattatatgtggtccttgtatttaaggctccatattgtaggtagggtaccctagaaatat

SEQ ID NO: 6264 - DNA, 493 bp, Glycine max
  unsure (1)..(493): unsure at all n locations
actaagcttgcaaggaagctagagaganaaagagatataggaagcaatgaatagcatagaatgaattagcttacaaagtgggttattacaattggttatatagttagttataagaacaactaactcacaactaactaaactaactctagctacatagtgattaaccaactaagctaactctagttacaagtggatctacgataagagatcttttcaagctaggaatggacatcagacattccttgcttgaaatacagaatctggaaagtgctaggcattaaagccttagtgtagatatatgctaattggtttgtagaagggataggaaacaacttcacaatgtgctagtcaatctcaacatgctttgtcctttaatgaaacacgggacttgcaactatatgaagagcagatttgttatcacagtacaaggtaggagggtgcagganatcaattgtaaacccagcaaatagttgagccattgtagcttagaagt

SEQ ID NO: 6265 - DNA, 437 bp, Glycine max
  unsure (1)..(437): unsure at all n locations
agcttggtccaagtttctcaaacacctgttgtaaccatttgaattcacccttaacccccattatgtatattggggaaatcaatccatcacaaatcaatcaaatacttacaatacagatatgattacgatagtcaaaccagttccgtatttgcacacaactgcaaggaataaacccatttaaccaatgcaatggaatcaaatatggtatgtcatactggcatatataacatgtaagaaaagtttcaggtcaaaatacttaccgattgctacctttatcgtgtttcccaagctgttgcaatacctcaatttctatcatggctgcctctcgatacttctttatcccacggacaatntttatggcaaccatttccttcctttctctgtcccagcactccaagacctgcccaaaagttccttcgcccattntactatggatc

SEQ ID NO: 6266 - DNA, 476 bp, Glycine max
  unsure (1)..(476): unsure at all n locations
tcaaaggactctatagggcttgaaacaagctattatgcaatggtttgcaagattatcatcttttcttaagtttgcaagcaatgtgcttttgaccattctttgttcattaagcatggttgcaacacaatttttgttttattggtttatgttgatgatattgtcttgttaggaaatgatttgcctgnaatttagagaattacaaatctactcgacaatgctttcaaaatcaaggacttaggagacctaaggtactttctggggtttaaggtagctagaagctctactggtataaatctttgtcaaagaaagtatgcactatatattttcaatgatgttggcatgcttagttctaagtcagcttccacaccttgtgattataccaccaagttgcatcaacactcatggtcacctcttatcacagaatatgcttnctcctatangagattaatanggagattgatctatcttgaccacac

SEQ ID NO: 6267 - DNA, 428 bp, Glycine max
  unsure (1)..(428): unsure at all n locations
agcttgaaattgaacaacggaagccttctatatattcaaatggtcataacttgtcacacggaagtccgattaacgcgcagactatatcgagacgctcgaaattgaacaacgaatgctcttgagaaattcatatggccataacttgtcacacagatgtctgattcaggcgcataatatatcgagacgctcgaaatctaacaacggatgctctcgacaaattcaaatggtcataacttgtcacacggaagtccgattcaggcgcataatatatcgagacgctcgaaattgaacaacgaatgctatcgagaaattcanatggtcataacttgtcacacggaatacagtggagaaattcatatggtcataaacttttgaacggaagtctgattcacgcgcataatatatcgagaagcttgacattgaacaac

SEQ ID NO: 6268 - DNA, 471 bp, Glycine max
tatgtacccaccatggtggctggaaatacaacaatatatattctcttagaagagtggtctgaagaagaaagaagattattgcagcacaatgtataggctaaaaaaatcattacttctgccttacgaatggatgaatattttatggtttcaaattgtaagagtgctaaggatatgtgggacactctacaagttacacatgagggaacaactaatgtcaaaagatctaggataaatactgtaactcatgagtatgaattatttacgatgaagacaaatgaaagtatactacatatgcagaacagattcacacatatagttaatcatcttgcatcattatgaagaacttttctaaatgaggatctcataaataaagtgttaagatgtttaagttgagagtggcaaccagaggttatagccatcacagaatctagagaattgtctattaatgctctcgctactctatttggaaaa

SEQ ID NO: 6269 - DNA, 460 bp, Glycine max
  unsure (1)..(460): unsure at all n locations
tagagccaattcaaacgacaataactntttactcggatgtctgattgagactcgtaatataacgagacgctcgaagttaaatgtttaagctttgagccaattcaaacgacaataactttttactcggatgtttgattgagtcctgtcatatatcgagacactcgaaattgaatgttgaagctctgagccaattcaaacgacaataactttttactcggatgtgtgattgagtcccgtcatatatcgagacgctcaaaattgaatgttgaagctctgagccaattcaaacgacaataactttttactcggatgtctgattgagtctcgtaatatatcgagacgctcgaaattgaatgttgaacctctgagcaaattcaaacgacaataactntttactcggatgtctgattgagacccgtaatatatcgagacgctcgaaattgaatgttgaagctctgag

SEQ ID NO: 6270 - DNA, 427 bp, Glycine max
  unsure (1)..(427): unsure at all n locations
agctngngcaagatgactaaggcaccatggactgtggccctaagccagaggatatgtgcatgccaccaaagtgtgcctctttggcctgtaagagtaaagttatagacttatgcctggcccggttgaattgggcactgngttatgtatgctggcccatcagcccaacctgttctcaagtgtctgacaccattcatgttcaatttcaattcactttataatttttgcatacgtaatactaataactaatgaagaaagcactcactgcctatcagtttcgtatatacagttggtagttaatggtttaatttactggatattaaatcatgtaatttacaattcaattgatcaatgaagaccattagatcaatgaaactaaaacatatgggatgttcatttggtcttacgaaagatcatttcatttttcgtc

SEQ ID NO: 6271 - DNA, 322 bp, Glycine max
  unsure (1)..(322): unsure at all n locations
cactagagagcttctaagtatatgacatgtccaacttgtacgttttatatctaatgtacattctacanaatcagaatctaaaaagcctgttaagtataaggaggtacctctgggataccacaaacctacattggttgtgcccttaagatacttaatgatccttttaacaacagataagtgaaattccttaggatttgattggtatcttgcacataagaaaacactaatcatgatatctaatctacntgtagttaggtagagaagtaatccaatcatacttctgaatcttgattcatgcactattttacctttctcatctaag

SEQ ID NO: 6272 - DNA, 346 bp, Glycine max
cagcttaagctggcaagctgctctaaccaaatattcctccagtgatcaagcattccataccaaaaaacaattcaagtatgagcaccaagccttatcaaaagcagcaagctgagatctgaaggtacaaagcttcatgcatggatgctgagacagactcttcatcagacacttgtattggaccatctagtataatctttatcaacaactcaaacatttggacaaactcttgtgcacatattgctagagaattctcacattctcccattccactgaaaacggcatctggatgacccaatatcatataaccacaaagaacaactctcacaggataccttgataacctaac

SEQ ID NO: 6273 - DNA, 372 bp, Glycine max
  unsure (1)..(372): unsure at all n locations
tcgtgtatttcaataatgagatcttgtgctcaagaaagctttatctttccaacccgattctaggagcaagtggacgcctaattacgaatgcccatatgtcgtcaagagaaccttctctggtggtgcactgactcttacgactatggatggagatgagctccctcgttctgtgaatgcggatgcagtcaagaaatactttgtctaaaaataaaacaacagctcggtaagtcataacccgaaagggcggcttatgcanaaatgagcgtctcggtgggtcgaaaacccgaaagggcggcccaggcgaaaattatagacatcatacagaagaataatcagcctgatatgtcgaatacccgaaagggcgatctatgc

SEQ ID NO: 6274 - DNA, 209 bp, Glycine max
atgtgtcgggatgatttctccaaatgtacctgagtaaactttatcagagagaaatcagaaacctctgaagtattcatagagttgagtctaagacttcaaacagagaaagactgagtcatctagagaattacgagtgacctttgctgagaattagagtacagcaggatcactgaattctgcacatctgaatgcatcacacatgaattctc

SEQ ID NO: 6275 - DNA, 312 bp, Glycine max
  unsure (1)..(312): unsure at all n locations
cttcttataccaatgtgacgaggagtgtggtggtcagattcataaagaacgaactgattngtcgatgcggactccctatgaagatcattactgacaatggcaccaatctgaacaacaaaatgatgcatgagatgttgccttntgccttgcatggacagggctgtggaggctgataataaatatattaagaagattataaagaagatgacggtgtcatacatagattggcatgagatgttgcctgttgccttgcattgatatcgaacctcggtacatacttctactggggcaacgccatacttctctgtttat

SEQ ID NO: 6276 - DNA, 372 bp, Glycine max
  unsure (1)..(372): unsure at all n locations
agttatgaccatttgaatntcttgagagcttctgttgttcaatttcgagcttcttcatatatcatgggccttaatcatacacccgagtcanaagttatggccgtttgaacttggccagagtttttgtgttccatttcaagcgtctcgatacattattggcctgaatcagacatccgagtcattagttatgacagttcgaatntgccaagagcttccatgttcaatttcgagcttctcgatatattatgtgccggaaacgcacattcgagtganaagttatgaccatttgaatntctcgtgagcttccattggtcaatattgtgcgtctcgatatatcataggcctcaatgaaatacccgagtcacaagttat

SEQ ID NO: 6277 - DNA, 291 bp, Glycine max
  unsure (1)..(291): unsure at all n locations
gagttttactctctagtaatcgattaccagtttactgtaatcgattaccagtgacaagttntattntcaaanagctntcaactgaatttataatgtttcaatcaatttcaaaatggtgtaatcgattacaatatattggtaatcgattacaagtgtgtctgaacgttgaaattcaaattcaattgtgaagagtcacatcctttcacaaaaatgctgtgtcgtaatcgatacaatgatttggtaatcgactaccagtgataagttttgaatagaagtcaaaagatgtaactc

SEQ ID NO: 6278 - DNA, 199 bp, Glycine max
  unsure (1)..(199): unsure at all n locations
tcttcatggatggatntgctcctttgacatctcgtggctctcagcaatacaaggccttgagtgtgccagagctgacacagcatatgtgggattcaaagaacatgatgtgagctgctgaccctcgacatggacgctacctcactgactcagccatgtttagaggcaagatgagcaccaaggaagtctacgaacatatgat

SEQ ID NO: 6279 - DNA, 380 bp, Glycine max
  unsure (1)..(380): unsure at all n locations
aactacgtacganagctatctagacatcgcccgtttctaatagctcatcacccttacggaagaatgaaaaaagaatttaatggaagtcaagagcacgaaactgcgcggataccgttaactggtgagcaggtcttccagcggattgaacaccttaatactatattgggacagacccaaaagaaggataaaagtaagagttgcatatggaagaagatgntccatttctttgatcttccgtactggtctgaactagatgttagacattgtattgatggtatgcatgtagagaaaaatgtatgtgacagcgtcattgggacactccttaacattcatggcaagacgaagaatggtctaaatacctgtcaagatctagctgacat

SEQ ID NO: 6280 - DNA, 325 bp, Glycine max
  unsure (1)..(325): unsure at all n locations
gttgtatggcttgaaacaagcaccgaggcagtggtacatagaagttaatgagtntatgagcaactcaggattcataagatgtgacatggaccattgctgctatgttaaaaaatatactaatagttatgttatccttgttgtgtatgtngatgacatgttgatngcaggatctagtatggcagaaattaacaggtngaagcagcagttggcagaaaactttgaaatgaatgatcttggtccagcttaacaaatccttggtatgagaattcttagaaacagatcagaanggaatttgaagctgtctcaggagaaatatatacacaag

SEQ ID NO: 6281 - DNA, 310 bp, Glycine max
tctggttgtttctggtgcggagatgatggtacagcgggtgaaccagaagcggaagtttcttttggtgaggtagccatggaaaagcagagcagttggaatgatttcgtaaatttcagaaggctattgtgaaatgctggtgaaaacacgaatgccaagcagatataaatttgaatgaagaatgtagagggtcgtgtgaagcaacggtcgacatttccttggttcagtagtgaacgcgctattaatgttaagtgattcgttcgggcacgttcagattgctgtagttgctataattcctctagcacacaaatgc

SEQ ID NO: 6282 - DNA, 378 bp, Glycine max
  unsure (1)..(378): unsure at all n locations
gcttaagctccttcaactgcacaatgctcttaatatttgaagagtatccttgtgtaaccttcacccgacgaagacactgacaaatacttatcttctccttcttggacaaagtatggcaggctggggtgcaagtaaatttcttcccatcagacgttggatgcaactgtgatcgtatacccatatcagttagatctcgacgggtattcaagccatccttcgtcttgccttgaatggtaaggagcgtcccaatcacactatcacaaacatctttctccacatgaataacatcaatacaatgtctaacgtcaagatcacaccagtacggaagatcaaagaaaatggacctcttcttccatatgcaactctgactnttattct

SEQ ID NO: 6283 - DNA, 446 bp, Glycine max
  unsure (1)..(446): unsure at all n locations
ttaagtcacctgagctgcagctaagattcttactctttccgagattggatcaaacgattaatcttcttccactggaaggaatcagccagatggtggagtattccatcccaatctatcccatgtgcatgccatgtaagttatgttgcataatctgcattagcaaacaaacgcctaaaccttggaatgatcagaagatactattacacctttgctagggggcctttctttgtgctttcatcactgctgaactcatcatcatccttcactttgtaccatgataccccacacctggggcatntatggagttcttcaaactcatgtctgtgcaatatgcaatcattatagtattcatgtattttttatactccatacccattagacacaatatcttcttcgcctgataataactntntggcaacatgttttcctctggaacacatgctaca

SEQ ID NO: 6284 - DNA, 305 bp, Glycine max
  unsure (1)..(305): unsure at all n locations
gcaaataaccaactgataattgccttctttttgtttccttatcaacggaagctgcccagtgtcttcaagcatcaaatcaatacaatgagctgcacaaggagtccaataaatatgttttcttntatccatcaacaacttacccgctaaaacatagttgctcccaatatcagttacaacttgaacaacattctcttctccaacttcctccacaataacatcaagcaactcaaaaaacttttcagctgtctntacaaaatcagaaccatcaacagacttcanaaacatggtaccagcttgagagtaat

SEQ ID NO: 6285 - DNA, 405 bp, Glycine max
  unsure (1)..(405): unsure at all n locations
atcttaagtcaccgccgctgcagcttgagtcttcttatctcttcccaaacttattctttcctatgccacccatgtaactngttgcaccaggaactnggagcatccactacaagaagcgaaagtaaagggtaaattgatttgatcaaagctactatagattcagagtattactaagtactaacaaggtagatacatacttgagcaaccttgattgaattatgagtggcaccttccagcacacaaacaaaaaagaaatagtagaagctgtcattatgacatatgcacttccactggtcattntataaagttggcttatgatatntaaatattaaagcaattatatagaatccaatactccggatctaatgcaatacctccaacaatggtgctcacattatatatttt

SEQ ID NO: 6286 - DNA, 299 bp, Glycine max
  unsure (1)..(299): unsure at all n locations
gatgtagttggacaagtggcctcaataacttaagaggaggggtcaattaagtcttacaaaatttcccaccaacaaatcttatcccccttttaaattatatatgataggctcagaatgcagaagaataagaagaaacaatccatttaacaatgttctcttacatgcgcaagataaagtaaactgcagtataataactgagataacggaagagagacatgcanactcaatntatactgtgttagccatttcccatacctatgtccagtcctcaagcaacccacttaagattttcactatct

SEQ ID NO: 6287 - DNA, 278 bp, Glycine max
ggatcccatttctaccaactacaaaccctaagaaaactatattatctacacaaaaaagacacttctctatatctgcatagagggtgtttttcctaaagactgaaagaacttgcctgagatgtcctaagtgatcatctatgctcctactgtacactaaaatatcatcataataaacaactacaaatctacctatgaaatcccttaagacatgatgcataagcctcatagaggtgaatggtgcattagtgagcccataaggcatcactagccactcatca

SEQ ID NO: 6288 - DNA, 270 bp, Glycine max
  unsure (1)..(270): unsure at all n locations
acctgaactcaggatgtgtctcatgcattttactcaacacctggttcacaccagtttgagaggaacttccaatgagctcttaanaaccgtggatactgcccaacaacatacctgccaacaaaaagatatattattaaaagaaacagaactaaacaagcaaaacacagcaagatggaatgtgtgaataatccttacatgatattactcgcaataaccagcttgttatcttnttcctttgtgatttcacatanggttaataaatcgcgaatg

SEQ ID NO: 6289 - DNA, 160 bp, Glycine max
tttcttcctacccgagactcattggtcgactcatatacctcaataacactcgtcccgacatcgcgtacgcaatacaacagcttatccaatacatgtctagtcccacggatgcccatctgcaagcagcctaccgcatattacaatacctcaagggcacacc

SEQ ID NO: 6290 - DNA, 338 bp, Glycine max
  unsure (1)..(338): unsure at all n locations
agcttctagtgggacatcttgacttgctntccaatctgacattcaccacagattctgccttcttctattntcagatagagaatgcctctaacagcacctttgtcaatgattttcttcatgcctcttaagtgcagatgtccaaatctttgatgccatattctgacttcatcttctttggaggatagacatgtggaggagtagctggcttcttggggtgtccataggtaacaattgtgctttgatctgctgcccttcattagaacttcactcttctcatttgtcaccaagcattctgactgtgtgaagtttacattgaatccttcatcacacagctgact

SEQ ID NO: 6291 - DNA, 448 bp, Glycine max
gacactataaatctcagcttggtttaaatttcgagcgtctcgatatattacgggactcaatctgacttccgagtgaaaagttattgtcgttagaattagctgcgagcttcggttttaaatttcgagcgtctcgatatattacgggactcaatcggacttccgagtgaaatgttattgtcgttcgaatttgctacgagcttcggttctaaatttcgagcgtctcgatatgttacgggactcaatcggacttacgagtgaaatgttattgtcgttagcatttgctgtgagcttcggttgtaaaatgcgagcgtctcgatatattacgggactcagtcagacttccgagtgaaatgttattgtcgatagcatttgctgcgagctacggttttaaattttgagcgtcttgatatattacaggactcaatcggactttcgagtgagatgttat

SEQ ID NO: 6292 - DNA, 432 bp, Glycine max
agcttggtagcaaattcgaacaacaataacttttcactcggaagtctgattgagtcgtgtaatatatcgtgacgctcgaattttaaaaccgaagctcgtagcaaattcgaacgacaataacatttcactcggaagtcctattgagtcccgtaatatatcgagacgctcgaattttaaaaccgaagctcgtagcaaattcgaacgacaataacatttcactcggaagtctgattgagtcccgtaatatatcgtgacgctcgaattttaaaaccgaagctcgtagcaaagtcgaacgacaataacatttcactcggaagtccgattgagtcccgtaatatatcgagacgctcgaatttttaaaccgaagctcgtagcaaattcgaacgacaataacaattcactcggaagtctgattgagtcccgtaatatatc

SEQ ID NO: 6293 - DNA, 449 bp, Glycine max
  unsure (1)..(449): unsure at all n locations
agcttctaaactntgtacaagaatgaagctctgataccacttgttagacaagtggcctcagatatcttaagaaggggggggttgaattaagatattccaaactgtttcccctaattgaaaatctatttttctttttacttaagttatgaattcccttaatgacaatcttcttaaatattaattcaaatgaagcaacttgaatatgaatataaagcaataataaataaaggagattaagggaagagaaaatgcaaactcagttttatactggttcggccacacccttgtgcctacgtccagtccccaagcaacccgcttgagagttccactaacttgtaaattccttttacaagttctaaacacacaaggacaacccttcctttgtgtttagatatctnttacaacaagagactcacagtctcttaatcccttagagaatgagaagaaga

SEQ ID NO: 6294 - DNA, 439 bp, Glycine max
ccttgctctaaagataagttacagcctgtttattggtcacattatgatggatacgtgaatagggtttaatcatatcccatgttttggtgaacactagacactagataacatcattgagttatcatgtcctatatttgacgcggaccaaatatttataggataggatataaattatgttcaaatgaaaaaaataagatttcaataaaattacatataatttttaaaaatgcaacttttaatttaatttttacaaattataaaaagattacaatttaactaaattatacaaaattatttttaattatgtatgacgtaatttttaaagttatagaaaaaatttatataagatttttaaatttataattattgttcaaataagaaaaatatttgaataagaaatagttagtttttaatggaggttcattctctgtccaatggg

SEQ ID NO: 6295 - DNA, 377 bp, Glycine max
  unsure (1)..(377): unsure at all n locations
agctngtaaggtagccataaaggagcttgaatcccaccattcttgatgtggagaagaagtaggtgatgaagatactagttgcaggatcatttatcccatttcagatagcacttgggtttcacctgtccaagtggtccctaagaagtcgagcaccaccgttgtgaagaaccaggataatgagttgatcccgaatagagtggccaatagttgataagtttgaattgattataggagacttaactaggaaaattgtaaggaccacttccctctcccattcattgatcaggttctagagaggtttgtaataccctgagatattataagttataaatcaatgtttaattggatntattgtgttgcttgactatatgatagac

SEQ ID NO: 6296 - DNA, 384 bp, Glycine max
  unsure (1)..(384): unsure at all n locations
agcttgtagaagcaaaaggccagctatggtcttcaaggtgtgatttgaaaaggcctatgactcagtctcatgggcttttttggattatatgctgtaaagaatgggtttttgtctcaaatggagacactggatttctgcctctctcaattcagcaaccatttcaattcttgtgaatggcagtcctacaaaggaatttgctcctactagctcctactagaggcttgaggcaaggggaccctttatatcccttactcttcaatatagttggagaaggcatcactggattgatgagggaagcaattcacaagaatttatatcgaagttacatggttggaaagaaaaaggaacccattaatattntgcagtatgcggatgacacagtat

SEQ ID NO: 6297 - DNA, 430 bp, Glycine max
  unsure (1)..(430): unsure at all n locations
ctcatcttggtggtgaagctccttcttctttgctcatcttttcctccattaagcatcctctagcttgctttttttgtgcttttcattgctttaattgttgaataatccttggaaatttgtcttgttaaaactctattggtttagttttcatttcatttttttttgtctttggttattgcttgtctctttgtttccttgcttgtgagttgccatatagggaattggaaaggagtattggtgccatatcttgaagaatttgagtaaagaagcaaggggccaaccaccttaagagctattggactaagaagcactccaaattgagtgaaacactaaagagagaatagtcaccacaattgaggacttttttttttgtaattntgtaattgacaatatgttttgctctcaaattttgtaacaaaaaggcctttca

SEQ ID NO: 6298 - DNA, 443 bp, Glycine max
  unsure (1)..(443): unsure at all n locations
gnaagctccttccacagcacacagctcttaagatttgtttgtatcctcgcggaaccttcacctgacgaagacactgacaaaaacttatcttctccttcttggacaaagtatggcaggctgggggcaagtaaattttcttcccatcacaccttggatgcaactgtgatcttatacccatatcagctagatcttgacgggtattcaagccatccttcgtcttgccttgaatgttaaggagcatcccaatcacactgtcacaaacatttttctccacatgcataacatcaatacaatgtctaacgtcaagatcacaccagtacggaagatcaaagaaaatggacctcttcttccatatgcaactctgactattatccttcttttgggtcttcccaaatacagtgttcaggtgttgaacccgctgatatacctgctcaccagtcaat

SEQ ID NO: 6299 - DNA, 406 bp, Glycine max
  unsure (1)..(406): unsure at all n locations
agcttgctgtcgtcacgggcccgagtcttcttgtctattgggttgacatcatgacccatttaaactttttttttccggtgaagacccatatcaaggttttttaaaaatatattttatgaattaatttaaaattaatggccccgtgacttttaagttattaacacaacactttaaccaactgaactaataagataattgtgttataaaataattaatgtcgttatatataacactaaaatttataatgtatatttaatacacatgcaaatntacataataaaatttaatgcaccaaaattaaatgtcacanaaattattatgtaaatntacatgtgcattatatatacattagaaataaaaaaaaataatttgtaaacatttttaannttttttttaaaatgaatcc

SEQ ID NO: 6300 - DNA, 320 bp, Glycine max
  unsure (1)..(320): unsure at all n locations
gtcagcagattcaaacgancaataaattttactcggatgtcttatatatgtcccgaatacatcgagacgctcgaaattgaatgttgaagctctcagcaaattcaaacgacaataactttttactctgatgtctgattgagtcccgtaatatatcgagacgctcgaaattgaatgttgaagctctcagctaattcaaacgacaataactttttactcggatgtctgattaagtcccgtaatacatcgagacgctcgaaattgaatgttgaagctctcagcaaattcaaacgacaataactttttactccgatgtctgaatg

SEQ ID NO: 6301 - DNA, 433 bp, Glycine max
taaacattcaacttcgagcgtctcgatatattacgagtctcatatcatacatccgagaaaaaagttattgtcatttgaatttgctcagaggttcaacattcaatttcgagcgtctcgttatattacaggactcaatcagacattcgagtaaaaagttattgtcgtttgaattagctcagagcttccacattcaatttcgagcgtctcgatatattacgggcctcaatcagacatccgagtaaaacgttattgtcgtttggattggctcagagattcaacattcaatttcgagcgtctcgatatatgacgggactcaatcaaacatccgtgtaaaaagttattgtcgtttgaattggctcagagcttcaacattcaatttcgagcgtctcgatatattacaggactctatcagacatccgagtaaaaagttatt

SEQ ID NO: 6302 - DNA, 431 bp, Glycine max
  unsure (1)..(431): unsure at all n locations
agctttgagccaattcaaacgacaataactntttactcggatgtctgattgaggcccgtaatatatcgagacgctcgaaattgaatgttgaagctctgagacaattcaaacgacaataactatttactcggatgtctgattgagtcccgtcatatatcgagacgctcgaaattgaatgttgaagctctgaggaaattcaaacgacaataactttgtaccgagatgtctgattgagtctcgtcacatatcgagacgctcgagaatgaatgttgaagctctgagctaattcaaacgacaataactttctactcggatgtgtgattgagtcctgtcatatatcgagacgctcgaaattgaatgttgaagctctgagccaattcaaacgacaataactctttactcggatgtctgattgaggcccgtaatatatc

SEQ ID NO: 6303 - DNA, 368 bp, Glycine max
attttcaatttcgagcgtctcaatatgttatgtccccgaatcaaacatcagggtgagaagttatgaccatttcaatttttctagagctatcgctgttcaaattcgagcgtctagatatggtatgcacttaaatcggacatccgagtgaaaagttatgaccatttgaatttctcaagagcttctgttgttgaatttcgagcatctcgatatattatgtccccgaatcggacatgcgagagacaagttgtgacaatttgaatttctatagagctttcgttgtgcaatttcaagtgtctcgatatattatgcgcctgaatctgacatccgagtgaagagttatgaccattggaatgtctcgagagctttcg

SEQ ID NO: 6304 - DNA, 141 bp, Glycine max
tctcattccagcctgcatggagatattcaacaacaacatgggcaatgcttccaaccacatagacacagcgaaacgcgaagatgctgcttacttaactgaacatgacctgttgcagataccatatagagcccgctccatgga

SEQ ID NO: 6305 - DNA, 325 bp, Glycine max
  unsure (1)..(325): unsure at all n locations
agcttaaacattcaacttcgagcgtctcgatatattacgagtctcaatcagacatccgagtaaanagttatggtcgtttgaattggctcacagcttcaacattcaatttcgagcgtctcgatatatttcgggactcaatcagacatccgagtaaaaagttgttgtcgtttgaattcactcagaggttcaacattcaatnttgagcgtctcgatatatgacgggactcaatcagacatccgagtaaaaagttattgccgtttgaatttgctcagaggttctacattcaatttcgagcgtctcgttatattaaaggactcaatcata

SEQ ID NO: 6306 - DNA, 361 bp, Glycine max
  unsure (1)..(361): unsure at all n locations
agcttgtgggtggaggacgcatgaacganactactatttggngctcctaaaaagggttgaggatggatgaatgcactaagcaatcactacgcacggctccaagctccagggtggaggacgcatgaacgaaaaagcaattcatggggctccgaaaaagggttgaggatggagaattgcactaagcaatcactacaaacggctccaaactcgtgggtgaaggacgcatgaacgaaaacgccattcatggggctccgaaaaagggttgaggatggagaatngcactaagcaatcactacgcatggctccaagctcctgtgtggaggacgcatgaacgaaaatgcaattcatggggctcccaaaa

SEQ ID NO: 6307 - DNA, 374 bp, Glycine max
  unsure (1)..(374): unsure at all n locations
agcttcttatgtcaaacccaataatgctctttgactgagagtaggcatgaaacttttggactagacagatcaccaagtttaatcttatacagatttccttgtctcttagcctagaagagtgaagagttttccttgttctcaatgatacacatatacttgttaaaagtgacattgtatccactatcacatatattacttatgctaagcaaactatgcttcaaccctttaacaagcaaaacattatctatagaaggataaggaggaatacatactttacctacaccaattatcagacctttctgattccgttcgaaagtgaccaccctactagacatagggcttagggatggaaacatacactnttcacttatcat

SEQ ID NO: 6308 - DNA, 451 bp, Glycine max
  unsure (1)..(451): unsure at all n locations
tccttganaagattcctaaagaagctagagcttagctacacacactcactctaatagctaagctcacctccttgagatgagaagctagaacttagctacacccccctataatagctaagctcacccccataacaaaatacatgaaaatacaaaaaaagtccctactacaaagactactcaaaatgtctcgaaatacaaggctaaaaccctatactactagaatggccaaaatacaaggcctaaatgaaggaaaaaaacctattctaatatttacaaagatatgcgggctcatacttagcccatgggctcaaaatctaccctaaggctcatgagaaccctagggccttcccttggatctctggcccgatctacttggagtcttctatccaatgcccttgtggggtaggattgcatcaggagtagaaaatatagagcatacaagaaaaactta

SEQ ID NO: 6309 - DNA, 429 bp, Glycine max
  unsure (1)..(429): unsure at all n locations
agctntcaagaatcaagatcaagattcaagactcatgattcaagaatcaagagaagacttaatcaagataagtatgaaaaggttttttcaaaaactgagtagcacatggatttttctcaaaacatgtttaccaaaaagttttgactcattggtaattgattactagattgttgtaatcgattaccagtagcaaaatgaatttgaaaaagttttcaaatgaatttacaatgtttcaattgatttcaaaaagttgtaatcgattgcaatgttntggtaatcgattatcagtgtctttgaacgttgaaattcaaattcaaatgtgaagagtcacatcctttcacataaaagcgttgtgtaatcgattacactgatttggtaatcgaataccagtgattggttctgaataaatcaaaagatgtaactcttcaa

SEQ ID NO: 6310 - DNA, 323 bp, Glycine max
taccacaattcgcacccttctatctgtggctgctattaacgactgtcacttagaacaactagacgtccacgatgctttgcttcatggtgatctgcacgatgaagaatatctggatctgcctcctgcgttcatactgcctgcttcatcttctaatcaagcctgcacattacctaagtacttatacggactagctcatgctaccagacagcggttctcccagctatccaactgctattatctccctaggatacataccttcatctgatgaccgatctatgctcacacaactacataaatctcatttcactgctcttataatctat

SEQ ID NO: 6311 - DNA, 403 bp, Glycine max
ctgcaagcttgaaatcttcatttagcatagtcacagtaagtataaacagcaaatacccccccccccccaaattaaaaggaaaaaaacaacaggaatatttgggtgatagttgatcaaaatgtcaaagccaatacctttagatactgcttgatcttgtctacctcaaggaaagaaaaatctatcttaactacaacagcaagaacattcttgtaggcattgacaaatagtgtggtgcagcagcaagtgttaggtatgagaaagccaatgaaagtgaactaacaatcgagacaccaacaatacaatcagttaaatagtaagaatataaataaattgaaaagtatgcaaatatcactttaccttgtacttagcaacctcctcactaacctccttcagttcacctttg

SEQ ID NO: 6312 - DNA, 454 bp, Glycine max
ctttcagataacctaacctggatattgaatcagagcctgtatactcaccattcttgtcaaacattgcaatcttttggacaggtccaaaggcagagaaaacctgccacagaaaacagagtaaagaaggtatatattatcagctaaagtgtaccattagtcagtaatgtcagaaataagcaactgccactgtgacttaaagtaccatgtgtaagacatccaaggttacagtatactgcatgttctcaatagatgcaagaagaacattactctcggcctccagtctcttcccatccaaacccaccatgggctgcaaaaattaaaaataataagttaagaacacattcctcattgaggaagtcagcatgaatggcaaccccttggtagtaggcacacctcactgatgtgtatgaggtgaatatcaagttacaataagcaattcggagggttccatttg

SEQ ID NO: 6313 - DNA, 482 bp, Glycine max
atcctcttagtcacctgcggcatgcaagcttctttgagaaaacttccttgagaagctagagcttagctacacacacccctctcataactaagctcacctccttgagaagcttccttaagaagattcctaaagaagctagagcttagctacacatacctctctaatagctaagctcacctccttgagatgagaagctagaacttagctacacacccctaataatagctaagctcacccccatgacaaaaaacatgaaaatacaaaaaaaaagtccttacaacaaagactactcaaaatgccccgaaatacaaggctaaaaccctatactactagaatggccaaaatacaaggcccaaccgaaggaaaaacctattctaatatttacaaagataagcgggctcatacttagcccatgggctcaaaatctaccctaaggctcatgagaaccctagggccttcccttgatctctagcccaatctac

SEQ ID NO: 6314 - DNA, 446 bp, Glycine max
  unsure (1)..(446): unsure at all n locations
agcttcgatatcttgacttgagcttcaatagattccttggagaaggtatggcaattccttctttccttgggacaatgacttccttgactcacctcgacctctcttttactggattccaggggaagattcctcctcagattgggaatctctcaaatttggtgtatcttgacctgagatatgttgccaacggaacagtaccctctcagatcgggaatctctctaagcttcgatatcttgacttgagctacaatgattttgaaggtatggcaattccttctttcctttgagcaatgacctccttgactcatctcgacctctctcttactgaattctatgggaagactcctcctcagattgggaatctctccaattnggtctaccttgacctcggaggtattctggtttcaaccttctctgttgctgaaatgaaaatgggtataagtatg

SEQ ID NO: 6315 - DNA, 368 bp, Glycine max
  unsure (1)..(368): unsure at all n locations
agcttgccttgccccttgatatattttatggtttcatggccactatgaatgacaaattccttgggataaatgtagtgttgccatgttttcaaagcccgtactaaggcatacaactccttatcataagttgaatagctaaaggtaggaccacttaacttttcactaaaataagcaattggatggccttcttgcatcaacacagccccaatcccaacattagaagcatcacactcaanttcaaaagatttttgaaagtttggcaacgcaagtatgggggcattagttagctcttgcttaagaacattgaaagcttcttcttgtttctctccccatatgaaaccaacattnttcttgagcacttcattgag

SEQ ID NO: 6316 - DNA, 457 bp, Glycine max
  unsure (1)..(457): unsure at all n locations
actcaagcttagggagttgttctaatagttntctgtgcatgtcttgctgatatagagagagagattaggaaactgagagccagtcagccagagaactaaatgtgtgtaaattgtcatatgatattatctgcagataatgctaatcaatgatattcatctgaccttccatggaactcaaactgttctgtggaaattgaagatttctgcaactctttcccagtcagtttctcccaaatttagactacctctctcttggataatatgttttctggcggccttatgtaaactgtcttgtttggagttctgggcattgcttaccctaaagaaaaactaagcattgcttattgatgtcatgtgctccttgctcatgatttgatcaatgtcccaaaatttctagatcatttgattaaatnttattttcaagtcgctagaagacaatgcaattcttatcatcatt

SEQ ID NO: 6317 - DNA, 403 bp, Glycine max
  unsure (1)..(403): unsure at all n locations
actggatgcatatgttaacttggtaacccatctagccttgaaccaaaaatcttgtcctgttgcaagggtctgtggtttgtgctcctctgctgaccaccatatataccttttgccttccatgcagcaacctggaacaattgagcagcccgaagcttatgctgcaaatatttacaataaacctcctcaaccttcgcagcaaaatcaaccacagcagaacaattatgacctcttcagctatagatacaaccctggatggaggaatcaccctaatctccgatggtctagccctcagcaacaacaacagcagcctgctcctttcttncaaaatgtngttgtcccaagcagaccatacattcctncaccaatccaacaacagcaacagccccaaaacaaaccaacagtg

SEQ ID NO: 6318 - DNA, 387 bp, Glycine max
tgcacttatgcatttccttgtgttttctatagacatccagggttggtccatatgctgctgaagatatgattgagatgggtaaggatgctggcaaggagcttctgtctcgggctggacctaacttcttcagtagttagcagcagatgattaaagtgtgatcaggtacacacaggtttcatggtcagctttcggctattgcttcctaagttaattcattctttgacctgttgtaactttagagtagataaaatgttcaattgagtttgggaaagaggacctctcattatggtcaaattgttgtattatgaggatattataatgccaattttttacgtagcttgtataattaccacgatagtggacttttgagaatcacgctaaatacac

SEQ ID NO: 6319 - DNA, 331 bp, Glycine max
agcttgagcaaattctaacgactataactttttacttggatgttcgataaagtcacgtaatatatcgagtcgctcgaaatagaatccagaaggtgtgagaaaattctaacgtcaataactttttactctgatgtccgattgagtcacgtaatatatcgagacgcccgaaattcaattcataaactctgagcaaattctaacgacaataattgtttacttggatgtccaattgagtcccgtgatatttcgagacgctcgaagttgaatacataagctctgagcagattctaacgacaataacattttacttggatgttcgatatagtcacgt

SEQ ID NO: 6320 - DNA, 283 bp, Glycine max
tgaattgctggatataatatatggaaagaaatccatccgatattactactcattactattatgattgaaattaatatttaatttagtatgtgagacttgaataaacataaaatcttaaaaattttagaataaaacatttttacaaattgtttttacatttttcaaataataataatactaatatagacatattataatttagtatttaatttctattctaaaatattaatgtaaaatattataataaataaagcgttactatctaatatcattattattaaaa

SEQ ID NO: 6321 - DNA, 421 bp, Glycine max
  unsure (1)..(421): unsure at all n locations
agcttgttagctagatgacttgncatatacattttcttgactagcatcaaatcagagaattaaacctggacatcttttagaaatgcttgctgaattaagacaggcagaaatccagtgtctccatttgggacaaaaacccattctttgcagcatataatccaaaatagcccatgagactgagtcataggccttttcaaaatccaccttgaaaaccatagctggccttttgcttctacaagcttcctcaatcacctcattaagaactagtacgccatgcaggatgtgtctgttttttatgaaagttgtctgcctctcatcaataagaccagatatcacttgtctcaatctatttgctaataacttagctatcaccttgtacatacatccaatcaaggagaatggtctgtagtcatcaaatgac

SEQ ID NO: 6322 - DNA, 291 bp, Glycine max
agccttatgtgtatctcttttgcgagaagaatatcccttcatttctctgacttacctctatgccgaggaaagaactcatcaaaccaaggtcaggcatctcagaggtcttcatcatgtcttctctaaactctatcatcatcttactattgattcccgtgtagataagatcatctacatatagagagagtaagagagtgtactgcccttgagacttgatgtaaagtgtaggctctctcttgctcctcctgaatcctcgatccatgaaatactgatcgattcttctataccatg

SEQ ID NO: 6323 - DNA, 365 bp, Glycine max
  unsure (1)..(365): unsure at all n locations
agctntgaaatccntatatctaatccaaggtagatgtttcataaatgggattcctttgcttgtgttgtttgattctggtgccacccattcctttatatcctgtttgtgtgtaggaaaacttaagctttctgtgtcttctttaaataaagatatagtagtagagacccctactagtggttctgtgttaacttctgatgtgtgtttgaattgttctgtggagatttctggtaggatattcttgattgatttgattngtttgcctttgagccagatngatgttattcttggtatggactggttatcttccaaccatgtcttgttgaactgttttgagaaaagtgtggtgtttgatgattctggagtga

SEQ ID NO: 6324 - DNA, 466 bp, Glycine max
  unsure (1)..(466): unsure at all n locations
taagctccttcaactgcacaaggctcttaatattngaagagtattcttgtggaaccttcacccgacgaagacactgacaaaaacttatcttctccttcttggacaaagtatggcaggctgggggcaagtaaattttcttcccatcagaccttggatgcaactgtgatcttatacccatatcagctagatcttgacgggtattcaagccatccttcgtcttgccttgaatgttaaggagcgtcccaatcacactgtcacaaacatttttctccacatgcataacatcaatacaatgtctaacgtcaagatcacactagtacggaagatcaaagaaaatggacctcttcttccatatgcaactctgnactttatccttctttggggtcttnccaaatacagtgttcaggtgttgaacctgctgatatacctgctcaccagtgaatggtatcggcacaatatcatgctc

SEQ ID NO: 6325 - DNA, 380 bp, Glycine max
  unsure (1)..(380): unsure at all n locations
agctnttacagccattaatcaacaatttaacttatatatgagatcatatttccttttcggaactgtactgatgcaatcctacctcgcaagggcattggctagaagactccaagtagattgggctagagatccaaggaaaggccctagggttctcatgagccttaggatagatttcgagcccatgggctaagtatgagcccgcttatctttgtaaatattagaataggtttttccttcgtctaggccttgtattttggccattctagtagtatagggttttagccttgtatttcggngaattttgagttgtctttgtaataaggacttttttttgtattttcatggtttttgcatggnggtgagcttagctattatagggg

SEQ ID NO: 6326 - DNA, 406 bp, Glycine max
agctcgcacattgctgtttaataaagaaagatttatactggaagccttggtacttcgacatcaaacgatgcatcataaacaaggaatacccgtaggaggcctctgacaacgacaacgaaggttggtggccagcttcttcctgagtgggaatatcctatacaagaggaaccatgacatggcactgcttcgatgtgtggatgccagagaggctaatcaaatgctggtagaggtgtatgaaggatcctttagcacgcatgccaatggacatgccttggcccgaaaaattctgagagtggggtattactggctcactatggagagcgattgttgcatccatgtgaggaaatgccataagttccaggcctttgcttgatatgttaatgctccacccataccctttacggct

SEQ ID NO: 6327 - DNA, 352 bp, Glycine max
  unsure (1)..(352): unsure at all n locations
agcttaccaccncagagtgccttggatattaatctgagagcagaagcttccatagaggaagagaatgatggagagggagaaagagagagagtggcgtggaaattgaaggagaatatgaagtgatgcaatcctatcccccaagaagattggaccaaagatgcaagagaaggccctatgattctcataagccttagggtagattttgggcccatgggctaagcataagctcacttatctttgtacatattaaattaagaattcattattttcgggccttgtatttagggctccataatgtatggtcggtaccctactaatgtaggatgtttcagcctttgattttatggcacct

SEQ ID NO: 6328 - DNA, 400 bp, Glycine max
  unsure (1)..(400): unsure at all n locations
agcttgtaatcgattacacacatactgtaatttattaccagaagagtttntcagaaaacattctcaacagtcacatctttttgtgtggctcttgaatggctatcataggcctatatatatgtgacttgagacacgaatttgacaagagtttttcagaacaaaaaaggtcttatcctcttataaagagaaatcgttttatcctcttacaaattccttgggcaaattacttgtgattcaataaggtattatttgagtgctcaaattgttcaatctatctcttgcaagagagatttcttcttctcttgttcttcattctgaaaagggattaagagaccgagggtctcttgttgtgaaagaattctaaacacaaaggaaggattgtccttgtgtgtttagaact

SEQ ID NO: 6329 - DNA, 262 bp, Glycine max
ctcagcttatatatatcgatacgctcgaaattaatcatcggaaactctctggaaattcaaatagtcataactattcacacggatgtccgattctgacgcttaatatgtcgagaggctcaaaattgaacaacggaagctcttgagaaattcaactggtattacttttcacaccgatgtcccaatcaagccaattacattttcgagacgcctcaaattgaaccaccgaagctcttgagaaattcaaatggtcataacattttac

SEQ ID NO: 6330 - DNA, 433 bp, Glycine max
  unsure (1)..(433): unsure at all n locations
ctgcattcatgcaagctccttactatnggactaattaactttgtttacgggtgcatgatttatttcacaaccaaattaaattgaattccattggtcacgagtcagtaacaacagtacgattaaatcactttatctttggttggtgcggaaggaaaagataagttatacctattgaatgacttgtgtcaataaacccaacttattttctttatgttattttgtttttacataaaatcccaaacgtttttactttcatggagacttataaaaaaatatagaattaaattcaataaatttttacagtcaattttttaatacattctaatatgtgtaccaaaagaaacatgatttcaattaacaaagttttacctttatactaatacattatttaatgaatntaaatttgtaacataattaaagtcattaatgtagt

SEQ ID NO: 6331 - DNA, 459 bp, Glycine max
ctcgtgtatcatacattatatcgatcaatgaggtgcttgagagtatttgtactgcctcgggtttaaaggtaagtattgaaaaatcaagattttatgcattcaagaatgtgtccaataccaagaggggtcaaatagctagcatcattaatttcccctacacctttaatttgggcaagtacctagggttccttatcttcactagccatgtcactaagagggaattcaacttcattctggatcacattcaagtcaaattggcaagctggaagtccaagctcctgagtagggttggcaaggtgactttagctcaattaatattggcctttatcccctcatatgtcatgcaaaactatcttcttttaaagggtactctgcaaagctatcgatactctaataagaaagttcatttggggtagcaactcttctcactttctcgattgagagactatttctaagcct

SEQ ID NO: 6332 - DNA, 413 bp, Glycine max
  unsure (1)..(413): unsure at all n locations
ntaagccaattcatacgacaatttctttntactcggatgtctgattgagtcccgtaatataacgaaacgctcgaaattgaatgttgaagctctaaccctattcaaacaacaataacgttttactcggatgtctgattgagtctcgtaatatatcgacacgctcgaaattgaatgttgaagctctaagcctattcaaacaacaataacgttttactcggatgtccgattcagtgacgtaatatatcgagacggtcgaaattgaatgttgaacctatgagccaatttaaacgacaataactttntactcggatgtctgattgagtcccatcatatatcgagacgctcaaaaatgaatggtgaccctctgagccaattcaaacgacaataactttttactcggatgtctgattgag

SEQ ID NO: 6333 - DNA, 316 bp, Glycine max
agcttaagcttcttttctgcacaaggctcttattatttgaagagtatccttgtggaacctttacccgacgaagacactgacaaaaacttatcttcttctttttggacaaagtatggcaagctgggggcaagtcaattttcttcccatcagaccttggatgcaactgtgatcgaatactcatatcagctagatcttgacagatattcaagccatccttcgtattgccttgaatgttaaagagcgtcccaatgacactgtcacaaacatgtttcttcatatgcataacatcaatacaatggctaacgttcagtatgga

SEQ ID NO: 6334 - DNA, 362 bp, Glycine max
tatcttgatgtactaagtcttccaactccatattatcctttatatcactatgtagcccatgtaggaaacaagccatagtagcctctcgatcctccataacattagctctaataatggaaacctccatctccttgtaatactcatcaacacttctactaccttgtgtgagtctttgtagctttttatgaaggtctctttgataatgagaaggaacaaatcttcttttcatcaaccttttcatttcttcccaactatccactaagggttcttcatatcttgccttctctctttgtaattggctccactagatgagagcatagtcagtaagttccatgactgccaccttcatctttttatcctcg

SEQ ID NO: 6335 - DNA, 398 bp, Glycine max
  unsure (1)..(398): unsure at all n locations
atcacatgatttattataatcattaatcttattcctacatttcaattgaatattatacttattccatggataacttctataattataaaacaatggtccttgttatacattaattatatacttgatgctagtaaaaaatataacaaaattccactaaaatatttatgtgattaaattaaattctctaatttaattatcaaataaattattgtcttttgtaaatattgaaacactctgtgtgaccatgtaagatcaatataaagtaatcataattaatttatcaatcaaggtaagcatctagcaacactctntagcgtccggatagcatgaattaacatcgtttttctctacgaaccaatagaagaataatctaatatgtcctgccatcatttataact

SEQ ID NO: 6336 - DNA, 451 bp, Glycine max
  unsure (1)..(451): unsure at all n locations
tgtataaaagaagcatggttactgctagactacattcaattttaatcctcaatttatgactttatagaacaatactataagacttcatctattttagtatttcctatcaaagtaacacaactagaacattggttgctgcatttntgttggacgtgctcttagtaatgcctattgattgaatatggtcctttgcttcaaattttagtgttttgctcctgcatttctgtttttaacatctttctttgaaatatttatttctgatggttaggcctttgatataatgtctcaatcaagagctgcatcttcttcaaatgttagcaacaatgaaagtaagagtcaaatatttaaagaaaaactattattaccttaagaaaggtccattcacagagttaattcttaattngttattgagtatttaacaaanatattatgacaatntggtctgctcaca

SEQ ID NO: 6337 - DNA, 426 bp, Glycine max
  unsure (1)..(426): unsure at all n locations
gacagttataatactaagcttatgcttaactatgtatggcaatacattattactgntgtttattacatacaagtgagcttgtaacaaatcttctagacttggagtgatcacatgcagacctcttgaacccttaccacccactctgtcatcatgccgagactcgggaaggccaacaggtttagccttctcaatgtattctgaataaaattcaatgacttcttctacaatgtacctctcaacaatagatgcttcaggatgatatagattctttgtataccctattaagatcttcatgtatcgctcaactggatacatctatcgcaaataaacaagaccacaacatttgatttctctgtccaaatgcagaatcaagtgaatcatgatgtcaacgaaagcaagggggaaaatacatcntccaactggaac

SEQ ID NO: 6338 - DNA, 462 bp, Glycine max
  unsure (1)..(462): unsure at all n locations
catatagatngaatcctagttcctctaaggacttatcataatatctgctggctgatcattagaattaatgaactcagtgataatctccttggacaataatttctctcaaatgaaatgacaatcaatctctatgtgcttagtcctctcatgaaaaatcggatttgaggcaatgtgaagagctgtttgattatcacagtataacttcatttgcaccactttacaaaatctcaattcttggacaaatagtttaatccacataagtncgcatgtaaccatagccataaatcgatattcggctcttgcactggatcgagtaacaacaagttgcttcttgcttttccaagagataatatttcttccaatgaaaacactatccagaggtagatctcctgtccatgggacaaccagcccaatccgcatcacaatatccagaggtagatctcctgtcttcatacaacaatc

SEQ ID NO: 6339 - DNA, 457 bp, Glycine max
tgaccaggaattacttgtatggtttggatgttgaattctggttgttcctggcgcggagatgatggtacagcgggtgaaccagaagcggaagtttcttttggtgaggtagccatggaaaagcagagcgtttggaatgatttcgtaaatttcacaaggctattgggaaatgctggtaaaaacacgaatgccaagcagatataaatttgaatgaggaatgtatagggtcgtgtgaagcaacggtcgaattttccttggttcagtagtgaacgtgctattaatgttaagtgattcgtttgggcacgttcagattgctgtagttgctataattcctctagcacacaaatgcccagcttgcccctcacgttttcaaactgatttgcatccaaagcctttgtgaaaatatctgctatttgttcctcatcgtcaacatgcttcagtgtgatcactctatcatcaa

SEQ ID NO: 6340 - DNA, 392 bp, Glycine max
  unsure (1)..(392): unsure at all n locations
tcctcaatttctctcattaagaatcaaagttccatgaagaatatgtctgtctttaatgaaagctgtntgtctttcatcaattaaggcaggtataacctgtctcaacctgcttgctagaagcttagctatcactttgtacatgcagcctatcaaggatattggtctataatcatttanggactgaggatggttaactttggggataagagccaagaaagaggcattgctgcctctatggaaacaactcgtgacatggaactcatccacaaatcttctgaactctggtgttagcacactccagaattcctttataaaattgaaattaaaaccgtccggcccagggcacttatctccaccacaactccacactgctttcttaagctcctggtctg

SEQ ID NO: 6341 - DNA, 282 bp, Glycine max
agatggaccatttcaagtgcttgaaagaatctatgacaatgtttacatttttgagctgcccggtgagtataatgttagttccaccttcaatgtctctgatttatctctttttgatgcagatggagaatccgatttgaggacaaatccttttcaagagggagagaatgatgaggacatgaccaagagcaagggccatgatccacttgaaagacttggacgacctatgacaagggctagagcaaggaaagccaatgaagctcttcaacaagagttagccatact

SEQ ID NO: 6342 - DNA, 462 bp, Glycine max
  unsure (1)..(462): unsure at all n locations
cgtggcatctgtgtgcaatacacaatgctcggtacaccacaacaaaatggtgtatcagaaaggtgtaatagaacattaatggatatgattaggagtatgttaatcaatttgactttaatcatatctttgtggatgtatgccttgaaaactgtcatgtatttgttgaataggattcctagtaaggcagttccaaagacacctttgaactgtggacaaataggacacctaatatgaggtacctgcatgtttggggttgccaagcagaaataaggatttataatctgcaagaaagaaaattggatgcaagaacaatcagtggctatttcattagttatccagagaaatcaaaggggtatatgttttattgtcctaatcataatatgagaatngtcgaaactggaaatgcaagaattcattgaaatggtgaaatcagtgggagtacagttccacgagaagtggaaa

SEQ ID NO: 6343 - DNA, 397 bp, Glycine max
  unsure (1)..(397): unsure at all n locations
gtcttgtgtggnggtttctgctacaaaaggagagttcaaganatgattagccaatggttgatacatggacggagatgaaaaagatcatgaggaagcggtatgtgccggctagttactcaattgacttgaaattcaagctccaaaaactaacccaaggcaacaagggggttgaggagtatttcaaggaaatggatgtgctcatgattcaagcacatattgaagaagatgaggaggtaactatggctcgatttcttaatggtttgactaatgatatccgcgatattgttgagctgcatgagtttgttgaaatggatgatttgcttcacaaagcaattcaagtggagcaaccatttaaaaagaatggagtggcttagaagagtcttaccaactctggttc

SEQ ID NO: 6344 - DNA, 332 bp, Glycine max
ctcttacgaacaaagaggataggcttacaggctttagtgtccctcacctgagaagtgcttcacaggcagatgctcttccagtcattggagtcaatcttgtagaaagcataatactcctcctttgtgatctcctaaggctctgacatccaaatggccttatgcttgttcaccaacgagcattcatgtgacacttccttgctgaggaaaaaaaaatgtgacacttccttaatcttctttaaattactttcttccttctcgttcgtcttcgcaacatgctccacctaagtacattaaaaaattagatattgaagtcaaagtggtattcaaaaata

SEQ ID NO: 6345 - DNA, 378 bp, Glycine max
  unsure (1)..(378): unsure at all n locations
agcttggatatatnttgtgtagtaatgctgtattaaactctgcatctcgcgagcatcactcttaaatatttatgtcttgagctcttcttctccagggtcaataatctcttggtggtccttgttcctggatagtagtagttgaaacttgggtctattgagagggctctatggtacaaaggatcgagctgccaatagggtgcactgcaagtgccagtggcatgtgattaagtggtcattggtgaggccagatgcttgcatgaatgaatgaaccactgttggaccaacgtacctaaagcccctcctcaccatgtctttgcttatgctctctgattttgatgtcttcactgaaatcttcgggccaaacttgtattgagtgga

SEQ ID NO: 6346 - DNA, 446 bp, Glycine max
tcttagtttcagatgatgcagatgggcttgtagctacctcatgcactcctctaatgactatggcatcatttctggcgctaaactgttgggagttggaagccatcttctcaattaaatttttggcttcagcaggagtcatgtctccaagggctccaccactggcagcatctatcatacttctctccatattgttgagtccttcataaaaatattggagaagaagctgctccgaaatctgatggtgagggcaactggcacatagtttcttaaatcgctcccagtactcatacaggctctctccactgagttgtctaatacatgagatatctttcctgatggctatggtcctggaagcagggaaaaaattttctaagaatactctcttaaggtcatcccagctcgtgatggaccttggagcaaggtaatacagccagtcctttgccact

SEQ ID NO: 6347 - DNA, 445 bp, Glycine max
  unsure (1)..(445): unsure at all n locations
agaggatgctgaagatgaatcagtggagaggttcttgtgccatggaatgttgtatttgccatcaggattgggaatttgggtgtagtaaggggatgatgagccagggctnggattgtaggaagcacatggacttggatggtaagatgagcaagggcttgctgctgctgatgatccaccaactatctccatgccctctgaaggcttgcatccctaattgtacacaaaatatattttcattaactgatcataatatgtggcatgtaatacgatttccatcaccaaaatcttttcaaatataacaaataaatcatttgtaagacactctaataaactccttcatgttggttccagtaaatatgtggatgtttggtagatttattccaaatcagggaaactcagattaactcaaccaataaaaaaaatgtgttgaaaagaagtaatgcac

SEQ ID NO: 6348 - DNA, 348 bp, Glycine max
  unsure (1)..(348): unsure at all n locations
gtacccggccggactgggaagtcatgcangcttcggtggtgcaaccagctgtcgccccaagtcgagcaccgggccttcacaccggaagaggacgagaccattattcgggcccatgcccggtttggtaacaagtgggccaccattgcgcgcctcctctcgggccgcaccgataacgccatcaagaatcactggaactcaaccctaaaacgcaagtgcgcgtccttcatgatggcgggtgatgaagccgtcgccgtgagtccgaggccgctcaagcgatccttcagcgccggcgcggcggtgcctcctcccggaagcccctccggatccgatttcagcgagtccagcgct

SEQ ID NO: 6349 - DNA, 368 bp, Glycine max
  unsure (1)..(368): unsure at all n locations
agcttgtaatctatttcacacatactatatattgattaccagaggagtttttcagaanacattctcaacagtcacatcttttcatctgtttcttaaatagccatcaaaggcatatatatatgtgacttgagatacgaatttgacaagagttttgaagaacacaaaggtcttatcctcttaacaagcacaattgttttatcctcttacacattccatggccaaaacacttgtgattcaatagagaattatttgagtgctcaaattgttcaatctatctctttcaagagagataacatcttctcttcttctttattttgaaaagggattacgagaccgatggtctcttgttgtgaaaggattctaaacac

SEQ ID NO: 6350 - DNA, 461 bp, Glycine max
  unsure (1)..(461): unsure at all n locations
ntaaggttagatgaaataaaatgtatcccaagcanccatttttttttgttttaataatttgaggtcattaaagtttagatgaccatacctcaagtgctacagtatggactcatccatattctcacatttcaatgcattgttttgcccaaatggcataaatagaggaaatactttattaggagccattttgatagaaataatttggccctttcttttatgaatgatattacatttatcatcatcaaagatgactttataatttttatgaataagttgaccaacacttagaagattttgagtaagacctgncacataaaaaacatcatggatatatnntttgctaccatnttgagttttaacagcaatggtgccttttnctttcaacttttgaacattttcatcaccaagtgtaaactttgaatttattgtctcatctaattgcacaaagcaactttttgttt

SEQ ID NO: 6351 - DNA, 302 bp, Glycine max
tgtgcctcttcacgtctggaatatgaatgtagcatatagatcttaagacccttatgtgctttgctgatggcttcctcccgttccaagcttcaattggagtcttgtcttttacagacttagttggacatctgttgagtatgtaaacagcagtgtagactgctttagcccagaatgtgttaggtacttgagcatcgatctagccatctccataactgtgcgattctttctctcggacactccactttgttgaggaggatatgcgactgtaagttgtcgctcaattccttcatcctcacaaaatc

SEQ ID NO: 6352 - DNA, 424 bp, Glycine max
  unsure (1)..(424): unsure at all n locations
ctataaatctcagcttgatacacttcttcatttacgaatctattcagaaaggaactctcggcatcgatttgatacaacttgatgtctttatgtgctgcatatgataagagtattattatggcttcaagcttgctactagtgtaaaggtttcttcatagtcaatcccttcttgttgattgcaccttcagcaactagtctagcctgtntgactacttctccttcttcattgagcttatttttgaacacccatttggtttcaatgactgactgattctttggaggggaacaagattccaaaccttgttcttagtgaattgactacatttctcttccataacaaacacctaagaatctngactcaatgcttcatcaatattcttaggctcaatggttgagaaaagagtcattattcctttttctctta

SEQ ID NO: 6353 - DNA, 434 bp, Glycine max
  unsure (1)..(434): unsure at all n locations
ctctaganaaagaagctagtaaccacactagttatttcggctcctaatngnggttaataatntgaattaatgtgtgatgctagtgactatacgataggagcagtattaggacaaaaatggaatggaagatttcatgttatccactatgccagtaaggtgctaaatggagcccagatcaactatgcaacaatggagaaggagatactagcagtgctttatgcccttaaatcaatcatatcatgtaggttcaaagattattgtgcacactgaccatttagctatataatatctactcaccaaagtggattccaagccaagttaattagatgggcccttctactacaagagtttgatctagatatccgagacagaaggggtgtgactgtgacaccctctaccccgacatatacataaataaataaaatatgtaatat

SEQ ID NO: 6354 - DNA, 463 bp, Glycine max
  unsure (1)..(463): unsure at all n locations
atctatatatggttanaacaagcttcccgtcagtgttaccttaagtttcatgttataatttcttcatttggttntgatgaaaaccccatggatcaatgcatataccacaaggttagtgggagtaaaatatgctttcttgttttatatgtagatgatattttacttgcagccaatgatcggngtttgctacatgaggtgaaacaatttctctctaagaattttgacatgaaggatatgggtgatgcatcttatgtcatcggcattaagattcatagagatagatctcgaggtattttgggtctatcacaagaaacctatattaacaaaattctagagagatttcggatgaaagattgttcaccaagtgttgctcccattgtgaagggtgatagggttaatttgaaccaatgtccanagaatgactttgagaaggaacanatganaaacattccttatgcttcag

SEQ ID NO: 6355 - DNA, 468 bp, Glycine max
  unsure (1)..(468): unsure at all n locations
gagtccacctcgcatgtcatgcaagcttgagtacctgngtagaaacatctggagttgatgagaaggtgcttcaacagctattgcattgtggctattattgttgggatgagctcatacaaagtagtcgttccttagttgtataccttgcccgaaaatacaggggtatgggaatagcattggatgatttacttcaggtttgttccaaatgtcattgctcatgattttatttgtaatttgtgattgtttcttgtgaggacaagtttctgtttgtcttttacctatttgtgcactcatcatatacagttgtaagttatatcgcaaagaacccgagtttcctgattaatagtcgatattttttagagcttacaattaacaacttgtgagagttagaatcacagctaatacttcaaagatatcagtccaatgaaagaaaggtcatgtacagaggcatagcataagttacaacta

SEQ ID NO: 6356 - DNA, 447 bp, Glycine max
  unsure (1)..(447): unsure at all n locations
tgtgcattcaatatcctgatgatggtattccatatgttcttttgactggactaatacatttgttgcccaagtttcatggtcttgtaggtgaagatcctcataaacatcttaaggagttccatattgtttgttccaccatgaaaccccctgacgtccaagaagatcatatctttctaaaggtttttcctcattctctagagggagtggcaaaagattggctatactaccttgctcccaggtctattttcagctgggatgaccttaatagggtgttcttggagaaattcttccctgcatctaggaccactgccatcagaaaagatatntcaggcatcangaaacttagtggagaaagctcgtatgagtactgggaaagaatcaagaaatngtgtgcaagctgccctcaccaccagaattctgagcaactccttcttcaatatttctatg

SEQ ID NO: 6357 - DNA, 397 bp, Glycine max
  unsure (1)..(397): unsure at all n locations
tgtaagttatatattcaatatattttatatgtgttatttatgtagatgtttatatnttgataaatgaatagttttaggtagtataagataacaattntgtatagtttagtttgaattgttaatgttatatatgccagattattttttgataaatgaatagttttaggtagtataagataataattttgtataatttattttgaattgttaatgttatatatgccagattatattttgataaatgaatagttttaggtagtataagataataattttgtatagtttagtttgaattattaatgttatatggtagattagatttaggtttatatgataaattagtgttgcaacctacccttcngcgggagggcgacacgtgactcgcgggatgcgtgtt

SEQ ID NO: 6358 - DNA, 441 bp, Glycine max
  unsure (1)..(441): unsure at all n locations
ntcataatgtccgtggaaaanactgtgctcttatcaacaatgtgtcatttctttgataccgaccgcttaaactactataatgtgactaattcaactaagcttgtaatggagaatgttgaactgtacatgaatgcacgtgtgtctccaacctctttgacctattatggattttgcttgggaaatggaaactacacagtnaaactccattttgcagaaataatgtttactgatgataaaacatatagcagtcatggaaggcgtgtatatgacatctacattcaggttcatatttttatcattttcctaaattggtcaaccacatgtaaattttgatcaaaattggtaaattctctttgggaacttcatgataccaaattcaaatacaacaaccacaacgactacaacgccttatccactatgtggggataccaaattcaatac

SEQ ID NO: 6359 - DNA, 369 bp, Glycine max
  unsure (1)..(369): unsure at all n locations
cgcaattaacatgaatggccttcctaatattacaggaatgtttgtatcttcacaaatatccattaccacaaagtctatcgggaagataaaatgtttcactctaaccagcacatcttcaattactccatatggtctggtaatggagcggtcagcaagttggtaagtcatcttagtgggcatgatctccaactctcccaaccttttgcacatggagagtggcattaaattaatactggctcccaggtcaataagagcctttcacacagtgacttctccaattgaacaaggaatagttacactcccanggtcttgatgctggggttgaaggatcttttaatcacaacactacaatatcctttcactatgata

SEQ ID NO: 6360 - DNA, 458 bp, Glycine max
atgaaagggtgagcaagaatggtacgatcattaatatctatagtggagaaaggagagcagttctcataaaaaataacatgtcaagacacttcaatggttcgtgtatggagattgtacacaaggtaacctttcttgtgggatttaaaacccagaaacacacaaggtaaggctctaggatcttgctttgttctgttagcactgagagtgctagtgtaacatagacagcaaacaactcaaagtaaattatatatcatataatgcaaaatagagtttttggtatggtgattcatttttctaaaaaggagtacgaataatgtgtatcaaggtagcagtatgaagtaaagcataggaccaaaatatgtttggaagggtagactgaaacaaaagggctcgagttacattgagtaaatgttgcgattttcgttcaacaatcacattttgttggcgaagttccacac

SEQ ID NO: 6361 - DNA, 392 bp, Glycine max
tattactgcctctagggaccactagatctattacatcatcaagctgagacatagtataattagtgacaaatcattgtaaaacaactaatttgaggatcttatttttactagtgatatccaaccttaagtaggtcaggaatctcatctctcgaagtcacaagcccaataagtttgtcaccaacagtatctggcatcactgaagtaatgacctacaataaaagaagaaatacagatgagagaaaatatgtgtaagtgaattaatgacaaagaaacaacagtcaattcagatccagaataatgtcataaaacaacaatctcaactaaaataaatagatattagatagtactaaccttgtgtaagattgcatgtgatcgtccggcttcctttccac

SEQ ID NO: 6362 - DNA, 365 bp, Glycine max
  unsure (1)..(365): unsure at all n locations
atgaagactctcccactatctagatgttaatctgggatctctatcagagactatgctagaatgaataccgtgtagtctaactatctcattgacatacaagctagtcaacctctctaacgagtatctaatgttaattacgatgaagtgagcagatatggtcaacctgtctacaataacctaaatggaatctaaacctttgggggtcctaggtaaccccaccatgaaatccatggagatactatcccacttccacttaggtatctctaaaggttgcaacttccctgaaggcttctggtgttctatcttagctntctgacacactgngcacacaaggacaaactcattaacttctttcttcataccct

SEQ ID NO: 6363 - DNA, 363 bp, Glycine max
  unsure (1)..(363): unsure at all n locations
agctngcttctatgtccctttcattgctntaatngttgaataatccttgaaaaattgtcttgttaaaactccattggtttagctntcattntcatttttntgtctttgtttattgcttgtctctttgtttcgttgtttgtgagttgccatatagggaattgcaaaggtggattggtgccatcctcatgcaagctccattggagcttgtaggcctaggatcttcttcatcaatggattcctttgcttcttggaagataaatggcagcggaatggagaacgaagagagagaggagatgccacttcaacgagaagatgagtctataagaagctcaccaccatatgaggccatggataatagctggg

SEQ ID NO: 6364 - DNA, 453 bp, Glycine max
  unsure (1)..(453): unsure at all n locations
gcttaagaaacatggcgtcagcaaacttcttatttccagaaggaatttctatctgtatacctccaatctttaatggagagggttaccactactggaaaactcgaatgcacatttttattgaggcaatagacttaagtatttgggaagccatagaaatagggccttatatacccaccacagtagaaagaattacaatagatggaagcacatcaagtgaaagcataacaatagaaaaacctagagatagatggtctgaagaggatagaagacgagtacaatacaatttaaaagccaaaaacataataacatctgccctgngaatggatgaatgtttcagggtttcaaattgtaagagtgctaaggaaatgtgggacactctacaattaacacatgaaggaactacagatgttaaaagatctatgataaacacactaactcatgaatatgaactat

SEQ ID NO: 6365 - DNA, 428 bp, Glycine max
  unsure (1)..(428): unsure at all n locations
aatataccttcttctgtatttgcatcanacttgcctaagttntctttcccgttgtttaacacaaagcatttacatccaaaaacatgaagatgagaaatgtttggttttcttcctctntacaattcatatggtgttttctttaagataggtgtaattaatgctctattcattatatagcatgcaatgttaatagcttcaacccanaaatacttaggaagatttgtatcattaagcaaacttctggctaattcttctaatgatctatttttcctctcaactactccattntttaaggagttctaggtgcagaaaagttatgttcaatgccattttcatcacanaataattcanaatatttattntcaaattcttcttcatgatcactcctaatggatgaaatattgagattttttgtatttaaatgattt

SEQ ID NO: 6366 - DNA, 435 bp, Glycine max
  unsure (1)..(435): unsure at all n locations
agtcacctgccgcatgcaagcttctgcttattagtgcacaactccttcaagaatttatcatatcttnggaatttctatattgcatccaacagaggtatgtttacctctacttttctaaatgtttccaagatctgatggtgagggcaactggcacatagttttttaaatctctcccaatattcatataggttctccccactgagttgtctaatacctgaaatatcctttctgatggttgtggtcctggaagaagggaaaattttttctaagaatactctcttgaggtcatcccagctcgtgatggaccttggagcaaggtaatatagccagtcctttgccactccctctaaagaatgaggaaaggccttcagaaatatatgatcctcctggacatctggtggtttcatggtgaagcagacaatatgaaattctttc

SEQ ID NO: 6367 - DNA, 497 bp, Glycine max
  unsure (1)..(497): unsure at all n locations
atctctaagtcacctgcggctgcaagcttaagaataagataagatcaagactcaagaatcattagaagacttaatcaagataagtatgagaaggagttttcaaaaactgagtagcacatgtaattttcacaaaacatgtttaccaaagagttnttactctttggtaattgattaccagattgctgtaatcgattaccagtagcaaaattgttgtgaaaaagttntcaaattgaatttacaacgttccaattaatttcaaaaagctataatcgattacaatgttttggtaatcgattaccagtacctctgaacgttgaaattcanattcaaatgtgaagagtcacatcctttcacantaaaagcttgtgtaatcgattacactgatttggtaatcgattaccagtgatggcttatgaataaatcanaaaatgtaactcttcanaaggttttgactnttcacnatggtttaagttttctaaaagtataactcttataat

SEQ ID NO: 6368 - DNA, 368 bp, Glycine max
  unsure (1)..(368): unsure at all n locations
gcttgtagaacaccaaagatgtaagacanaattttgtatgtaagtgtaaatttgaaacaataagagctaatatacaatcagatacctgaaagtgataatttatgttgctatgatccctaacaatgtataattagtccctgttagattacatttatctttacatgatcttgtatatattattacacaaaaacttatgattctgattgatatgtaattacctaataatcagtaattgattgatatgtaatcaatattgattctgatttctccattataaataaagatgagatgtggtcatctaagacacaaaattacagtacaactaatacactgctatatggtatcaaagcttaagttattcttgacag

SEQ ID NO: 6369 - DNA, 440 bp, Glycine max
  unsure (1)..(440): unsure at all n locations
ggccgaagtggagaaacaatgtggaaagcatattaagattatgagatccgatagaggtggagagtacaacggtagatacacgaagaatgaacaagcacctggtccatttgtgaaatttcttcaagaacataggattgttgtccattacactgtgcctttagatcaaaatgatgcggtaaaaagaagaaactaaactntaatggacatggtgaaaagtataaggagtaatagaaaacttcctcaattcttgtggattaaatctctaaaggcggttgtgtatatattaaatcgagtatcaaccaatgttgtctcaaagacanccttttgagctattcaaaggttggaaaccgagttngcgacatatatgcatttggngatgcccgtctgaagtgagaacttataacccacaagaaaagaaactagacccaatgactattagt

SEQ ID NO: 6370 - DNA, 461 bp, Glycine max
  unsure (1)..(461): unsure at all n locations
gagtcatcgagtcacttttccattaagtatgaataaatgttatgttccttttgctntaatccattctgatgtatggtgtccatccccaaaatcttctatctctggttatcggtggtttgtgatatttgttgatgattgcactcgaatgacttggatttacttgttgaaacataaaaaaatgaagtggtacacatatttcaacaatttcataaaatgattcagactcaatattcaaagaagattaggatccttcgctctgataatggtggggagtttgtaaatcaccaattccatgagtatttcaaaaaacacggacttattcacgaaaccacgtgtccacaaactccacaacataatggtattgcagaacagaaaattccgcatatccttganactgctcgtgctcttttacatggagcacatgtgcctcaccaccattggactgatgttgttactacaac

SEQ ID NO: 6371 - DNA, 478 bp, Glycine max
  unsure (1)..(478): unsure at all n locations
agcttatctntcagagtctngaaagctgccaagcattcatcatcaagcttgaagactgcctctntattcagcangttgctcaatggtttgacgaatttagagaagtccttgatgaacctctgatagaagcctgcgtattcgaggaaactcccgatacccttggcatttattggtggaggtaaattctcaatgacnatcaatttggctttgtccaccttaatgcctcaggctgaaatcttgtggcccaatattattccttcttggaccatgaaatgacacttctccttattcagcaccagaattgcttcaactcatcttcgcaatacgagctctagattagtcaagaagtagtcaaaggaaagcccaaaaattgagaaattgtccatgaagacctttatgcactnttctaccatgtcntgcaaaatagctagcacgtacctctagaaaagtngtggtgcattacataacccgaatgaca

SEQ ID NO: 6372 - DNA, 389 bp, Glycine max
  unsure (1)..(389): unsure at all n locations
catttttattatagttataatttatatgttttaatgtaatgaaaaactgaatttntaagtcaaactctgtggatgaatatatttttattaaaagatgtatgaaattacacttaactcacggcgaagtaacaatatgcctcagactacatgtacaattaagctattagggagaaactatattattttatgaatntggacaataagttctttcattaagtatataatatgggtattcattgtaaaaaattattatagtaattcacatctataattgtataaaagtatacgtttgatgtatgatttatgataattttatgataaaatacttactaccaagaatattatttctgcacatatgggttataaagcttaccaatatatatatatat

SEQ ID NO: 6373 - DNA, 223 bp, Glycine max
ttatcgagacactcgaaattgaacaattcaagctctcgagaatttcatatggtcatatcctttcactgcgaggtccgatgcaggcgcataatataatgacgacgcatctaaattgaacaaccgaagctctcgagaaattcacatgtgcataaccattcacacggagggcatattaatgcgcataatatatcgatacgcatcatactgtacaacggtagctctg

SEQ ID NO: 6374 - DNA, 476 bp, Glycine max
  unsure (1)..(476): unsure at all n locations
atcctcagagtcacctgccgcatgcaagcttgaactatctgtgattccacaacttcaatgttttctcgtaaaatagttcatgtcattaataaatatagcaaaaacattgaatttcacccacaanaagggacttttcttcaacttanataggctntgtacatataaaagaaggatttatgagaaattgaatctaaccaccccccgaaatataaagtatcaacactgtaattatattctaattacccaaaatagttgaggacctcaattatttgatctgctaaatcttcagcagaaggaataggatcctcggcacaattggcagttgctcccaacttcaagaactcttgtggaagtttcagagggaaaactatatgaataataatattcagttctacatgcaatanaaaatacatncaaatcaaccaacttacanacctcatgtccaggaggactgatatgatatatgcanaagttgt

SEQ ID NO: 6375 - DNA, 349 bp, Glycine max
  unsure (1)..(349): unsure at all n locations
agcttccattgctcaatttcgagcatctcgatatattatgcgccttaataggacctccaagtgaaaatttatgacctattgaatngctcaagagcttccattgttcaatttcgagcgtctcgatatattatgcacctgaatcgtacctccgagttaaaggttaagaccatntgaaaatcttaagagcttccattgttcaatttcgagcgtcttgatatataatacgcctcaatcagacctccgagttaaaagttatgagcatttgaatttctagagagcttctgttgttcaatttcgagcgtctcgatatattatgtgcctgaatcggacatccgagtganaagttatg

SEQ ID NO: 6376 - DNA, 409 bp, Glycine max
  unsure (1)..(409): unsure at all n locations
caatcacatttagcaactcagtggatatgttgtggattgatagaacataagtaatgtaaagtaaatatagtactttactagaaggaaaatgattgttgaacatatgttggtgcttgaaatttgactttccaaaagtaatcatccttagtagaatcatatgttgttgaattaggccaatagtattattacttaccctattctttaatttaggatatatntatcattaattatctttagattaaattatccttaattaatcgttatgacaaataattacaagacagaaaaatgtattaataatgataggggtatttttaaaaaatacaaatgtaattattttgatacaaatttaagacaattatacttcacttgaatgaaactgtaaatcaacattatttncagcatgata

SEQ ID NO: 6377 - DNA, 410 bp, Glycine max
  unsure (1)..(410): unsure at all n locations
ggagcgtctcgatatattactgtactcaatcggacatccgaataaaaagttattgtcgtttgaattngcttagagcttctgttntcaatgtggagcgtctcgatatattacgggactcaatcagacatccaagttaaaagttaatgtcgtgtgaatattatacgaggttccaatttcaatttggagcatcgcgatatattacgggactctattggagatccgagaacaaagttattgtcgtttgaatntgatacgagcttccgttttcaatttggagcgtctcgatatattacgggactcaatcggacatccgaataaaaagatattgtcgttagaatttgcttacagcttctgtttcaagttggagcatttgattattacgggactaatcagacaccaagttaaaagtt

SEQ ID NO: 6378 - DNA, 433 bp, Glycine max
  unsure (1)..(433): unsure at all n locations
agcttgtaggcctnggatcttcttcatcaatggattcctttgcttcttgagggtctgatgcagcagaatggagaaggagaaagatgaatggagacgccacttcaagtagaagatgagtctagaaaaagctcaccaccataggatgccatggataagagcttgaaggtagaagaagatgaatgaagggacaggataagaagagcacgaaatttagtgcctctaaagaagtctgaactttgaagtttaattctcaaaatgatcaaagttcanaanaatgcacacacatgacctctatntatagcctaagtgtcacacaaaattagagggagaattgaatttctattcaaatttcacttaaatnntgtggagccaaatttggagccaaaatttcactaatttatgatagtgaattttagttatggttcagcccact

SEQ ID NO: 6379 - DNA, 498 bp, Glycine max
  unsure (1)..(498): unsure at all n locations
tctggactataacgcccttatgacggtaacgtatacacttatactaaatcactgtcatataaattgttagaatttgtgccaaagcagatactatctaacctaatactttatagtatattatttgccatattagtgttagattatactgtggagtacctttcacatataatacaaatatatattacgtattagacatgacctgacctgcatattcccaatacccggtacatcgaacaaattaatatgtgattgaaaggaggaaagtaatgtatgattgaaaggatctcaccaaaatgttaatatgtgaataattaatatctaatgcatctaattaagggttatcggaagagtaaaagggtgtccattaatatacacagtattcgagtatatgttattgtgcagtttcaataccaagtaactgctacgacaattacattaactactcattacctatgtttggtaannataatgaatcattatcaattgcatatatacaat

SEQ ID NO: 6380 - DNA, 413 bp, Glycine max
  unsure (1)..(413): unsure at all n locations
agcttcctcaccatggaccctanatctatggctggccaacctattagatctggcattcctgttagctctgtaatgactggaagctagtaatggagtgctaccagttctagagaatcggtacgatgaataccggccctgtgttttcttccagaatttggtgcttaaaaattcagcaccaggtagcaggcaacaagtattcttaggagcatcagatttagatatccttccacttgatacagccaaatcataagagatctcatccaatgctaactccaggccatgcacacgagtctctaaagtatgcattccattttcagagttcctcatgaatttctgcataanaatatatggtggatattgtcagacatgcccatcattcgagagttggcatactctacatatatgtgcacata

SEQ ID NO: 6381 - DNA, 290 bp, Glycine max
cttggccttttgccacaactctcgtaaatgggagagaaatgttcatctaaagcatacaagtccctaatattatcaaatcctaaaatttgagctcctagggagcaaaacaatgtgtgtctcctatagagggcatcagctaccacattcgtttttccctttttgtatttgataacatatgaaaattgctctaggaactctacccattttgcatgcctcttgtttaacttgctttgccctctaatgtacttaagtgattgatgatcactatgaatgacaaattccttggaaac

SEQ ID NO: 6382 - DNA, 420 bp, Glycine max
  unsure (1)..(420): unsure at all n locations
atctgactcacacgaggctggatagactactcgtatatgactctctagttcccatgtggcgtcttctcctaatgcacctccctagatcaacttgactaatggattctgcttctctcttacgtgctttgtacgcatatactccatcctcanaggcaatgtttgatatgtcaagttctccttcacttgtatgtcatccaatttgatcacatgagatggatcatggatatacttacgagttaagacacaagaaagacattgtgaagattataaagagaccgnggtaatgcaatttggtatgccatgggactgactctnttagagaatatggaacggaccacgaaaatgaggtgtgagtctttgagatttacatgctcgaccaacccaagtgcacggagtgactctagagaatacatgatcacc

SEQ ID NO: 6383 - DNA, 423 bp, Glycine max
  unsure (1)..(423): unsure at all n locations
actgaacatattctctaatgatatgatgatcaatgtcaatgtgcttggatcgttcatgatgagcagggtttgaagcaagacttatagcagatttattatcacaaaataacatcacagagggcacatcaacttcaaagtgaagaattaacttgcttaaccaaacaatntcactagtaacagaagacaagacacgatatttagcttcagtggatgatattgaaacagtggattgtttcttagaacgccaagaaagaagttattntccaaaaagacacataagtcagaagtggatcttctggtatcaacacaaccggcccaatcagcatctgcaaaggcagtgaggttgagagagttctgagcatggaaaaacatacctcgtccaagagcagaattgatatactgcantaaatgatgaacaacatg

SEQ ID NO: 6384 - DNA, 439 bp, Glycine max
  unsure (1)..(439): unsure at all n locations
tgactgaagacattgaagtctntngagatgtaaatgaagacattgatagtcttgacaaaagactctgatagtctttgaaatgtaaagaagactttcatagtcttgataaaagactctgatagtcttttaaatgtaaagaagactttgatagtcttgacaaaagactctgatagtcttggaaaaataaagaagactttgatagtcttgacaaaagacattgaagtctctgaaacgtaaagaagactttgatagtcttaacaaaagacattgaagtctttgaaatgtaaatgaggacattgtagtctttagaatgcataaagatagaggactntgagtcctatgaaagataaagacaaaggactttgattcctatgaaagataaacgcgaggactntgagtcctatgaaagatataagagatgagtgtataatctcaacat

SEQ ID NO: 6385 - DNA, 370 bp, Glycine max
  unsure (1)..(370): unsure at all n locations
cgacaataacatnttactcggatgtctgattgngtcccgttatatatcgagacgctccanatngagaacggaagctctgagcaaaatcaaaagacaacaactttttacttggatgtccgattgtgtcccgctgtatgtcgcgacnctcgaaatttagaacagaagctctgagcaaaatcgaatgataataagattttactcggatgtccgaatgaatcccgtaatatatcaagacgctcgtaattgaaaacggaagctctgagcaaattctaacaacaataacgtcttactcagatgtctgattcagtctcgtaatatatcgtgacgctcgaaatcgaaacaaaagctctgaataaatcaaaagacaata

SEQ ID NO: 6386 - DNA, 413 bp, Glycine max
  unsure (1)..(413): unsure at all n locations
agcttctcatttcaatttcaagcgtctagatatattactggacacaatcggacatccgagtaaaatgttattgtcgtttgaatatgctcagagcatctgttatcaatttcgagcgtctcgatatataacgggactcaatccgacatccgagataanagttattgtcgttggaatttgcccagagcttcatatttcaatttcgagcgtctcaaaatattagagcactcaatcggacatcnttagtaaaagttattgtcgtttgaatttgctacgagcttctatattcaagtacgagcatctcgatatactactggtcccaatcggacatccgagtaaaaagttattgtcgttaatatattctaagagcttatgtattcaatttcgagcgtcactatatattacgggacttaatc

SEQ ID NO: 6387 - DNA, 222 bp, Glycine max
  unsure (1)..(222): unsure at all n locations
cagctcgtccttatggttattaatgtatgaatcgttgcaattgcacctcttccttgtcaggcaatatatctgtttgcatttgggattccaattttcatcaacagtggttaccctactcctcacgtgaagtggaacttgtgggttatccacaagctgctgcttacccttgtttatggntccatactgtacatgtatcattctaggtggagagaaaggttacct

SEQ ID NO: 6388 - DNA, 453 bp, Glycine max
agactcttaatatatgaagagtattcttatggaaccttcacccgacgaagacactgacaaaaacttatcttctcctctttggacaaagtatggcaggctgctggcaagctaatattcttcccgtcagaccttggatgcaactgtgatcgtgtgctcatatcagctagatcttgacgggtatccaagccatccttcgtcttgcctagaatagtaagcagcgcaccaatcacactgtcgcaaacatttttctccacatgcataacatcaatacaatgtctaacgtcaagatcagactagtacggaagatcaaagaacatagacctcttctttcatatgcaactcttactcttatccttcttttgggtctttccacatacaatattcacgtgttgaacacgctcatatacctgctcaccagtcaacagtatcggcgcaatatcatgctcttgactt

SEQ ID NO: 6389 - DNA, 327 bp, Glycine max
atagagtagaagatagatcattgatccatcctccaccttgttgtgtataacacaacaatcatagagacttctcttgaatcctcgactggtgataaagctatcagacctcatgtaccattgccttggagattgtttcacaccatacaaggatctctgcagttgacaaacatacctttcttttccttgaacttcaaacccttcacgctggtttattagaatattctcttccaatctttcatggagaaaagaagtcttgacatcaagttgttcaagttccagatcttggtttgccactatagcaagcaaaatcctgatggatgcatgtct

SEQ ID NO: 6390 - DNA, 340 bp, Glycine max
  unsure (1)..(340): unsure at all n locations
agcttctagcanacaggttgagggtagtgctaccagttctaatagatganaggcagtcagccttcataaagaatatgcatatccttcatggaattctcattctcaatgaggtggtggatgaagctatttggaggaagaagcctgctatgatgtctaaagtggattttgaaaaagcctatgattcggtatcttggtctcttttggattatatgttgatgagattaggcttctgccttaaatggagaaaatggatttctacttgtctccaaacagctacaatttcagtcctagtaaatgggagccccacaaaggagttngttccttctagaggattgaggca

SEQ ID NO: 6391 - DNA, 252 bp, Glycine max
tcaatgatcatactacacatctagaggccttctaaagctaagcacactagaaggggttcgattaatcaaataaatcgcagatctcatagcctcactccatacatgagatgagacattaccatctatcataactgatcttgtcacctctaatatttgactatctttcctatcagccactccattatgttgtggcgaataaggacatgtggtttaatgcatgaatccattacagttcatgaactctattaattc

SEQ ID NO: 6392 - DNA, 382 bp, Glycine max
  unsure (1)..(382): unsure at all n locations
tgaagctctgataccactggttagatatgtgttctcatatatcataagaaggtgggntgaattaagatattccaaactacttccacaattaagaatctatttcactttntattcaagttataaattcccttaataatgaacttcttaaatattgattcacataacacaatttgaatatgaatataaagcagtaataaacaaaggagattaagggaagagaaagtgcaaactcagatttatactggttcggccacacccttgtgcctacgtacagtccccaagcaacccgcttgagagttccactatcttgtagattccttctacaagttctaaacacacaacgacaatccttcctttgtgtttagaagtcctttacaacaag

SEQ ID NO: 6393 - DNA, 474 bp, Glycine max
  unsure (1)..(474): unsure at all n locations
tataaaataaattagagggtaccaataccaaaactggctataatctgcaagaccaaccactgcagtaattntatcatgttgtgtcttagaaagtaaccttatggtcacatttctgccaccagcatcaaggattcctgatgccaaaattgctcccatcttgctcatggtatcctcatgcttgtccagaataattttctccaattgtcgcctagaacacaattattgtaagaaaacaacaaatatatagcctcactgtccaaaataaataggacagacttacctaaatgttcccacacgtgagtcactagcttcactgatctgaaccatgaccatagccattgctataagggcaccttgacgaacaaaatcaacaacatccgatgtcaaaggctccaataaagaaatagcctcactgagacctgtacccgcacangagatacccacagcaagaagctgctcatatcgaacatgtgg

SEQ ID NO: 6394 - DNA, 466 bp, Glycine max
  unsure (1)..(466): unsure at all n locations
tctanactntatacaagaatgaagctctgataccacttgttagactagtggtctcagatatcataagaaggggggttgaattaagatattccaaactacttccccaattaaaaatctatttcactttttattcaagttataaattcccttaataatgaacttcttaaatattgattcaaataaaacaatttgaatatgaatataaagcaataataaacaaaggagattaagggaagagaaagtgcaaactcagatntatactggttcggccacacccttgtgcctacgtncagtccccaagcaacccgcttgagagttccactatcttgtaaattccttttacaagttctaaacacacaaggacaatccttgctttgtgtttagaattcctttacaacaagagacccacggtctcttaatcccttagagaatgaggagaagaagaagaatgaatctctctagaaag

SEQ ID NO: 6395 - DNA, 388 bp, Glycine max
ctgcaacgtgaattctgttcaactgataagatatctttctaattcagccaactaactaactatttctgttaaagctgtttatactgctaagagcctccctcaagctgggaatggatattcatcattcccagcttgttacaaaggagctgacatgtggctggtggcaaagccttggtgaatatgtccgggagttgcatggaagatgagaccggaaggagctctacaagacccgcaatgactttgtggcggataatatggccatcgatctcgatatgcttagtgccgtcatggaaaaccggattcgtggctatctgaatggcagattgattgtcacaatataacgtggctggctgaataaatgctacaccaatgtcatggagaatatacg

SEQ ID NO: 6396 - DNA, 341 bp, Glycine max
  unsure (1)..(341): unsure at all n locations
tgtcatctacatagagtagaagatagatcattgatccatcctccatcttgntgtgataaacacaacaatcatagagacttctcttgaatcctcgactggtgataaagctatcaaacctcatgtaccattgccttggagaatgtttcaaaccatacaaggatctctgcagttgacaaacatacctttcttttccttgaacttcaaacccttcacgctgtttcattagaatattttcttccaatcttccatggagaaaagaagtcttgacatcaagttgttcaagttccagatcttggtttgccactatagcaagcaaaatcctgatggatgcatgtctaacc

SEQ ID NO: 6397 - DNA, 330 bp, Glycine max
  unsure (1)..(330): unsure at all n locations
agctngacangaatgaagatgagaagaagaagcattattagttgaaggagaagtntgacaacccctgcaaagtgatcaaggatgacaaatctatgaaggatcttattctgtttctgtttgagactgctcttctcacttctagtttcagccgtgaaggatccacataatgtttaagcttggactgagcatcaatgaagatgcacgtgaagttgttgctgacatgcccccactagaggaggccgaagccgatgctgatggcagcaagatggagaaggttaattaaacttaaatatgatgtgtttcttattagtagcttatctaatgcgtatg

SEQ ID NO: 6398 - DNA, 374 bp, Glycine max
  unsure (1)..(374): unsure at all n locations
ctgtcctaagcaaaggtcccaatgtcctattaacaacttttgtttgcccatcggtttgtgggtgacaagtggttgaaaataacaatctagtgcccaacttgccccacaaagtcctcccaaaatggcttaagaacttagagtccctatcactaacaatgcttcttgtgcaaccatggagtctcacaatctccttgaaaaacatatcagccacatgggaagcatcatcaactttttttacatggaataaaatgagccattntagataacctatcaacaaccacaaaaatggaatctctaccactgcttggtgttggcagccccaaagcaaaatccatggataaatcaatccaaagatactccggaattggaatgga

SEQ ID NO: 6399 - DNA, 415 bp, Glycine max
gcgtctcgatattttacggggctctatccgacatccgagttaaaagttattgtcgtttgattattctaagagcttcccttttcaattacgagaatctcgatatattacgggacacaatcggacacccaagttaaaagttattggtcgttgaattttctcaaagcttctattttcaattacgagcgtctcgatatattacgggactcaatcggacatccgagtaaaaagttattggcgtttgaattttctcagagcttctgttttcaattacgagcgtcccgatatattacaggactcaatcggacatccgagtcaaaagttattgtcgcttgaatctgctcagagcttctgttttcaattacgagcgtctcgatatattacgggactcaatcggacattcgagttaaaagttatt

SEQ ID NO: 6400 - DNA, 423 bp, Glycine max
gaaatcacatgtttgtcatcatctttttggggagaatgtgaatgtatgtatacatgattttgatgatgtcaaagaagaatctaacaaggctgcttcaaatgataagcatttgcttcaagaataattcaagattgcttcaacaaacaaagccttgtttcaagattcactaaagaccaagccttgccttaaaacaaagtgctttcaagacatgcaaggctctggtaatcgattaccaggaagtgtaatcgattaccagaagacagggttgagaaatagctgttgaaaaatgttctgaatttgaattctcaacatgtaatcgattaccatatgtctgtaatcgattaccagcaacgaaactttggaaattcaaattcaaaagtcataacccttcaaattataattgtgtaatcgattacacaaaca

SEQ ID NO: 6401 - DNA, 429 bp, Glycine max
  unsure (1)..(429): unsure at all n locations
caaatgatgcatatgattttgtagctacctcatgcactcctctaatgactatggcatcatttctggcgctaaactgctgggagttggaagccatcttcttaatcaagtttctagcttcagcaagagtcatgtctccaagggctccacccctggcagcatctatcatatttctcaccatattactgagtccttcataaaaatattggagaagaagctgctccgaaatttgatggtgagggcaactggcacatagttttttaaatctctcccagtattcatataggctctctccactgagttgtctaatacctgagatatccttcctgatggccgtggtcctggaagcaaggaaatnnttttctgagaatactctcttaaggtcatcccagctcgtgatggaccttggagcaaggtaatacagtcaatcat

SEQ ID NO: 6402 - DNA, 425 bp, Glycine max
  unsure (1)..(425): unsure at all n locations
ntgtgaagctcctgttntagctntacccgattttactcaaccatttgaagttgaatgtgatgctagtggagttggcattggggctgttttgatacaaaacaaaaggcctatagcttatttctcggagaaattgggaggagccagattgaactattgcacctatgacaaagagttctatgccattgtgagagctcttgatcattggaatcattatttgcgttctaatcactttatattgcattcagatcatgagtcattgaagtatatcaatgggcagcagaagttgagtccaaggcatgctaaatgggttgaatttcttcaatcttttaatttctcttcaaaatacaaggatggtaagagtaatgtggtggctgatgcactntcaaggaggtatgctttaatttcaattcttgaaactcgtttac

SEQ ID NO: 6403 - DNA, 427 bp, Glycine max
tacatgttttaacataaaacccaacaccctcacatgcttcactgttggcttcctttgtgtccacacttcttcacgcactttattctttagcttcttagttggactctgattcagcatatagactgcaagggacacaacttctcccaaaaattctgatggcaggtgtttctccttcagcatacatctacccattgtcattacagtcctattcctcctttcagccagcctattatactgaggagtatatggagcagtaacttcatgcattatgccatgttggatacagaaaaattcgaaatcctttgatgtatactcccctccaccatctagtctaataaccttgattgctttccactatgttttactcaacactataaactccttgatatagaaagccttactcttgctttatcagtacaccactcat

SEQ ID NO: 6404 - DNA, 403 bp, Glycine max
  unsure (1)..(403): unsure at all n locations
ttgtttgcattcgctgaacctttgatgtattatctgatatgttatcgaagattatcttgtttactaacttactctccctttatatctcaattatttatgtgtgcacgtgagctgatgagcatgccaatgactgattactactggtcgaattttacttgattgagatatatgaggtgaagatgtcgaccccggcaaagaagagactgatgagggattttaaaagattggcacaagatcctcctgctggcatcagaggggctccccaagacaataatattatgcttcggaatgctgntatctttgggtgtgtaagagtatatatatcatgaaattcttgttctcttaagagtgtgtttctctttactntgtgcgtttggatgatgtaaggtatgataacaatcta

SEQ ID NO: 6405 - DNA, 419 bp, Glycine max
atttcgagcgtctcgatattttacggagctctatccgacatccgagttaaaagttattgtcgtttgattattctaagagcttcccttttcaattacgagaatctcgatatattacgggacacaatcggacacccaagttaaaagttattgtcgtttgaattttctcagagcttctattttcaattacgagcgtctcgatatattacgggactcaatcggacatccgagtaaaaagttattgtcgtttgaattttctcagagcttctgttttcaattacgagcgtcctgatatattacgggactcaatcggacatccgagtcaaaagttattgtcgtttgatattgctcagagcttctgttttcaattacgagcgtctcgatatattacgggactcaatcggacattcgattaaaagtta

SEQ ID NO: 6406 - DNA, 448 bp, Glycine max
  unsure (1)..(448): unsure at all n locations
tagaaacatgaaacactggatgaatntgagcacattcaggcaaaaccaactcataagcgactagaccaatgacacaattaatgcaataaggtctgaaataacacttgcccaacttgaccgagccataacccctcatagatgtttgacgataaagttataaaaggccatactaatgtaatccttccaaggaggggacccatcaccagagctagctaggatacttcaggaagattgggtcagggatgcaggagaagaccctaggattctcatgagccttagggtagattttgtgcctacgggcgaagtataaacccacttatctttgtatgtattagattagggtttcattattttttgggccttgtatttagggctccatagtgtagggagggtgccccacaagtttagggtaccctagtgatctaggatttttcagcccttgtatttt

SEQ ID NO: 6407 - DNA, 431 bp, Glycine max
tgtaatcgagtacacacatactgtaatcgattaccagaggattatttcataaaacattctcaacagtcacatctttttgtgtgattcttgaatgactatcaaaggcctatatatatgtgacttgagacacgaatttgctaatagtttttcacaacaaaaaggtcttatcctcttataaagcaaaatagctttatcctcttacaaattccttggccaaaacacttgtgattcaataaggaattatttgagtgctcaaattgttcaatctatctcttttaagagaggtttcttcttttcttcttcttcattctgaaaagggattaagagaccgagggtctcttgttgtgaaagaattctaaacataaaggaaggggtgcccttgtgtgctagaacttgtaaaggaattacaagatagtggaactctcaagtgg

SEQ ID NO: 6408 - DNA, 434 bp, Glycine max
  unsure (1)..(434): unsure at all n locations
ccataatgttttccagaagtggctttagaacttagcatctctatctgacacaatggtcctaggcaaaccatggagtctcacaacttccctaaaaaagggttttgagatatgggaagcatcatccaccttatggcatggtataaagtgtgccatcttgctaaacctatccaccactacaaagatagagtctacacctctttgggttctagggagcccaaggacaaaatccatactaatgtctacccaaggtgcagatggaatgggtaagggtgtgtatagcccatgaggcatcaccctagacttggctngtacacaacccacacacctgatgcaatgctgatggacatctttcttcatatggngccaatagaacttctctttgagtaagacaaaggtcttgtctatcccanagttgcccatgagcccactctcat

SEQ ID NO: 6409 - DNA, 315 bp, Glycine max
  unsure (1)..(315): unsure at all n locations
tctagtctcaattttgagcgtctcgatatatttctcctgttcattcggacatccgagtaaaaagttattgtcgtttgaatntcctaccagcttccgttttcaatgtgcagcgtctcgatatattacaggactcaaccggacatccatgtataaaattattgtcaattcaattttctcagagcttcggatctaaatattgagcgtctcgatatattacgggactgaatcaaacatccgagtaaaaagtttttgtctattgaatttgatacgagcttccgttttcaatttggagcatctctcgataaattatgacaa

SEQ ID NO: 6410 - DNA, 410 bp, Glycine max
agtctcacgattgtcacgtgctcatgcaacaattgttagccgtggctatacgagacatctttccaaacaaagtcaggttagccataactcgcctgtgctttttcttccatgctatatgtagctaagtcattgatcctgtgaagtttgatgagctggaaaatgaggccgcaattatactgtgccagttggagatgtattttccccctgctttctttgacatcatgattcacttgattgtgcatctagtcagagaaatcaaatgttgtggtccagtttatctacggtggatgtacccggttgagcgatacatgaagatcttaaaagggtatacaaaaaatctatatcgtccagaagcatctattgttgagaggtacatagcggaagaagccattgaattttgttcagaatac

SEQ ID NO: 6411 - DNA, 305 bp, Glycine max
  unsure (1)..(305): unsure at all n locations
aaccaaatgctcatcactgctnatgatgaagcttcaagttgtttcatataaatctcctcctctaaatcaccattaagaaagattggtttcacatccatttgnttcaactgaaggtcaaaatgagaaactaatgccaacataatacaaagagaatattacttatatacaagagaaaaagtcttagtgaaatccattccttcttgggagaaaatcccttagcaacgagtcctgccttgattctttcaaagaagcctaatgaatccttcttggtcataaagatctatgtaatactcatcgaatgcatc

SEQ ID NO: 6412 - DNA, 446 bp, Glycine max
  unsure (1)..(446): unsure at all n locations
aatcgtttcagttggaaaaaatcccttgtgcatgaagatcaaaggatattatcacacaaagatacatcaccaaaaaaataaaataatgaaagatataaatttaaagcagatatcttttatctacattcacacaaacatctaaacaatattcactatctcaaattttaatttgacaatgaattacatttatcctctatttaataatgtcaaaataacaataaattgatatcttgacagaactataattataataagagtttaaaataattttacattatcatctactcatcaatcattgttgttatgatttttaaaataattnttatcaaagtcaacaaacttatatcataaatgatgattgaatgataatgtaattttacattatataatattntttctcttataataacctaagcaaaggataaatgcacacattgatccgatgc

SEQ ID NO: 6413 - DNA, 459 bp, Glycine max
tatgaaatggatttaagtgcaacaattaaataggtgttatcgtgttcaattttacttaaacacttactgcaccccgttgatcgagccaaatggctccggattcagtgggcaagatcgagagtgtatgttcttgaaaagtaaaagacacaacacaggaggttaagatgcaaatcatccatatttattagtgctacgatcatggtttgcaaaggattttaagactttggagatcccaatgagtccttggagaataatcatgtatttaaccttctagcttccctaggcgttatgcataatattgtttgacgatatcggaattcacgggtgaaggaaattcttcatcatccatactggcaagcaacaatgcccctcccgaaaatgccttcttcacaataaaaggtcctttataattcggagcccacttccccctatggtccttttgagcttgtgatactttct

SEQ ID NO: 6414 - DNA, 445 bp, Glycine max
catcagtataacccttcagtttcaattcagagtctccataaatgaggttttggtctttagttcttcttaagtacttaagtatggtcttaaccattttccaatgttcttcaccagggtttgcttgatattgactagttacacctaatgcataagcgacatcaagatgtgtacaagtcctggtgtacatgatagctcccactacactagcatatggtactctacttatgcgttttctttcttcaggagttgttggacaattctccttactaagagtaattccaacacctacaagcaaatagcctcgtttggaattatccatgttatatctctttaagatagtatcaatgtacatagattggaagagtccaagcaaccttttagatctatctctataaatctttatacctagaatataaattggttctcccaaatccttcatggagaa

SEQ ID NO: 6415 - DNA, 406 bp, Glycine max
actcttggagaaaggatgttcagtgaattcagttaaaggttctctagaaatccatggcaaagcaaagagattggtgatgaaagctccattggccaagaatagaaccttcaaggtaagcctaaacaccattgaatctaagtgtctttccgctgcaactttgtcagatgattcatggttatggcaccttagactaggccacttaaattttagagatatgagcctcttgagatccaaagaaatgttaattggtctccctccaattaaaattcctaagaagatatgtgacaattgcttaatcaacaaacaacccaggaattccttaagcaattttactacttctaaggctagtgaaatattgcatgttgtttactcagatatctgtggacctcttgacactccatcatta

SEQ ID NO: 6416 - DNA, 411 bp, Glycine max
  unsure (1)..(411): unsure at all n locations
agtctcacgattgctttgctcatgcacaattgtagccgtggctatacgagacatctttccaaacaaagtcaggttagccataactcgcctgtgctttttcttccatgctatatgtagctaagtcattgatcctgtgaagtttgatgagctggaaaatgaggccgcaattatactgtgccagttggagatgtattttccccctgctttctttgacatcatgattcacttgattgtgcatctagtcagagaaatcaaatgttgtggtccagtttatctacggtggatgtacccggttgagcgatacatgaagatcttaaaagggtatacaaaaaatctatatcgtccagaagcatctatagttgagaggtacatagcggaagaagccattgagtnntgttcagaatacattga

SEQ ID NO: 6417 - DNA, 453 bp, Glycine max
  unsure (1)..(453): unsure at all n locations
gcttaacatcagaccacttccaggtgctggaactacttcacatggatttgatggggcctatgcaagttgaaagccttggaggaaagaggtatgcctatgttgttgtggatgatttctccagatttacctgtgtcaactttatcagagagaaatcagacacctttgaagtattcaaagagttgagtctaagacttcaaagagaaaaagactgtgtcatcaagagaattatgagtgaccatggcagagagtttgaaaacagcaagtttactgaattctgcacatctgaaggcatcactcatgagttctctgcagccatcacaccacaacaaaatggcatagttgaaaggaaaaacaggactntgcaagaagctgctatggtcatgcttcatgccaaagaacttccctataatctctgggctgaagccatgaacacagcatgctatatccacaaca

SEQ ID NO: 6418 - DNA, 423 bp, Glycine max
  unsure (1)..(423): unsure at all n locations
ccaaaatatcttaactttaaggtagatataacatgtataaactgaattatactagcaaaggaatggtaagagatgttaaagttatatttatcaattatcaagactaagtacattatctcaaatcacaccttcttgcttattcttatagggaaatgatcattntatggcaacataagtaattgaagcccgaaaggatacacctctactgccaattcagtctgggaaagacctgaactaaataactttccttgccaatgtaggtcaccgccatacctagtcaaggggaacaaagttaggcaactcattaaagcctagttaaagggttagtcatctaagtttgtgtaatatatcattaatataatatatcacttattacattntagatgaactatatatgaccagtgtgacaagtaaacaatctca

SEQ ID NO: 6419 - DNA, 387 bp, Glycine max
  unsure (1)..(387): unsure at all n locations
aaggactcatggtcactatgaatgacaaattccttgggataaaggtagtctggccatgttttcaaagcccgtactaaggcatacaactccttatcatatagtgaatagttaagggtaggaccacttaacttttcactaaaataagcaattgaatggccttcttgcatcaacacagtcccaatcccaacatttgaagcatcacactcaatttcaaaagatttttgaaagtttggcaacgcaagtatgggagcattaattaggttttgcttaagaacattgaaagctntttcttgtttctctccccatttgaaaccaacatttttcttgagcacttcattgagaggtgctaccaatgtgctaaaatccttcataaatcgtctataaaaa

SEQ ID NO: 6420 - DNA, 443 bp, Glycine max
  unsure (1)..(443): unsure at all n locations
tgccttgccccttgatatatttgaaggactcatggtcactatgaatgacaaattccttgggataaaggtagtcttgccatgttttcaaagcccgtactaaggcatacaactccttatcataagttgaatagttaagggtaggaccacttaacttttcactaaaataagcaattgaatggccttcttgcatcaacacagccccaatcccaacatttgaagcatcacactcaatttcaaaagatttttgaaagtttggcaacgcaagtatgggagcattagttaggttttgcttaagaacattgaaagctttntcttgtttctctccccatttgaaaccaacatttttcttgagcacttcattgagaggtgctaccaatgtgctaaaatccttcataaatcgtctataaaaacttgctaagccatgaaaactcctcacctcggtc

SEQ ID NO: 6421 - DNA, 350 bp, Glycine max
gaatcaactgagaaagtctttccacacataatacaaaaaggtaactggatagaggatatctttgcctaagacccctcgaaagattgaaaacattactcttctccccattcaatagaacttggaaagatgtgaaaggcatacactcgtaaacaatactaaggaaatggtcatcaaaacccaaatccctcaaagtgtgaatgacaaaatctcactaaatgctatcatatgccttctctagaacaactttgatcgccataaacccttttctccctttagatcttctcgtcttatggaaaacttcttgagccatattaccattatccctcccttgtctccctagaataaagctg

SEQ ID NO: 6422 - DNA, 348 bp, Glycine max
cgggctcaatttcgagcgtctcgatatattattcgcctgaatctgacatccgtgtgataagttctgaccattataatttgtcgagagcttccgttgttcaatttcatacctctcgatatattatgcgcttgaatcggacctccgtgtgaaaagctatgacatattgaatatctcgcgatcttccattgttcaatttcgagcgtttcgatacatgatgcgcctaaatcggacatctcggagaaaacgtactaacatttgaattcctcgagagctttcgttgttcaatgtcgagcgtctagatatattatgctcctgaatcggactttcgagtgagaagttatgaccatt

SEQ ID NO: 6423 - DNA, 432 bp, Glycine max
  unsure (1)..(432): unsure at all n locations
cccacaaagtattctgtttcaactttcttggctagctaggctctcttaatttgaggcacataagtaaagcgcaaacatccaaatactttaaaaaatttcaagaagggtntataaccataccaagcctcagaaggagtcttctcatctactgctttggtgggaagtctatttaacaaaaatactgcagtgtttgtagctttcgcccaatatgccttaggtaactctttctcatgaaacatacatctgaccatttccaagattgtttgattctttctttcactaaccccatcttgtttagaggtgtaagaagcttgtaattgatgtcaatgtctgcttcctcacaaaacatgatgaggtatgctgaagtgtactccttaccattatcagacctcaaagcttgaatcatgcagccactttgctttttaatccact

SEQ ID NO: 6424 - DNA, 452 bp, Glycine max
  unsure (1)..(452): unsure at all n locations
nntctttgtagttaatggcatggcagcagggttctttgcttgcaagagggtgtgtgaggcaaggagatcccctctcccctcctcttttgattggcagaattagttctcagcagagggatatccaagttaattcagaatggtctcttacctcggaggtcaggaccaaggggctgtctcattcccagtcatgctttttttacagatgatcttatgattttttgccgtggccaaaagaaagggttgatgcatttgatgaccttgctttctcaatatggggaagcttcgggacagtggattagcctggaaaagtgcagatcagattttttcatggcgttctctctcgaaataggatcctctcttatggacatccttggtattggaaagggatctcttccttttcattaccttggtgttcctaatttccaaggtagaccacaggcaagttatcttat

SEQ ID NO: 6425 - DNA, 440 bp, Glycine max
tctcgatatattatgtgcctgaatcggacttctgtttgtattattattaccatttgaatttctcgagagctttggctgttcagtttcgagtgtctcgatatattatgcgcctgaatcggacttttgtgtgacaagttatgaacatttgaatttctcgagacctttcggttttcaatttaaatcgtctcgatatgtgatgcgccagaatcggacttccgcgtgacaagttatgaccattggaatttatcgagagctttcggtgttcaatttcgagggtctcgatatattatgtgcctgaatcggactttcgtgtgacaagttatgaacattggaatttctcgagaccatacgatgttcaatttcgagcgtctcgatatattatgcgcctgaatcggacttctgttagacatgttatgaccttttgaatttctcgagagctt

SEQ ID NO: 6426 - DNA, 423 bp, Glycine max
  unsure (1)..(423): unsure at all n locations
agcnttgtgacgaactatgtatggctttatctttatttttattattnagtatatacaaatgagcttgttgcaattcttctagacttggagtgataacatacaatcctcttgaacccttacctcccactctttcgccatgctaagactccggaacctcaacaagtatgagaaaaaacttagcttttcctttttggataaagtatgagaagctggaggcaagtatattttcttaccatcaaaccttggatgtaactggtctcgtatacccatctcaactagatcttggcgagtattcaaaccatcctttgtcttgccttgaatgttaagaagattgtcgatgacactatcacacacacttttctcaacatgcataacatcaatacaatgtatgacatctagatcgaaccagtatggaagatcaaa

SEQ ID NO: 6427 - DNA, 411 bp, Glycine max
  unsure (1)..(411): unsure at all n locations
agttgctccaacacttaagatacttagctcgctcttcttatccaatcttatgtcggctaaacggacttcatacttgacttgattgttcatcgtcccaaacttgaaccttagggattgctctaggattatttcatttgggctttctaggatgacaccagtcctactccctttntcattggatgaacccatctgcatacaaattccaccactcggattgtagttctgtagttgttgtcaattcgacgatgaagtctgctaagcattgagccttcgttagatcccttggtttgtacttgatcccaaactcgaacaactagaccgactaacatatcattcggtttgcaagttctggtttcatcatgactgttaagatatggtggttggtttaaactatgatttgatgactttgga

SEQ ID NO: 6428 - DNA, 405 bp, Glycine max
  unsure (1)..(405): unsure at all n locations
agcttgcttaagattatatattgtatttctttaattngcacactatgtgtttctttccttcaactaagaatcccattggttggtccatataaacattctcctctaattctccattaagaaaggcattttttgcattcatctgatgtagctccaagtcataatgggctactaatgctatgataatcctgaaagaatcctttagtgagaccgatgaaaacgtctctttataatcaatgccatctttcttagtaaatcccttagcaacaagtctagccttgtaacatttaaggttgtcatgagagtcacatttagtcttgaagacccacttacaaatcttacaactttggtaattctacaaggtcccaaacaccattatgttccatggaatctatctcttctttcatg

SEQ ID NO: 6429 - DNA, 423 bp, Glycine max
  unsure (1)..(423): unsure at all n locations
agctngcagatgagtttattggaagattcanatgttgttggtttaaaaanacnngnanctttgggtaaagatagtgaaaattttgtgaagtgtcaaaaactagacacaatctcgaaaagaaacaatataaattattgtattttcttggtggcttttcttattatttttgtttatttgaaaaaacatgattttaagtcattaattattgtttgtgccttaacattttttaaaatatcattgtcttacactacaaacacgacaaacaatagtgatttttatatcacaatttaactcttaaatcaattacgtttttttatttataaggttcaaacataaaattttacttaagaattgagtctaatgtggatgtttttataagtacatatgttataataatgtaattttttccccttaaatctaatt

SEQ ID NO: 6430 - DNA, 381 bp, Glycine max
  unsure (1)..(381): unsure at all n locations
agctttgagaatttgagaacatgacatttcatttgacagtaatatccaagatatacaaatgggtgttggtcaatgtaccacatttaatagtacaaactaaaagaacaagaaaaacagaccaatttctaggcgtctcagaaaaaactttagacaagacagttcacctaataaggttttggattagtagtaatcatatttgtgtaaataaatagcttaccagagttcattggactccatcgctggaaccgaaaaggagatggtatgttgagaacagaagcaccagaaacactgttatgcctggaaatgggaagatattgcctccggaaaaaccttggcatccaattgccaatacatgataaagcacanagaagaagaataaaa

SEQ ID NO: 6431 - DNA, 407 bp, Glycine max
  unsure (1)..(407): unsure at all n locations
agcttgaaggaaaactngangtcntgttaacctactaacccagcttgccatgattcataaatctacacctgtcgcaagagtctgtggtctatgttcttctgcagatcaccatacagatctttgtccttctttgcagcaatctggaatcaacgagccacctgaagcttatgcggcaaacatttataatagacatcctcagcagcaaaaccaacaacagctgaataattatgacctttgaagcaatacatacaatccatgttggaggaatcatccgaatctgcgatggacatgtcctccacaacaaaaataagccgtccctccttttcagaatgttgctggtccaagcaagccatatgttcctcctccagtacagcagcagcgatcacaactaacacaacaagcagatg

SEQ ID NO: 6432 - DNA, 420 bp, Glycine max
agctttgaggatatcagcatcagtgctatctcttattggaaagtcccaacaagccttgtagatagctaagtgtgccaagggtgctcctcctctggctaaaccagaagcaagtcccctataatttgcatttcctacaaagtaacctgctgctgtggaagctgtgtgagtgccatggccaatggcatctcttgccgagagatattcatcagagttgtttccttggaggagtttcttagtctgatcacttattcctttcatgaaccatctagcacctattatcttcttgttgcaattggtggagttgaagtgctttcccccttgacaaattcctttccaccttgatgggatttgtcccattgcttcatcattgaaacttggtgactctggccaaatgccttcaagaaatcatatttgtcattg

SEQ ID NO: 6433 - DNA, 407 bp, Glycine max
agcttaaatgatagaaatctattacttttttttataataatatcaaccaacatcataagtagcactttgatcttatcttatgaaaataaaatgaatatattttttttatcttatcaccatcttgactcttaagaaacaaaaaaaaaatagattatttaaaaaataatggaataataaaatatgacaaagccttagtaaagatgtatatgacttattgatatgtgcagatgagatgtaaataaacatctttatggaaaactatccttagtaaagttttaagttattattcaaattccttgtgtaatactcttactgtcactatttatttttatttgtataaattgaacataaattacatttgattggaatatgtaataggttgttcatgatagttcttactatgtaaa

SEQ ID NO: 6434 - DNA, 405 bp, Glycine max
  unsure (1)..(405): unsure at all n locations
ttttatgccataatatttgtgttcttccgcatctcttttgacntnttttatcaaacggcaaatgagcaactcacgggagtagtatgcctgtgcagaagaaaaggaaataggaaaaaaaacattgaatacctacataatctattgtgttgttcattactttgttttttaatctgaactctattttattgaactcaaagaccttatttacgtgtataatatatgttttttctttattaacaggtggaactgaaatttcaatatagagcacttctgtttttggcataccagagtttaagctttatgtttggtgacttgaccttatcccctctttatgtctatcaaagtatattntctggaagactgaaaaaggtccaaaatgaggatgcaatatttggcgcattttct

SEQ ID NO: 6435 - DNA, 395 bp, Glycine max
agcttgacagatttctagtatctcacttatggtttgtttaatggcctgacaccacccaatccaccttggataggaatttctctgatcactgccctatcttgctgaggtcaagattcattgactggggacctaaaccttttagggttctggattgctggtttcaggatagctcttttaaaagaattgttcatgactgctggacgtctacgcagattggagggtggggtggttatgtgcttaaagagaagataaaacgcctcaaaagaagattaaaggagtggaataaggagcactttggggacacttttaagaaggtcaagcagattcaagaggagcttagtaggctggaagagaattctattgatagacatctgtctcccttggaggtctcgtat

SEQ ID NO: 6436 - DNA, 425 bp, Glycine max
  unsure (1)..(425): unsure at all n locations
actaagcttatgctganacatctacaacagacctcctcaacctttcatcaaaatcagccacaacagaacaattatgacctctcctgcaacaggtacaatcccgggtggaggaatcatcccaaccttagatggtcgaatccttcacaacagcagcaacaacaacaacaaccttattttcaaaatgttgttggcccaagtagaccatacattcctccaccaatccagcagcaacaacagcaatagccccagaaacagcaaacagttgaggctcctccgtaaccttcccttgaagaacttgtgaggaaaatgacaatacaaaacatgcagtttcaacaagagactagagcctccattcagagcttaactaatcaaatgggacaattggctacacagttaaatcaacaacagtcccagaattctgacag

SEQ ID NO: 6437 - DNA, 419 bp, Glycine max
  unsure (1)..(419): unsure at all n locations
agcttatgagaatttcaagctttatattctatgtatttttaatnnatcatgataaaaagctttcaaaaaggaacttccagcctggtcaataggttttattatttagttatagattaagattgtttcctataagctgaaatccaagtggtctagaccattcatcatcaaagaagttatgccacatggaatggtgatattggaggatccagccaccaaaaggacatggaccgtgaatggtagcagaatcaaacactacttaggtggtgatttcgagaggctaacaactattgtccaactacaagaggcttgaaccacaacaaagacgtccaacttaaaagacattaaagaagtgctcctgggagacaacctagtatttctgaactttgcttttaattttctattttcctaattacatatat

SEQ ID NO: 6438 - DNA, 403 bp, Glycine max
  unsure (1)..(403): unsure at all n locations
agcttcaacatcagaccacttccatgtttntttttctacttcacatggacttgatggggcctatgcaagttgaaagccttggaggaaaaaggtatgcctatgtggttgtggatgatttctccagatttacctgggtcaactttatcagagagaaatcagacacctttgaagtattcaaggagttgagtctaagacttcaaagagaaaaagactgtgtcatcaagagaatcaggagtgaccatggcagagagtttgaaaacagcagagcatatagagtattcaattccagaaccagaactgtgatggaatccatcaatgtggtggttgatgatctaactccagcaagaaagaaggatgtcgaagaagatgtcataacatcgggagacaatgtagcagatacagc

SEQ ID NO: 6439 - DNA, 418 bp, Glycine max
tcttatccaaggcaattcttggtgggaatcttcttcttccttggcttattccctagtggatggtgcctcccctctccccttctcctttgccttccgctgcatctccatggtgtaaaatcaccattgaaggacctcattgaagctcaaagatccagcctccatagaagccccacaagcaagcttccatcaataggttttctaaaatggctcattttattccatgtaaaaaagttgatgatgcttcccatgtggctgatttgtttttcaaggagattgtgagactccatggtttgccaaggagcattgttagtgatagggactctaagttcctaagccatttttggaggactttgtggagcaagttgggcactaaattgttattttcaaccacttgtcacccacaaaccgatgggcaaat

SEQ ID NO: 6440 - DNA, 361 bp, Glycine max
tgaaagacagtaatgaccagaacaaaattgatccatctgacacaacagaacttataatgaacagttacatcatacttcaatagacacaaaccacaaaagcttatcataaagcttggagccatgtgcaggagccccaacggcattaatgaccagccaccaggggttcctctccgcgtagaacggcctgtaactcccctcggagtcaaggttggcgcggaaggggtggtgggcccacttggagtgttcggaggggaccacgtcggtgtgggagtagaggaggatggattctacggttgggtccgggccttcttatttagaaagaccagtggcttccctggaacgaactacatggtttgggatt

SEQ ID NO: 6441 - DNA, 414 bp, Glycine max
  unsure (1)..(414): unsure at all n locations
agcttgtncaagcctttgcattctatttttatcagtatgttntgattggtggaaaatgatggaatatatttttttttttggtttaaaacaaaggtgccaaatttgactagtttgtatgatattattaatttaagaatttaatgtgatattcacttataagataagttatttaatcataaatcattattgatatgattttaaagattgttattataaaagaataaatttatcatatcgtgatttatgatttgatgataatgtaaaattattttacattatcattatataatttttcttctctaactttacatcttaatgcacaaaatggacagaatataattattatcattttcaatttttcaaaacaattttttttttatcatttatatgtattagatgtataaattaagtaac

SEQ ID NO: 6442 - DNA, 396 bp, Glycine max
tctaaactttatacaagaatgaagctctgataccttttgttagacaattggcctcagatatcttaagaaggggggttgaattaagatattgcaaactattttcccaattaaaattctatttcaatttcaatgcaagttacaaattcccttaaaaatgaactcttaaataatgattcaaatcgaacaatctgaatataaatataaagcaataataaataaaagagtttaagggaagagaaagtgcaaactcggatttatattggttcggccacacccttgtgcctacgtccagtccccaagcaacccgcttgagaattccactatcttgtaaaatccttttacaagttctgaacacacaaggacagtccttcctttgtgttcagatttctttacaac

SEQ ID NO: 6443 - DNA, 431 bp, Glycine max
gatcttaagtcaccgcggctgcaagcttgcaattgacattttttctattcatagggacatcaagcgctaaccttttttcactcaactgtaacaatgcttgatgatgataatgcccaagccttttgtgccagatttctgtgtgattctctatgagagagaaaacaacttgctcctccttcaatggatttagagcaaaactttttcctttcatttttaccttgaagatttcttgaccagctacatctttaattaagcaatatttgtcttccaatacaactttaaatcctcgttcaatcaattggccgacacttaataagttttggtcaattttcagaatgaataggacatcagcaatacatcttgtgcctgcagaacttgtgattgcaactgtcccctttcctttgactaggatataatcaccattacaaatt

SEQ ID NO: 6444 - DNA, 408 bp, Glycine max
ttcttgacttcaggtttttggtttatatgatacttgtataaactagactccacatattcctctggtcttattgttaccacatatggcagggctatggctgaattacgggttcttaggctatttggaaatcctcttgagtttcttcctgaaattttgcccctccacaaacttcgacacctttctcttgcaaatattaggatcgtggcagatgaaaatttgagatcagtgaatgtgcaaatagaggtagcactttgtaaactagctagactaccttgctgacattattctttcgaaacatatcacatgctttttctggtcattgcagatggaaaacagttcttatttcggtgcatctaggcataaactcagtgccgtcttctctcttatattccgattttcttcttgtca

SEQ ID NO: 6445 - DNA, 393 bp, Glycine max
gctcagcaatcatatgatcatagtgcatgctaactgtgtttccttctttaattccaatccccactcggacttgcacaatagcagattttgaatatgatagaaagaacgatccacaaattaacatttaagttttatagttattccagaccaactggggaagtttatatacccataactagatcagcctgcttgtcttgcatatatgaccttgccgagtatatctccgaccttgggccgatgtacttatacatgaaaaatgggtaggaagaacctacagatatggagagcaacatcacctgataaaggtatgtgattgactcatcggaagatcttctcccatggtaacaaggatgtgccattcaacacgatactgacccacatttatttctgtaa

SEQ ID NO: 6446 - DNA, 408 bp, Glycine max
  unsure (1)..(408): unsure at all n locations
agcttgtgaaccactcgtaattataatatatcacttggttgtagctaaagcacctagtatatgtagtatatattaaaagataaagggtgagaggaataaatttaaaatataaatatgaataattaagattaaaggttatttaattattacataactactaaaaaaattacaccattttgtattttaattttaatcctttatgattatatatgtatgcgagtaaataattcatatactgatggagcataagatttttattctattattaaatcataaattattatgtataataattttgttaatttttataataattattttaaaaatcaaaattttcataattnttcattaattaacaatattattctatactaatgtgtgtaaaaattaatatctatttctatatat

SEQ ID NO: 6447 - DNA, 421 bp, Glycine max
  unsure (1)..(421): unsure at all n locations
nttcttccttcttatcttcgcaacaagagcagcagctgcgatctccaggttctagtggatcagatggcaccatatcccaatggtcaaatactaactgggggaaagcctttctcccagttttagcccttagtgattcattgaatttagatgactcaataacaggaaaatatgccttgacattgtaaagtggggtgccaggcctctggctttcctcaaacacatgccctcttttctggttaagaacactgtatacaccaccaagagcctgttcaggtgcctgtatttccaccagatacacaggttcaagaagtcttggttttgctgtcagcatggctgcatagcacgctcttctagcagttgaaatgatctgaccacctctctgtgaatggcatcagcatgaagaatcacatcacatatcttg

SEQ ID NO: 6448 - DNA, 415 bp, Glycine max
  unsure (1)..(415): unsure at all n locations
agcttagcaaacatgcttatctattatttgtttcnttttaatatgaacttgactaatttaatttagagtggtgtatttcaatgttcagtatattggttctgttcatatattttacattgtaatatttaaatagttatatgtttgttattgttaaattagacataagtggctgtacatttttgtgtacatatcatatcacgacttttgttattgatgtaccaaatgagttgttactttattgtgattttataattatgtgataatttttcaccagtggtaatgttccattctttataacatgatggagaaaaaattgatattttatgtgataaatgagagggtggctgacatgggtgagttagttattggcactgctgagttcagaatgggaacaaaaggcataatangtcttgct

SEQ ID NO: 6449 - DNA, 414 bp, Glycine max
ttattggcttaacttgagctttaactccttgtttgttccattgccaactatcttaacttctctcacctacctatctcttcaacacaataacctcttgggctctattcctaactcatggggtggtagcttgaaaaataacttctttcggttttgaaaaatgatcatagatcataacttgtcgagtggaagcattcctgcttctttgggtggcttgagtgaactcagagagatttatcttagtcataaccaatttagtggagttatcccaaatgaaataggaaacctttctagacttaaaactctagatttttctaacaacaccttgaatggaagcttgcatgccgctctctctaattttattcaataaatacagatagcaagtacaaaacaaacccatgctatactaccatatgt

SEQ ID NO: 6450 - DNA, 424 bp, Glycine max
agcttcttatccaaggctcatctgtgtgtgattctctttcttccaaggcttattccctagtggatggcgcctcctctctcctcttctcctttgtcttccgctgcatctccatggtggaaaatcaccattaaaggacctcattgaagctcaaagatccagcctccatagaagccccacaagcaagcttccatcaagtgtgtttcatatttcaataacaattgtggattatatggcacaacaaatcgattatcaagttcaataccatttttagcactgtacgcccatcatttcttctcctataaattggaaatccatcttggtcaacaattgttgatccatggaattttttagggaaatatctaatacacttcccattgaccatacacagtgatcttttatttgcaaacccacatggtccatgaat

SEQ ID NO: 6451 - DNA, 419 bp, Glycine max
agcttctaaacttaatacaagaatgttgctctgataccacttgttggacaagtggcctcagatatcttaagaagggggggttgaattaagatattacaacttatttccccaattaaaaattctatttaaccttctattcaagttataaattcccttaataatgaatttcttaaatattgattcaaaaagaacaatttgaatatgaatataaaacaataataaataaaggaatttaagggaagagaaaatgcaaactcagatttatactggttcggccacacccttgtgcctacgtccagtccccaagcaacccgcttgagagttccactatcttgtaaattccttttacaagttctaaacacacaaggacaacccttcctttgtgtttagaattctttcacaacaagagaccctcggtc

SEQ ID NO: 6452 - DNA, 412 bp, Glycine max
agcttattttataaaataaaattaattattgtggattacatagattatggtgcacaaaataaatgagaagtgaatatattttacaatatttaagctttctgtaattaaacgtggccttaattttcaccatacattttggctgtttttttacatgaaagaaaaatttgaatcaaagttgtatgaagaagggttatggcctcttagaacttttactttatcatagattcatagtaataatgcatttggtttattaggctaactcaaatctctaacaaatggccatgcattgaaactgtaggctgatgttgataacagtgggacaattgattacggcgagttccttgctgcaacattgcaccgcaacaaaattgaaagagaagataatctatttgcagccttttcttactttgat

SEQ ID NO: 6453 - DNA, 442 bp, Glycine max
agcttaaggctattacttgacctttatgcataaacactcctccatggttatcaaactctcgagttaactcgctaactcttacgagtttacaaattcaattgtcctctgcgagtcgactcttgagtaaactctttttttagtagactctaggcaaactctataaactctgagtaaactcgttaaactctcgagtttaccaccaagtcaatgagttagcaagttaaaaaaattagaccaaaatgtaagtcattttttattgttttctttctgtatagtattcagcataccttcatttagtgtaatattctcaaatacaaaattctcacctttaataatattaaacctttattctctaataacaacaaactctcgatgagaatgatctaccactactataatctctgcagttattatctagtagtgatatattattactagactt

SEQ ID NO: 6454 - DNA, 440 bp, Glycine max
tcaacctagaggagacggaccattccaagtgttggagaagatcaacgacaatgcctacaagattgacttgcctagtgagtataatgtaagtgccactttcaatgtgtctgatctatctctttttgatgcagatggaggagccttggatttgaggacaaatccttttcaagaaggagggagtgatgaggacataaccaaggaccatgaagcacttgaaggtcccatgaccagaggcagacttaaacaagcccaacacgtcatagagacaaggctggtcatttgtatagctgccattgatgatgattgaaggcccaagtgcataaagatgaaggcccagaggcagaggcactaccaagactactaattgttgctgaaggcccaaactaacttgaaggaccaagttaaatagagtcttagttataatttatctttattgtaat

SEQ ID NO: 6455 - DNA, 479 bp, Glycine max
  unsure (1)..(479): unsure at all n locations
taggaccttgaaactaagcttgaccctaaataagacccagaggaataccgaanaagtagtaacaagcaatattcacgtaagcaaccacagcctgccaccctgcgccaacagcaacacctgagagaacgggttgcacgttgttgatgacaatgcaaagggccaacatgggcgtgagctctaccacaatctttctcacttctgaatcatttgaaaacaagaaagggtactggttccggaagattatcagcaccatcgagagcatgacaccgatcagagttgaagtaatcacagcaacaagaagtgaaaactttgctgttcttgggtgacatgctcctagttcatttgacaccctcacactgcaaatgtaattnttggtcactgactgatttangtaaatcattcacagtttaatggttatgcacaataacgtacaacagtctatactattgttaactaataataaatcattgataatataa

SEQ ID NO: 6456 - DNA, 419 bp, Glycine max
agctttacattactcctcatgcttctcaccatgtctaataatgttcgatttcttcgttctgccacaccattctgatccggagaaccaggcatagtgtattgggcaacaatcccatgttcttgaagaaatttcgcaaatgaacctggtgcttgtccatcctctgtgtatctaccatagtactccccacctctatctgatctcacgatcttaatttgtgttccacattgtttctcaacttcagccttaaaaactttaaaggcatctaaagcttcattcttagaatgaagtaagtatagatacatatatcatgaataatcatctataaaggttatgaagtatttcggactattagcatccatgtctggacaacatatgttggtatgtatgagttctaataaaatagaacttctctttgcacc

SEQ ID NO: 6457 - DNA, 419 bp, Glycine max
agcttgctcgtcttgctgatatttatcatgcatacttttctgatgatgaccgaggaacaattagggatcaacttgaaacttatgtgcttcaagtgagaagaaatgcttctttttccacttgtgaagatgttcaaagtttggctatgaagatggttcaaactgagaaacatttggtatttccattggtttataaacttattgagctagctttgatattgccggtgtcgacagcatccgttgaaagagctttttcagcaatgaagattatcaagtctaaattgcgcaataagatcaacgatgtgtggttcaatgacttgatggtatgttacaccgagcgggagatattcaagtcacttgatgatatcgatattattcgaacattaaccgcaaagaagtctctgaacggacacttgtcttgt

SEQ ID NO: 6458 - DNA, 450 bp, Glycine max
  unsure (1)..(450): unsure at all n locations
ctntattttcagtagatgaagatgaatccgtggccacctcatggactcctctaaggacaatagcatcatttcttgcactgaattgttgggagttagaagccatcttctgaatcaaattcctagcctcagtaggggtcatatcaccaagagctccaccactggcagcattaatcatactcctctccaggttgctaagtccctcatagaaatattgaaaaaggagttgctcaaaaatctggtggtgagggtagctcgcacacaatttcttgaatctttcctagtactcatacaagttttctccactaagttgcctaatgcctgaaatgtcttttctgatggcagtggtcctagatgcagggaagaatttctccaagaacaccctcttaaggtcatcccagctgaaaatagacctgcgagcaaggtagtatagccaatcttttgccactccct

SEQ ID NO: 6459 - DNA, 435 bp, Glycine max
  unsure (1)..(435): unsure at all n locations
agcttcttcacatagtccgcctttgcttgatcttctttatgcttaaaaacagaaacattatgcttatgcaaaagatcaagaggagttagtgggttaaaaccataaacaacttcaaaaggagaacaattagtggtgctatgaacagctctattgtaagcaaactcaacatggggtaaacaagcttccctaagttttaagttcttcctcaaaactgtcctaagcaaagttcccaatgtcctattaacaactattttttgcccatcggtttatgggtgacaagtggttgaaaataaaaatttagtgttcaacttgccccacaaagtcctccaaaaatggcttatgaacttatagtccctatcactagcaatgctccttggcanaccatggagtctcataatcttctttgaaaacaaatcattcacatgggaagcatca

SEQ ID NO: 6460 - DNA, 433 bp, Glycine max
  unsure (1)..(433): unsure at all n locations
agcttaagctccttcaactgcacaatgctcttaatatttgaagagtatccttgtggaaccttcacccgacgaagacactgacaaaaacttatcttctcattcttggacaaagtatggcaggctgggggcaagtaaattttcttcccatcagaccttggatgcaactgtgattgtatacccatatcatctagatcttgacgggtattcaagccatccgtcgtcttgccttgaatgttaaggagcgtcccaatcacactcacaaacatttttctccacatgcataacatcaatacaatgtctaacgtcaagatcacaccagtacggaagatcaaagaanatggacctcttcttccatatgcaactctgacttttaatccttttttgggtcttcccaaatacagtattcaggtgttgaacccgctgatatacctac

SEQ ID NO: 6461 - DNA, 427 bp, Glycine max
agcttccgttattcaatttctagcgtctcgatatattatttcaccgaatcagacatccgagtgaaatgttatgaccattcgaatttgtcgagagcttcttttgtttaatttcgagcgtctagatgagttatgtcaccgaatcggacatctgtgtgaagagttatgaccattcgaatttctcgacatcttccgttgttcaatttcaagcgtctcgatatattatgtccccgaatctgtcttctttgtgaaaagtttggaccattcgaatttctggacaacttccgttgttcaatttcgagcgtctcgatatattatgtccccgaatcggacatttgtgtgaaaagttatgaccattgaaatttgttgagagcttccgttgttcaatttcaagcgtctcgatatattatgtcccctaatcagacatccg

SEQ ID NO: 6462 - DNA, 397 bp, Glycine max
agcttcaatggcttattgaggatggagaggtgcaagttatgaagcaagtagagttggatatttccattggaaagtacaatgataaggtgctttgtgatgttgatcctatggagcccacccacttactcttggggagaccatggcaatttgataagagagctaatcatgatggtttcaccaacaagatctctttcacatatcaaggcaaaaagatagtgctcataccattgagtccacaagaagtgtgtgaggatcaaagaaaaatgatagagaaaattcttcaagataagagagaaatagatttagagagcccaacacttgagagttcacaaagtaaggacaaaaagagggaaacacaagagaggaaaaagatgagtgaaacacttgaagtgaggga

SEQ ID NO: 6463 - DNA, 344 bp, Glycine max
  unsure (1)..(344): unsure at all n locations
actcagcttgaattgaacacggatgctctcgaganaatcaagtggtcttaccttgccacacagatgtacgagtcggggaaataatatatcgagacgcacgaaattgaacaacggatgctctcgagatatttgaatggtcataacatttcactctgatgttcgatccggggacataacttatcgagacgctcgaaattgaacaaccgaagctcatcacaaattagaatggtcgaaactttccacgcgaatgttcgattcggggacataactcatctagacgctcgaaattgaacaacggaagctctttataaattagaatggtcataagttctcacaccgatgtt

SEQ ID NO: 6464 - DNA, 383 bp, Glycine max
agcttgccgccacggagttttccgactatgctcttgtgtggtggaacaagctacaaaaggagagagcaagaaatgaagagccaatggttgatacatggacggagatgaaaaagatcatgaggaagcggtatgttccggctagttactcaagggacttgaaattcaagctccaaaaactaacccaaggcaacaagggggttgaggagtatttcaaggaaatggatgtgctcatgattcaagcaaatattgaagaagatgaggaggtaactatggctcgatttcttaatggtttgactaatgatatccgtgatattgttgagctgcaagagtttgttgaaatggatgatttgcttcacaaagcaatccatgtggagcaacaatta

SEQ ID NO: 6465 - DNA, 430 bp, Glycine max
agcttgactcttacgagtcagtttagttaaaggtaaagccaacttggagaaaccttctatgaatctccggtaatatcctgctaaacctacaaaactcttaatctcaaaaacagacttaggactctcccacttaagaacagcttctatcttagagggatccacagctatacccccttgagatatcacatgccctaggaaactaactttctctaaccagaactcacacttggacaacttagcatagagttgtcggtccttaagggtatgcaacacaatcctcaaatgttcttcatgctcctctctagtcttggagtataccaaaatatcatctataaatactaccacacaattatcaaggtaagggtaaaaaactctattcatgtagtccataaacactcctggagcattagtcacaccaaaaggcatgact

SEQ ID NO: 6466 - DNA, 452 bp, Glycine max
tctatagaaggttcgttcctaatttctctacaattgcatcacctctcaatgagttggcgaagaagaatgtggcatttacctgaggtgaaaaacaagagcaaacctttgctttgctcaaagaaaagcttactaaggcacctgttctagctcttcctaacttttctaaaacttttgagctagaatgtgatgcctctggagtgggagttggagctgtattgttacaaggtgggcaccctattgcttattttagtgaaaaacttcatagtgtcacccttaactaccccacctatgataaagagctttatgccttaatacgagccctccaaacttgggaatattaccttgtttccaaggaatttgtcattcatagtgatcatcaatcacttaagtacattacagggcaaagcaagttaaacaaaaggcatgcaaaatgggttgagtacctacagcaa

SEQ ID NO: 6467 - DNA, 435 bp, Glycine max
agcttcaagaaaaatggcctcagcaaacttcttatttccagaaggaaattcaatcaatagacctccaatctttaatggagagggttaccactaccggaaaacccaaatgcaaatttttattgaggcaatagacttaaatatttgggaagccatagaaatagggccttatatacccaccacagtagaaagaattgcaatagatggaagcacatcaagtgaaagcataacaatagaaaaacctagagatagatggtctgaagaggatagaagacgagtacaatacaattgaaaagccaaaaacataataacatctgccctgtgaatggatgaatatttcagggtttcaaattgtaatagtgctaaggaaatgtgggacactctacaattaacacatgaaggaactacagatgttataagatctaggataaacacatt

SEQ ID NO: 6468 - DNA, 429 bp, Glycine max
  unsure (1)..(429): unsure at all n locations
ntgagcanattcaaacgtcaataactntttactcggatgtctgattgagtcccgtaatatatcgagacgctcgaaatggaataccgaagctctgagaaaattcaaatgacaataactttttactcggatgtctgattcagtcccgtaatatatcgagacgctcgaaattgaataccgaagctctgaacaaattcaaacgacaatcacttttttactcggatgtctgatgatgtcccgtaatatatcgagacgatcgaaatggtatactgaatctctgagcaaattcaaacgacaataacattttactcggatgtctgattgagtcccggaatatgtcgagacgctcgaaattgaagaccgaagctctgagcaaattataacgacaataactttttactcggatgtctgactgactccggtaatatatcg

SEQ ID NO: 6469 - DNA, 416 bp, Glycine max
agcttctcgacatattacgggactcaatcagacatccgagtaaaaaagtgattgtcgtttgaatttgctcatagcttcaacattcaattttgagcgttttgatatattacgatactcaatcggacatccgagtaaaaagttattgtcgtttgaatttgctcagagcttcggcattcaagtccgagcctctcgatatactacgggactcaatcagacctccgagtaaagggttattgtcgtttgaatttgctcagagcttcgacattcaagtccgagcgtctcgatatattacgggactcaatcagacatccgagtaaaaagttattgtcgtttgaatttgttcagagcttcaacattcaatttcgagcgtctcgatatattacgggacccaatcagacattcgagttaaaagttat

SEQ ID NO: 6470 - DNA, 424 bp, Glycine max
  unsure (1)..(424): unsure at all n locations
tgccgccacggagtnttccgactatgctcttatgtggtggaacaagctacaaaaggagagagcaagaaatgaagagccaatggttgatacatggacggagatgaaaaagatcatgaggaagcggtatgtgccggctagttactcaagggacttgaaattcaagctccaaaaactaacccaaggcaacaagggggttgaggagtatttcaaggaaatggatgtgctcatgattcaagcaaatattgaagaagatgaggaggtaactatggctcgatttcttaatggtttgactaatgatatccgtgatattgttgagctgcaggagtttgttgaaatggatgatttgcttcacaaagcaatccaagtggagcaacaattaataaggaagggagtggctaagaggagttttaccaactttggttct

SEQ ID NO: 6471 - DNA, 352 bp, Glycine max
agcttctagatgagttatgtctgcgaatcggacatcctgtgaaaagttatgaccatttgaatttctcgagtgcttccgttgtttaatatcaagcgtctcgatattttatgtcctctaatcagacatcggagcgaaatgttatgaccattcgaatttgtcgagagcttccgttgttcaatttcgagcgtctagatgagttatgtcaccgaatcagacatctgagtgaaatgttatgaccattcgaatgtgtcgagagcttccgttgttcaatctcgagcgtctagatgagttaggtcaccgaatcggacatccgtgtaaaaagttatgaccattctgctctgtcgagagcttc

SEQ ID NO: 6472 - DNA, 447 bp, Glycine max
tcgatatcttgacttgagcgccaatatatttcttggagaatgcatgtcaattccttctttcctcgggacaatgacttccttgactcacctcgacctctctggtactggattcatggggaagattccatctcagatttggaatctctccaatttggtgtatcttcgcctgacgtatgccgccaatggaacaattccatctcagatttggaatctctccaatttggtgtatcttggccttggaggtgattctgttgtcaaacctctgcttgctgaaaatgtagaatggctatcaagtatgtggaagctcgaatatcttcatttgaggtatgcagacctatccaaagcatttcattggctacacactctccaatctcttccttctttgacccacctatctttgtcacaatgcacacttcctcactataatgaaccatccttgctcaactt

SEQ ID NO: 6473 - DNA, 423 bp, Glycine max
  unsure (1)..(423): unsure at all n locations
agcttataaagaaggttntagagggtggtgttagaaagtctcacatcgcctgcctcgatccttaaggtgtaggtttatatatctattggacaacttcacttaatattaattgattttaagttaaaatctaacatggtatgagagnttatagtccgtcttaattttcttaattgaccagatgggattggcttatcctgagagattagttcttgcttttagttttgttatccttctctttacttaccaaaaaacaaaagttctcttgctatcttttataacaagtattgaataaaaagtaaatacatgtaatgtcttgaaaatgtaaaacacattaattacttgtcataaaaagaataatagaacgatatatgtaatgtaagagacttttataagaggaaacaccttttttgttcttaaatataa

SEQ ID NO: 6474 - DNA, 426 bp, Glycine max
  unsure (1)..(426): unsure at all n locations
agcnttttcaaatttgttgcaggaacaattcgttttaaagctctccaagtgtacatttgcgcagcctcaggttgaatacctgngtcatgttgtatcagcacagggtgtggaaccagtcatggccaaggtccangctatacagcaatggctggaaccgcattcggggcgcgcactcaggagttttttgggtcttgctggtttttatagacgcttcattcgcggctatgcaaccatcgcagctcctttgaccaaattggtcacggcggaaccttttcagtggaccgacaaagctcgtgctgccttcactcacctcaagcaagtgttgacctccactcctgtcttgcggttgccggatatctctcttcccttcacggtggagacggatgcttctggaacaagcatgggagtcgtgttgacccaacaggg

SEQ ID NO: 6475 - DNA, 420 bp, Glycine max
  unsure (1)..(420): unsure at all n locations
agcnttgcgtctacaaatgtcatgtcctccccttggcctttttccatgtgggggatagatgtcataggtgccatcgaacccaaggctttgaacgatcatcgcttcattctcgtggcaatagattatttcaccaaatgggttgaagcggcttcctacaccaatgtcatgaggagtgtagtggtcagattcataaagagggagctgatttgtcggtatggactccctacgaagatcattactaacaatggcaccaatctgaataacaagatgacgtaggaaatgtgtgcggatttcaaaatccagcatcacaattccacgccctaccgaccaaagatgaacggagccatggaagcagccaataagaatattaagaaaattatttagaagatgacagtatcatacaaagatnggcatgagatg

SEQ ID NO: 6476 - DNA, 339 bp, Glycine max
  unsure (1)..(339): unsure at all n locations
tctggtttcaatttgagtgtctagatatattacgggtatcaatcggacatccgagcaaaaagttattgtcatttgaattttgtgagagcttctgtattcaattntgagcatgaagaattattaaatgactcaatcggacatccgagtaaaaagttattgtcgtttgaatttgctgacagcttcagtattcaatttcgagagtcttaaattattaaatgactcaatcggacatccgagtcataagttattgccgtttgaatttgcttaaagcttttattatgaatttcgagcgtcttgatatattattggacttaatcagacatccgagtaaaaagttat

SEQ ID NO: 6477 - DNA, 432 bp, Glycine max
  unsure (1)..(432): unsure at all n locations
agctntaagcaaattcaaatgacnaataactttgactcggatgtccgattgagtcatttaataattcttgacgctagaaattgaatacagaagctctcaccaaatttaaatgacaataactttttactcagaagtctgattgtgtcccgtaatatatctagatgctcaaaattgaaaacagaagctctgagcaaattcaaacgacaatagcttttgactcggatatccgattgagtcatttaataattcgagacgctcaaanatgaatacagaagctctaagcaaattcaaatgacnaataactttgactcgaatgtccgattgagtcattttataatttgagacgctcaaaattgaatgcaggagctctcaccaaatttacatgacnaataacttttactcagaagtctaattgtgttctgtaaatatcta

SEQ ID NO: 6478 - DNA, 352 bp, Glycine max
tagagctaattcaaacgacaataactttatactcggatgtctgattgagtcccgaaatatatcgaggcgctcgaaattgaatgttgaagctctgagcaaattcaaacgacgatatctttttacacggatgtctgatcgagtcccgtaatatatcgagacgctcgatattgaattctgaacctctgagctaattcaaacgacaataactttttactcggatgtttgattgagtcccgtaatatatcgagacactcgaaatggaatgttgaagctctgaggatcttcaaacgataataaccttttattcggatgtctgattgagtcccgcaatatatcgagactctcgaaattg

SEQ ID NO: 6479 - DNA, 345 bp, Glycine max
  unsure (1)..(345): unsure at all n locations
agcttcaacattgaatntagagcgtctcgatatattacctgactcaatcagacatacaagtaaaaagttattatcgtttgaaaatcctcagagcttctgtattcaatttcgagcgtctcgatatattacgggactcaatcagacatccgtgtaaaaagttattgtcgtttgaattagctctgacgttcagaattcaatttcgagcgtctcaatagattacgggactcaatcagacatccgagcaaaaagttattgtcgcttgaattagctcagagcttcacaattcaatttcgatcgtctcaatatattacatgactcaatcacacattcgagtaaaaacgttat

SEQ ID NO: 6480 - DNA, 442 bp, Glycine max
tattaggacctatgaaactcagcttgcatactattgtttgataaaacaaaaagaggatggtaagccttggtatttcgatatcaaacgatacatcaaggacaaggaatacccgcctgaggcctctaacaatgacaagaggacattacagaggttggcagccagtttcctcctgagtagggatgtcctatataaaagaaaccatgatatggtattgcttcggtgtgtgaatgcaaatgaggctgggcagatactaacagaggtgcatgaagggtcatttggcacccatgccaatggacatgccatggcccaaaagattatgagagttggatattactagatcaccatagagaatgattgttgtgttcacgtaaggaaatgccacaagtgccaaacctttgtggataatgttaatgctccacccgtaccggtgaatgtgttgtca

SEQ ID NO: 6481 - DNA, 419 bp, Glycine max
  unsure (1)..(419): unsure at all n locations
agcttggcggcttcttccaaaggtgatctcgtatggtgaaatgccggtggctaaatgggtagaagtgttgtatgaccattctgcccaaatcaagaaacaatcccatgtggatggtctctagtgtacaaaagctctcaagtattgctcgatgatgcgattcatggcttccgtcgggccgtcggacagaggatggtacgctgagctcatacagagcttggtgccgctcaatttaaataattcttgccaaaagtgactgataaacagtgggtccctgtttgagaccagacttcagggcatgctgtggagcttgctagaaatctccatgaataaccttgccatacttgaagctgtatgatgttgtggtagtgtacctangtggactccctttgaaaagcgatccacaatgactaanataactg

SEQ ID NO: 6482 - DNA, 441 bp, Glycine max
  unsure (1)..(441): unsure at all n locations
agctttaaagtgaattgtggtcatatcaaaacaatctcttcttaacattaatcattagaagaccggttgatgttattttaaataggtttaattgatataatgctcctaattaattatgcattgcgatgtttggttactttaatacttattgtacttggtagtcaatctcaatgttctttctttcttggtaatgcatcactattctattgcttacagaatctcntaatttttggcagcaacaatgtcaaaaattattaaagagatgttacccccagatgtacgtgttgcaagagatgcccaagatctattgattgagtgttgtgtaggtcagaattatgtttccattatatttgatatgttgccttaattgttatatttgaagctatatntatggtctaaattcaagtgtgcatcttagtcgtgcacaaaattgatgatttt

SEQ ID NO: 6483 - DNA, 414 bp, Glycine max
agcttctgtccctgagaaactggttcccagaatacaacagggagtgaagattgctgaaaaccctatccttgctacaagtcctagggaagtagacacggagatggacaagaaaatccgcagtattgtgagtagcatttagaaagacgcctctgttcctgatgctgagaaagatgttccaacatcctccaccccagatgttgttgtccctgaagctgatgaagatgtcccaacatcttccaccccgaatgtttctgtgcctgatgttgagaaagatgttccaacatcttccggcccaaatgctgaagtactctcttcccccagcaaagagagatcaacagaggaagatgatcaagccacagaggagactcctgcaccacgggcaccagaacctgctccaggtgacctcattgatct

SEQ ID NO: 6484 - DNA, 417 bp, Glycine max
tctatagaaggttcgttcctaatttctctacaattgcctcacctctcaatgagctggtgaagaagaatgaggcatttacttggggtgaaagacaagagcaagcctttgctttactcaaagaaaagcttactaaggcacctgttctagctcttcctgacttttctaaaactttcgagctagaatgtgatgcctctatagtgagaattggagctgtattgttacatggttggcaccctattgcttattttagtgaataacttcatggtgccaccctcaactacactacctatgataaagagttttatgccttaataagagccctccaaacttgggaaaattaacttgtctccaacgaatatgtcattcatagtgatcatgaatcaacttaagtacattagagggcaaaacaagttaaac

SEQ ID NO: 6485 - DNA, 473 bp, Glycine max
  unsure (1)..(473): unsure at all n locations
gacctataaaactcagcttctttaaaaacttattgaaataagctaaaaagaacttgtatgaaggtcataagtcatttatatatatccaaatcagcttcattgaagctctacccaaaccccccctagataattaatctaatttgtacagaggaatgaagtacctttgccctgtgttgtaaaagcaaacttgtttcaacactctcacacattccagaggtgctacttgtttccttctgccgtgagctaacctataaatagagatactacaaaaaccataaaatacaatgcaaacacttacattgttataccaatgttgcataaacttaaccataaatgatatggacaaacaaaatatagagttctttgatggagtaaaaacaagtgacagatttcaagcatacggagttctatgatctgaagaanacacatattccaattgataatatgattattatcaggttggctcatgacta

SEQ ID NO: 6486 - DNA, 436 bp, Glycine max
agcttctgccatggtatctaatcgagggggactagctggaagacgaggtcgccctcaatgttcttactgtaagagagtgagccacacacaaaacacttgttattgtattcacggattctccgaataatcggtgaatatttcaaagtctgaaacatctaagataaagttttcgaaggctaactatgaagagtatctccacccaaaagctgccaataaatctctaacatcatctactataagtggtcataactccactgcctgcatttcccaatctggtaataatcaaagtccatggataattgattcaggtgcttctgatcatattgctggtaatagttctttattttcattcctctctccttctaaaattcctcatttcattattttaaccgatggttctagagtgcagcaacaagaatcgccatgtatcactcac

SEQ ID NO: 6487 - DNA, 381 bp, Glycine max
  unsure (1)..(381): unsure at all n locations
ctttcttctggntgttctgctaagatttccaagcgttaaacagaacgagaagggattggaacctcacatttactatctttgtgcgagacaaatttctcttgttaaaaaattatttcacaaatcccaacgttatggatgtgggaaaatgtgttccacacttggtgatcaaatttctcgacgatccaacgattaatgattttaagatcataattttattggaacaggtttaggtgtatgaggttaaaagaaagctccgtgcgagggacatttctctccccacagacattatttcataaatcccaatggtagagatgtacgaaataagtttcaaacctagtgttcaaatttcacgataattcaacgattaacgagtccaagatc

SEQ ID NO: 6488 - DNA, 417 bp, Glycine max
agcttgtgataaaatctagagagatatcattctatacgacttctaggatcggaatatgttgcagcaaccccgctggagacaacacctggtacttgttatgttgataaacgtcacattggcggatgtactccattataatagctttcattctcttccaaaagaagctggaagacaaccgcttatacgtcttcgtgaatcccgaatggccacctgtaaccgtgtcgtgaaattcggccatcaaagtaggttaggcaacatcaaacagctcttgaagaataggaaaccatcgtgcagagtatagtgtggcagagaatcataatcagattgcaattgggagctcaacttgaccaactcaaggtcattttgcacttcgttcttgatagcagggaaatccacccaataaggactaatggagat

SEQ ID NO: 6489 - DNA, 432 bp, Glycine max
agcttgtaatcgattacacacatactgtaatcgattaccataggagattttcagaaaatattctcaacagtcacatctttttgtgtggttcttgaatggctatcaaaggcctatatatatgtgacttgagacacgaatttgacaagagtttttcagaacaaaaaggtcttatgctcttagaaagaaaaataattttatcctcttacaaattccttggccaaaactcttgtgattcaataaggaattatttgagtgctcaaattgttcaatctatctttttatagagagatttcttcttctcttcttcttcattctgaaaagggattaagagaccgagggtctcttgttatgaaaggattctaaacacaaaggaaggattgtccttgtgtgtttagaacttgtaaaacgaatttacaagatagtggaacactc

SEQ ID NO: 6490 - DNA, 455 bp, Glycine max
  unsure (1)..(455): unsure at all n locations
tgcttctacactgctggtatgttgccccagtgttcttgagcccaaaggacatcaccgtatagcagaaaggtgcccacagagtgatgaaggttgtantttccatatcctctagtgccatctttatctaattatagtctgaaaacccatccatgaaagaaaaacagggcaaaattggtcgtgttatctacgagcacatcgatgtgtggtaaaggaaagttatcctttggactgactcagtctaaatcctgatagtccacacacattcgtaccttcccatccgttttatggactggcacgatattggtgacccattccgagtactgagcaacggccaagaagccaacattgaattgcttcttcacctcttcttttattttcagcgacatctcgagcttcattctcctcatgctttgctttaccggggagcactcgggattcagaggtagtttgtgcta

SEQ ID NO: 6491 - DNA, 367 bp, Glycine max
tcaacattcaatatcgagcgtttcgatatattactggactgaatcatacatccgagtaaatagtctactgtagtttgaagttgctcagagcttcaacattcaatatcgagcgtttcgatatattacgggactgaatcagacatccgagtaagaagttattgtcgtctgaattatctcagagcttcggtattcccactcgagcgtctcgatatattacgggactcaatcagacatccgagtcaaaagttattggcagttgaatttgctcaaagcctcgacatgcaatagcgagcgtgttgaattactacgggactcaatcagacatccgacgcaaaggttatctgtcgttctgatttgctcagagctt

SEQ ID NO: 6492 - DNA, 371 bp, Glycine max
  unsure (1)..(371): unsure at all n locations
agctntgagcaacttcaaacaacaacaactttttactcggatgtctgattgagacccgtaatatatccagacgctcgaaattgaataccgaagctctgagaaaactcaaacgacaataactttttactcggatgtctaattgagtcccgtaatatgtcgagacgctcgaaattgaataccgaagctctgagcaaattcaaacgacaataacttcttactcggatgtctgactgagtcccgtaatatattgagacgctcgagattgattatcgaagctctaagcaagttaaaacgataataactatttactctgatgtctgattgaatcccgtaatatatcgagacgctcgaaatgcaataccgaagctcta

SEQ ID NO: 6493 - DNA, 365 bp, Glycine max
  unsure (1)..(365): unsure at all n locations
ttcaccctctaatgggtctcttcctagccttgtgtctttctctcgcacttgccatgattctctctttgtatggcacccaatatggggtgcanagtggtggttatgtgaaatctgacatgggttttgatgattaccctgtttccaagcttcaaaaccttgtgatggttgctgggcattccatttacactattagtagttgcggcaaaattgataaagaggattcttggtttttggagtcttatcagaagaatccaggccaagctgccacttttgtgacacacattcatgaggggattgagattgtggcaagggatgaatctgctttgctgctcttcaatgggggagagactccgagagatgctggc

SEQ ID NO: 6494 - DNA, 332 bp, Glycine max
  unsure (1)..(332): unsure at all n locations
agcttggctttatttnccttattattcatattntccttaattattttcctttccttaattattcatattttcctcacttagttttcttcccttaattaatcctgttttcctcaattagctctgttttccttaattagttcgctttcttgactttattttaatcactaagcatcataaattcattacttttaatattctctacacaaaacttaaatgatattaaagtgataattattttctccaaaaggaaaaattatgagaaaattttttcaaaattctatttaattaacccccacatttattctttattaacaggtatcatcacccctctt

SEQ ID NO: 6495 - DNA, 360 bp, Glycine max
  unsure (1)..(360): unsure at all n locations
tattttcattaatataatctnttatatttaatttaaaggataattataaacattaagaatttatatatgagaaatgatgactataaatatagataattagttgaacctaacaattttaaggatgctataaaaaaaagggagggatgtgtgtggagaaaagtaaccaagaagaattaaaaacaattgaaagaatcaaattcccaaaattataattggttaaataatcaattaatgaataagtaaccaacatgtgattagacacaaatgattaatatgttaaaattaaagttaaattatttgaataatatttaagtttgatatattctaaataaaaaaaaattattaggttttttatttgta

SEQ ID NO: 6496 - DNA, 366 bp, Glycine max
taagcggtgatcaaacttgctctttggaacaatctttatgaacatatcagcaggattgtgtagagtgctaatcttatgaactttgattcttctttctaaccgaatgaagtgatatctaacatctatatgcttggttctatcatgatgaacttgatccttggccaagcatatagcactaaggctgtcacagtagatgttagcatattcttgattaattccgagatcatttatcagacctctaagccaaattccttcctttgcagctttagtaagagccatatatttagcctcagtagttgagagagcaaccgaaggttgaagtgttaccttccaactcaccaagcagccaccaagggtgtaagcata

SEQ ID NO: 6497 - DNA, 363 bp, Glycine max
tgtatgaagagagagattcttctcatgaaactgaactcatttatctatgtctttaaaactgcacaggttagtatcaagttcaacccagctaagtgacacccgaatacttcaaccagttactttgatcttacttgtttccttttctcattttgcagcttacaatcacagctatcataacaatgacagtcttcatacgtactcagcggactgtggacttgataggtgcaaactatttattgggttcattgtactatactcttgtccgcctcatgactaatggagttgcagagttgatcatgactattactagactccctgttgttgataagcagaaggaattctatctctatccagcttgggctt

SEQ ID NO: 6498 - DNA, 368 bp, Glycine max
tgaaggtgtgtagcccaccatcttttcatagtttatttctggtaatgtgtctactatcattgtcatcatttttttctccgtcatggaggtgccacttgagctgccaggtctctccacctttgggcgtattcttttgaaagattcgtgccccctttttgcacatgttctgtagttgcatcctatccgaagacattatactgacactgcctaacgaaggcaaccactaggtccttccaagaatggactcgggaaggttccaagttagtgtaccaggtaacagctacccgagtaagactttcttggaaggaatgtatcagcaattcctcatcttttgcgtatgcccccatctttcgataatacatctttag

SEQ ID NO: 6499 - DNA, 267 bp, Glycine max
agcttgaaggcaaactggatgctttgttcaacttggtaacccagctggccttgaatcagaaatctgtacctgtcgcaagggtttgtggtttgtgctcctctgctgaccaccatacagacctttgcccttccatgcagcaacctggagcaattgagcagcctgaagcttatgctgcaaatatttacaatagacctcctcaacctcagcagcaaaatcaaccacagcagaacaaatatgaccttttcagcaacaaatacaaccctggat

SEQ ID NO: 6500 - DNA, 371 bp, Glycine max
agcttcgcacttgataatgcagttacttgaacagcgctaggcaatgacattcatggtgctccaagcaaaggtggagtatggaggattgccttgagagtccacacttaggcaatcatgaaactcaactccaaactcgaaagtgaaggacacatgaacaaccctaagcaagaacattcaaggggctccggaaaaggaccgagaatggaggattgccttgagggtcctctcttaggcaatcatggaacacaactccaaactcaaaagtggaggacacatgaacagccctaaacaataacattcatgtggcttcggaaaaggatgagaatggacgattgccttgagggtcctctcttatgcaatcatggaacaca

SEQ ID NO: 6501 - DNA, 366 bp, Glycine max
taagctccttcaactgcacaaggctcttaatatttgttgtttatccttgaggaaccttcactcgacgaagacactgacaaaaacttatcttctcattcttggacaaagtatggcaggctgggggcaagtaaattttcttcccatcagaccttggatgcaactgtgatcgtatacccatatcagctagatcttgacgggtattcaagccatccttcgtcttgccttgaatgttaaggagcgtcccaatcacactatcacaaacatttttctccacacgcataacatcaatacaatgtctaacgtcaagatcacaccagtacggaagatcaaagaaaatggaccagttcttccatatgcaactctgac

SEQ ID NO: 6502 - DNA, 366 bp, Glycine max
tcttagtttaagctgatgaagatgaattcgttgtttctttatgcactcctctaatgacaatagcatcatttctggcactaaattactgggagttggaagtcatcttctcaattaaattcttggcttcagcaggggtcatgtctccaagggctccaccactggcagcatctatcatacttctctccatgttactgagtccttcataaaaatattggagaagaagctgctcagaaatctggtggtgagggcaactggcgcatagttttttaaatctctctcaatattcatataggctctctccactgagttgcctaatgcctgaaatatcctttctgatggtcatggtcctggaggcagggaattttt

SEQ ID NO: 6503 - DNA, 369 bp, Glycine max
  unsure (1)..(369): unsure at all n locations
agcttagcagaggatagggaagttctccttagcagatgactggcggtagggctgtagccgaagcaggacccaatctcctacttgataatgcatctcgcgatgtttgtgatctggttgtttcttcatgaggtcctgngctttgagcagcttcttgtgaatagtttgaaaggttgcatctctgtcagtcaagaggctctcgacagcttcgatatttgatgtgctggagatatactcagggaaattgaatggtttccggccaaatgtcacctcgtagggagttgtacccgttcccgcgttccacgaggtgttgtgtgaccattctatccatggaaggaacttgccccacctattgggtcaccggtgaacaaa

SEQ ID NO: 6504 - DNA, 355 bp, Glycine max
tcagaattcaatttcgatcgtctcgatattttttatttctcaatcagacatctgaggaaaaaagttattgtcgtttgaatttgctgagagcttcaacattcaattttgagcgtctcgatgtattacaggacttaatcagacatccgagttaaaagttattgttgtttgaatttgctgagagcttcaacattcaatttcgagcgtctcgatattttacgggactcaatcagacatccgagttaaaagttattgttgtttgaatttgctgagagcttcaacattcaatttcgagcgtctcgatattttacgggactcaatcagacatccgagtaaaaagctattgtcgtttgaatta

SEQ ID NO: 6505 - DNA, 371 bp, Glycine max
agctttactatgcagagaatattttatgtaaataccttcatctgacttagcatcaaattttcctaagttatcttttccattattcaatacaaaacatttacaaccaaagatatgaagatgtgagatgtttggttttctgccattgaacaattcatatggagttttctttaaaatgggtcttattaaagccctatttaaaatgtagcatgcagtgttaacggcttcagcccaaaagtattttggaagaagagtatcatttaataaagttctagcaatctcttccaaagatctactttttctttcaacaacaccattttgttgaggggttcttggttgcaaaaaaatatgctcaatcccatgcttatcacaaa

SEQ ID NO: 6506 - DNA, 361 bp, Glycine max
ttgaggaaattcaaacgacaataacttttgattggttgtccgattgtgtcccgtagtatctcgagacgctccaaattcaaaacagaagctattagaaaaatctatggacgataactttttacacggatgtcccattgagtcccataatatatcgagacgctcataattgaaaacagaagcgctgaccaaattcaaacgacaataacttttgactcagatatccgattgtgtcccgtaatatatcgagacgctcgaaattcagaacagagctattagaaaaatcaaacgacgataactttttacacggatgtccgattgagtcccataatatgtcgagacgtttgaaattgagaactgaagc

SEQ ID NO: 6507 - DNA, 345 bp, Glycine max
agcttcggtagttcaattttgttcttctcgatatattatgcgcctgaatctgacatctgtgtaaaaagttatgaccattttagtttatcgggagcttccgtttttcaatttcgagcgtctctatatgtgatgagctcgaatcggacatccgagctaaaagttatgaccatttgaatttctcgagtgctttcggttttcaatcttgagcgtctcaatatattatgcgcttgaatctgacctccgtgggaaaagctatgaccatttgaatttctcgagagctttcgatgttcaatttattatgcatcggaatcggacattcgtgtgaaaagttatgaccatttgaat

SEQ ID NO: 6508 - DNA, 367 bp, Glycine max
tagctacacacacctatctaatagctaagctcaccttcgtagatgagaagctagagcttagatacacaccccctataatagctaagctcaccctcatgacaaaatacatgaaaatgcaaaaaagtccctactacaaagactactcaaaatgcctcgaaatacaagactaaaaccctatactactagaatggccaaaatacaaggaccaaacgaaggaaaaacctattctaatattttcaaagataagcgggctcatacttagcccatgggctcgaaatctaccttaaagctcatgagaaccctagggccttcccatggatctctggcccaatctagttggagtcttctatccaatgcccttgcgggg

SEQ ID NO: 6509 - DNA, 304 bp, Glycine max
agctttggataccccaaggatcttttttaaaattacttgggaaagagagccatgagggtggtctcatgggccactttgggatcgacaagaccttgtcttactcaaagaaaatttttattggccctatatgaagaaagatgtccataagcattgcactaagtgtgtggcttgtttacaagccaagtctagggtgatgcctcatgggctatacacacctttacccatcccatttgcaccttgggtagacattagtatggactttgtccttgggcttcctaaaaccccaagaggggtagactctatc

SEQ ID NO: 6510 - DNA, 290 bp, Glycine max
agcttctatagaaggttcattcttaatttctctacaattgcatcacttctcaatgagctggtgaagaagaatgtggcatttatctggggtgaaaaacaagagcaagcctttgctttgctcaaagaaaagcttactaaggcaccctattgcttattttaatgaaaaacttcacagtgccacccttaactaccccacctatgatacagagctttatgccttaataagagccctccaaacttgggaacattaccttgttttcaaggaatttgtcattcatagggatcatcaat

SEQ ID NO: 6511 - DNA, 300 bp, Glycine max
agctttgaaggacattgttttgttggccaacaacaacaacacttgctcctcataagagagtttatcatttgcattcaacaattgacctactagctgattgaacctgttgatgtggtcatggagatctcctcccatctccattttgagttgatacaactccatctttaaacaaaggtgattggttagcgactttgacgcatagatattatcgagcttctcctacaaggccttcggtgttgtctccttcaacacgttgcgttttatctcgggagcaaaggcttaccgaaatatgctcacaac

SEQ ID NO: 6512 - DNA, 313 bp, Glycine max
agcttagcacctggaattcagattctttatttaccaacctatcgatgttggggagagggtacacgtctttggggcatgccttgatcagataagtgtagtcagtccacactcgacattggccgttggttttttttaccatcacaacattgatgagcctggtggaaaacctgacctatttgatgaagttgcttatcgacttcttctttgaaggctttatgtcgctcttctcccatcttccttttcttctgtgatataggattggcctgggggcagatatccaatttgtggcaaattatgtcgagatggatcccca

SEQ ID NO: 6513 - DNA, 322 bp, Glycine max
  unsure (1)..(322): unsure at all n locations
agcttgccaattgggaagactgttcgttatctcttgngatgggattgaaccccaatgaatgccccattgagcaaagcaccaccacatgcaggggtaacaagaaccttgtcatggacatggctcagcactttgttccccaacaccatcaagttcccatctgcaacagatattcctgcccctacagccatctttgatgatttgatgaatcaaacacaagctcaaaaggaaattgcagcacacagagcaccacaacccctctattgttgtttgttccaaatcaaatacaaatgagttaatgcaacaagggaaggaaaaggaaagg

SEQ ID NO: 6514 - DNA, 290 bp, Glycine max
agcttaataattcaatctatggattgttacattcctcccaccagtggtatttaaaatttcatgaggtcatttcttcattcagctttgaagagaatgtcatggatcactgtatataccagaaggtcaatgggaataagagttggttccttgtattatacgtagatgatattctgcttgtgactaatgataagggtatgctatatgaggtgaaacaatttatctcaaaaaacatttatatgaacgatatgggaaaagcatcttatgttataggcattaagatccctaaaaaa

SEQ ID NO: 6515 - DNA, 341 bp, Glycine max
agcttagaagaaattcaaatggttatatcttttcactcggatgtatgattcaggtgtatcacatatcgagacgctcgaaatcgaacaacaagagctctcgagaaattcatattgtcagaacctttcacacggaggtccaattcagccgcatcacatatcgagacgctcgaaatttaacaacggaagctctgaaaaaattcaaatgctaataacttttcactcggatgtccgattcaggcgctttacatatcgagacgctcgaaattgaacaacagaagctctctagaaattcaaatggtcataaattttcacatggaggtgcaattcaggcgcattatata

SEQ ID NO: 6516 - DNA, 377 bp, Glycine max
ctatagaaactcagcttataatatattattacgctcaaaataatttttgattctctcgagaaattcaaatggtcataacttttcacccggatgtccgattatggcgaatcacatatcgagacgctcaaaattgaacaacggaagctcttgagaaattctaatggtcaaaacttttaactcggatgttcgattcaggcgcatcacatatagcggcgctcgaaaaggaacaacggaagctctcgagaaattcaaatggtcataacttttcacactgaggtccgatcctggattataatatatcaagacgctcgaaattaaacatcggaagctctcgagaaattcaattggtcatcacttttcacacggatgtccgattc

SEQ ID NO: 6517 - DNA, 307 bp, Glycine max
  unsure (1)..(307): unsure at all n locations
agcttcaacatcagaccacttctgtgtgctggaactacttcacatggacttgatggggcctatgcaagttgaaagccttggaggaaaaaggtatgcctatgttgttgtggatgatttctccagatttacctgngtcaactttatcagagagaaatcagacacctttgaagtattcaaagagttgagtctaagacttcaaaaagaaaaagactgtgtcatcaagagaatcaggagtgaccatggcagagagtttgaaaacagcaagtttactgaattctgcacatctgaaggcatcactcatgagttt

SEQ ID NO: 6518 - DNA, 363 bp, Glycine max
tgctcgtcttgctgatatttatcatgcattcttttttttgatgaccgacgaacaattagggatcaacttgaaacttatgtgcttcaagtgagaagaaatgcttctttttccacttgtgaagatgttcaaagtttggctatgaagatggttcaaactgagaaacatttggtatttccataggtttataaacttattgagctagctttgatattgccggtgtcgacagcatccgttgaaagagctttttcagcaatgaagattatcaagtctaaattgcgcaataagatcaacatgtgtggttcaatgacttgatggtatgttacaccgagcgggagatattcaagtcacttgatgatattgata

SEQ ID NO: 6519 - DNA, 371 bp, Glycine max
tgaagtgaggaagtgtggaagggtgagacttctatttttattcgttgaccacagagtagtacctagaatacagaagaagcaacaacaatcaatttaacaatattctttaaacatgcaagacacaattgattgcaacaaaataaataagataagggaagagagaatgcaaacacagttttatactggttcggccacaacccgtgcctacgtccagtactcaagcaacccacttgagatttccattatctttgtaaaatcctttacaaagtctgaaccacacagggacaacccatcccttgtgttcagatgctttacaacaagagactcacagtctcttaaccaatctcattgaataagaagaatggaagaag

SEQ ID NO: 6520 - DNA, 306 bp, Glycine max
  unsure (1)..(306): unsure at all n locations
agcttgctaacccatggtttcttctatatatctcccacactttttggggtgggctattcttggatggccttgattttttcagggtccacatggaccccatttctaccaactacaaaccctaagaaaactatattactaacacanaaggcacacttctctatatttgcgtagagggtatttttcctaaggactgaaagaacttgcctgagatgtcctacgtgatcatctaggctcctactgtacactaaaatatcatcaaaataaacaactacaaagctacctatgaaatcccttaagacatgatgc

SEQ ID NO: 6521 - DNA, 360 bp, Glycine max
  unsure (1)..(360): unsure at all n locations
tttggtatcaattacgagcgtcttatatacttcgggacataatcggacatccgggtaaaaagttattgttatttgaatttgctcataggttctgttttcaattacgatcgcctcaatatattatgggattcattcggacatccgagtaaaaatttattgccatttgaatttgctacgagcttccgatttcaattacgagcgtcttgatatacaacgaaaaacaatccgacatccgagtaaaaagttattgtcgttagaatatgcttagagcttctgttttcaattacgagcgtctcgatatattacgggactcaatccgacatccgagtaaaaagttattgtcatttgaatntgctcata

SEQ ID NO: 6522 - DNA, 367 bp, Glycine max
tgattttccatgcagtaatgactccaaagctttatctctcctcctcctcttatggcccaaaagagatcttctcccatcagtgttctgttcagtatcttcccattaacatttataatttgagcatcaattatattatcagaagctaagccgtattttctgaaaattgtaccaaacccacctccactcaaatgccctccaacaccaacagtggagcaacttccagctgggaaaccatgaacctcacttttcttttcaattgcataatagagttctccaagtgttgcacctgactcaacccatgcagtttcttcgtccatgttaatggttatggacctaaggttgaaaagatcaatgattatgaatggaa

SEQ ID NO: 6523 - DNA, 295 bp, Glycine max
agcttttgaagacaaaattggtgttctttagtttttttgaggactaaattagggattgctcaattatttttatttaaaagaaattgtgtttcctatgttttcattgctttctctttgatattatatatttggattttttatattcttcacgacaaaagtaaattatatatattccttgagcttatgtcaaaagggtcattggcaagtctctatcaaaagtatcggttaaacgattctcaagtttctgcatacacaaggcagattttatgtggcttggaggatcttcatgatcata

SEQ ID NO: 6524 - DNA, 371 bp, Glycine max
  unsure (1)..(371): unsure at all n locations
tagaattaatgtcattagccattacagcnggctaatttttttcctatagangnnaaaaaaacgtagaatagatttggatgaactgaccctagaaatggtttcagcaggaggagtaccaagaaggtcagttatgagatccaattggtgcactacattttttccaggaaacaatggcttcccactgagcatttctgcaaatatgcatccaatgctccaaatatcaattgcaggcgtatactgcaaaagacaaggatttgaaattacacactagtgcaatacttaaatatattcaacttcataaatcatacacaatcccggtagaggaggattgaagaggtaaccgatctagtgcgtaaaaggctttgcaaaag

SEQ ID NO: 6525 - DNA, 362 bp, Glycine max
tgtctctctttacttgaggtatgtaagattattatttgcagccaaatgtcttcagatttgttagctttggtttgtagtcgtgccatgcttcaaatggagtctttttctacaaagcttttgttggtaacctattcagcaaaaaaactgttgtgtgtgcagcctctgcccaaaattcctttggtagccctttgtcatgaagtaagcaccttgtcatctccataattgttcggtttttcctctcgacaataccattctgttgcggagtgtatggtgctgtcaattgatgttcaatgcctgcatctacacaaaacttgttaaaattttcagaggtatattcagttccattatcggacctgatcacc

SEQ ID NO: 6526 - DNA, 359 bp, Glycine max
tcaccgatctctctatgttgatgatatagtgatttcagggaatgatactactaagattgtccagctaaaagagcacttattcagccatttccaaaccaaagatctgggatatttgaagtatttcctcggtattgaggtggctcaatcaggagatagtgttgtgatctctcaaaggaagtatgctcttgatattctaaaagaaacaggtatgcaaaattgtagacctgttgatagccctatggatccaaatctgaagctcatggcagattagagtgaagtttatcatgacctcgagagatataggcgacttgtgggaaaactcatttatctcaccattataagacctgatatctcctttg

SEQ ID NO: 6527 - DNA, 320 bp, Glycine max
  unsure (1)..(320): unsure at all n locations
cccgggatccttaagtcacctgcaggctgcagctaacaaaggttgttattgggtggaattcctagagcaattcccttatgttatcaaacataaaaagggaaaaggtaatattgtagacgatgctttttctcggcgtcatgcattactttctatgcttgaaacanaattgattggtcttgaatgtttgaaaagcatgtatgaaaatgatgaaacttttggagaaatttttaaaaattgtgaaaaattttcaaaaaatgggttctttatacatgaaggctttcttttcaaaaaaaaaaaaatgggtatgccttaatgttctc

SEQ ID NO: 6528 - DNA, 363 bp, Glycine max
taagaccccagctcatatcctcacagtgtcttttatgtggaacaagtgcaccagtatcagttcctctcttagccttacaatcatagaagggaggagcatggaagcatggctccatcgacatggcacgttgacaaggaggatcaggagctgttccattctcgggcttgtacagtatccacggtttcaaccctccaagcccctgcgccacgtagccgaaagtagaccacgagctcgtgaccaacatatccatcaagctcaagaggtaaatttctgcccaagctttttggttgtgcatcttcttctctgtttgttgatacccttcatggcttggctggtaaatgccaacaacttctcctgtcacag

SEQ ID NO: 6529 - DNA, 365 bp, Glycine max
tctaaactttatacaagaatgaagctctgataccacttgttatacaagtggtctcagatatcttaagaaggggggggggttgaattaagatattccaaactacttccccaattaaaaatctatttgacttttttttaattgagttataaattcccttaacaatgaacttcttaaatattaattcaaataaaacaatttgaatatgaatataaagcaataataaataaaggagtttaagggaagagaaagtgcaaactcagatttatactggttgggccacacccttgtgcctatgtctagtccccaagcaacccgcttgagagttccactatcttgtaaattccttttacaagttctaaacacac

SEQ ID NO: 6530 - DNA, 307 bp, Glycine max
agcttagtaaagctaagcactatcaatctccttctttggcaaattttgtctaaaacatacttagacacttcctgagcaggtacgagcagttatgcaagtgggatcagcaactttcattatcagagtaatcaagcacagcggaaattctgcaagttgcaagtcgtttccaggatgtcaagacatctcacatgacatcagctttcttcttctgctccccctgtctccatgctcttactgcagcatcttctatcaactactaatctttttcaggatggcaaaacatctcatgtgacatcagcttttcctt

SEQ ID NO: 6531 - DNA, 372 bp, Glycine max
agcttggctaaaatggacacaatttatcaaaaatgattttttaatcagttttttttttcattttagatcaattttctttgaggatataaatttagttgatataaaaattcgatatactttttataagagttggatattaagaaagtgaactttctggattacttgtgactacaacaaatataaaaagtttattaaaaagaaacatgcatcaccccaactacaattctcatttctttcttgatgtacaatacaatccaatacaaaaactaaaattatagaaccaataattttactataacatataatacatatgagaaaaatgcaatataatgcattaccattaattaataactaaaaataactacaatctat

SEQ ID NO: 6532 - DNA, 287 bp, Glycine max
agcttctatagaaggttctttcttattttctctacaattgcatcacctttcaatgagctggtgaagaagaatgtggcatttacctggggtgaaaaacaagagcaagcctttgctttgctcaaagaaaagcttactaaggcacttgttctagctcttcctgacttttctaaaacttttgagctataatgtgatgcctctggagtgggagttgaagctgtattgttacaaggtgggcaccctattgcttattttatggaaaaactttattatggctcccccaactaccc

SEQ ID NO: 6533 - DNA, 363 bp, Glycine max
ttgaacagaaacattactttgtctggagacatgaaaatagacacaaggaaaagatcaaaaactatatttcgaacacaagtaatatacaaagtaaaatttagccaacctgtcattaactccttcaagcatcacatactcaaatagaactttgtagttctttttgaagcaaagctcctctcgaagtgtctgaagaagcaactccagcttgtactttcgatttataggcatgatccagtttcttacctgacattagatttaaatatgagcaatcctccctttcttcccatccttacattttcatgtctaatttcaagggtgatataccaacaaataacagtaaagtaataagaaatttacctcatc

SEQ ID NO: 6534 - DNA, 367 bp, Glycine max
tatgctgcaaacatttataatagaccccttcttctgaaaaaccaacaacagcagaataattatgatctttcaagcaacagatacaatccaggttggataaatcatccaaatctgagatgggtaagtcctccacaacaacaacagcctgtccctcccttccagaatgttgctggtccaagcaagccatatgttcctcctccaatatagcagcaacaacaacaaagacaacaagcaactgaggctcctcctcaaccttccttagaagagttagtgagtcaaatgaccatccagaatatgaaatttcagtaagagacaagagcctccattcagagtctgacaaatcagataaggcagaaggctactcagt

SEQ ID NO: 6535 - DNA, 283 bp, Glycine max
  unsure (1)..(283): unsure at all n locations
agcttattnctatgttaaaacctttttatcactgccaaaaccgcatgggtgttcgacatagatgagactacactctctaatctcccttactatgctgaccatggatttgggtatgactttcttttgtttgtctatgttattgctagttatttacttacagtaaattacataaactttcttagatttaaagaaattatacctgtacgtctttcttccttttttgacacacctacacacttttctttaattttaaaacatacacaaactttcttaaatattattc

SEQ ID NO: 6536 - DNA, 402 bp, Glycine max
  unsure (1)..(402): unsure at all n locations
ggatgcatnggtcaacttggtaacccagctggccttgaatcagaaatctgtacctgtctcaagggtttgaggtttgtgctcctaagatgaataaatacagacctttgcccttcaatgcaacaacctggagcaattgagcagcctgaagcttatgctccaaataatgacaatagaccttctcaacctcagcagcgaaatcaaccacaacagaacaagtgtgagctctccagcaacagagacaacccaggacggaggaatcaaccctacctcagatggaacagccctcagcaacaacaacagcagactgctccatcctgacgagatgctattggcccaagccgaccatacatacctccaccgatacaacaacagcaacaaccccagaaacagccaacagatgag

SEQ ID NO: 6537 - DNA, 455 bp, Glycine max
  unsure (1)..(455): unsure at all n locations
agctaggaggaattgactacctctactgaggatgttccaggcaaatattgagggatgctcgagggaggcttaccataagttacttcatatggagtcatctgggtggtatagtggcacgttgtattataacaccactcagtcaagcttagaaatttgccccattgagatagttggttataaatgaatgctcttaaatactgctggagcacttggttcagaactttagttcggccattgctctgaggatgataagttgtgctcatgcgcaacttggtcccattgagcttgaagagctcttgccagaagcgactcatgaagattggatctctgttggaaattatacttttaggaaagccatgaagcttgcataccatgttgatgaanagttaagtaacacggtgggttgtgaaattggtgggtagcatgccgaaatgagcttcctttgagaagttgta

SEQ ID NO: 6538 - DNA, 445 bp, Glycine max
  unsure (1)..(445): unsure at all n locations
cttgaagagttggaaactgtaatgcatacataaatttcatttatatcatatcttgatctcagattatctaggactccaggaacatgctagtattcaagctttgtcatatcatccactccacttggtgggacttctgtatctctatgataaatactggaagctntaacaacaacctgcaaatctcaagacaaacaagagcaatgcaaaaattcacaaatcgtaaacattagaaagtttcaaatatgaagttaacttaaaaatgtatttatagtataccaaatacaccaaataaaagtacagacatcgtgcaaaacaagaacaagtattttcaaactttcaataagacacatatctttattatgatatgcttcaaaggttcccaccggtcattcatgtncaagatatcaatgtactcgaagtaaaccagtcagattgaaagaacatg

SEQ ID NO: 6539 - DNA, 430 bp, Glycine max
  unsure (1)..(430): unsure at all n locations
ggatgcaagcttcattgatttatgtatttaagttatcaagtgcatctatttatcattattgagatttagggagaagggagattatgatttaggagggtgtatatatagtattactcaaataaaagacatgaatttaaaatgtggaatttcttgcctgagcaaaagcatatggtaaagcagaatacattccagctgctctttccctataaaagactattcgctcagcagcaaccactggctgcactgaataagcattcttaatgccaataaggaggacagcaacatacatggagcccaaggcgtttaaaagatcttgttgcttttcactgcaataattgacgtgaaagcttcctgttagatcaaatagtagcaacaaaacanatgagattaaaaataacatttgcaagcttcttgttngatcttacatttt

SEQ ID NO: 6540 - DNA, 451 bp, Glycine max
  unsure (1)..(451): unsure at all n locations
ggatgcaagcttctagaaaaacaacttctagtaaaaggaaagcatcctccacaactgctagtgaaaaggtaattttagttttaaaatatatttttgacttaaatttgtgttttagtttctcaaatttaggcacttttagttttggtctccttgatagaaatatgttctttttaatcactcaaattcaagaaatgataattttggtccctcagagactcaaagaacagatttttaattgaaggataaaaaaaaatattttaaatttaaagaactaaaaacatatttaaatcttatatttcattaaattttattttataaatcttaaccaaccttttataaatattatcttttatttgtttttactctttcaaacatccaacattagtgaaaagaaagaggtctagacaagcattacaatacaaatcagttntgtttctctcttatttgacac

SEQ ID NO: 6541 - DNA, 456 bp, Glycine max
agcttatgctacaacatctacaacagacctcctcaacctcagcagcatattcaaccacaacagaacaattatgacctctcaagcaacacgtacaatcccgggtggaggaatcatcccaaccttagatggtcaaatccttcacaacagcagcaacaccaaccttattttcaaaatgctactggcccaagcagaccatacgttcctccaccaatccagcagcaacaacaacaacagccccagaaacaacaaacagttgaggctcctccacaaccttcccttgaagaacttgtgaggcaaatgacaatgcaaaacatgcagtttcaacaagagaccagagtctctattcagagcttaattaatcagatgggacaattggctacatagttaaatcaacaacagtcccagaattctgacagattaccttctcaatctgtccagaatcccaagaatgtgagt

SEQ ID NO: 6542 - DNA, 450 bp, Glycine max
  unsure (1)..(450): unsure at all n locations
ggatgcaagcttagccacacagttggcaagtgtatcagctgcttcctgtgtggatgcctcagcatacacacgaacaacatcttcagtgccagatggtcgcacaaagcatcgaccttgggggtccttagctgtaaatgcagaagaggaaagagtatcaagctgcaatattagtaaactgaaattctgcactttaatctttcacactaaaaggctttcatggatggatgaaactgacaaatatctcgcagtcagtgaaattttgccaagccacttggacttgataacagtaatagtataatcccataaacaagacaccaacttttcagaaatataacattcaattntggtattatttaggcctccttgcctccctcactctgcccattcttggtggtttcacaaataanagcaagcaagcaatgataaaaccaaaaaacaatgttgtctttg

SEQ ID NO: 6543 - DNA, 382 bp, Glycine max
  unsure (1)..(382): unsure at all n locations
agctntgagaaattgagaacatgacaaaaacttgtgacagtaatatccaagatatacaaatgggtgttggtcaatgtaccacatttaatagtacaaactanaagaacaagaaaaacagaccaatttctaggcgtctcagaaaaaactttaaacaagacagttcacctaataagtttttggattagtagtaatcatatttgtgtaaataaatagcttaccagagttcattggactccatcgctggaaccgaaaaggagatggtatgttgagaacagaagcaccagaaacactgttatgcctggaaatgggaagatattgcctccgganaaaccttggcatccaattgccaatacatgataaagcacanagaagaagaataaaa

SEQ ID NO: 6544 - DNA, 232 bp, Glycine max
tgcagctagcaagtcttctctcaattgtgggactttgtaagtgtattgatttatgtccatagtttggtatgtgctaatttatgttacatcacatgcttatgtattgtgattggtcttgctgcatatttcagattctagttttgttccaccactagtttatgctgttcttggaagctcaaaagaccttgcagttggacctgattcaattgctttttctgtgatgggattcatg

SEQ ID NO: 6545 - DNA, 400 bp, Glycine max
  unsure (1)..(400): unsure at all n locations
agcttgaaattaaacaacggaagctctcgagatattcaaattgtcataacttttaactcggaggtccgattcaggcgcgtaatatatcgagacgctcgaaattgaacaatggaagctattgagcaattcaaatggtcataacttttcacttggaggtctgtttcaggcacataatatatcgagactctcgaaattgaacaacggaagctctcgagaaattcaaattggcataactnttcactcggaggtcagatacaggcgcataatatatcgagacgctcgaaattgaacaacggaagctctcaagaaaatcaaatggtcaaaacttttcacacggaggtcagattaggcgcataatatatcgagacgcttgaaattgaacattggaagatctcgtgaa

SEQ ID NO: 6546 - DNA, 413 bp, Glycine max
  unsure (1)..(413): unsure at all n locations
cttgatggtgtcgagaagaaatcacatgtttgtcatcatcaattatggggagaatgtgaatgtatgtatacatgattttgatgatgccaaatattaatcaaacaagggtgcttcaaatgataagcatttgcttcaagaataattcaagagtgcttcaacaaacaaagccttgtttcaagattcactaaagaccaagccttgccttaaaacaaagtgctttcaagacatgccaggctctggtaatcaattaccaggaagtgtnatcgattaccagaagacatcggtgagaaatagctgatgaaaaacgttttgaatttgaattttcaacatgttatcgattaccatatgtctgtaatcgattaccagcaacgaaacttcgtgaaatcaaattcaaaagtcntaacccttcaaat

SEQ ID NO: 6547 - DNA, 446 bp, Glycine max
tcaagctttaaaaacttcgatgtcttgtatacactgtcttcttcctatgctttaattggaggtaacttgtgtctttctcacatataggacatgcgtggtggcctttgacgctatatctactcaaattcccatatgtcggaaagtcgttaatggtgcaaaaaatcattacacgcaacctgaatgtctcctgagcattcctgtcatacacatcaaccccttctacccacaatttcctgaggtcttcaatcaatggagcaagatacacatgaatgtcatttcctggctgtctgggaccggctatcatcatacacatcattatgtacttccgtttgatgcacaaccaaggaggaaggttgtaaatcatcagcaaaataggccaggaactgtgtgtgcagctcaagttcccaaaaggattcattccatcggaggcgagaccaacccttatg

SEQ ID NO: 6548 - DNA, 436 bp, Glycine max
  unsure (1)..(436): unsure at all n locations
ggatgcaagcttaagctccttcttctgcacaatgctctttatatttgaagagtatccttgtggaaccttcacccgacgaagagactgacaaaaacttattttctcctttttggacaaagtatggcaggctgggggcaagtaaattttcttcccatcagaccttggatgcaactgtgatcgtatgcccatatcagctagatgttgacgggtattcaagccatccttcgtcttgccttgaatgttaaggagcgtcccaatcacactgtcacaaacatttttctccacatgcataacatcaatacaatgtctaacgtcaggatcagaccagtacggaagatcaaagaatatagacctcttcttcatatgcaactcttacttttatccttctttgggcttnccaaatatagtatttaggtgtgaacccgctcatatacct

SEQ ID NO: 6549 - DNA, 420 bp, Glycine max
  unsure (1)..(420): unsure at all n locations
tcttattttcagcagatgaagatgaatccgtggccacatcatggagtcctctaatgacaatagcatcatttcttgcactgaattgtttttatttggaaaccatcttctcaatcagattcctagcctcaacaagagtcatatcaccaagagctccaccactggcagcatcaatcatactcctctctaggttgctaagtccctcatagaaatattgcagaaggagttgctcagaaatttggtggtgaggacaacttgcacacaatatcttgaatctttcctagtactcatacaagctctctcaactaagttgcctgatgcctgaaatgtctttcttgatggcagtggtcctagatgcaatgaagaanttctccaagaacaccctcttaatgtcatcccagctggtaatggacctgggagcaa

SEQ ID NO: 6550 - DNA, 213 bp, Glycine max
tatatctactcaaattcccatatgtcggaaagtcgttaatggggcataaaatcattacacccaacctgaatgttctctgaacattcctgtcatacacatcaaccccttctacccacaatttcctgaagtcttcaatcaatggcgcaagatacacatgaaccgcacttcctggctgtttgggaccggctatcatcatacacatcattatgtact

SEQ ID NO: 6551 - DNA, 434 bp, Glycine max
  unsure (1)..(434): unsure at all n locations
tgtcaagcccnccagcctggacaggtgttgtttgggttgctgctgtaaagttgtccaaggaggacattgatgcaatcctacccccaagggctttggatagaagactccaaaaagattgggccagagatgcaagagaagaccctagggttctcatgagccttagggtagatttcagacccatgggctaaatatgagcccacttatctntgtacatattagattaaggttttattatttttgggccttgtatttagggcttcatagtgtagggagggtaccctagtaatgtaggattntttaacccttgtattttagttcacttagactagttnttgtatagggtagttttaataattcacatacatcaaataatattatatctgtatatttataattaggaatatgattgttaacgtgtngaaatcatagaattc

SEQ ID NO: 6552 - DNA, 404 bp, Glycine max
cctcatcaaactacttgtttcccgagggatattctataaacagacctcccatctttaatggagtgggttaccactactggaaaacccgcatgcttaatattatagaggcaatagatttaaatatttgggaagccatagaacaaggaccttatgttccctctataatagccggaagtgcaacaatagaaaaacctagagcagattggactgaggaagaaagaagattagtacaatataatttaaaggccaaaaatattattacatccgccttaggaatagatgaacactttacggcttcaaattgtaaaagtgctaaggatatgtgggatacaatacaagtaacacatgaaggcacaacagatgttaaaagatctaggataacactcctactcgtgaatatgaac

SEQ ID NO: 6553 - DNA, 452 bp, Glycine max
  unsure (1)..(452): unsure at all n locations
ggatgcaagcttgtaaatntttgttatcaaagcagcttccatatggtggatggngagagagttacttgtcgagccaaaacaaggtacatttcattcttttagctttgaatatatatccccaaactatgaagataaaataaatgaaataaagattatacatgagaattatgctcacgtgctttaccctgtcaaataggtttatacaaacttagaaggcaaccgtgcaaacttagttcagacttcatgggctttgttgtcccttattgatgcaggacaggttagtaataaagctctatgttttgaatttttaccatatcataaatttaaacctcctaactccttaggccctatggaaaaaccctgcaaagtgcaatggtcctctagttagtaaagtgcattgtaccccttgtcaaagatgggactattacttgaacaacttaanaaatatttta

SEQ ID NO: 6554 - DNA, 436 bp, Glycine max
  unsure (1)..(436): unsure at all n locations
tgcaagcttaataagtccatctatggattgaaacaagcctcccgccaatggtatttaaaatttcatgaggtcatttcttcatttagctttgaagagaatgtcatggatcactgtatataccacaaggtcagtgggagcactacaagaaaaataacctatacctatagacaaaaactgtcactataaataaaaaatccgtaggtaaatgtatgatagactttgtcctacagacatttcttctgtcaactttaagggggcgtataatgacggttaattgtctgtcactatagattctacctactatgtatagcgtgtaggtaaaagtcattaacttctacttacattatctaactgcaggtaaaagtctttaatatgaacatcacttgagactgcaagaaccttcttttccattaaccgatgccacanaactgtacta

SEQ ID NO: 6555 - DNA, 414 bp, Glycine max
gcttgggatactttctttaagaccaaatccccttcgttgaacttacatgggcgtaccttcttggtgaaagcgttcttcacccggctttgatataaccatccttggctcatggcggccaatctcttatcttctataatattcagctgatcaaagcgtgcctgggtccattccgactctttcagccctaactcaaccagaattctcaaagagggaacctccacttcaaatggaagcacaacctccatcccgtacactaatgagaatggagttgccccagttgatatgcacaccgaggttcgataaccatgcagtgtgaaagggaaaatctcgtgccaatccttgtatgacacggtcattttttgaactatcttcttgatgttcttattagcaacctcaacttcccccattcattgt

SEQ ID NO: 6556 - DNA, 134 bp, Glycine max
ggaatgggacctcggtgtgaaaagttatgaccatttgaatttctcgagagcattccgtatacaatttcgaacgtctatatttgtgatgctactgaatcggacatctgtgtgaaaagttatgaccaattgaattt

SEQ ID NO: 6557 - DNA, 396 bp, Glycine max
  unsure (1)..(396): unsure at all n locations
agcttataatatatcgatacgctaganattattcgtcggaaactctcgggaaattcaaatggtcataacgtttcacacggatgtccgattcgggcacataatatgtcgagaggctcgaaattgaacaacggaagctcttgagaaattcaaatggtcataacttataactcggatgtctaattcaggcgcatcacatatagaggcactcaaaaatgaacaacggaagctctcgagaaatncaaatggttataactattcacactgaggttcgattcatgattataatatatcaagacactcgaaactaaacatcggaagctctcgataaattcaattggtcataacttttcacacgaatgtccgattcgtgcgcataatatgtcgacacgctctgat

SEQ ID NO: 6558 - DNA, 449 bp, Glycine max
cttgaaggtgttaaagacatgagccattgtggtgtagaacccaatgaaatcaccatggtgaatgctttaatacctgcgctcgtagtagagactttgatactggacaatgggtgcaccagcacattcgtaaggctggttatgatcccttcatgtccacatctaatagtaacatcattcttgcaactgcaattcttgaaatgtatgccaaatgtggcagcttcaagatagcaagagacctgttcaacaaaatgcctcagagaaacattgtttcttggaacagtatgattaatgcatacaatcaatatgagagacataaggaggcactagatctcttttttgatatgtggactagtggcatttatcctgataaggctacctttctgagtgtgttgagtgtttgtgcccatttgtgtgctctggcattgggacaaactgatcatgcttatctg

SEQ ID NO: 6559 - DNA, 420 bp, Glycine max
  unsure (1)..(420): unsure at all n locations
ggatgcaagcttctgttttcaattacgagcgtctccatatattacgggcctcaatccgacatcggagtaaaaagctattgtcgttagaatttgctcagagcttctgttctgaattttgagagtcttgatatactacggaacacaatcggacatctcagtaaacagttattgtcgattgaatctgctcagagcttctgttcttaattacgagagtctcgatatattacgggattcattcggacatccaagtaaaaagttattgccgcttgaatttgctcaaagcattcgttgtcaattacgagcgtctagatatattacgggattcattcggacatccgagtaaaaagttattgtctttntatttngctcagagcttctgttttcaattcccagcatctcgatatattacaggactctatc

SEQ ID NO: 6560 - DNA, 406 bp, Glycine max
ggatgcaagcttaacataaggcatgcgaagtgggtggaattcctagagcaattcccttatgttatcaaacataataagggaaaaggtaatattgtagccgatgctctctctcggcgtcatgcattactttctatgcttgaaacaaaattgattggtcttgaatgtttgaaaagcatgtatgaaaatgatgaaacttttggagaaatttttaaaaattgtgaaaaatcttcagaaaatggtttctttagacatgaaggctttcttttcaaagaaaacaaattgtgtgtgcctaaatgttctactaaaaatttgcttgcttgtgaagcacatgaacgaggtttaatggggcattttgtggtccaaaagactctatacacattacaagaacacttttattggcctcata

SEQ ID NO: 6561 - DNA, 318 bp, Glycine max
agcttctatagaatgtttgttcctaatggctctacaatggtctcacctctcaatgagctggtgaagaagaatgtggcatttacttggggagaaagacaagagcaagcctttgctttactcagagaaaagcttactaagacacctgttctagctcttcttgactattctaaaacttttaagctagaatgtgatgcctctagagtgggagttggagatgtaatgttacaaagagggcaccctattgcttaatttagtgaaaaacttgatggacccaccctcaactaccccacctatgataaagagctttatgtcttaata

SEQ ID NO: 6562 - DNA, 254 bp, Glycine max
tcagttttcaattacgagcgtctcgatatattacgggactctttcagacatccgagtcaaaatttattgtcgtatgaattttctcagagctttagttttcaattatgagcgtctcgatatattacgagactcaatcggacatccgagttaaaaattattgtcatttgatttttgtcagagcttacgttttcaattacgagcgtctcgatatactccgggacacaatcggacatccgagtgaaaagttattgtcg

SEQ ID NO: 6563 - DNA, 243 bp, Glycine max
  unsure (1)..(243): unsure at all n locations
agcttgtgctattccaagttcatttaccatactattaaaccagattgcttccttcactccttcagctagggccatgtattctgcttcagtagttgaaagagtaacaactgattgttgtaccaaacanagtaaacacatatcctattaaaaatttccttgtgtctacatttcctgcaaaatctgcatctacatagcctgtgattgctgcctcatgtgctgtcttcttgaccttaatccagcttt

SEQ ID NO: 6564 - DNA, 451 bp, Glycine max
  unsure (1)..(451): unsure at all n locations
aagctaggcactaacaatctccctcgttggcaaatattgtctaaaacatacttagacacttcctgagcaggtacgagcagttatgcaagtgggatcagcaactttcattatcagagtaatcaagcacagcggaaattctgcaagttgcaagtcgtttccaggatgtcaagacatctcacatgacatcagctntctgcttctgctccccctgtctccatgctcttactgcagcatcttctatcagctactagtcttttccaggatgtcaagacatctcatgtgacatcagctntcccttgtctccatgctcttactgcagcatcttctatcagctactagtagcttacatcagtcatcatcagcagcagcagtctccccctcaaaatcatgtacatacaactccccctcaaaatcatgactcatgcatacatcgtatcctacttctctaaat

SEQ ID NO: 6565 - DNA, 448 bp, Glycine max
tgagcacgcttgcaagcctctccttactcacttgatcacgcaggatatgaaacttggtttcaatatgtttactcctgtcatgtgcctcacgatgcttagctaaatcaattgcttatttgttatccatcaacaacctcataggactgcaatttctcaagtttagttctcccattaaagcttccagccatagagcttgacaggccgccatagcagcagcaatatattcttcttcacatgttgacaaagcaactacactctgcttctttgagcaccaagagattggtgatgttccaaatttgaaaacatagccagtagtgcttttcctatcatccttatcaccacaccaatctgaatcactataaccaaacacttcttcttctatattcttttgactgtaaagacataaaattccaagatccaatgttccttgcacatacctcagaatcct

SEQ ID NO: 6566 - DNA, 285 bp, Glycine max
acttttcactcggaggtccgattcatgcgcataatatatgatgacgctcgaatttcacaacggaggctctcgagaaattcaaatggacataactttgaactcggatgtccgatttaggcgcatcacatatcgagactctcgatattgaacaatagaagctctcgagaaattcaaatggtcataacttttaactcagatgttcgattcaggcgcataatatatcgagacgctctaatttgaacaaaggaagctctcgagaaatgcaaatggtcataacatttaact

SEQ ID NO: 6567 - DNA, 433 bp, Glycine max
  unsure (1)..(433): unsure at all n locations
agcttagttacacatacctctctaatagctaagttcacctccttaagatgagaagctagagcttagctacacaccccctataatagctaagctcacccatatgccaaaaaacatgaaaatacaaaaaaagttcctactacaaagactactcaaaatgccccgaaatacaaggctaaaaccctatactactagaatgaccaaaatacaaggcccaaacgaaggaaaaacctattctaatatttacaaagataagcgggttcatacttagcccatgggctcaaaatctaccctaaggctcatgagaaccctatggccttcccttggatctctagcccaatctacttggagtcttctatccaatgcccttacggngtaggattgcatctatatcttcctttggatntgcaaagagtcgtcattattctataatgac

SEQ ID NO: 6568 - DNA, 422 bp, Glycine max
agcttacccttctggttttaagtgctaagtaactagcatttttgaaccatttgctaacctgcattttctaacacattagtaacagagtttgaacaggtcaagagctgactgacttgaataaagaccaaaagcaatgcaagtaacttgcagatggagatagtacaaaatttgctgtttaatacataatgtttaacaaaggtaacactactacaagacaaattcagaatttcagattaatgtagaaacaagatgcaactagagactgcaaggcataaccttttcaggatctagtcccaactctttcgaaagactgtccttcacagatcttggaggaagctcattctctgcaaaagcttggcgaagtttctggcatatttcatcaaaaaaaattaaaagacacaaattagtgcgtgtataattat

SEQ ID NO: 6569 - DNA, 414 bp, Glycine max
  unsure (1)..(414): unsure at all n locations
tataatgagttntgtttagaataggtcttataagtaccttgtttaaagtatagcaaatagtactcacacaatcaactcaaaagtactttggtagcgttgtttcatttagaagagttctagctccttcttcaagggatctatttttcctctccacaacaccattttgttgaggtgttctagggatggaaaagttgtggtgaattccattttcttcacaaaacatttcaaaatactcattttgaaattcacctccatggccacttctaattgaaacaatattaagacctttctgattttgaataactttggaacgtttgcgaaaagcatcaaaagcttcattttttgttttcaaaaacaaattccaagtgaaccttgaataatcatctattattaccaagcccaaactcatagttc

SEQ ID NO: 6570 - DNA, 270 bp, Glycine max
cacctcctgcatgcaagcttctctttgagacaagcaaaggcttgctctcgtttttcaccccatgtaaatgccacattcttcttcactacctcattgagaggtgatgcttttgtacagaaattaagaacgaaccttctatagaagctggctaaaccatggaagctcctaatatctcccacattttttggggtgggccattcttgcatggacttgatcttcttagggtccaattggacgccatttttaccagctacacaccctaagaaatac

SEQ ID NO: 6571 - DNA, 299 bp, Glycine max
atggtcatagcttgtcacacggaggaccgattcatgcgcgtaatatatccagatgttcgtgactgaacaacatatgctctcgagaaattcaaatggtcataacttttcactctgatgtccaattcatgcgcatcacatatctagatgctcgaaattcatcaaccgaagctctatcgaaatgcgaatggtcataagtattcactcggatgtcaaaatcacgcgcatcacatatcgagacgctctaaattgaacaacggatgctctcgagatattcaaatggtcataacttttcactctca

SEQ ID NO: 6572 - DNA, 428 bp, Glycine max
  unsure (1)..(428): unsure at all n locations
agcttaaaggaagtgaacgaattagcatgggcataaatgtctccgcattgattggtaaatctgttccccaaattcctgaaaaatgtaaagatccaggtacattcagcataccttgtattatagggaatagtaagttcgagaatgccatgctagatttacgagcttctgttagcgttatgcctctgtctagttataattctctatctctaggtcccttgcagtcaactgatgcggcaattcatttagctaatagaagtgttgcctatcctgttggtttcatagaagatgtcttagttagagttggtgaactgattctccctgttgattnttatattttgaatatggaagatggattgtctcaaggatcagttcccatcattctaggtagaccctttatgagaactgctagaactaagatagatgtttat

SEQ ID NO: 6573 - DNA, 366 bp, Glycine max
acattcgctcattgatttttagttttacaataaatgactttgacctcaccttctctctgtgcttcccttaaaaaaaaacaacttgatcttgaaatgcttagtcctgccatgaaaaacaggattatttgaaatggaaataactgtttgattatcaacaaagaatttgtgtaggctccttttgttccatatgtaaatcaacaagtatacgccttatccaaatagcttgattcacaactgcagtgactgccacatattctgcctcaactgtgctatgagccactatgtcttacttttttgaactcaaagaaaacatacccgaaccaaagttgaaacaataacctgttgtacttttcatatcatcaattg

SEQ ID NO: 6574 - DNA, 422 bp, Glycine max
  unsure (1)..(422): unsure at all n locations
tactcaagcttatgctgcanacatctacaacagacctccccaacctcagcagcaaaatcaaccacaacagaacaattatgacctctccagcaacaggtacaatcccaggtggaggaatcatcccaaccttagatggtcgaatccttcacaacagcagcaacaacaaccttattttcaaaatgctgctggcccaagcagaccatatgttcctccaccaatccagcagcaacaacaacaacagccccagaaacaacaaacaattgaggctcctccacaaccttcccttgaagaacttgtgaggcaaatgactatgcaaaacatgcaatttcatcaagagaccagagcctccattcagagcttaactaatcagatgggacaattggctacacagttaaatcaacaacagtcccagaattctgaca

SEQ ID NO: 6575 - DNA, 344 bp, Glycine max
aggatttccttttagtagggaatctatccttcctaagatggagccaaacccagtcaccctcattaagaactagctcttttcttcctctattgcctttagttgaatacacctttgtttggttctctatttggttcttaaccctctcatgcatcttctttacaaattctgacctagattccctttctttatgtataaaagaagtgtccagtgggaggggaatgaggtctaacggtgttaggggattgaacccatagacaacctcaaaaggggactgcttggtggttctatgaacccccctgttgtaggaaaattctacatgaggaagatactcatcccaagactta

SEQ ID NO: 6576 - DNA, 400 bp, Glycine max
tggtacatatagtctgaatctcggatcctgttaatgacttattctaaacacttgttggctgatcattagaaccaacgaactgagtgacaaacaattatttattgaagctgctctcgaataagatgacaaccaatctctatatgcctggtcctctcatggaagactcgggttgcggcaatatgaagagcagactgagtatcacaatacaacttcatttgcaaactcttcacaaaacttcaatacttgcagataatgtctgatccacatgagctcacatgtaaccatagccatagatcgacactcagcttctgcactagaccgagcaacaaccgttggtttcttgctttcccaagagaatacattttctccaatgaagacacaatcacttgatgagatcttc

SEQ ID NO: 6577 - DNA, 408 bp, Glycine max
cagtgcaagctgtggcatgcactcgtagcttctacataagcgtcacacaggattggaggagaagttgatattatattctaatgacacttggatttgaaacttgaatttgtgtgttcctatttatggagccacatctctacttatcatgattacagagtattagatatgggtgagccaacgcatccaatagcgagggctggattccacactaagtgtgcttaagctgcatgatgattgagaagaatgaaagacatgcactcagtgtgactatatgaagtggcaatagggtgaaccagcaaatgctcacccggccccctttaaagccactgattgtgctctcccagtacatcaattcatctccacacacgcgtaaataaacttaatgcatgagaagtaaaacctgcctgt

SEQ ID NO: 6578 - DNA, 426 bp, Glycine max
tatgttgcaaacatctacaatagacctcctcaacctcagcagcaaaatcaaccacaacagaacaattatgacctctccagcaacaggtacaatctctttatgaggaagtatcccaaccttagatggtcgagtcgttcacaacaccagcaacaacaacagccttattttcagaatgctgttggcccaagcagaccatacgttcctccaccaatccagcagcaacaacaacaacaacaaaaacaacagccccagaaacaacaaacagttgaggcccctccgcaaccttcccttgaagaacttgtgagacagatgactatgcaaaacatgtagtttcaacatgagaccagagcctccattcagagcttaactaatcagattggaccaatggctacacagttaaatcaacaacagtcctcgaattctgac

SEQ ID NO: 6579 - DNA, 377 bp, Glycine max
cgcttggtgacgatcgaagcttataggtcattatcgtgtggagtcacgaggttcagcttagtttatatggacaactagtctcgggaaaggtaattgcttctggtttggatgaagagcttgccaaggaagccaaaagagctggtatatacttgagtcgttgattatctctcctccatacaagcattttcagggcacaatgttctttgctaaagtgctattcacttatgccatttttgccagtttctgtctgaaaacataggttagcacaggaggtagcatccatgctacaattgagtgttgagattgataccggctcatctgagaggttagtttatttgtctccagtaattctcaccacaactaaaataaaatatctt

SEQ ID NO: 6580 - DNA, 430 bp, Glycine max
agcttaaacattcaatttcgagcgtctcgttatattacgggactcaatcagacatccgagtaattacttattgtcgtatgaattggctcaaagcttaaacattcaactttgagcgtctcgatatattacgggactcaatcagacatccgagtaaaaagttattgccgtttgaattggctcagaggttcaacattcaatctcgagcgtctcgatatattacgggactcaatcagacatccgagtaaaaagttattgtcgtttgagttggctcagaggttcaacattcaatttcgagcgtcccgatatattacgtgactgaatcggacatccgagtgaaaagttattgtcgtttgaattggctcagagcttcaacattcaatttcgagcgcctcgatatattacgggactcaatcagacatccgagtaaaaa

SEQ ID NO: 6581 - DNA, 360 bp, Glycine max
gagtgcctgaccgaattgataggtcctttaggtggcagcatgttggactccgaatccgagcacttcttgtcacgatgatctataataaggctcttaccctttcttgtcaatcaaagcaggaccacacttctggggaaataatcaatttcatgactgctgatgcggaaagagttggtgttgtcaggtggtctatccatgatttgcggatggtggctctgcaagaaacattagccctggtgatttggtataaaaaccttgggctggcttcaattgctgcttttgttgcaacagttgttattatgttggcaaacgctccattgcgatcatcgcaggagaagtttcacaagaagctgatggagt

SEQ ID NO: 6582 - DNA, 439 bp, Glycine max
  unsure (1)..(439): unsure at all n locations
agctntacttcaatattttccaaatcatcaagaatcttgttgaaatcaaccaattgttcagtggctgttcttgactctgtcatcttgaaggtgtacagttgttgcttcaagcatagccgatttgcaagggactttgtcatatacaatgactccagtttcagccacattgaggctgctgtcctttctcttgcaacttctcttaaagctttgtctccaaggcatagaatgattgcacttctagctttagcaatcatctctgatttctcctttgagcttagagattcagacatcttttcttctcctttaagagcatctgcatagccatgttgaatcaagattgcttccatcttgattctccataacccgaagtcattttcccctgaaaacttctctatatcatancttgttgttcccatctttcttgatcttgatcctgttc

SEQ ID NO: 6583 - DNA, 417 bp, Glycine max
  unsure (1)..(417): unsure at all n locations
agctcgtaaggcttcgggtggtacatgatagatagactcaacttggataccatccttgtgctacaacaattgcagcaagacccactatccataatgagagnaataattttgtttaaaaccttgcatcttgtatgaaagatgttttctttttgggtttgggttaggtcacaagattgactcccaatgagccatctctccattagaagatcaccttcttcgtaggggcaaacctcttcaatatgctcatcacccttggcttcaccctcacttccacctgaggaaggagaagaagtagccttctcttgactactgtagatgtcttgatcccacatgatcatggttttctttgtagtggcattgagaaagaatgtggcctttcccaatacattntaagcacttaatgttactagttctatc

SEQ ID NO: 6584 - DNA, 435 bp, Glycine max
  unsure (1)..(435): unsure at all n locations
agcttgagaaacattaatagaattatatttgactatatttcaagtacacatttaacatttttttctctaaaattaaacttaatgggcttctagagcaaaagagagtttttcaacttcaaccaaataaagaaacttcaaagcattgttctttgtttgtggtaactttaattacaaagcatacacatatataattaattntcaattaagaaaaatcaaattacctcttcaaacaatgtaacataaaagataaaacaaaccacaaaaaataatcatgaaaggaagagataaatttatttccaaccacacatatcaaatattcatttaatgaatgtgaaattacaaaactacccctaatacaaaaactagtctaggtgccctaaaatacaagggctgaaaaatcctacatttctagggtaccttacctatattatggat

SEQ ID NO: 6585 - DNA, 439 bp, Glycine max
caagcctcttatctttcctatgactagcattggcattcctgtaaaaagcagtcttctcccgctgattttcatcaaagattctacacatgttgatcaactgtgcaaagttatgaataccgtgataatttaccatcatttttacttctggtcgaaggccattgacaaatttcatgcatttggacctctccccagcttccccctaataatgaggaaaataccttacaaggttctcaaacctcgccgcatactctgccaccgtcatactttcctgtttcagctcaagaaactccatctccttcctattcttgacatcttccggaaaatacttctccagaaaagtttgtctgaaagtctcccattggacaacaacaccaccgtgtccctctaaacgtgggcgagtgttctcccaccagtactctgcctcatctgataacatgtg

SEQ ID NO: 6586 - DNA, 292 bp, Glycine max
agcttattctatgtgattgaccaagcacactatgatcacaaaattcaagtttatctagtttatcaccacctaacagattttgtttctcaagttcatgtattcctctttcactaacatgacctaatctcagatgccatatcttcgagttatcactcaatgtattactagctaccgatgcatgtccaatagctagcggaacctatcagaataaacaagccattacttttattcttgttacccttacctatgattaaagatccatttgaaatctcaacaacaccatatggaattc

SEQ ID NO: 6587 - DNA, 401 bp, Glycine max
  unsure (1)..(401): unsure at all n locations
gacctataaaactcaagcttgctaccccaagaaccatcaggaaattacttgtgaaggagagccatgagggtgggctcatgggccactttgggatagacaagaccctagtcttactcttagaaaagttctattggccccatatgaagaaagatgtccataagcattgcactaagtgtgtggcttgtttacaagccaagtctagggtgatgcctcatgggctatacacacccttacccattccatctgcaccttgggtagacattagtatggactttgtccttgggctccctagaacccaaagagttgtagactctatctttgtagtggtggataggtttagcaagatggcacactntataccatgccacaaggtggatgatgcttcccatatcttaaaactc

SEQ ID NO: 6588 - DNA, 441 bp, Glycine max
  unsure (1)..(441): unsure at all n locations
agctagcttctacactttgtgcatgtccttcatgctttacatgcctaatgacacctaagcactcttagtagagaatcttggacttgatcttggattagtggactgaaccatatctgaaattcactaattataattagtgaaattttggctccaaaatttggctccacaaattcaatttcaaattcaagtgaaatttgaatagaaattcaaattttcctccaattntatgtgacacttaggctataaatagaggctaagtgtatgcattttttcgaactttgatcatttgaaaatgaaacttcagattttagagctcttttagaacacaaaattttgtgctcttctcttcctctcccttcattcatctccttcttcctccaagctcttatccatggcctcctatggtggtgaacttcttctagactcatcttctccttgaag

SEQ ID NO: 6589 - DNA, 381 bp, Glycine max
tacggaccttcagtctcagctttgacccgctgtaaatgatatgttcatgatgcataagaatacgtaatgaccaatccaatgatgatcttataatgcgcctaacataagcgatcgctattttatatatgagagaagggaagagagaatgacaaaacctatttatactggttcgaccacttcccgtgcctacgtacagtcctcgagtaacccacttgagattatccactatctctataaatcctttatagactttgaacacaccttgggatccatctcccttgtgttcaagattctccaagagacaaccagtctcttgattacaattatcacaatctaagagacaatcagtctcttgattacaattaagtctatgagatgaat

SEQ ID NO: 6590 - DNA, 406 bp, Glycine max
  unsure (1)..(406): unsure at all n locations
agaccttatttattngataatcgatatttttatatatattcgcattaacattttaaagactgtcttgacttttttttatgacagtaaatactatatcttgacttgagaatttattttgaaaacttacttaaaagtaaggtcaattaaataaattaagactatctctatattattaataatcaactagattaattaacaattatataactcaaatatccaatgataaatttgatataataactacattattaatattattgggaaaaacaatacaaagtcaataagttcctcgcggaattgatcatgaattttactatcaacttattcttaaaagaaaaaactttgaaatataaatcatgtttcttcaaaaataactttaactgacattaattgtataaaatcaatt

SEQ ID NO: 6591 - DNA, 444 bp, Glycine max
  unsure (1)..(444): unsure at all n locations
tatcaaaccaaagcaacttctatctagaacaacttgaagagctatattagaagaaatttcaattgttgaaatgtatagtaagtcggtcatctagtgacagcataacaaagtcacaaatactagtactaagttgaagaacatattgcagtatcgagtgtttgctggttacatattttcaggttatatacctggaggagttccacaacacatattgcggtcatcaatatgctcaacttcaagaccaatgaaccatgcaccaagtgagacatcttcattagcatatttatgcaaaatcggcctgcaatcataattagactccacatgaaatttctatatgtaagagaatattctatgagaaacatggactgatccccgaactgagatttcctattatgaaaattntaagtttatgaaaaagaaagtttcttattgtaatcaaatctt

SEQ ID NO: 6592 - DNA, 418 bp, Glycine max
  unsure (1)..(418): unsure at all n locations
actcaagctagaatcggacatccgtgtgaaaagttatgaccattagaatctctcaagagcttccgctgttaaatttcgagcctctcgacatattatgcgcccgaatcggacatccgtgtgaaaacttatgatcatttgaatttctcgagagtttccgatgtttaatttcgagcgtatcaatatattataaccctgaatcggacctcagtgtgacaagttatgaccatttgaatttgacgagagcttccgctgttcaatttcgaatgtcactatatgtgaagcgcctaaattggacattcgagttaaatgttatgaccattaggatttctcaagagcttccgttgatcaattctgagcgtctcgatatgtgattcgcctgaatcggacatccgtgtganaagttatgaccatttgaatt

SEQ ID NO: 6593 - DNA, 293 bp, Glycine max
taacaaagagcatgcgaagagggtggaagtcctagagcaatttccttatgttatcaaacataaaaagggaaaaggcaatattgtagccgatgctctttctatgcgtcatgcattactttctatagcttgaaacaaaattgattggtcttgaatgtttgaaaagcatgtatgaaaacgatgaaacttttggagaaactttgaacaattgtgaacaaatttcagaaaatggattgattagacatgaaggctctctttccaaagaaaacagaatgtgtgtgcctcaatgttctact

SEQ ID NO: 6594 - DNA, 423 bp, Glycine max
  unsure (1)..(423): unsure at all n locations
ctcagctattaaacttggtcgtgtactccccaacagacatgcttccgtgtttcaaatcctgaaattccctcgccttccgcttcctcagatctcgtggaaagtaattttccagaaatttgtccttgaaggcattccaaggaatcacgcctcccgttgcaacaaatgaaggcttcacgaacttccaccaattctcggcctctccttggagcataaatgtcggataagggaccttatgctcctcgaggcaacccatcgccttgaaaatcttctccgtctcagctaaccacaacctagcaccttccggatcatagtctccactgaactttggctggtggttcttacggaaagccatgagcccncgatactccgccggctccacatcacgttcctgcaccagagtatctagcacagctgtgatgcagt

SEQ ID NO: 6595 - DNA, 437 bp, Glycine max
agctcgaaatggtttactatcattgatgagaggtatggggtggtgtttagtattccacagtttattatcaggattctgatatcctttggtttcacttttgtggcagcaagaaggtccttaattgccccaaacatcaccattgatacctcttgcctgccatcattcagtgagtttctgtaaccagtgcggaaaactccttttggcaggtacgtttcatcgcctatgccagatttcttaagaactcgttcttgaaactcaatggcggtttcattgaaattcctatattttttggccaactgaatgaactctgccttatagatctgcataaataccttattattgaatgcatgccaacattggaatataaaaaataaataggatcaccctctcacgcatatagccaaacaactaagagttcatgtatgcatatatgttat

SEQ ID NO: 6596 - DNA, 436 bp, Glycine max
actcagcttaacattcaatattgagcgtctcgtaatattacgggactcaatcagacatccgagtaaaaatatattgtcgtttggattggctcacagattcaacattcaatttcgagcgtctcaatatattacgggactcattcagacatccgagtaaaaagttattgtcgtttgaattagcttagagcttcaacaatcaatttcgagcgtctcgttatatcacgggactcaatcagacatccgagtaaaaagttattgtcgtttgaattggctcagagcttcaacattcaatttcgagcgtctcgatatatgacaggactcaatcagacatccgagaaaaaagttattgtcgtttgaatttgctcagaggttcaacattcaatttcgagcgtctcgatatattacaggactcaatcagacatccgagtaaaaagat

SEQ ID NO: 6597 - DNA, 406 bp, Glycine max
  unsure (1)..(406): unsure at all n locations
agctntgagccaattcanacgacaattactttttacatggatgtctgattgagtcctgtcatatatcgagacgctcgaaattgaatgttgaatctctgagccaatccaaacgacaataactttttactcggatgtctgattgtgtcccgtaatataacgagactctcaaaattgaatgttgaagctctgagctaattcaaacgacaataacttttaactcggatgtctgattgagtcctgtcatacatcgagacgctcgaaattgaatgttgaagctctgagccaattcanacgacaataancttttactcggatgtctgattgactctcgtcacatatcgagacgctcgaaattgaatgttgaagctctgagccaattaaacgacaataactgtntactcggatg

SEQ ID NO: 6598 - DNA, 462 bp, Glycine max
  unsure (1)..(462): unsure at all n locations
tctagcacactccagacatcttcgcacanatcccaacggtcagatcttggaaaggtgtcttttgaagttgcaaaccatatttcgagacgatccaacggttaaagaaggctgggcagcatttttaccgaggaagctccatgtagttttctctagaagcttcattaagaggcttctagcacactccagacatcttctcaaagatcccaacggtcagatcatggacaagtgtcttgtgaagttgcagagcaaagttcgagaagatccaacggttaatgaaggctgggcagtgtttttaccgaggcagcttcatgtagctttctctagaagcttcattaagaggcttcctctagaagcttcctcgtggcttcttcgagaagctgtctcaagaggcttctttgagaagctacatccttatctatccacncctctattaactaaattaacttccttcaaaattattac

SEQ ID NO: 6599 - DNA, 449 bp, Glycine max
  unsure (1)..(449): unsure at all n locations
ctcacgctgtggactgaggacaacttgtgccaaccgcgaaatagatgttgagatcagcggaaacacgaatgacacctttgttaaaatcaacatgtgtaaagatcaaaggctggccttggtaaccatcaactgctacaacatcaagagggcaatctgcacctgtgcttgtcatatcaaggccacctaaatccggggaagccggaacgatgtaataactcgaacgagctcgaactatctttcctgatgtgtccagcacttgctcaggtgcacgacctgctgcaccaataatagcctttgtgctcacagcaactataaggaccaatgttaccaatgtcatcttcattgttctagttttagttatgtgtttttgcaacttgtgatggatatggaagaagagggagattatatctacgttcngaattggtgtaatccatgtacccatgtgcaca

SEQ ID NO: 6600 - DNA, 486 bp, Glycine max
  unsure (1)..(486): unsure at all n locations
agcttggcctcagggcaattccctcctttcacgccaaattactttgctgatcctgaaatcaatgaaatgctattagaaattatatacaaaataaatcacagtttaatttttttataaactcataaatataatattttaatagtctacattcatcattccattccatgtgtacaaacaattaggctacattaaaattgtagtcccccctaattttaaaattgtaattntgatcccttatttttaaatcaaaatatttagtttttttattttaaaaaataaataattctaattntttttcattagttgataatttaaagtcaaatattaactntgatgtgacatattagtgatgttgaacttatataagcaattgacatgagactatgtgaaanaagaattaaataaagtgaataataaaaaaatattntaataggaattgaactcataactatttatttatagataaaataaaaattactaattcac

SEQ ID NO: 6601 - DNA, 429 bp, Glycine max
  unsure (1)..(429): unsure at all n locations
aagcaattaaactaactaaattaaatgctagaaaaatagaaataaaaagagacctgtgttgcctccccgtaagcgctcggttaatgtcattagcttgacgcatcgtcctgttatcctggattgaagcgtagaatactgttcaatctctcaatagctccaccatgatattgctttagcctttgtccgttcaccacccatatgacgatcacaaagnctcactgcttcatatgttcggactttcttgatggtaaatggtctagaccatttcgatttaagcttnccaggacacaatttaagtcttgaggtgaacagcaacacttgttgtccttgttgaaaatccctcttgagcagttctctatcatgatactctntacatttttctttgtacaactgtgaagattcataagcagttacatttatctcttcaac

SEQ ID NO: 6602 - DNA, 400 bp, Glycine max
gatgatatggtcttcaccgacgataggatcatattggtctataaagaggcaaatctgatcatcatgctttgatacatgccaaagaacaactagggcgaatgaagagggtgagaatgagggagaagcccatgttgtgactgccattcctatagagctagagtaatgcgttgcatgttgatttatactggttcgagcacttcccgtgcctacgtgcagatctcaagcaacccacttgagatattccactctctttgtgaaactccttttacaaagtctgaaccacacagggacaacccttcccttgtgttcacgaatcctctacaacaagagacccacggtctcttaatccctcttctgaagtaagaagaagagaagaagagatctctcttattagagatac

SEQ ID NO: 6603 - DNA, 454 bp, Glycine max
  unsure (1)..(454): unsure at all n locations
agcttctctcctagctacatggtgcgttngcaatgatagaagctaggcgatcctgcagaaaaccttggactatgcttgtggagctggtgctgaatataaccctctccgctaaaacgggtcttgtttccagcccaacaccgttagggcccactgtaactacgccgtgaacagctacttccaaaggaagggtcaagggtcctgcgactatgcgggaacagccactgttactgcatctgaccccagtaaatccttcaatctctcttttctttttctttgttttctctcttagcatttattccttggaacaataatcgtagctgacccttttatctgtttctctttntcttgatgagcaggctctggcggtacttgtgtttacacttctagcgtcaggtatgtatntgtatttgatccacccatcatcaagctttcttctggttaatatgctaatctt

SEQ ID NO: 6604 - DNA, 486 bp, Glycine max
  unsure (1)..(486): unsure at all n locations
nntgtctcaagtattcaaatctgactcttggaagtgccttgatcagaatgtcagcactttgattctctgttttgcagtacagtaacttcacttctccttccctttgaacttctcttagaagaaaaagctntatcttgaaatgcttagttntgccatgaaacactggatcattagcaatttagattgcagcctgggtgtccacaaaaatctgtgtgctttcttcttgtttcatatgcaaatctgtcataattttcctgatccaaagagcttgattcactgtagcaacaatagctacatactctgcttctgtagttgattgagctacaacttcttgctttntaaaacaccaagaaaagactccagaaccaaaggagaaacaataaccagaggtgcttctcatgtcatcaatacaacctgtccagtcactatcagaatatccatggagcttanattatgagaaagagagtacatataccatagtctaaa

SEQ ID NO: 6605 - DNA, 389 bp, Glycine max
  unsure (1)..(389): unsure at all n locations
agcttagttacacatacctctctaatagctaagttcacctccttaagatgagaagctagagcttagctacacaccccctataatagctaagctcacccatatgccaaaaaacatgaaaatacaaaaaaagttcctactacaaagactactcaaaatgccccgaaatacaaggctaaaaccctatactactagaatgaccaaaatacaaggcccaaacgaaggaaaaacctattctaatatttacaaagataagcgggttcatacttagcccatgggctcaaaatctaccctaaggctcatgagaaccctagggccttcccttggatctctagcccaatctacttggagtcttctatccaatgcccttacggggtaggatngcatctata

SEQ ID NO: 6606 - DNA, 383 bp, Glycine max
agcttgagggaaaacttgatgccttggtcaacctagtaactcaacttgccataaatcagaaatctgcatcttcacctattactgttgcaagagtctgtggtctatgttcttctgctgatcaccatacagatctctgtccttctttgcagcaatctggagtcaatgagcaacctgaagcctatgttgcaaacattcataatagacctcctcagcagcaaaaccaacaatagcagaataattatgatctttcaaacaacagatacaatccaggttagaggaatcatccaaatctgagatgggcaaatcctccacaacaacaacagcagcaacaataacagcctgtccctcccttccagaatgctactggtccaagcaagccatat

SEQ ID NO: 6607 - DNA, 424 bp, Glycine max
tatctgagtccactctttatgtgaaatataagggaaataactttctcatagtttctctctatgttgatgatcttttagaaactggagatgatgcaaggctagttgaggagttcaagcaagaaatgatgcaagctattgaaatgactcatcttggtctcatgacttattttcttggaattgagatcaagcaaagttaaaacaaagtgttaatctgtcaaaggaaatacacaaaagaaattttgaagaagtttcaaatggaggaatgcaaatctattagcacaccaatgaatcaaaaggagaagttcaacaaggaagatggtgctgataaaattgatgaaggatattataggagtttgattgaatgtctaatgtatctcactacaataaggtcagacattctatttgttgtaagtctcttgtctcg

SEQ ID NO: 6608 - DNA, 369 bp, Glycine max
  unsure (1)..(369): unsure at all n locations
caaacgacaataactctagactccgatgtgcgattgtgtcccgtaatatatcgagatactagaaattcacaacagaagctcttataaaaatcaaacgacgatgactttntacacggatgtccgattgggtcccataatatgtcgagacgcttgaaattgaaaacagaagccttcaccatattcaaaagacaataactttttactggaatgtccgagtgagccccataatatatcgagacgctcgtcattgaaaacacatgctcagaggaacattcaacgacaataacttttgactcaaatgtgcggttgagtcccgcactatatccagacgctcgtaatcgaagacagaagctctgaggaaattcaaac

SEQ ID NO: 6609 - DNA, 353 bp, Glycine max
  unsure (1)..(353): unsure at all n locations
agctntgcgggttataatgaatgatggctatggtctgcttgaaaatttgatgcacctgcctactttacaatattaattttataatgtaatttggatacatattcttttttcatgtgggtggttttgatgccactatgcaggcatatactgaaacttccggaaacctgaagggcttaccacaaggtataatacaagctacttcagatcttgagttaaggcatttatggtcgccaagtaatttgaggtcaaaggtcagcatcttttgcaatttatttattttacattatatagttctatttaaatcgatagatgatgaccgaatntgtaaactacaagcggcacgtcatcaatta

SEQ ID NO: 6610 - DNA, 359 bp, Glycine max
caagcttatcgacttctgtgtagattcatcatctggggacatcaattatgcagacttagtactttccccaatcgatgcccttatcgtttacatttggacttctatgataccatgtctttgtaacaatcacaatccaacaatgtctatgcttctgtatacacaattgatacaaaatgggtatcccccagatcattttactttcccatttgcactcaaagcatgtttgtgccattgctgatcaacattgtggaaaatgcattcattgctgcatagtgaaatctgggtttgaagctgatgcctatactgctactgggttactgcatatgtctgtgtcatgtgcacatctgaactcacgactc

SEQ ID NO: 6611 - DNA, 311 bp, Glycine max
  unsure (1)..(311): unsure at all n locations
ttaataagatatctcttgaagataatcttgctttggtgacaccttctggggaggaggagataaaggaatcggtttgggagtgtggtatcttgaaaagtccctagccggatggttataatctcaagtttatcaaaaacttttgagatttattgaaggtggatgtgaaacatgttttggatgaattccatttacatggaattattccaagagggtccaattcttcttttatatcccttatccccaaggtgaccaatcctctcaactcgggagagcttagaccaattntctttggtggattctatgtataaaat

SEQ ID NO: 6612 - DNA, 449 bp, Glycine max
  unsure (1)..(449): unsure at all n locations
ctccatgaatagcctccaatcaaaggctatgcttattatttcattntacttcattttcttccttatgattcccacatataatttaagtaaacatgcggaagacaggatgaacgcgtagctattagcagtcacagactcagaatattgtaaaaaccttcttgataatagcattgaaatgaggataaaataagtataaaagtgaagctcacaaaggaaaaataagaattaaccaaatatacctgaggatcaagaggatcagcctcgcgagaaacaaggttttgtaagctaataatcacattagtagctgccatcacagggtctatagaaagttggggaagagctgcatgacctccctttcctcttattattgcttcaaatacaccacttcctgccgataatggaccacacctagaggccactctcactactggaatgtcaggcgtcacatg

SEQ ID NO: 6613 - DNA, 399 bp, Glycine max
  unsure (1)..(399): unsure at all n locations
agcttgngcaatagtccccactaccatcacctagatatatcatcctctntttaccctcttccaaaattgaatcttggattctatctatgattaaaccctgaaatggttaaaaatttaataagattttataaccataataattggtcacaagattccaaatgatagaaacttcaaaattgatatgagtaaatgcatgtttggtttgactcttcagaattgattataattacataattaattttgaatatattttaatatgttttatttatcaagaagaattcagaattgattctaaattaaaataactttgaatagttgttacatttaatccaaaattctatattgacatttatttgtaacttgattctatataaagtatccaaacataatatacataat

SEQ ID NO: 6614 - DNA, 388 bp, Glycine max
  unsure (1)..(388): unsure at all n locations
tgtacaattaaacagctctcattagaagctgatccaaacttatcctaaaacttggattgggtagaacaaatcaacagtcatagaaacacacatgatgagttggcattctgcaaccacatcataacatgagatgagtcatgagttgcttctattggaatgttcacaacaagaagagcatataatttgagggacttgaagcctaagatngaccgaagaacgattacattaataatcaccttatcatatgccatgcgtgcatttgggtcagagagaatggaataagctttgtcgagtatgatggccatgtcatggccagcagggccagcaatgtcatggtggcagcgcttctgaagagagcgatacgccactttgacctgtgactgatcac

SEQ ID NO: 6615 - DNA, 457 bp, Glycine max
  unsure (1)..(457): unsure at all n locations
ctaagctaatagtcttctagtaaagaaatcactggtagcagtaaaattattaatcagctatatatcacgggtgatattaaataaactgcctaattataaattatttcatgcattgggctgataatagcagtaaaatatttatactcaaaaccgaggcgttcaagttcaatgaagttaactacttcagtacttcatatatgggacgcagtatatataaaatggatacttagccaaaaagattaattagtctaaatattttaaacattttatatttaaaatggatactttntaattaacaatatatatatactcatttcttcttttaaatggatactttctaattntatttgattacacttacttaacttcttttacagattttgaaaccagctttcacaataatagctgatcacgagatgaaatgccttntgttattgattcgtggcacacatagtac

SEQ ID NO: 6616 - DNA, 435 bp, Glycine max
  unsure (1)..(435): unsure at all n locations
agcttgcanactaagtgactactnttcttgctttcaaatcccattgctttatccatgtacacttcttcttcaagatccccatttaagaatgttgttttcacatccatttgatgtaattctagatcaaaatgagctactaaggccatgattatcctaaatgaatccttcttagagaaaggagaaaaggtttcatgataatgaatacccctttttgagtaaagcctctggctacaagtctagctttatatctttcaacattacctcttgagtctctcttggttntaaaaacccatttacactatagagactccttttcataattctattacgtcccacacttggattttagccatagattccatntcttcattcatggcttcataccataatntagaatcatctctactcatgacttgtgaaaactttaattgatca

SEQ ID NO: 6617 - DNA, 432 bp, Glycine max
agcttgtattccagagaagtggtaagaacactatatgatactaaaaacaagacatatgatagtaatagctttatgatttatcctttctctctgttaaccttaaaatatccacgagaggacatatctggctcagtatatttcttgaattttcagtcctacgttgcacaagaggaacttttcttgtgaactttaactgtaaaagagaccctcacatactcagcaaacatgaggctttcttctaaaatgaccaaagaagagatagacaaagtggtggaagaaaccatagtggaaatgggtctggaagattgtgcagatactacgattggaaattggcattgtaggggtattagtaatggtgaaaagaaaagactagcattggccttgagattctgacacaaccatatgtcctacttcttgatgaacctactactg

SEQ ID NO: 6618 - DNA, 408 bp, Glycine max
gagcttactcttctattagctagatgtaatgcactataaccatgtttgcatataaggatgatttgtgattgtcaacagcttttatgaataagatatgatatgtgcttcatatgtcacatatgatacatgtccaatacaatgatacaattgttctaaaaatatataagatatgatgcttgtgaaactcatagaacatgatgaatatataattgcaattctacaaatctagactaagaacatattcttgaacattactaaagttataaatcacttgctgtggtctataaataagaatagtacgaatcttgttcctttattgaaatcatctataaagggcacaacttgcccttttagttagtcaagctactatgcttctataatatagaacatagatactgttatatctca

SEQ ID NO: 6619 - DNA, 323 bp, Glycine max
tctttcgtctttattttctagcgtctcgatatattatgggactcaatcagacatccgagaagaaagttattgatgtttgaatgtgctgggagcttccatttcttttttcgagcgtcttgatatattaccggactcaatcggacatccgagtaaaaagttattgtcatttgaattttcctgggtcttccatttttaatttcgagcgtctcgatatattatgggactaaattggatatcctagtaaaaagttattgtcgcttgaattttctacgagcttccgattttaatttcgagcgtcatgatatattacaggactcaatcgg

SEQ ID NO: 6620 - DNA, 381 bp, Glycine max
  unsure (1)..(381): unsure at all n locations
tganattgaacaacggaagctctcgagacaatcgagtggtcttaaattntcacacagatgtccgattcggggaaataatatatcgagacgcacgacattgaacaacggaagctctcgagaaatttgaatggtcataacatatcactccgatgttccagccggcgacataaattatcgagacgctcgatatcgaacaaccgaagctctcgacaaatgataatggccgtaacgtttcacgcgaatgttctattcggggacataactcatctagacgctccatattgaacaacggaagctctcgagaaatttgaatggtcataagaattcacacggatgtccgattctggaacataatatatccagacgatcgaaattgaacaa

SEQ ID NO: 6621 - DNA, 372 bp, Glycine max
  unsure (1)..(372): unsure at all n locations
agctntgagcaacttcaaacaacaataactttttactcggatgtctgattgagtcccgtaaaatatcgagacgctcgaaattgaataccgaagctctgagcaaattcaaacgacaataacttttttactcggttgtctgattgagtgccgtaatatatcgagacgctcggacttgaatgccgaagctctgagcaaattcaaactacaataactctttactcagatgtctgattgagtcccgtattatatcgagacgctcggtattgaatgctgaagctttgagcaaattcaaacgacaataactttttactcggatgtttgatagagtcccgtaatatatcgagacgctcgaactggaataccgaagctctg

SEQ ID NO: 6622 - DNA, 401 bp, Glycine max
  unsure (1)..(401): unsure at all n locations
gaccttaaatctaagcttcgatcaacttgttctttnntcaatttttgatcaaggagaaagttggtgagtcccccataccattgtcttgatgcttgtttaagtccatagagagcttcttaagcttatacccatgagtaggagttttatgatcctcaaaactgggagattgagaaacatagacttcctcttcaatgtattcttttagaaaagcactcttcacatccatttggtacacgttaaaatccataatacaatcaaatgcaagcaataatctcacaacttctaatctagctattggagcataagtttcaccaaagtctatgtgctctcgttggttataacctctggctactagcctagatttattcctagatatcaagccatgttcatctagcatattt

SEQ ID NO: 6623 - DNA, 392 bp, Glycine max
  unsure (1)..(392): unsure at all n locations
cgaccataactttntactcggatgtttgattgatgctcgtaatatatcgagacgctcgaaattgaatgttgaagctctgagccaatataaacgacaatgactttttactcggatgtatgattgagtcccgtaacatatcgagacactcgaaattgaatgttgaacctctgagcttattcaaacgacaataactttttactccgatgtctgattgagtcccgtaacttatcgagacgctcgaaattgaacgttgaagctctgagcccattcaaacgactataactttttactcggatgtctgatcgaggcccgtaatatatcgagacgctcgaaattgaatgttgaacctctgagccaattcaaacgacaataacgtgtttctccgatgtctg

SEQ ID NO: 6624 - DNA, 411 bp, Glycine max
agcttcaacattcaatttcgagcgtctcgattattacgggactcaataagacatccgagagaaaagttattgtcgtttgaattggctcagagcttcaacattcaatttcgagcgtctcgatatattacgggactcaatcagacatccgaggaaaaagttattgtcgtttgaattggctcagagcttcaacattcaatttttagcgtctcgatatgttacgggactcaatcagacatccgagacaaaagttattgtcgtttgaattggctcagagcttcaacattcaatttcgagcgtctcgatatgttacgggactcaatcagacatccgagataaaagttattgtcgtttgaattagctcagagggtcaacattcaattccgagcgtctcaatatattacgggactcaat

SEQ ID NO: 6625 - DNA, 349 bp, Glycine max
  unsure (1)..(349): unsure at all n locations
agcttatgccatcaaatataaaatattcttattnggatgatagcaaaagttttccagtaattatatctgcctcccttgttgatgagcaagaggaggagctgttatctgttctcaagaagcattagaaggctataggctggaccctgatagacatttctggtattagctcatccacatgtatgcatcaaataaatttagaggatggggctaaaccagtaagatagccacagagaagactcaacccacagattcttgatgtagtgaagaaggaggtaaccaagctnttgcaagctggaatcatttatcttatctccgacagccaatgggtgagtcccgtccaggtagtccc

SEQ ID NO: 6626 - DNA, 320 bp, Glycine max
  unsure (1)..(320): unsure at all n locations
agctntctgtagatcaatgtctgaatgcacatgctgacgtggagtaaatgtcaaaggttccctatgccaatgcggctggttatttgatgtatgctatagtctgcactagactatatttggcacatgttgtaagccaagtctacaattttatgtctaacccacgatagcgacattgggaagtagtgaagtggatcttgaggtaccgaaatggtacaacaagtcatggtattatgtctggtagttagcaaggcgatcctttagttgcgagatatgtggattttgactatgttggtgatctggatgacatgaggtctacaaca

SEQ ID NO: 6627 - DNA, 290 bp, Glycine max
tttgcaagccagaatcttttatcctatctccgatagccaatgggtgagtcccgtccaggtagtcccgaagaagactggcctcacagtgatcagaaatgagaaggaggagctgattcctactcgggtgcagaacagttggaaagtctgcatcgactataagaggctgaaccaggttaccaaaaaggaccattttcccctgccattcattgaccagatgcttgaacgcctggcaggtaaatcccactactgtttccttgatggtttttctggttatatgcaaattactattg

SEQ ID NO: 6628 - DNA, 288 bp, Glycine max
ttaactcggatgtcttattcatgcgcataatatatcgagacacttgatattgaataacagaagctctcgagaaattcgaatggtcataacttttcacacggatgtccgattcgggcgcataatatgtcgagacgctcgaaattgaacaacggaagctctcgagaaattctaatggtcataacttttcactcggaggaccgattcaggcgcataatatatcgagacgctcgaaattgaaaaacggaagctcccgagaaattcaaatgggcataacttttaactcagagg

SEQ ID NO: 6629 - DNA, 275 bp, Glycine max
agcttgttctatccactgggaaccatcccctgagcaagcatacaaatggaaaaatatgagtcccaaagtaccaaaatccctgcggatatatgaagctcatgttggaattagtggttctgagccaaaaatatcctcattcaatgatttcacagacaaggtttcccccctcatttctttgggttggaatttgtaactaatcaattatacatatcttccatgtctatatattgtaatgggctccattgaatttttacttttattatatgcacaatgca

SEQ ID NO: 6630 - DNA, 304 bp, Glycine max
taatactcaagctttctatggttttttgtgtaggacaccctcatggtggttaaagccccgagaagacctcaccttatgacctgaagtggtacaacaaaccactgagaagctaaagttgatccaagaaaggatgaggactacccagagtaggaagaaaagttatcacgataagaggagaaaagacttggaattcaaggttggtgatcatgtattcttgagagtcactccatggactggggttggtcgagcattgaaatcctgaaaactaacacctcgctctatcagtcttgtccaaattcttaaa

SEQ ID NO: 6631 - DNA, 275 bp, Glycine max
  unsure (1)..(275): unsure at all n locations
agcntanctgatttgagcgcgactcggaagtaaaaatgggagaagatatcataccgcaagtttgtaagtttaaatatatgggatcaatactacaaaatgatgggaaaattaatgaggatgtcacacagagaatgcaagcaagatggctgaaatggagaaatgcatcaaggttatttgtgattgcaaagtacccaccaaacttaaaggctaattttatcgtattgctatacatccactatgctctatggtagtgaatgttaggctttaaagggaca

SEQ ID NO: 6632 - DNA, 283 bp, Glycine max
ttgatttcctttgtttctgtgactcttcttttctcatgtgcacccaaacccaatctccgggttcgaagacaaccttctttctccctttgttggcttgtttagcataacttttatttttcctctcaatttgatctttgactccctcatgaagcttcttcacatagtccgcctttgcttgaccttctttatgcttaaaaacagaaacattatgcataggcaaaagattaagtggagttagtgggttaaaaccacaaacaacttcaaaaggagaacaattagtggt

SEQ ID NO: 6633 - DNA, 287 bp, Glycine max
tatgctgcaaacatttattatagacctccacagcagcaaaaccaacaacaacagaataattatgacctttcaagcaatagatacaatccaggttggaggaatcatccaaatctgagatggacaagttgatgtgatcctgactaggagtggatcgcttgatacaggctacgaagattttggatgatgccacttccaatgaaggaagataagtcagggtagacgccacaaggattaccttgataagtctgagattggttcaacaaggaacccagagagaagctctcacc

SEQ ID NO: 6634 - DNA, 277 bp, Glycine max
agcttcttttttctggtccataaggtaatctattataggcaaagggtacttgttcttaatcgtcaccttattcaactggcggtagtctacacacaacctcatggtcctatctttcttctttactaacaacactggtgctcccattggagatacactgggtctcacaaactgcttctccaaaaactcctctaactttttcttaagctcggctaactctataggagacatcctataaggggctatggatataggtccagcaccaggtaccaggtctatg

SEQ ID NO: 6635 - DNA, 274 bp, Glycine max
agcttgctatttctggaagctcctaatatctcccacactttttggggtgggccattcttggatggccttgattttctcagggtccacttggaccccatttctaccaactacaaaacctaagaaaactatattatctacacaaaaggtacacttctctatatttgcatagagggtgtttttcctaaggactgaaagaacttgtctgagatgtcctaagtgaaaatctaggctcctactatacactaaaatatcatcaaaataaacaactacaaat

SEQ ID NO: 6636 - DNA, 275 bp, Glycine max
agctttagtattcccaataatattaatgaagctcataattttcttggttaagagtaaagaagccaaactaaccgtttcacgcagggcagatgggtttgaagaacttaaggcagtttgaaagtgttcattgggcacagccatggaattcaacacctcagcatcaattgtttcatcctctaagtcaatcacattcattttctcccggatacactgtagtgcagcctctgtgcaaagagcagcaagatctgatccaacataaccatgagtatctctgc

SEQ ID NO: 6637 - DNA, 289 bp, Glycine max
taacatcgatttttttattaactgatgttaagaaaagtgcggtggcattttcataaataagttgacttaattaacatcggttttttcaaaacccgatgttaacatcgacctcttaatattggttttgaaaaattgatgttaccatcaagtacccaacatcggttattgaaacaccgatgttaactttagaaagttaacatcggtttttaaaaaaaccgatgttaacattgacatgttaacattggttttgtttaagaaaccgattttgtctcattcataagttaaaacc

SEQ ID NO: 6638 - DNA, 285 bp, Glycine max
  unsure (1)..(285): unsure at all n locations
ttagctntgtccccttgcttcatgnagactcgtccaaaatcgtgaagtaaacctcggatccctgtcggatacaatactggaaggaattccatgcaaccttactacttccttgatgtacaactccactagcttctccattctatacttcatattcaccgaaataaaatgagcagatttggtgagtcgatctattatgacccacacaacatcatgtccacgactagtcttgggtaaactagatacaaaatccatagatatgctctcccatttccattccggaatttc

SEQ ID NO: 6639 - DNA, 271 bp, Glycine max
agcttctgatctaaatttcgagcatctcgatatactatgggacacaatcagacatccgagtaaaaagttattgtcgtttgattttgctcagagcttttgttctaaatttcgagcgcctcgatatactgtgggacacaatcggacatccgagtaaaaagttattgtcgtttgattttgctcagagcttctgttctgaatttcgggcgtctcgatatactacgggacacaatcggacatcagagtaaaaagttattgttgtttgattttgctc

SEQ ID NO: 6640 - DNA, 275 bp, Glycine max
agcttgtattctggcagcagaaaaacaagtggttgttaactaagaagaaggaaatggcttcctcaatgatctcctccccagctgttaccaccgtcaaccgtgccggtgccggcatggttgctccattcaccggcctcaaatccatggctggcttccccacgaggaagaccaacaatgacattacctccattgctagcaacggtggaagagtacaatgcatgcaggtaagacaactccacacatatatacacacaagaggcaccaaaaagtttaaa

SEQ ID NO: 6641 - DNA, 274 bp, Glycine max
agcttgtgtgtttgtgacgcatgaacgaaaacacaattcatggggctccgaaaaagggttgaggatggagaattgcactaagcaatcactacgcatggctccaagctcctgggtggaggacgcatgaacgaaaacgcaactcatggggctccgaaataggattgagaatggagaattgcactaagcacattacggcgcatggctccaaactcatgggtggaggacgcatgaacgaaaacgccattcatggggctccgaaaaagggttgaggatg

SEQ ID NO: 6642 - DNA, 348 bp, Glycine max
tgttgagtatgcagtgaaaaatggccctgactttgaagctatgatatgtgaaaaacaacgggataatccttcctatagcttcctctttggtggggaaggtcatggttactaccgttataagctttggttatcaactcgtcccccgggtggtccattcaacccgtcttttccatcatcttccatgcccatgatgcttcctccaaatccaatgatgaatctgtctcctgtaaatgtttctccgatgaaccctgcacgaattggttcttcaccttcgatgctaggtccacctcctttccaacagttctatgatcaacaacaccaccatcaacatcctcagtcttttggact

SEQ ID NO: 6643 - DNA, 266 bp, Glycine max
aatgagatgttgaagatttgaaagtgttgatggcagctcaccctctattttgttatgtcttaaatccaattcgtgaaagttgtttgattgaggaaagacatttgggatttgaccactgaggtggttagcttctagattcataaaagataaccgcggaagggttaatagtgaggatgggattgaaccgttgaggttgttaactgagaggtccacgaaagtgagatgtatgatgttgaagaaagaaggagggattgacccttggaaac

SEQ ID NO: 6644 - DNA, 397 bp, Glycine max
ttgagaaaattcatacgacaataactttttattcggatgtctgattgagtcccgtaatatatcgagtcgctcgaaattgaataccgaagcgctgagcaaattcaaacgacaataactttttactcggatgtctgattgagtcccgtaatatatcgaaaagctcgaaattgaatgttgaagctctaagcaaattcaaacgacaaaaactttttactcggatgtctgattgagtcccgtaatatatcgaaacgctcgaatgtgaatgtagaagctctgagcaaattcaaacaacaataactttttactcggatgtctgattgagtcccgtaatatatcgagatgctcgaaatggaataccgaagctctgagcaaattcaaacgacaataactttttact

SEQ ID NO: 6645 - DNA, 364 bp, Glycine max
tgcatcagcatatgacctttatttaacatcataatttcataaaagaggaataggtctatatttttatcttaagcacttaagtatgatcttaaacactttccactgtgcctcactatgggacgcttgatatcgactaattacacctagtgcataagcgacatcaagacatgtacaagacatggcgtacatgatcgttcccactacactagcatatggtacgctactcatgcgagctctttcttcacgagttgtaggacaattctccctactaagagtagattcaacacctacaggcaaatagcctcacttggaaatatccatgttatatctctttaagatagtatcaatgtacatagattgggag

SEQ ID NO: 6646 - DNA, 400 bp, Glycine max
tataatatatcgatacgctcaaaattaaacttctgataacttttcacacggatgttcgattcgggcgcataagatgtcgagaggctcgaaattgaaaaaccgaagctcatgagaatttcaaatggtcataacttttcacacgaatgtccgattcaggcttataatatatcgagatgctcgaaattgaataacggaagctcttgagaatttcaaatggtcataacttgtcacactcaggtccgattcaggcttataatatatcgagacgctcaaaattaaacatcggaagctctcgagaaattcaatcggtcataatttttcacacggatctccgattcgggcgcataatatgtcgagacgcgcgaaattgaacaacgaaagctctcgtgaaattcaaatg

SEQ ID NO: 6647 - DNA, 438 bp, Glycine max
tgagagcttccgttgttcaatttcgagtgcctgtatattgatgcgcctgaatcggacatccgagtgaaaagttatgaccatttgaatttctcgagagcttcctatgtttaattttgagcgtctcgatatattatacgcctgaatcgaacctcagtgtaaaaagttatgaccatttgaatttctttagagcatccgttgttcattttcgagcgtctctatatgtgatgaaccttaatcggacctccgcgtgaaaagttatgaccatttgaatttctcgagagcttccgttgttcaatttcgagcgtctggacatattatgcgcccgaatcggacatccgtgggaaaagctatgaccatttgaatctctcgagagcttccggtgttcaatttcgagcgtctcgacatattatgcgcccgaatcggacatccatgggaaaa

SEQ ID NO: 6648 - DNA, 409 bp, Glycine max
tctcgatatattatgctcctgaatcggactttcgtgtgaaatgttatgaccattggaatttctcgagagcttccgatgttctatttcgagcctctcgatatattatgctcctgaatcggacttccgtgtgacaagttatgaccatttgaattgctcgacaccatacgttgttcaattacgagcgtctcgatatattatgcgcctgaatcggacgtccgtgtgataagttatgaccatttgagtttctcgagagcttccgttgttcaatttcaagcttctcgatatattatgctcctgaatcggacatccgtgtgagaagttatgaccattggaatttctcgagagctttcgatgttctatatcgagcgtctctatatattatacacctgaattagacttccgtgtgaca

SEQ ID NO: 6649 - DNA, 416 bp, Glycine max
tgtgctattccaagttcaattaccatacctttgtgttcgacaagtggcctcagatatcttaagaaggggggttgaattaagatattccaaactacttccccaattaaaaatctatttcactttttattcaagttataaattcccttaacaatgaacttcttaaatattgattcaaataaaacaatttgaatatgaatataaagcaataataaacaaaggagattaagggaagagaaagtgcaaactcagatttatactggttcggccacacccttgtgcctacgtccagtccccaagcaacccgcttgcgagttccactatcttgtaaattccttttacaagttctaaacacacaaggacaatccttcctttgtgtttagaattcctttacaacaagagacccacggtctcttaat

SEQ ID NO: 6650 - DNA, 419 bp, Glycine max
  unsure (1)..(419): unsure at all n locations
tctaaactntgtacaagaatgaagctctgataccacttgttagacaagtggcctcagatatcttaagaagggggggttgaattaagatattccaaactgtttcccctaattaaaaatctatttcactttttactcaagttatgaattcccttaatgacaatcttcttaaatattaattcaaatgaagcaacttgaatatgaatataaagcaataataaataaaggagattaagggaagagaaaatgcaaactcagttttatactggttcggccacacccttgtgcctacgtccagtccccaagcaacccgcttgagagttccactatcttgtaaattccttttacaagttctaaacacacaaggacaatccttcctttgtgtttagagatcctttacaacaagagactcacagtctctt

SEQ ID NO: 6651 - DNA, 403 bp, Glycine max
  unsure (1)..(403): unsure at all n locations
tgcacaatggaactgatggtttctcaacaacaaacttgataggctctggaaattttagctctgtctacaaaggaactcttgagttagaagacaaagttgttgcaataaaggtcctaaaccttcaaaaaaaaggagcacgcaagagtttcattgctgaatgcaatgcccttaaaagtattaaacatcgaaatctggttcagattttaacgtgttgctccagcacagattacaaaggccaagaatttaaagctttgatatttgagtacctgaaaaatgggagcctagaacagtggctgcatccaaggacattaactcctgaaaagccaggaacattgaaccttgaccaaagattaaatatcatgattgatgttgcntttgcaatacattatcttcatcatgaatg

SEQ ID NO: 6652 - DNA, 327 bp, Glycine max
  unsure (1)..(327): unsure at all n locations
tgcctgngcgagctgtcatgaccctaaatgccttgttttgctataaatatgatgtagctccattggagcttgtaggcctaggatcttcttcatcaatggattcctttgcttctctaaagatgaatggcagtggaatggagaaggaagagagagaggagacgccacttcaaggagaagatgagtctagaagaagcttaccaccataggaggccatggataagagcttggaggaagaaggagatgaatgaagggagagcaagagaagagcacgaaattttgtgcacacacatgacctctatttatagcctaagtgtcacacaaaattgg

SEQ ID NO: 6653 - DNA, 386 bp, Glycine max
tgaacctttatcatagcagacaacttctctttttctgaaaagggagtgctaataggtttagaatcagccattccaaacctcacaagtatcttctgaatgtagtccttttgagacaaaaatagccttttctgagttctgtccctatagatcaccattcctaagattttctttgcagccgctagatctttcatatcaaattcaccactcaagaggatcttcagattttgtatatcacacatgctttttgctacaataagcatgtcatctacatagagtagaagatagatcattgatccatcctccaccttgttgtgataaacacaacagtcatagaaacttctcttgaatccttggctggtgataaagctgtcaaacctcatgtacca

SEQ ID NO: 6654 - DNA, 394 bp, Glycine max
ttgagccaattcatacgacaataactttttactcgaatgtctgattgagtcccataatatatcgagacgatcgaaattgaatgttgaatctctgagcaaattcaaacgacaatagctttttactcggacgtctgattgagtcccgtaacatatcgagacgctcgaaattgaatgttgaacctctgagacaattcaaacgacaataactttttactcggatgtctgattgattcccgtaatatatcgagaccctcgaaattgaatgttgaagccctgagccaattcaaatgacaataaatttttactcggatgtctgattgagtcccgtaatatatcgagacgctcgaaattgaatgttgaacctctgagccaattcaaacgacaataacttttt

SEQ ID NO: 6655 - DNA, 414 bp, Glycine max
tgttgagaaattgtgcaaacaagagggaattggtgagacatgctattactagattttccacttcttatctaaccttggaaaggctccacaaagagaaagctaatattagaaagatgtttatttctgatgaatggatcttaaacaagttatctaaggagcctaaggggaaagaagctgcaaaggtagtgctcatgccttctttttggaatagtgtggtttacactcttaaagtcatggctccacttgtcaaagtgcttcgtcttgtggatggtgaaaggaaaccagccatgggctatatttatgaagcaatggacaaggcaaaagaaacaattatcaagtctttcaacaacaacgaaagcaagtacaaagatgtgtttgcaatcattgataaaagatgaaattgtcaacttcata

SEQ ID NO: 6656 - DNA, 417 bp, Glycine max
tcaagagatcatccccttgacaacattcttggtgacatctcagcaggggtaacaactagacattctctcaaagatttatgcaataacatggcttttgtatctatgattgaacctcaaaatttaaatgaagccataatagatgaaaattggataatagctatgcaggaagaactaaaccaatttgaaagaaataatgttcgggagttagttgagaaaccttaaaactacccaatcattgggacaaaatgggtgtttagaaataaattagatgaaaatggcatagttataaggaataaggcgagattagtagccaaaggatataatcaagaagagggaatagattatgaggagacatacacttcagttgctagattagaagtcatcagaatgctattagcttatgcatccataatgaat

SEQ ID NO: 6657 - DNA, 380 bp, Glycine max
tcagtggcttagtgaagatgaagaggtaaaagtgactcaacaggttgaggtgtgtctcaccattgggagatataatgacaaggtgctgtgtgatgtggtcccaatggaagcgacccatgtgctgttaggaagatcgtggcagtatgataccaaggcagtgcatgatggcttcaccaacaacatctctttcaagcaagctgacaagaagattgttctcaaaccgttatctcctcaagaggtttgtgaggatcagataaaaatgagagaaaagaaaaagagtgagacacttgagaggaaaaagagtgagacacttgagaaggaaaagtgaggaaagaaaaagatgaaacattgagaggaaaagaagaaaacaatgagtgaaa

SEQ ID NO: 6658 - DNA, 336 bp, Glycine max
tccatgtttaatcacgagcgtctcgatatactacgggacactatcagacattcgagtccaaagctattgtcgtttgacttttcttacagctttcgttatcgatttcgagcgtctcgatatattatagggctcaatcggacatccgagttaaaagatattgtcggttgactattgttatagattccgttatcaatttcgagagtcgtcatatattacagggctcaatcgaacatccgagtaaaaagttattgtcgttagatctttctcagagcttccgttttcaattacgagcgtctcgatattcgacgcgacacaatcggacattcgagtcaaaag

SEQ ID NO: 6659 - DNA, 417 bp, Glycine max
tgaagaggcaattgatgtgttgcattctcaatcagtatccttcagcattttcggtgaaaaagtttcttcgcctgtggtttcgaaattgatacaggcttttgaatcaaaagtacaagaagatgagcatgagacagaaagtagggattccagtgatgttctgtcatcatcaaactcatttattatgttaactaaagagcaaattggagatttgaaaaaattgctttcaaagtggaagctgaatgttcagattgcaggtacattattcaatggggagcgagatgatcggaaaactggtgatgcaaagtacagtgatctcaaggaccagtttgaacaattgaagcaacattgctcagatttggaagcatccaacattgaacttgcagttcaatatgaaactgcaaagcaacttctgggtga

SEQ ID NO: 6660 - DNA, 433 bp, Glycine max
  unsure (1)..(433): unsure at all n locations
agcttgcacacaagattctccttgcctggcacttcanaaccttctggttgggtcatatatatgtcttcctctanatccccatgcaagaatgcagttntaacatctaactgctccaagtgaagattctctacagctactatactcagaataaatctgatggtagtcatctttacaactggagagaagatctttgtgaaatcaattccttgtttctactgaaaccctttcaccacaagtctcgccttgtatcttcttctaccttcagattctttctttagcctatagacccacctattctgtaacgctttctttccttctagcaatttagttaaagaccacgtcgtattcttctgaagggatgtcatctcatttttcatcgctagctcccactcaatagtgtcattcccctgtgtagcatcactgaaacattctg

SEQ ID NO: 6661 - DNA, 379 bp, Glycine max
  unsure (1)..(379): unsure at all n locations
tgtttttctttgctgaaaataattaattagttntgcatttttaatatcacttagttattattaatttatggtttagtgttaaattaattttggtaaattattattttgtgttttagaataatagtgtttagttattattaatttacagtttaggtagataaattattatacatgataaattaattttcttaaattattattttatgttttagaacaatagtgtttagttattattaatttaccgcttagttagataaattattatacatggaaaattaatttttttattaaattattattttatgttttagaataatagtgcttagttattattaatttacgaattagttacataaattattatacatgttaaattaat

SEQ ID NO: 6662 - DNA, 429 bp, Glycine max
  unsure (1)..(429): unsure at all n locations
agcttgaatcggacatccgtgtgaaaagttatgagcatttgaatgtctcaagagcttccattgttcaatttcgagcatctcgatatattataagcctgaatcggacattcgtgtgaaaagttatgaccatttgaatttctcaagaggttccgttgttcaatttcgagcctctcgacatcttatacgcccgaatcgaacatccgtgtgaaaagnnatgaccatntgaatttgcaagagtctccgaggtctaatttcgagcgtatcgatatattataagcctgaaacggacattcgtataaaaagttatgaccatttgaatttctcaagagcttgccgtgatcaatgtcgagcctctcgacatattatgcgcccgaatcggacatccgggtgaatagttatgaccatttgaatttcgcgagagtttccgat

SEQ ID NO: 6663 - DNA, 397 bp, Glycine max
taatgaagccacaagaaaagatcactacccgcttcccttcatggatcaaatgctcgagagacttacagggcaatctttctactgttttttggatggatactcgggttataatcagattgcagtagatccccaagaccaataaaagataactttcacatgtcacttcagtgtcttttcttatcgccgcatgccattcggtttatgtaatgcccctactactatccaaagatgtatgatggctatctttgctgacatggtagagaaaggcattgaagtctttatggatgatttttcagtctttggtgcatcttttgagaattgtttagcaaatctagagaaggtgttacagcggtgtgaagaatccaatctggtacttaacggggagaaatgtcatttt

SEQ ID NO: 6664 - DNA, 431 bp, Glycine max
agcttgagactgggcaatgaatagaaatcatcacttccattgatgcctttaagtaagacttcattggttgcctgtgatttgacaatgcacaagtgaggatagaactcaaaataaacttcattatctttagcaaacttactgacacaatagatttttagtgattgaaaaaacatgtaacaaattatgaagataaagaggaaaattaggattggtaggagacttaaaagaagaaaaaccaaaaccaagaattttcaaaccttcaatcaaagtgaccaagctgatgagtattttgtgtttctccagtcacatggaatgaagctcccgagtcaaggatccaagttgagttagtattttcctgggaagatgaattagctagcatggcactcagaataacttcaatgggagttgactgattctgacttttagtattt

SEQ ID NO: 6665 - DNA, 343 bp, Glycine max
  unsure (1)..(343): unsure at all n locations
tttaatctgattaaaagcccaaacaagaaatgcaaagggaagttctatgaaggtgactggtgtaactgcaatcattcatcaaattgaatgataaaagctaaaaacaaatttgcataaaccaggattataaaatgaaatttggcattaaacctatnntaaaataaatgaaagtccaaatcagaacataacaattatgcaaatcggagccaagttaatcttagcgaatactcacctccatccgataaccagcccttgatgcacacatagcatggaaataagtggaacacttgcaacattgtgtgcacgaaccatgaatttcttacaaaaacacaaatctgaaatc

SEQ ID NO: 6666 - DNA, 387 bp, Glycine max
agctttgcataccccaaggaaccatcaggaaattacttgtgaaggagagccatgagggtgggctcatgggccactttgggatagacaagaccctagtcttactcaaagaaaagttctattggccccatatgaagaaagatgtccataaacattgcactaggtgtgtggcttgtttacaagccaagtctagggtgatgcctcatgggctatacacacccttacccattccatctgcaccttgggtagacattagtatggactttgtccttgggctccctagaacccaaagagttgtagactctatctttgtagtggtggataggtttagcaagatggcacactttataccatgccacaaggtggatgatgcttcccatatcttaaaac

SEQ ID NO: 6667 - DNA, 425 bp, Glycine max
  unsure (1)..(425): unsure at all n locations
agcttcacaaaagtttatatggcttgaaacatgcaccgaggcagtggtacaagaagtttaatgagtttatgagcaactcaagattcaacagatgtgacatgggccattgctgctatgttaagaaatatactaatagttatgttgtccttgtcatgtatgttgatgacatgttgattgcaggatctagtatggcagaaattaacaagttgaancancagngggcagaaaactttgaaatgaaggatcttggtccagctaaacaaatccttggtatgagaattcttagaaacagatcagaaggaattttgaagctgtctcatgagaaatatatacacaagttgcttgacatgttttaccttgaagattctaagaccaggaatacccctntaggatctcatttgaagttttcaaagaagcaatctttg

SEQ ID NO: 6668 - DNA, 442 bp, Glycine max
  unsure (1)..(442): unsure at all n locations
agctntcaactattagctagttnttcaatctccaattagttnttcagttaattntgtcaaacgtaatctaaatataagttacattatcattaaagaaaaaaaaatacttttgaaaattttaagattggcataaattaaaggttaaattagtctgtaggatctcatattattacaaatttttttaattagatccttatattttattnttcttttaatgggtcctatattaattttaaatttgtaacctacgttaatttatcatgaggaatctgttagacttaatgaaatatttcatcatatatacacatatagatgcgaaccctaaaccaatacacttgaattgattataaatgtgtgaaccttaaactacgaattgttacatacgtgattaaggaagtgcgaacaacattacaaacaaaataaggattaatcacgcattatg

SEQ ID NO: 6669 - DNA, 387 bp, Glycine max
agctcgttccagaatccgcaatctacgccaagttgctcgaactcgagactcagatagattctgctttggccaggaagaaaattgatgtgcaggcgaaagttagaaaccctctctgcgttaagaaaacgcttagagtttatgtttataacactttttcaaatcaagtgaaagtggagactgggaagaatggtgtggaggagccttcttgggctctgaggataactggaagggtgttggaagatggtaatggaaaggattctgtggcggaaggaatcttgacgaatgaatatccaaaattctcggctttctttaagaagattaccatatacttggatcagggcttgtaccaggataaccatgttgttgtgtgggatagtgctcattcgg

SEQ ID NO: 6670 - DNA, 388 bp, Glycine max
tgttgttttttagctagacaactttttattactattttttattttctatatttttcttccatcttattcttttcttgctcgctctctttttgctcctttttttccatgagatattttgctacctaaacatacgtatatttttgtgaggtattttgctatatacatgcgtgtccaaggtatcttgctacctaaacatacatatatatgttttgtgagatatttttgctatatacatgcatatccaaggtatcttgctacctaaacatacatatatatattttgtgaagtatttttcctacatacatgcatatccaaggtatctttctacctaaacatacatatatattttgtgaggtatgactaccttccgagcttgtgcttgttttat

SEQ ID NO: 6671 - DNA, 393 bp, Glycine max
  unsure (1)..(393): unsure at all n locations
tctatagaaggttcgttcctaatttctctacaattgcatcacctctcaatgagctagtgaagaagaatgtggcatttacctgnggtgaaatacaagagcaagccttttctttgcttaaagaaaagcttactaaggcacctattctagctcttcctaactattctaaaacttttgagctagaatgtgatgcctctggagtgggagttggagctgtattgttacaaggtgggcaccctattgcctattttagtgaaaaacttcatagtgccaccctcaactaccccacctatgataaagagctttatgccttaataagagccctccaaacttgggaacattaccttgtttccaaggaatttgtcattcatagtgatcatcaatcacttaagtaca

SEQ ID NO: 6672 - DNA, 429 bp, Glycine max
agcttgcaaactaagtgctcacctttagtatatgagaatcctttaagttgtttcatgtaaacctcttcctctaaatgaccattaaggaattccattttcacatccatttgatgtaactcaaagtcaaaatgagctactaatgccataattactcggaaagaatctttcttagatacaggagaaaaagtctatgtgtaattaattccttctctttgagtgaaccctttggcaacaagtcttgccttatatctttcaatgttgccttatgagtctttcttggttttaaaaactcatctacattcaatggcttttacactactaggcaactatacgagatcccatacttggttaaatgccatagaatccatctcatctttcatggcattgtgccacaagtttgattctttagaactcatggcctgtgaaaac

SEQ ID NO: 6673 - DNA, 412 bp, Glycine max
agcttgccttgccccttgatatacttgtgggactcatggtcactatgaatgacaaattccttgggataaaggtagtgttggcatgttttcaaagcccgtactaaggcatacaaatccttatcataagttgaatagttaagggtaggaccacttaatcttttactaaaataagcaattggatggccttcttgcaacaacacaaccccaatcccaacatttgaagcatcacactcaatttcaaaagatttttgaaagtttggcaacgcaagtatgggggcattagttagcttttgcttaagaacattgaaagcttcttcttgtttctctccgcatttgagaccaacatttttcttgagcactttattgagaggtgctgccaatgtgctaaaacccttcacaaattggccataaa

SEQ ID NO: 6674 - DNA, 405 bp, Glycine max
tttatgatctgtgtgcacaataaattctctgcccaataaataatgtctccagtgctgaatacaaagcacaagggccatcaattccttctcatagacagattttgccagattcccatcagataaagctttactgaagaaagcaataggtcgtctctgctgcattagaacagcacctatacctctgccagccgcatcacactcaacttcaaaaggtaaatcaaaatttggaagaattagcacagggggggaagtcatgatccccttcatctcctcaaaggccttgacagcctctattccccaagaaaaattgtctttcttagtcaattcggtgagaggttttgctattttaccataatcctggataaactttctataataccctgcgagactcaaaaaaccacgtac

SEQ ID NO: 6675 - DNA, 406 bp, Glycine max
tgttcgtgtgtagagaaacttaagctttctgtgtcttctttaaataaagatccggtggtagagaccccaactagtggttctgtgttaacttctaatatgtgatttatattgtcctatggaaatttctagtagaacattcttgattgatctgatttgtttgcctttgatccaaattgatgttattttgggtatggactggttatcttccaaccatgtcttgtaaaactattttgataaaactgtggtgtttgatgattttggagtgagtaaggataggatatttatatctaccaaccaagttgtgatatctttaaaagaagatgcttaagtgcacatgatcttgtttaactttgaagtagagacaaatgtttccatgggtgacctccctgttgttagagtgtttcct

SEQ ID NO: 6676 - DNA, 406 bp, Glycine max
cttgatttcctttgttccggaaacctttcttttctcatgtgcacccaaacccaatctccgggttcgaagacaaccttctttctccctttgttggcttgtttattataacttttatttttcctctcaatttgatctttgactctctcatgaagcttcttcacatagtccgcctttgcttgaccttctttatgattaaaaacagaaacattaggcataggcaaaagatcaagaggagttagtggattaaaaccataaaatacttcaaaaggagaacaattagtggtgccatgaatagctctattgtaagcaaattcaacatggggtaaacaagcttcccaagtttttaagttattcctcaaaactgtcctaaacaaagttcccaaagtcctattaacaacttccgttt

SEQ ID NO: 6677 - DNA, 410 bp, Glycine max
tcttaagttcttagagaaagcctcatagaacttgttgtaatcctccttgttctctgcaatttcaaagaaaagctcaagtggatcctcgtgtacaaagtcttctttatatatctttaaatgacaaggtaataataggatctaaaatgtaaggatccaaatccatatttatcatagattacattattacaatatacttctatctaatattgaaaaaaaattgatacgtgtgtgcgcacatatatgtatatatgtacgtatgcctcatattaaaaaagtcaacttttgaatgtattatgatatcataattgaattcagaagtagaatttaactgtccaggtggacaaatcatctagaaaaatgtgacatacatggtgttaacaaacgatgcaaaatataacaaaagtatacat

SEQ ID NO: 6678 - DNA, 390 bp, Glycine max
tgaacatatacacatactataacatatgttgatgtacttaattttggggtattcatatgcagataataactggttaggaaatagttaatcacattaaaggggaagaggaaatatatcttgttgcgtgagtttatacataaaaagtgttttagttattagtttaatttactaatctatgagaaataaagtggaggtggtggatgattatgtattgtgttgttaatggtactggaataattagttatagaaatatgggtgttctgctaattggtttttgttttttgtctttgtacgtttcaaatttgtctgaaataacattaattttaagtaacgaataataatatatattacaaaatttagttatgcaatatttcacaagtattaggtgaa

SEQ ID NO: 6679 - DNA, 376 bp, Glycine max
  unsure (1)..(376): unsure at all n locations
tcaagaaaaagatggcctcagcaaattccttatttccagaagggaattctatcaatagacctccaatctttaatggagagggttaccactactggaaaacccgaatgcaaatttttattgaggcaatagatctaaatatttgggaagccatagaaatagggccttatatacccaccacagtagaaagagttacaatagatggtagttcatcaagtgaaagcataactatagaaaaacctaaagatagatggtctgaagaggatagaaaacgagtacaatacaacttaaaagccaaaaacataataacatctgccctgngaatggatgaatatttcagggtttcaaattgtaagagtgctaaggaaatgtgggacac

SEQ ID NO: 6680 - DNA, 406 bp, Glycine max
tggctctggccattagaaccatttcattcttaagttccttaacctttaaatagacattctggtcaagtaagtgcttttctgcatcaaacagatcaaacttgatcttctaatcatctatgcccatttctagtttatcctttcccatatccaccacacaaccggcggttaacataaagggatggcccaaaatcaaggggattttagcgtcctcttcaatatccatcacaacaaaatctgcagggaaactaaactgcttcaccttaaccagaacatcttcaattatgctataaggtcttgtaatagaccgatctacaagttgtagtgtcattctagttggcataatctccaactctctaattctcctacacatggagagaggcatcaaatttatactggcccccaaatc

SEQ ID NO: 6681 - DNA, 409 bp, Glycine max
tctatttattttcagtagatgaagatgaatctgtggccaccaaatggacttttctaaggaaaatagcatcatttctcgcactgaattgttgggagttggaagctttcttcccaatcaaattcctagcctcggcaggagtcatatcactgagagctccaccactggcagcatcaatcatactcctctccatgttgctaagttcctcatagaaatattgaagaaggagttgctctggaaactggtggtgaggacagcttgcacacaatttcttgaatctttcccaatactcatacaagctctctccactaagttgcctgatgccttaaatgtcttttttgatggcagtggtcctagatgcggggaagaatttctccaagaacaccctcttaaggtcatcccagctgaaaat

SEQ ID NO: 6682 - DNA, 382 bp, Glycine max
tgttcgtgtgtagagaaacttaagctttctgtgtcttctttaaataaagatccggtggtagagaccccaactagtggttctgtgttaacttctaatatgtgtttgaattgtcctatggaaatttctagtagaacattcttgattgatctgatttgtttgcctttgatccaaattgatgttattttgggtatggactggttatcttccaaccatgtcttgtaaaactattttgataaaactgtggtgtttgatgattttggagtgagtaaggataggatatttatatctaccaaccaagttgtgatatctttaaaagaagatgcttaagtgcacatgatcttgtttaactttgaagtagagacaaatgtttccatgggtgacc

SEQ ID NO: 6683 - DNA, 394 bp, Glycine max
tgacggagtttggtgcatcggggaataatttcactttataagtgggtcccaattggattcccaattttcaacttacctatttggaagagatatcatggccgttaggtcccagctttccattgtggattcagtcacaaaacaaacttgaatatgttggactatctaacacggggattttcgattctatttccacacagatgtgggaagcactttctcaggttttgtatttaaacctctctcgtaatcatatccatggtgagattgggactacattaaagaatccaatatctatcccaactattgatctaagctcaaatcacttgtgtggtaaattaccctatctttcaagtaatgtgcttcagttggatctttcaagcaattcattctccgaatc

SEQ ID NO: 6684 - DNA, 339 bp, Glycine max
tgttgatgctaggcaggggatatgcatctttggaacacgtcatgtacaggttggtgtagtctgtgcacaatttatgtatttgaattctctgatgaactgggatttaagcagcttgtcaatctctccactggctactttgtgtagttcttctcccatcttccttttcttttgtgagactggtttggcctgagggaagatagccattttgtggcatataatgttagggtggatgcctggcatgtcagatggttgtcaagcaaataaatctgcgacttcagctataggtctgtgctcgtggctaatgaggtctttgttgagctgtgtgcattgcccaaactt

SEQ ID NO: 6685 - DNA, 364 bp, Glycine max
agcttctatagaaagttcgttcctaatttctctacaattgcatcacctctcaatgagctggtgaagaagaatgtggcatttacctgcggtgaaaaacaagagcaagcctttgctttgctcaaagaaaagcttactagggcacctgttctagctcttcctgacttttctaaaactattgagctagaatgtgatgcctctggagtgggagttagagctgtattgttacaaggtgggcaccctattgcttattttagtgaaaaacttcatagtgccaccctcaactaccccacctatgataaagagctctatgccttaataagagccctccaaacttgggaacattaccttgtttccaagagattgt

SEQ ID NO: 6686 - DNA, 375 bp, Glycine max
tggacttcttgtgttctgggaacctctccttcctcatgtgtaccaaacccaatcacctgggtcaagcacgactttctttctgcttttgttggcttgccttgcatagctcacatttttcttttcaatttgagccttcacttgctcatgcagcttcttcacatacttagctttagcctgtgcgtccttatgcttaaacatagcaatgtgtggcataggccacaaatcaagaggagtcaaaggattaaatccatacactatctcaaatggtgaacaattagttgtgctatggacaacccgattataagcaaactcaacatgaggcaaacatgcttcccaagatttttctttaaaacagtcctaagcagtgtgcctaaa

SEQ ID NO: 6687 - DNA, 391 bp, Glycine max
  unsure (1)..(391): unsure at all n locations
tctgttttaaattacgagcgtttcgatatatttcgggactcaatcggacatccgagagaaaatttattttcccttaaattcgctcagagtttcatttttctattatgagcgncncgatgtattaggggtctcaatcggacatccgagttaaaaattattgtcgtttgatttttctcaaagctttcgttttcaattacgagcgtctcgaaatcctacgggacacaattggacatccgagtgaaaagttattgtcgtttgaatttgtttagagcttatgttttcaattacgagcgttttgatatcccacgggacacaatcggaaatccgagttaaaagttattgtcgctagaattttgtcatagcttccgttatcaattatcagcgtctcgat

SEQ ID NO: 6688 - DNA, 428 bp, Glycine max
  unsure (1)..(428): unsure at all n locations
agctntgagcaaattcaaacgacaataactntagactcggatgtccgattgtgtcccgtaatatatcgagatactagaaattcagaacagaagctattagaataatcaaacgacgatgactttttacacggatgntccgatgggtcccataatatgtctagacgcttgaaattgaaaacagaagctttcagcatattcaaaagacaataactttctactcgaatgttcgagtgagtcccataatatatcgagacgctcgtaattgaaaacagaagctcagaggaaattcaaacgacaataacttttgactcaaatgtccgcttgagtcccgcactatatcgagacgctcgtaattganaacagaagctctgaggaaattcaaacgacagtaactttttactctgatgaccgattgagtcccataatat

SEQ ID NO: 6689 - DNA, 429 bp, Glycine max
  unsure (1)..(429): unsure at all n locations
agcttacattattgttggcaagtctatatatattattttttagaacaaaaatattccttgtctctaactgaaaaataaataaaaacagggattcgactttttttatgcgaacaagagtataataagtgatttgactcattaataaataaaaaactcgacaattgatatttgaatgtattcataattctggtaactcgttatgcatgtgcacataatataaatctattaaaaggagttgaagccaaaggattcatanatatctttttattnttaacataaagaagaacattacgattctctataaccaaataaaagcattcaagattatagattataacatatcctacggattggtatttataaaaatacttatcatgaccagaaaagcaagaatatgcaatatccgaatatctactacttgattaagtt

SEQ ID NO: 6690 - DNA, 438 bp, Glycine max
agcttcgaaatctaaagatctaattcatggtaaatgtttcataaatggaattcccttacttctgttgattgattccggtgcaacctattcttctatatcctattcatgtgtcgggaaacttaagcttcatatgtcttctttaaataaaaatctgattgtagaaaccccaactagtggttttgtgttaacttctaatgtgtgtttgagttctcttgtggatacttctggtaggacatttgtggttgatctgatttgtttgcccttgagccaaattgatgttattctgggaatggactagttatcttccaaccatgtcttgtagaactgctttgataaaactgcggtgttctatggttctggagtgagtgatgatatgatgttcatctttaccaaccaagctgtgacatctttaaaagaagatgctcaagtgtacatgat

SEQ ID NO: 6691 - DNA, 406 bp, Glycine max
tcttgccctcaaattccttgagctgaccaacagcatattcatcaatggcatcaaccatataaagaacctcgtatcccttcttcttcaacttctctaagaatgtagagttctcaacagccttcttgctttcacctgtgatgtagtagatgtcactctgaccttccttcatcctggtcacataatccttgaggcttgtcatttcatcaccactcttggtggagtggtacctgagcaattcagcaatctttcccttgttctgtgaatcctcatggatacctagcttcaagttcttggagaaagcctcatagaacttgttgtaatcctccttgttctctgcaatttcaaagaagagctcaaggcacttcttaaccaagttctttctgatgaccttcaagatcttgttctg

SEQ ID NO: 6692 - DNA, 388 bp, Glycine max
tctaaactttatacaagaatgaagctctgataccacttgttggacaagtggcctcaggtatcttaagaagggggggggggttgaaccaatatattacaacttatttccccaattaaaaattctatttcactttctatccaagttataaattcccttaataatgaatttcttaaatattgattcaaatagaacaatttgaatatgaatataatacaataataaataaaggagtttaagggaagagaaaatgcaaactcagatttatactggttcggccacacccttgtgcctacgtccagtccccaagcaacccgcttgagagttccactatcttgtaaattccttttacaagttctaaacacacaaggacaacccttcctttgtgttt

SEQ ID NO: 6693 - DNA, 427 bp, Glycine max
agcttaagctccttcaactgcacaaggctcttaatatttgaagagtatccttgtggaaccttcacccgacgaagacactaacaaaaacttatcttctacttcttggacaaagtatggcaggctgggggcaagtaaattttcttcccatcagaccttggatgcaattgtgatcgtatacccatattagctagatcttgacgggtattcaagccatccttcgtcttgccttgaatgttaaggagcgtcccaatcacactatcacataaatttttctccacatgcataacatcaatacaatgtctaacgttaagatcacaccagtacggaagatcaaagaaaatggacctcttcttccatatgcaactctgacttttatccttcttttgggtcttcccaaatacagtattcaggtgttcaacccgctgat

SEQ ID NO: 6694 - DNA, 391 bp, Glycine max
gaaattcaaacgacaatactctttgactcggatgtcggattgagtcacgtaatatctcgagacgcttgaaattgaataccgaatttctgagcaaattcaaacgacaataactttttactcggatgtcggattgagtcacgtaatatgtcaagacgctcgaaatagaataccgaagctctgagcaaattcaaacgacaatacctattgactcggatgtcggattgagtcacgtaatatctcgagacgctcgaaattgaataccgaagctctgagcgaattcaaacgacaataactttgtactcggatgtgcgattgagtcccataatatgacgagacactcggaattgaataccgaagttatgagcaaattcaaacgacaataaatttttac

SEQ ID NO: 6695 - DNA, 415 bp, Glycine max
  unsure (1)..(415): unsure at all n locations
agcttcaacattcaattacgagcgtctcgattataacgagactcaatcagacatccgagtaaaaagttattgtcgtctgactntgctcataactttatcattcaatttcgagtgtctntatatattacgggactcaatcagaaatccgagtaaaaatttattgtcgtttgaagttgctctgagcttcaacattcaatttcgagcgtcttgatagattacactgactcaatccgacatccgagtcaaaagttattgtcgttcgacttggctcagaactttaacattcaatttcaagcgtctttatatattgctgggactcaatcatacatccgagtaaaaagttattgccgtaaacttttctcagagcatcataattcaattggagcgtctcgtatattaccggactcaatcagac

SEQ ID NO: 6696 - DNA, 435 bp, Glycine max
  unsure (1)..(435): unsure at all n locations
agctngccaacaagaatagaagactatgagatgtttcctgatagtgcaatagatgatgatggtgaattggttcatctagcaccgatgggagaagcagaacctgtcaccttccaataagcaattaaaaaagaagtatggttacaaactatgagagaagagttgaaagccatagagaggaacaagacatgggagctggctagtctaccaaatggcaaaacaactataaaggtcaaatgggttttcaagaacaagctcaaaccagatgggagtattgctaaacacaaagccaggctagtggcaaagggctttatgcagaaagaaggctatgattacaaagaagtctttgcaccaatggctaggtttgagactatgaggttgatagatgctttggcaagttggaaagggtggaaactatggtaaatggatgtaaagtct

SEQ ID NO: 6697 - DNA, 438 bp, Glycine max
agcttctcctcttgatgcttctagggctctttttcccatataggcactgtggtgtgctctggaatctgtgccctttcttctgcctacaatttgtctaaaagtttgtaaaagtgtgtgtcaaagtgtgtgtaccctaattctgcacaagataggctttaaataggctctaaattcacgacgttgcgcttagcgccaccctatctgatgcaagctccattagagcttgtaggcctaggatcttcttcatcaatggattcctttgcttcttggaagatgaatggcagcggaatgaagaaaggaagagagagaggagacgccacttcaaggagaagatgagtctataagaagctcaccaccataggaggccatggataacagcttggaggaagaaggagatgaatgaatggagagggagagaagagcacgaaactttgtgct

SEQ ID NO: 6698 - DNA, 438 bp, Glycine max
  unsure (1)..(438): unsure at all n locations
agcttgtaatcgattaccagaggacattntcagaaaattatttccaagagtcacaacttttcaaatggcttttacatggccatcaaaggtctatttatatgtgacttggaacacaaatttgctcaaaatttttcagaacaaaaaggttttatcctctcaaaaagcaaaatcttcttatcctcttaagattccttggccaatacacttgcaattcaataaggatttatttgagtgctcaaattgttcaatctatctctttcaagagagatttcttcttctcttcactctaattctcaaaaagggattaagagaccgagggtctcttgttgtaaagaaatctgaacacaaaggaaggattgtccttgtgtggttcagaacttgtaaagggattctacaagatagtggaactctcaagcgggttgcttgtggactggacgt

SEQ ID NO: 6699 - DNA, 407 bp, Glycine max
tcttcacatagtccgcctttgcttgaccttctttatgcttaaaaacagaaacattaggcataggcaaaagatcaagaagagttagtgggttaaaaccataaacaacttcaaaaggagaacaattagtggtgctatgaacagctctattgtaagcaaattcaacatggggtaaacaagcttcccaagtttttaagttattcctcaaaactgtcctaagcaaagttccaaaagtcctattaacaacttccgtttgcccatcggtttgtgggtgacaagtggttgaaaataacaatttagtgcccaacttgctccacaaagtcctccaaaaatgcaaatcatcaagcctaggtataggatgcctatatttaatggtgatgttattaagggctctacaatcagaacacatg

SEQ ID NO: 6700 - DNA, 394 bp, Glycine max
tggctaatccaaaatcagcaactttatgattgaaattgctgtccaatagaatatttcctggtttgatgtcataatggattattctttgtttgcaatcttcgtgcaagtatgcgatgcctctggctatcccaactgcaatctcataaagcttttcatatcctaaggtcttcttttcatggaacaaatacctgtcaagagagccattctccatgtactcataaaccagtgctcttagatctctttcgaagcaaaatccaatcaactgaactagattgaaatgatgaacttttccaattgtacccacttctgccataaattgttcctcaattctcttatctgagttaccacgtagaaccttcacagccacagtgattccatcactcaaatttccttt

SEQ ID NO: 6701 - DNA, 302 bp, Glycine max
agctagcttaagaccgtatattgatttctttaatttgcacaccatgtggtcctttccttcaactgagaatcccattggtggagccatataaacattctcctcttaaattcccattagaaaagcagttttcacattcatctgatggaactcttaatcaataaagggtactggtgtgcatgtaatcctcaaagaatccttttggagatcggggaaatgtctctttataatcaatgtcatctttctgagtaaatcccttaacaaagccttgttacgttcaaagttgtcatgagagtcacgtttag

SEQ ID NO: 6702 - DNA, 311 bp, Glycine max
tgtcaaaaaggaaagcaagttaaaaactcgtttcaaagcaaatacattgtttctacttcaaaactccttgaactacttgacattgatttatttggtccctctagaactatgagtttaggtggaaattactatggcttggtaagtgttgatgattactcaaggtttacttggaccttgtttttgaaaaccaaaaataaagcttttgatgcttttcgcaaacttgccaaggtgattcaaaatgaaaaaggtccaaacatttttcaattagaagtgatcatggaggtgaatttcaaaatgagtcttttgaaact

SEQ ID NO: 6703 - DNA, 442 bp, Glycine max
agcttatcaatcttttgagcaaggagaacccccaatgcataattggatgcatcacacattagctcaaaaggggatgtccaatcaggtgcctgaataataggggtggtagtcaccgcacgcttgaggcaatcaaaagcctctttgcatcggtcatcaaaataaaactccaagtccttttgcagcaaattggatagtggaagggccactttgctaaaatccttgataaagcgcctataaaaccctgcatgaccaagaaaagaacgaacctctcgaacgcaagaggggtaaggcaattgtgaaataacatttatttttgcagggtctacctctatgcccctactggaaatgatatgccctaaaactataccttgttctaccatgaagtgacatttttcaaaattcagcacaaggttagtttcaatgcatctattaagaactctat

SEQ ID NO: 6704 - DNA, 412 bp, Glycine max
  unsure (1)..(412): unsure at all n locations
agcttccatcattcttctccttcctcaagaggaagtgagggtgaagccaagggtgatgagcatattgaagaggtttacccctatgaagaaagtaatcttctaatggtgagaaggcttcttgggagtcaaccttgtgacctaactcaatcccaaagagagaacatctttcatacaagatacaaggttttaaacaaaaattgttctcttattgaggatagtgggtcttgctgcaattgttgtagcacaaggttggtacctaagttgagtctcactatcatttgccacccaaacccttacaagcttcaatggctcaatgatcaaggggaaatgatagtcaataaacaagtacaaatatcattntctataggagactactgtgatgaagttttatgttatataatccctatggaag

SEQ ID NO: 6705 - DNA, 378 bp, Glycine max
tataagcaacaacacccacacgatcaaccacttgaaagggaccaatgtatgtaggactaagcttagcattggccctttgtgcaacagaaacttgtctgtaagaatgaagcttaacaaaaacaaggtcaccaatggcaaagtgtcttttagatccatgcttatcagcaagttgcttcatacaattctgagcttgctgtaaatgaaacttcagaactctaagcatttcctccctcttgctaaggcttcgatccaccaaagcaaccttggattcaccaggaaggtaaggcaatgaaatgggaggaggccagttgatatagctccaagtggagcttgtaggccttggatcttcttcatcaatgcaaaaaagatgattggaga

SEQ ID NO: 6706 - DNA, 407 bp, Glycine max
  unsure (1)..(407): unsure at all n locations
gatgtaacatntggagaggttaatgaaacaacgagatgatgcgctccatgagaggttggatcaaatggagaatagagaccatatgaattgctcaagagcttccattgtttattttctagcgtctagatatataatgcgcctcaatcggacctccgagttaaaagttatgaccatttgaaatgctcaagagcttccattgttcaatttcgagcgtcacgatatattatgcacctgaatcggacctgcgagtgacaacttatgaccatttgaattgctcaagagcttccattgttcaattttgagcgtcacgatatattatgcacctgaatcggacctgcgagtgacaacttatgaccatttgaattgctcaagagcttccattggtcaatatcgagcgtctcgatata

SEQ ID NO: 6707 - DNA, 395 bp, Glycine max
tctgcacttccaggagagaaaacccaagaaggaaaagccaactcatgcagttgaaaagcatcacaagcaagcatctcgaacgttgcaccctcaactcgacttggagtcttattttagcacttttcaatcacttctgatgaaagacccaaagcttcaaaaatctgagcacctttgtatgatgccaaagttgatattcccatcttggcaagaaccttcatcattccatagttgcttgctttgaaatacttcttgaccaactcatcttttgagtggaattcaccacttgcttttggtggtatctttccatcaacctgcaggcgccaaattgcatctattgccaaatatgggcatatagcatcagcaccaaaaccaacaagggtgcagaaatgatgcac

SEQ ID NO: 6708 - DNA, 428 bp, Glycine max
tcttgttttccttgtacttgccactgatggagaggatctacgagagggtttactgctacgaaatggtgatggagatgcagatcataatggagattgcggccacggcgttagtcactggaggcatggtgtacaaaggagggttttctgagatgagggaagaagctgagagggtttttgacaagggatccactttttactggttgacggttgtgtcaagtgtggtgacatggcagtgttgctacatgggaactgcagggttggtctttctcacatcttcagtaactggaggggtttctgctaatgctttgttgtccctgaatgtgttggcagggtggtttgtgtaccatgatgccttcaatggttttaagattgtggccactgttttgtgcatttggggcttctgctcttatgtctattgcatgtacttt

SEQ ID NO: 6709 - DNA, 410 bp, Glycine max
  unsure (1)..(410): unsure at all n locations
tgaaggtgtgcagcccaccattttccatagtagaatactagtaatgtgtctactatcattgtcatcattttttcgtcattgaggtgccacttgagctgccaggtctctccacctttgggtgtattctttgaaagatctgtgcccctttttgcacatgttctgttgttgcatcctatccggaaccatatcaaacttgtactgatactgcctaatgaaggcaaccattangtccttccaagagtggactcgagaaggttctaggttagtgtaccaggtaacagctaccccagtaagattttcttggaaggaatgtatcagcagttcctcatcttttgcgcatgcccccatcttccgataatacatctttagatggttcttggggcaagtagtccccttgtacttgtcaaagt

SEQ ID NO: 6710 - DNA, 357 bp, Glycine max
tattactatgtccgctacgaagtcttcatcggagtgccccgtactcaagaaccgcgaaagcatatcaacagattcaagcgattgtttctccttcagctcctttttcttctctctcactatgtacctggcgaactcgtgcacttccttcaccgctcttcttagacgcctttcggaacctatgtgaagtaatctctttattttccagactaacggcaacggctcgcggaaccggttgctgctgatctccggtggttattcgaaggcttgtgcgaacttgctccgttcagctgacagcgtcaggtattcggtgtcgaagccaaacgcgattttgcagatgttgtcaaacgcgaaacgttg

SEQ ID NO: 6711 - DNA, 353 bp, Glycine max
tgtaatcgattacacacatactataatcgattaccagaggagatggttagataatattctcaacaatcacatcttttcattgggtcttgtatttcatcaaaggcctatatatatgtgacttgagacacgaatttgctaagagttttcagaacaaaaaggtcttatcctcttaaaaagcaaaatcgttgtatcctcttaaaaattccttggccaaacacttgtgattcaataaggaattatttgagtgctcaaattgttcaatctatctctttcaagagagattcattcttcttctctttctaattcactaacggattaagagaccgacgatctcttgttgaaaagaatctaaa

SEQ ID NO: 6712 - DNA, 412 bp, Glycine max
tctattgctcttattcatctttactcgcgttatctcagaccttttatttctgttgcctaagattttgcatacacctccttcaaagtgaagtatgtagcctctctccatcatttggccaatgcttagaagattttcttttatgctgggaactagtaagacatcatggatgagtcgcgtacctttatctgtctccaccatgacagtgcctttgccttttgattcaaccacactttcatttcccagtcgaactttgactttgacagactcatcaatacttttgaaaatagtctcatccttggccatgtgattgctacatccactatccaagtaccagtttcctcccttttcttttattgagtcttaagtggcgtagaacgtacattgttcttgatcatgatcctctgcgatattg

SEQ ID NO: 6713 - DNA, 429 bp, Glycine max
  unsure (1)..(429): unsure at all n locations
taactcgaattgcaacgttccaattgatnttttaatggtgttatcgattacaatatattggtaatcgattaccagtgtatctgaacgttgaaattcaaattcaattattaagagtcacatcttttcataaaatgctttgtgtaatcgattacatggttttagtaatcgattaccagtgacaagttttgaataaaaaagtcaagagatgtaactcttccaatggttttcaggtttttctcaaggttataactcttccaatggttttcttgaccagacatgaagagtctataaaagcaagaccttaacttgcatttgaacaactttttacaactctttagaacaacttttgagaaacctttgctacttattcttcttcttcttcctttgccaaaagctttctaagttttctggtttccaaaccttgctctt

SEQ ID NO: 6714 - DNA, 361 bp, Glycine max
  unsure (1)..(361): unsure at all n locations
aagagatcatccnctcgacaacattattggtgatatctcaaaaggggtaacaactagacattctcttaaagatttatgcaataatatggcttttgtatctatgattgatcctaaaaatataaaagaagctntagtagatgataactagatcattgccatgcaagaagaacttgaaccaattgaaagaaacaatgtgtggaaattagtagaaaaacctgaaaattatcctgttatagggacaaaatgggtttttagaaataaattagatgaacatggtataattattagaaataaagccaggttagtagcaaaagggtgtaatcaagaagaaggaatagactatgaagaaacatatgctcct

SEQ ID NO: 6715 - DNA, 399 bp, Glycine max
tcgcatatcctttgataaaccttcgatagtaaccagtgaggcctaacaaacctctcagctgcttgatattgagtcgtgtaggccactctagatctgtctgcaccttaatagcatccatagcaactccttcacctgaaactatatgtcccaagtactctatctccaatacaccaaaagagcatttagacaacttagcaaacaaaacattttctttcaacactgtcaatacaacctctagatggcataagtgttcatgccatgtggaactatataccaatatatcatcaaaaaactataacacatatttccttaaagcatgttggaaaatatggttcatcaaacactgaaaagaagtcgtagcattggtcaaaccaaatggaattaccaaccactcataat

SEQ ID NO: 6716 - DNA, 448 bp, Glycine max
  unsure (1)..(448): unsure at all n locations
tactcaagcttcaacatcagaccacttccgggtgctggaactacttcacatggatttgatggggcctatgcaggttgaaagccttggaggaaagaggtatgcctatgttgntgtggattatttctccagatttacctgggtcaactttatcagagagaaatcagaaacctttgaagtattcaaagagttgagtctaagacttcaaagagagaaagactgtgtcatcaagagaatcaggagtgaccatggcagagagtttgaaaacagcaggttcactgaattctgcacatctgaaggcatcgctcatgagttctctgcagccattacaccacaacagaatggcatagttgagaggaaaaacaggactntgcaagaggctgctagggtcatgcttcatgccaaagaacttccctataatctctgggctgaagccatgaacacagcatgc

SEQ ID NO: 6717 - DNA, 398 bp, Glycine max
  unsure (1)..(398): unsure at all n locations
tcaaccaaggtgagatggaccatttcaagtgctaganagaatcaatgacaatgcttacaaagttgagctgcccggtgagtataatgttagttccatcttcaatgtctctgatttatctctttttgatgcagaaggagaatccgatttgaggacaaatccttctcaagagggagagaatgatgaggacatgaccaagagcaagggcaaggatccacttgaaggacttggaggacctatgacaagggctagagcaaggaaatccaaggaagctcttcaacaagtgctgtccatactgtttgaatacaagcccaagtttcaaggagaaaagtccaaggttgtgagttgtatcatggcccacatggaggaggactaaatgacaccactntatttcaaattta

SEQ ID NO: 6718 - DNA, 401 bp, Glycine max
cttttgtgtcttctttaaataaagatctagtggtagagatcctaactagtggttctatgttaacatctaatgtgtgtttgaattgtcctgtggattatttaggtagaacatttgtgattgatctgatttgtttgcctttgagccaaattgatgttattctgggtatggactggttatcttccaaccatgtcttgttaaactattttgataaaactatggtgtttgatggttttggagtgagtaaggatatgatatttatctctgccaaccaagttatgacatctttaaaagaagatgctgaggtgtacatgatcttgtctaacttggaaatagagacaaaggtttccatgtgtgacctccctattgtcagagagtttcctgaagtgttccctaaggatata

SEQ ID NO: 6719 - DNA, 412 bp, Glycine max
  unsure (1)..(412): unsure at all n locations
ggggtaatttataattntctatcactgtgtctggcatgggttggtggtcctggagctgttgtaataagtttgagtggtcgagttctgtaaccatcattntgtctgatgaacttgtgctttcctcctataccgctggatgggtgggtttgtatctgattcatatgtttggattaaaagcttttgtgccggaaaatagttatatatcccttgaacgttctatgtagtgttttttaattacctatttttttgtcacttaaagtactaggatgatgcatttgccacacaatatggaagatttattttttatagattattggaaaatgacctagacatcctggagatgccaatggatttagtagagacttctaacatggtggcatgacattatatcacaanttacgttcatctctca

SEQ ID NO: 6720 - DNA, 418 bp, Glycine max
  unsure (1)..(418): unsure at all n locations
tcaagaaaaagatggcctcagcaaactccttatttccagaagggaattctatcaatagaccttccatctttaatggagagggttacccttactggaaaacccgaatgcaaaattttattgaggccataaacctaaatatttgggaagccatagaaataaggccctatatacccaccacagtagaaagaattacatagatggcagttcatcaagtgaaagtataactatagaaaaacctggagatagatggtctgaagaggatataaaacgagtacaatacaatttaaaagccaaaaacataataacatctgccctgagaatggatgaatatttcanggtttcanattgtaagagtgctaaggaaatgtgggacactcttcgattaacacatgaaggaactacagatgttaaaagatct

SEQ ID NO: 6721 - DNA, 249 bp, Glycine max
atcttttgtaatggagaattgcactaagcaatcactacgcatagcttcaaactcgaaggtggaggacacatgaacgaaaacgcaattcatgggtctccgaaaagattgagaatggagaattgcactaagcaatcactacgcatagctccaaactcgatggtggaggacacatgaatgaaaacgcaattcatggggctccgaaaagatggagaatggagaattgcactaagcaatcactacgcatagctc

SEQ ID NO: 6722 - DNA, 238 bp, Glycine max
atttttttgtaaaaagcgctggattttaggccttagattcttatctgtggtgggagttcgtttccaagggaatgggactatgctaggttcagacagggtgctgataagtgtggggcagtgttgatgtgtgatttggctcatatcagtggtcttgtagcggctaaggtgatttgattttactgtcttttctcttgtttctgtttgaattatgttatcgattttatggttgtttatgcat

SEQ ID NO: 6723 - DNA, 253 bp, Glycine max
agcttttatttattcaattcaaaagccttttgtgcttgttcattccacccaaacgcacccttcttcaaacattcggtcataggacttgctatagtgctaaaattctggataaagcgtcgataaaatgatgcaagaccaaggaaagatctcacctccgaaactgttgtagggctcggccaagtcttgatagcatccacttttgtttgatcaacggatactccatctttagacaccacatatccaagaaacacca

SEQ ID NO: 6724 - DNA, 247 bp, Glycine max
ttatctttttcccatatgctatacgcgtcatcttggttccaaagaaggacggaactcgaagaatgtagatagattgtagagccatcaacaacatcgctgtaaggtatagacatcttatccctagactttatgacttgttagatgagttgcatggttctagttatttctccaaaattgatttgaaaagtatttaccaacaaattagaatgagaaaaggtgatgagtggaaaaccgcttttaaaactaa

SEQ ID NO: 6725 - DNA, 250 bp, Glycine max
agctttttttaatttaaaattgtcataacttttcactcggatgtccgattcaagcacatcagatatctagacgctcgaaattgaacaatggaagctctcgagaatttaaaattgtcataacttttcactcggatgtccgattcaggaacatcatatatctagacgctcgaaattaaacaacggaacctctcgagaaattcaattggtcataacttttcactcggatgtccgattcaggcgcataatatat

SEQ ID NO: 6726 - DNA, 247 bp, Glycine max
  unsure (1)..(247): unsure at all n locations
ttttatanctcttcaccctattgtgcctttcaatgttccccatgtctctatcaaagacacaatagttggaaactacctaatcccaaagggtagtcacatattgttaagtagacaagaaattgggcgaaaccaaaaagtttggggttaacgaagctcacaagttcaagccagaacgtcacctgataatgaataagagtgaggttgttgttttgacggagccagatttgaagtttattttgttcagcac

SEQ ID NO: 6727 - DNA, 247 bp, Glycine max
  unsure (1)..(247): unsure at all n locations
atttatttttttttgnacaagaatgaagctctgattccacgtgttacacaagtggcctcatatatcttaagaagggggggttgaattaagatattccaaactgtttcccctaattaaaaatctatttcactttttactcaagttatgaattcccttaatgacaatcttcttaaatattaattcaaatgaagcaacttgaatatgaatataaagcaataataactaaaggagattaagggaacagaaa

SEQ ID NO: 6728 - DNA, 250 bp, Glycine max
agcttttattatctcattatggtctcaagcaggcccccaggcaatggtttgaaaggcttcagactaccttacttcagtttgggtttgtggcaagtaaatgtgatctctctctgttcatttacaagaccaagtctcacactgtatatctccttgtgtatgttgatgatattataattactggaagttctattcctttaattcaacatcttacctctcagttgaactcaaaattctctctcaaacagcttgg

SEQ ID NO: 6729 - DNA, 203 bp, Glycine max
atctctataaatactatgctagaggccaccatgaacctgacacctcacttattacaagtggtcaacttttaaggaaaatctgatattaataggaatgaagtgagcagacttagtcaatctatcaacaattacccaaatagaatctaaacctctatgggttctaggtagtcctaccacaaaatccatggaaatactgtcccact

SEQ ID NO: 6730 - DNA, 360 bp, Glycine max
  unsure (1)..(360): unsure at all n locations
agctagagcttatctacacatacctctctaatagctaagctcacctccttgagatgagaagctagagcttaagtacacacccnctataatagctaagctcacccccatgacaaaaaaacatganaatactaaaaaattctttactacaaagactactcaaaatgccccgaaatacaaggctaaaaccctatactactagaatggccaaaatacaaggtccagacgaaggaaatacctattctaatatttacaaagataagcgggctcatacttagcccatggactcgaaatctaccctaaggctcatgagaaccctagggccttcccttggatctctagccaatctacttggagtcttct

SEQ ID NO: 6731 - DNA, 344 bp, Glycine max
attcctaatatctctacaattgcctacctctcaatgagctggtaaagaagcatgtggcatttacctgtggtgaataacaagagcaagcctttgctttgctcaaagaatagcttactaatgcacctgttctagctcttcctgactattctaaaacttttgagctagaatgtgatgcctccggagtgggagttggagctgtcttgttactagggtgatgcctcatgggctatacacatccctacccattccatctgcaccgtgggtagacattagtatggactttgttgtggcatccctaaattaatgactagtttaaatgtataaattaaatagcataaccatgg

SEQ ID NO: 6732 - DNA, 174 bp, Glycine max
  unsure (1)..(174): unsure at all n locations
caacatcagaccacttnatggtgctggaactacttcacatgtacttgatggggcctatgcaagttgaaagccttggatgaaagaggtatgcctatgtagttgtggatgatatctccaaatttacctgngtcaactttatcagagagatatcagacacctctgaagtattctaag

SEQ ID NO: 6733 - DNA, 454 bp, Glycine max
agcttggttatctccttctttatccctgagaaccaccgggttgagtcttctctgtggctgtcttactggtttagctccatcctctaaatttattcgatgcatacatgtggatgggctaataccaggaatgtccgccagggtccatcctatagccttcttatgcttcttgagaactgacaacaacttctcctcttgctcatcagcaagggaggcagatataatcactggaaaactcttgctatcatccaagtaagcgtaatttaaatttgatggcagaggcttcaattctggcgtggtcggctggacagtggtagaatgagatggtttctcagccttgacctcataaagaaagtcagaggtatgtgccatctcttgaacatggttagtcctatctgactctataaaatcatctcatgaggtaaacaccaccatcagcatgcaatcaatatcactc

SEQ ID NO: 6734 - DNA, 294 bp, Glycine max
gtgcaagctttaatttatacttgagaagtattgagtgatatttatagctaactaaccattaattaattccttttatcttttcttgtttatattttatttaattggttgtcatataaatattatgtcaatagtttatatgattatcacgtcaatactaatatgtcatgttaactagcgagcaatcttgactttggacggtgaaccaatgaaaagattaaaattatttattttacaacataaaagaattaacatcacatatttaatatataaagaatcaagattgaatttaacaaa

SEQ ID NO: 6735 - DNA, 297 bp, Glycine max
  unsure (1)..(297): unsure at all n locations
gcttcaatacctctcacagaggagaagacaaagtaaataaggtgtgtctccaaactctaatatgtgagtttgaatccttacatatgaaagagtcagagtccatttctgattatttntcaagaattctcactatttcaaatcaactaaaaagaaatggtgagaaagtagatgatgtaaaattatggagaagatactatgcttactagattccaaattgagcacattgtgtgacaatcgagggaaccaagatttagaaccatgatgatagaacaacttcaggatcactacagtttatga

SEQ ID NO: 6736 - DNA, 471 bp, Glycine max
  unsure (1)..(471): unsure at all n locations
ttttttatgcatcgcttgattctctgttntaatgtttgtgcctagtccaattttttttattattgtcttttattaaactcatttcatgatatnttgnnaagtgatgcatatcaagctattggctactaaaattttcttacctcatgatttattcaagtcaatagtgaaatagcaatgggtgcaaccatttccccaatttctgcataccgaaactcccagttcaatattagtgtacttatctggaaggtataatcccaagaatcttcctagtgattaatctgcaaatggaaaccagcctttaagcatcttgggtctcatctcattattcttccgactaggtgtatggcatgcggaccactataatgtctcaagtgtttggattcttcaaaacccctatcatctaacaagcatntgtatgaaacaagacatgtggagatccaagcctatgtatgctaattcatagctaatatg

SEQ ID NO: 6737 - DNA, 384 bp, Glycine max
  unsure (1)..(384): unsure at all n locations
gaaccatgtacattgtggagattgtgtgactacatggctacctcttgagcatagtgccaaatagagacctttngtttacctctaggttntgggagagtttacaagaagccatatagactaaagtggaacttagttcatcctatcaccctcaaatagatagttaaaccgagagaactatctaatccttagaagaccttcttatagcttgtgcgattgaacaaaaaagtagttggaacgagtgttaacccttgtagagttacctataataataatatccatgccagtacanggatggcaccatntgaagccctgtttgggcagaagtgtaaaacacccttgtgtttgtatgagatagatgaacctctcttgtaggtctagcgtgtt

SEQ ID NO: 6738 - DNA, 358 bp, Glycine max
  unsure (1)..(358): unsure at all n locations
agctctgaccatttgaattgctcanaagattccgttgtttcaatttcgaacatctcgatatcttatgcgcctgaatcggacatcctagagaaaagttatgatcattcgaattgctcaagagcttccattgctccatttcgaacgtctcgatatattatgcgcctgaatcggacatccgagtgaaaagcttgaccattngaactgctcagacgatcccttgttcatntcgaacatttcatatcttatgcgctcgatcggacatctgatgaaaagcttgaccattgaattgctcaaagctcccttgtcaatttcagcatctcgatatttatcgcctgatcggactccagttaaagtttga

SEQ ID NO: 6739 - DNA, 398 bp, Glycine max
  unsure (1)..(398): unsure at all n locations
agcttctactataagtttgttcctaatttctctacaccgnctcacctctcaatgagctggtgaataagaatgtggcattcacttggggtgaaagataagagcaagcctttgctttgcttaaagaaatgttcacaaagacatttgttttagctcttcctgacttttctaaaacttttgagctcgaatgtgatgcctctagagtgggtgtgggagctgtatttgtgcaaggtgggcaccctatnttcttttttagtgaaaaaattcatggtgccaccctcaactaccgcacctatgataaagagctttataccttaataagagccctccaaactnangaacattaccttgtttccaanggaattgtcattcgtagtgatcatgatattcttatgtacatt

SEQ ID NO: 6740 - DNA, 433 bp, Glycine max
  unsure (1)..(433): unsure at all n locations
ntatctgaagaactcgccaagcgcacttactgcactaagcaagttcatcttttgaggatgaacactcatcctcttgctgaactacctgtggctaagcgaggctgaatcgctaagcccaggtaacttaaccatnnttttttgtgatagccacatgttagacaagtggcctcagatatcttaagaaggggggttgaattaagatatcccatactacttccccaattaaaaatctatntatctttttattcaaattataaattcccttaacaatgaacttcttaaatattgattcaaataaaacaagttgaatatgaatataaagcaataataaataaaggagtttaagggaagagatagtgcaaactcatatttatactggttctgccacacccttgagcctacgtacagtcctcaagcaacccgcttgagagtt

SEQ ID NO: 6741 - DNA, 360 bp, Glycine max
  unsure (1)..(360): unsure at all n locations
ntagatgcctntaangtttttatggctgaagttgagaaaaatgttgaaaacaaattaagatcgtgagataagatagaggtggtgagtactatggtagatacatagaggatggacaaacaccaggttcatttgcgaaatttcttcaagaacatgagattgttgcccaatacactatgcctggttctccggatctgaatggtgtgacagaacaaagaaatcgaaccttattagacatggtgagaagcatcaggagtaatgtaaagcttcctcaattcttatggattgatgctcttaagacggttatgtatatattaaaccgagttccaaccaagggtgtctcaaagacatcttttgatgtat

SEQ ID NO: 6742 - DNA, 380 bp, Glycine max
atgcactcctctaatgtttatggcatcatttctggcactaaactgctgggagttggaggccatcttctcaattaaatttctggcttcaacaggagtcatgtctccaagggctccaccactggcagcatctatcatacttctctccatattactgagtccttcataaaaatattggagaagaagctgttctgaaatctgatggtgggggcaactggcacatagtttcttaaatctctcccagtactcatacaggctctctccactgagttgtctaatacctgagatatccttcctgatggctgtggtcctggaagcagggaaaatattttctaagaatactctcttaaagtcatcccagctcgtgatggaccttggagcaa

SEQ ID NO: 6743 - DNA, 247 bp, Glycine max
  unsure (1)..(247): unsure at all n locations
tgcttcaacaccgttaagggtaaagactctttcctttgtaagctccattggagcttgtaggcctaggatcttcttcattaatggatccctttgcttcttggaagatgaatggcagcggaatggagaaagaagagagagagaggagatgccacttcaaggagaagatgagtctagannaagctcaccaccataggaggccatggataagagcttggaggaagaaggagatgaatgaagggagaggaag

SEQ ID NO: 6744 - DNA, 199 bp, Glycine max
  unsure (1)..(199): unsure at all n locations
agctatagtcttcatgttgatgatgctgtgccccctatttaacaggttgngaaaggttctattatttgaactcaaccaacccatacatatgattaaatntattattatatatgaattaattataaatataaaacaccattaaatttagctcacatcacttattaaaatattaaattaaatcactcatgctcttccttca

SEQ ID NO: 6745 - DNA, 350 bp, Glycine max
attgagatgctagatattgagaaatggaagttctcgtaaattcaattggtcataacttttcactcggatgtcagattcaagagcaaaatatacagagacgctcgaaattgaacaacggatgctctctagaaatataaatggtaaaattttttcacatggatgttatattcagacacataatatatcgagacgttcgagattcaagaattcaaaaattaaagttctcaagatatatagagatgaaaaattatgaccatgggtgtacgattgagacccatgatatatcgatatgctcaaaattcataaattggtccaattcataaattcaaagagcccttacttttgacatg

SEQ ID NO: 6746 - DNA, 379 bp, Glycine max
  unsure (1)..(379): unsure at all n locations
gagaggatatatataagctatgctaaccaagccatctagggagaaagaaggttgtcttcgaacccggagattgcgtttgggtgcacatgagaaaagaaaggtttccgaaacanagganatcacagcttcaaccaaggggagatggaccatttcaagtgcttganagaatcaatgacaatgcttacaaagttgagctgcccggtgagtataatgttagttccaccttcaatggtctctgattatctctttttgatgcagatggagaattcgatttgaggacaaatccttctcatgagggagagaatgatgaggacatgaccaagagcaagggcanggatccacttgaaggacttgangacctatgacanggctagagcag

SEQ ID NO: 6747 - DNA, 305 bp, Glycine max
  unsure (1)..(305): unsure at all n locations
tctgtccctgagaaacggttcccagaagacaacagggagtgattattgctgaanaccctagccttgcaacaagtcctatggaagtagacacggagatggacaagaaaatccgcagtattgtgagtagcatnttgaaagacgcctctgttcctgatgctgagaaagatgttccaacatcctccaccccagatgttgttgtccctgaagctgatgaagatgtcccaacatcttccaccccgaatgtttctgtgcctgatgttgagaaagaatgttcaacatttttcggcccacatgctgaagtactc

SEQ ID NO: 6748 - DNA, 369 bp, Glycine max
  unsure (1)..(369): unsure at all n locations
tctgcatcatatttctgcatccatcaagattagtagttgagtgttccaccatgtattctgcccaatgctgagactacattatctgtcaagttccagtaaccaatgaggtttacattgacaagtctagcctaacaattatgcaaaaggtggagaagaccaacatcatttatggcatagagtttagtcagattaagatgctgaagtcaaggacacaatttgaacaattatgacttggctagcattgataaaaccaagtcacntttgaattactaaaggtcgaagagactcgcaaggagaaagcatatacacttccatatcgatatctttgactcccatgcacttcacaagggaaagagangaactttattt

SEQ ID NO: 6749 - DNA, 455 bp, Glycine max
cgtcccggatccttaagcaccgcggctgcagcttatgcaagattttgtgattcttcaaataaaggaaagagagacagtgaatgcatatttttcttgtagtctaaccataaccaacaaaatgaaggctcatggtggagtgaaacagtcattattgcaaagattttgagatcaatggtctcaaaatttgattatgtggtatgctcaattgaagaatccaacaacttagacatgatgagtattgaggagttgcaaagtagtctttttgttcatgagaagaggatgagaagttgtggagaagaagagcaggttttaaagatctcccacgaagaaaaagcaggtagaggtagaggcagaggaagcggaagacaatcattcaataaagttgctattgaatttttcaaatgtcacaagttaggacactatcaatatgaatgtcttgattgtgagaaagatgc

SEQ ID NO: 6750 - DNA, 353 bp, Glycine max
tgatgagaaaagttacatgaattggcaccagcaagttaatgctgtccttcgagctcatcaattagaaaaatatgtcgtcaatcctgttgttcctctcaagtacctctccgaagaagatcgtgcagctgggacaatcaatccagaatttacgaattgggatcgtcaagatgctctaatcatgtcttggcttctttctacgctttctgattcaattctcagtcgtgttgtgacttgttgtcattcattccaagtctggaatgccatttgctcccattttcatggtcttacgcgtgcaagaactacgcaattacgcttggaactgcgaaccatcaagaaaggcaacaaatcttgca

SEQ ID NO: 6751 - DNA, 420 bp, Glycine max
agctataggcaaattctaacgacaatatctttctactcggatgtctgattgagtcccgtaatatatcaagacgctcgatattgaatgttgaacctatgagccaattcaaacgacaataactatttaatcggatgtctgattgagtcccgtaatatatcgagacgctcgaaattgaatgttgaagctttaggcaaattcaaacgacaataactatttactcggatgtctaattgagtcccgtaatatatcgagacgctcgaaattgaatgttgaacctatgagccaattcaaacgacaataactttttactcggatgtctgattgagtcccataatatatcgagacgctcgaaattgaatgttgaacctctgagccaattcagacgacaataactttgtactcggatgtgcgattcagtgg

SEQ ID NO: 6752 - DNA, 247 bp, Glycine max
aaacttgaattaacctgtaactagctatttttgtattcattgtaactaacggagaaactaaatttccacttaatatgagaagatgtaccttttatgagaccttattgctactaccatttagcatctctggcgccatccatagaagatttccacgaacaccaccacacaccaacgtatttcgcttaatctttgataagccataatcaccatcctggtgaaaagcaagtttcttagctgtatcacaatg

SEQ ID NO: 6753 - DNA, 330 bp, Glycine max
  unsure (1)..(330): unsure at all n locations
taataagtccatctatggattgaaacaagcctcctgctagtggtatttaaaatttcatgaggttatttcttcattcagctttgaagagaatgtcatggatcactgtatatactagaaggtcagtgggagtaagatttgtttccttgtattatacatagatgatattctacttgcgactaatgataagggtatgctatatgaggngaaacaatttctctcaaagaactttgatatgaaggatatgggagaggcatcttatgtcataggcataaagatccataaagaaagatctcgaggcattttaggcttgtctcaagaaacctatatcaa

SEQ ID NO: 6754 - DNA, 286 bp, Glycine max
ttcaattgggttctggaatggccatcaaaggcctatttatttgtaactggaaacacgaatttgctaaaagtttttaaaccaaaaaggtcttatcttttaaaaagcaaaatcgtgttatcctcttacaaagttccttggccaaaacacttgtgattcaataaggaattatttgagtgctcaaattgttcaatctatctctttcaagagagatttcatcttctcttcttctgtattctgaaaaaggataaagagaccgagggtctcttgttgtaagaaaatctgaaca

SEQ ID NO: 6755 - DNA, 347 bp, Glycine max
tggatttccttttagtagggaatctatccttcctaagatggagccaaacccagtcaccctcattaagaactagctcttttcttcctctattgcctttagttgaatacacctttgtttgattctctatttggttcttaaccctctcatgcatcttctttacaaattctgacctagattccccttctttatgtataaaagaagtgtccagtgggaggggaatgaggtctaacggtgttaggggattgaacccatagacaacctcaaaaggggactgcttggtggttctatgaacccccctgttgtaggcaaattctacatgaggaagatactcatcccaagacttatgg

SEQ ID NO: 6756 - DNA, 418 bp, Glycine max
  unsure (1)..(418): unsure at all n locations
agcttgtgaaagatgtcttcttaggaagcaacacacataatcatntttaactgaaaaagcatggaaagctaaaggcttgttggagtaaattcacactgacatctatggaacaatgaggacatagtcgctcaacaacaataggtacttcatccttttcattgatgacttctctagaatgacatgggtttactttcttaaagaaaaatcagaagtctttggaatattcaagaagatcaaagcctttgtcaagaaacaaagtgggaagcatataaaagtactcagaagcgattgaggcaaggaatacaactttcatgagtttgataagttttgagaagatgaaggcattgagtgtcagcttacagtggcatattcttcacaacaaaatggtgtgcctaagagaaagaattgaacagtcatg

SEQ ID NO: 6757 - DNA, 425 bp, Glycine max
  unsure (1)..(425): unsure at all n locations
agctntgtgcagcatggatgatctgcatagtattattgatcatatgttgaatacaagattgcatacaaagtgctctatatccagcttaacaaacttagtaactgattctactctaactaattgctaactaatctaactatcctctaactgaaaataactaactctattttctgcatagagctttaatacccctctcaagttggagagtaaatgttaatgagtcccaacttgcggataaaggaagagaaagctagaagcattaagggctttgtgaagatatcaacaacttgatgttgggatttcacatgagcaagcttaaggttgttggactgcactaactcacaaatgaagtgataatcaatatcaatgtgtttggatcgttcatggtgagttggattagaagctagatcaattgcagatttgct

SEQ ID NO: 6758 - DNA, 345 bp, Glycine max
tcccaagaaaccttggacctgcttatcggtacatggctcgggcatctcgaggattgcttttaccttgtctggatccacctctattcctttctggctaacgacaaagtcgagcaatttttttgattttacctcgaacgtgcactttgcgggatttacccttaacctgtatttatgcagtcgcccgaacaacattcgcaaattgactaggtgttcctactccgtccttgatttggcgatcatgtcatccacgtagacctcgatctctttatggatcatgtcatggaataacgccaccattgcctgctggtatgttgccccaacgttctttagcccaaatgacatcac

SEQ ID NO: 6759 - DNA, 308 bp, Glycine max
tcagttttaaatgtcgagcgtctcgatatattactcgactcaatccgactttcgagtgaaaagttattgtcgttagaatttgctacgatcttcgattttaaatttcgagcgtctcaacaagttactggactcaatctaacttccgagtgaaaatttttgtcgttcgaatttgctacgagcttcgattttaaatttcgagcgtctcgatatatttcaggactcaatcggacttccgagcgaaaagctatagtcgttcgaatttgctgcgagcttccgttttcaaattagagcgtctcgagatattaccg

SEQ ID NO: 6760 - DNA, 428 bp, Glycine max
agcttgcagcaaattctaacgacaataacttttcactctgtagtgcgattgagtcccgtaatatatcgacacgctcgaaatttaaaaccgaagctcatagcaaattcgaacgacaataacttttcattcggaagtctgaatgagtcccataacatatcgagatgcttaaaatagaaaaccgaagcttgtgcaaattcgaacgacaataactgtttactcggatgtgcgattgagccccgtaatatatagagacgctcgaaatttaaaaccgaagctcgcagcatattctaacgacaataacttttcactcggaagtccgatggagttctgtcaactatcgagacgctcgaaacttaaaaccgaagctcgtagcaaatacgaacgacaataacttttaattcggaagtccgattgagtcccgtaacata

SEQ ID NO: 6761 - DNA, 344 bp, Glycine max
tgtgcatccaataccctgatgaggatgtcccatatgttcttaaaactggactgattcatttgcttccaaagtttcatggccttgcaggtgaagacccgcacaaacatttgaaagaatttcacattgtctgctccaccatgaaacccctagatgtccaagaggatcacatatttctgaaggcttttcctcattcattagagggagtggcaaaggactggctgtattaccttgctccaaggtccatcacgagctgggatgaccttaagagagtattcttagaaaaagttttccctgcttccaggaccacaaccatcaggaaggatatctcaggtattagacaactc

SEQ ID NO: 6762 - DNA, 357 bp, Glycine max
ttcttgtgttgcttatgtagagcactgcaatgctattttacaatcaccggcagcacaccccgaattcataattgtcaacaatctcattcttcaccagaagcgcatttggctaccacgggatttccagatgatccccaccttgctcaccgagtttcacttgactccgacagggggtcacatgggcatagccaagacccttgcccagatatcagagaactttagttggccaggtctccataatgatgtgagaaaattcattgcccaatgcgttgattgtcaacacaccaagtataaaactaagaaaagtgtcgggttgttgtgcccgttgccagtgccgcatcgggcatgggaagaact

SEQ ID NO: 6763 - DNA, 420 bp, Glycine max
  unsure (1)..(420): unsure at all n locations
agctnttgccacaaaacacattgtttccaacatccaaggctctggttattgattaccaggcagtgtaatcgattaccagaagacaattttgaagcaaagggttntgaatttcaattttgaatcatgtaatcgattaccagatgtttgtaatcgattaccagcaatggcactttagaaaacactttgaaaagacacgacccttcaaaatataactgtgtaattgattactagaaacctttaatcgattaccagtgaagaatttcagaaaaaagtttttgaaaagacacatatcttcaaacctttttgaaaaggcaccaagggcctatatatatgtgtgtctcacttagaaaagcaggagagagatattctaagagaacttaatttccaaatgctctctcaacaactcttgggcaaacactt

SEQ ID NO: 6764 - DNA, 425 bp, Glycine max
agctttgatgcaacagttggagaggttattggaagaaggagatgatgcgctccatgagaggttggatcaaatggagaatatagatcataatgaagaagaaaggaggagaagagggaatgatgatgttcctagacaaaaccgaattgatggtattaaactcaacattcctctctttaaaggaaagaatgatccaaaggcctacttggaatgggagatgaaaatagagcatgttttctcatgcaaaaactatgaggaggaccaaaaggtcacgcttgccgccacggagttttccgactatgctcttgtgtggtggaacaagctacaaaaggagagaacaagaaatgaagagtcaatggttgatacatgggcggagatgaaaaggatcatgaggaagcggtatgtgccggctagttactcaagggact

SEQ ID NO: 6765 - DNA, 341 bp, Glycine max
  unsure (1)..(341): unsure at all n locations
tgaaggtaaactagatgccttggntaacctggtaacccaactgaccatgaatcanaaatctgcacctgccgccagactctgtggtttatgctcctctgccgaccaccacacagacctttacccttctgtgcaacaatctgaagcaattgaacaacctgaagcttatgctgcaaacatctacaacagacctcctcaacctcaacagcaaaatcagccacaacagaataattaagacctctccagcaacaggtacaatcctggatggaggagtcatcccaaccttagatggtcgaatccttcacaacaacaggagcaccaacaaacaactttttttcaaatgc

SEQ ID NO: 6766 - DNA, 342 bp, Glycine max
tgaaggcaaactggatgcattggttaacttggtaacccagctggccttgaaccataaatctgtacctgttgcaagggtttgtggtttgtgctcctctgctgaccaccatacagacctttgcccttccatgcagcaacctggagcaattgagcagcccgaagcttatgctgcaaatatttacaatagacatcctcaacctcagcatcaaaatcaaccacagcaaaacaattatgacctctccagcaacagatacaaccctggatggaggaatcaccctaatctcagatggtctagccctcagcaacaacaacagcagcctgctccttcctttcaaaatgctgc

SEQ ID NO: 6767 - DNA, 426 bp, Glycine max
  unsure (1)..(426): unsure at all n locations
agcttgcaatctatttaagtacctgcgtggttattaaaaaattatatcatactattctctaattttattattttgaattacctatattatttttatgttttaaacaaactaaattttttcttaaaaataaacacgttggcaattcgggttggcagggtctgaattctgaacggttttgttgcaaatattcttgaaaataacaatgtaaatttcgatcttctaacccgaatttacactttgaatagtaaacttgtatgtttgtgtaaataatgagaaaatatgtatgtttgaatatataatttttttataaatgtatgtttctcaaaaaatttctattcttgcaaaataaattataaccataatttaatataactctttatacaatatacttatgttttacgataacattaaaatntggaaattatt

SEQ ID NO: 6768 - DNA, 366 bp, Glycine max
agcttgtacagtgtgggaagaggatttgattgttcaataagaagaatctacttcaaccgatatgcccttaggcacggcattacataacatataaatgactctcggatagggaggacacttatctatagcatcaggtgctgtatcgaatctcattgcacaacaggggaaatggtccacgatacaactaccttttggggaggtcgcgttgatttccgaaaactgctcggccacagtcggacaagtgggaaatgttgtattaagccaaaaaaatttatgtagatccggatctaaatgtaggatatgtaagcgtactgtattaagaggagtagttatgatacccctagaccatgcccatgggggtggtga

SEQ ID NO: 6769 - DNA, 397 bp, Glycine max
ctaacaagagttttcattgcccacaaagtttatcctctcaaaagattaagagtttttctgaactgaactgtcttatcctctcaaaaagattccttggtcaaccacttgcatattcaataaggaattttgattggtcttcattgtacaatctatcccttttaagagagatttcttcttctcttcttcttacttctgaaaagggattaagagaccgtgggtctcttgttgtaggggattcttgaacacaagggaagggttgtccctatgtgcattgttaatccgaaaagagagagtgaaagtttaattgcggaataatattcgtatcttaattcaatcccctcttcttctcaaggtaaccgaggccatttgtccaacatcctattcttgacaactcgct

SEQ ID NO: 6770 - DNA, 455 bp, Glycine max
gatcttaagtcacctgcggcatgcaagcttgcaaaccaaatgctcaccactattagaggagaaatctttaagttgtttcatataaacctcctcctctaaatcaccattaagaaaagttgttttcacatccatctgttgcaactcaaggtcaaaatgagaaactaatgccaagataatacgaagagaatctttcttagatactggagaaaatgtctttgtgtaatctattccttccttttgagtaaatccctcaacaacaagtcttgccttgtatctctcaatgttgcctaatgaatcccttttggtcttaaatacccatttacatctaatggcctttgccccattaggcatctttacaaggttccaaactttgttactctgcatggaattcatctcatccttcatggcatcataccataaatttgactctttacaactcgtggcttgatcaaaag

SEQ ID NO: 6771 - DNA, 436 bp, Glycine max
agcttgtggattatgggtagtgatggaagggtgagaaaggatggtagggtcaataatgttaagagaaagcagttctcataaaaaatgacattttgagacacttcaatggttcgtgtatgaagattgtacacaatgtaacctttcttgtgggatttaaatcccaaaaacacacaaggtaaggctctaggatccaacttttttctgttagcattgagagtgctaatgtaacatagacaaccaaaaactcaaagtaaattaacatcatataatgcagaatagagtttttgatatggggactcatttttcagaaaatttgtaggaatgatatttatcaaagtagcaacatgaagtaaagcataggaccaaaaaatgtttggaaggttaaattgaaacaaaagggcccgagttacattaagtaaatattgatgttttcttt

SEQ ID NO: 6772 - DNA, 339 bp, Glycine max
ttgggaggaacatggacaaggatgctatccgaccatttagtttctagacttcttggacgttggtcgggatctacatctccagtatggcagtgcatttgttagggttggcttcaatcccccggtgagtgatcatgaaaccaaggaacttgccttcacctaccctaaaagtacatttttcaaggttgaagtgcatgtcatatttgcggaattccccgaagacttcttctaggtttgccacatgttgagttatgctttgaaacttgatgaccatgccatccacatataccttgacatttagtccaatctactgtcataacttgcgaatgatgatgggagcct

SEQ ID NO: 6773 - DNA, 259 bp, Glycine max
ttgcatccccctaagatccattaggaaattacttgtgaaagagagccatgagggtgggctcatgggccactttgtgatagacaatacccttgtcttactcaaagaaaagctctattggccccatatgaagaaagatgttcataagcattgcactacgtgtgtggcttgtttacaagccacctctatggcgatgcctcatgggctattcacacccttacccatcccatctgcaccttgggtagacattattatggacatt

SEQ ID NO: 6774 - DNA, 331 bp, Glycine max
tgtttaagaagagcgagtcctaattccacaatatgtttgtgtttcctttccactacaccattttggtgatgagtgtgtggacagatcaatctaagagtgataccttggcttgctaaaaaattagtgagaggtctgaactctcctcctcaatctgtgtgaacactcttaattttggagtcaaactgaagttcattagcttgaactgttgaaaaatggtgaaggtttctgacttatgtttaagcaaatagatccaggtgaacctagactaggcatcaacaaaggttatgtaatagtaaaaaccatttttggaaagaatgtggacaggacccca

SEQ ID NO: 6775 - DNA, 422 bp, Glycine max
agcttaacaaaaggcatgcgaagtgggtggaattcctagagcaattcccttatgttatcaaacataaaaagggaaaaggtaatattgtagccgatgctctttctcggcgtcatgcattactttctatgcttgaaacaaaattgattggtcttgaatgtttgaaaagcatgtatgaaaatgatgaaacttttgcagaaatttttaaaaattgtgaaaaattttcagaaaatggtttctttagacatgaaggctttcttttcaaagaaaacaaattgtgtgtgcctaaatgttctactagaaatttgcttgtttgtgaagcacatgaaggaggtttaatggggcattttggggtccaaaagactctagatacattacaagaacatttttattggcctcatatgaaaaaggatgtgcagaaattt

SEQ ID NO: 6776 - DNA, 352 bp, Glycine max
tgaaggtaaactagatgccttggtaaacctggtaacccaactggccatgaatcaaaaatctacacctgtcgccagactctatggtttatgctcctctgccgaccaccacacagacctttgcccttctgtgcaacaatctgaagcaattgaacagcctaaagcttatgctacaaacatctacaacagacctccttaacctcagcagcaaaatcagccacaacagaataattatgacctctccagcaacaggtacaatcccgagtggagaatcatcccaaccttagatggtcgaatccttcacaacaacagcagcaacaacaacaaccttattttcaaaatgctgctggcccaa

SEQ ID NO: 6777 - DNA, 326 bp, Glycine max
tgatttccctaccaagcctcttacattatcacctcgcacagaaacatcagtcattaatggaacttataggggatttatggaaattatactgcagaacaatgatactaagatgcatacctatcacatgagtggatatgcattttttgttgtcgggtactggctaactcctcttttatgatgccattccatgtttctggaaccaataacacaacttgatttagtaggctgcacgatagattttggtgattggtcttagaatagcaagggtacatataacaagtgggatggaatagctcgcactacagcccaagtatatatatatttat

SEQ ID NO: 6778 - DNA, 416 bp, Glycine max
agctttaatgtgttttcccttgtataactactaactgcagtaacagattctcctgaaatctgttgagtcccacatcgagtagaagtggaaaggttgagcaccatataagtgaggagaagacccataaatctgagccttaaggttttgggttagagtgtgatgtcagatctccttatgtggtggctcgtggtccacaggtgtacccctcgaatctccccaacaattggtatctgagctgatggttcaagttggtgaccggctcagacgagtatgcaagtactgcaggtggccaaaatggctagcggcacagcgtgccccgcaggtggagcggagtggccagaatggctagcgggcaaggcaagtaccgcaggtggccatggctatacttgtggatgataaagacttccgctagaggg

SEQ ID NO: 6779 - DNA, 349 bp, Glycine max
tcttcttgactcatcttttccttgaagtggcgtctccaatcatctttcttccttcttcattatgctgccattaaacttcaagaagaaaaggactccattgatgaagaagatgcaaggcctacacgttccacaaggagctacataataattacatattaaaagctcagagaaaccgcccacattcctttataaacaccttagatcaaggtaacagtctatctccactatctttacaatctttcaaaaatcttcaagatttctcttagaaaaagatcacaaaaaccctaattatcttcacaaaatcactatgacatgctacagcaaaaacactaatcctgccatgtccatc

SEQ ID NO: 6780 - DNA, 409 bp, Glycine max
  unsure (1)..(409): unsure at all n locations
agctttctccaccaagttgcctgatgcctgaaatgtcttntttgatggtagtggtcctagatgcagggaagaatttctccaagaacaccctcttaaggtcatcccagctgaaaatagacctgagagcaaggtagtataaccaatcttttgccactccctccagagaatgaggaaaagccttttgaaagatatgatcttcttggacatcagggggcttgatggtgaaacaaacaatatggaactccttaagatgcttataaggatcttcacctgcaagaccatgaaacttgggcagcaaatgtattagtccagtcttgagaacatatggaacacccttatcaggatattgaatgcataagctntcataagtgaaatcaagtgcagccatctccctaagagtcctatcacg

SEQ ID NO: 6781 - DNA, 246 bp, Glycine max
taatatatcgagacgataaaatttttcaacggtttctctcgtgagattaaaatggtcataagttttaactcggatgtccgattcaggagcttcacatatcgagatgcacgaaattgaacactggaagctctagagaaattctaatggtcataaattttcacacagaggacctattcacgcgcttaatatattcagacgctcgaaattgaacaatggaagctctcgagatattactatggtcataac

SEQ ID NO: 6782 - DNA, 410 bp, Glycine max
ctcaagcttgaagaatttacataaaattggttatggggatgattctgcaccgaagttatcttatcgagaaccccaaaaggcacctaatgggcatgctgttatgcatgttaaggatatactgcctcgaggccttatcaactctgggaatctatgttttcttaatgcaaccatgcacgctctcttgtcatgctcacctttcgttcatcttttacagcaattaagaactcgcaaccttcctaaggttagtttttctgctgctgcatgtcaactattaaccaattaactaatactgccatgtacaggttttagcttaacttatagatgagataataacattaaaggaataaagacctaaaagatgtattatgcattcagatttcccttatgctagaaaattattgaactgatat

SEQ ID NO: 6783 - DNA, 336 bp, Glycine max
tttgggtcgtacttccattgctaagttcaagtctttaaaatctctcgatcaattgcaattctttcaccatcataacgaacatatgcaaggacttcttgctcaaagcattcgccacaatgttagccttgctgggatggtatgacaactcaaagtcataatcctttagaaactccatccatctcctctgtctcatgtttagctctttttggtcaaacaggtacttcaagcttttgcgatcattaaataatttgaatattgcccgaaagagataatgcatccatatctttaaccataaaccattgttgccagctctaagtcatgggtaggatagttcac

SEQ ID NO: 6784 - DNA, 250 bp, Glycine max
tttaatttcgagctcttggatattatcttgactcaatcggacatttgtttgaaaagttattgtaattcgaatgcgctcatggctacagtattgcatttcgagcgtctcgatatattacgggactcaatcggacattcgagtaaaaagttattgttgcttgaatttgctcagagcttcggccttccatttcgagcatgtcgatatattacgggactcactctgacgtccgagtaaaaagttattgtcgttt

SEQ ID NO: 6785 - DNA, 406 bp, Glycine max
tctcgacatatgatgcgcccgaatcggacatctctgtgaaatgttatgaccatttaaatttcgcgagagttttcgatgtttaatttcgagcgtatcgatatattataagcctgagtcgtacatccgtgtgaaatgttatgaccatttgaatttctcaagagcttctgttgttcaatttcgagcctctcgacatatgatgcgcccgaatcggacatccgtgtgaaaagttatggccatttgaatttctcgagagcttccgatgtttaatttcgagcgtatcgatatattataagcctgaatcggacatccgtgtgaaaagttatgaccatttgaatttcacgagagattccgttgttcaatttcgagcgtctctatatgtgatgcgcctgaattggacattcaagtg

SEQ ID NO: 6786 - DNA, 269 bp, Glycine max
ttgaattggatgggctatcgattaagatgcttcctgaacaaaacacattgcccaaaaatcacttcgaggcgaagaagaatttatgtcctgtgggaatggaatacccaaagatccatgcatgcactaatgattgcatattatacagaaatcaagttgcagaaatgcataagtgccccacatgtggggtatcatggtacaaagtccaagataacaaatttgttgatggtgcaagcaaaagcaatagtcatttagcaaaggtgtgctggtat

SEQ ID NO: 6787 - DNA, 252 bp, Glycine max
tctacatcagacttctttcaggtgctggaactatttcacatggacttgatggggcctatgcaagttgaaagccttggaggaaagaagtatgcctatgttggtgtggatgatttctccagatttacctgggtcaactttatcagagaaaaatcagacacctttgaggtattcaaggagttgagtctaagacttcaaagagaaaaggacagtgtcatcaagagaatcaggagtgatcatggcagagagttgaaa

SEQ ID NO: 6788 - DNA, 248 bp, Glycine max
tgcgagaaattcaaatggtcataactttgaactcggatgtcctattcaggtgcataatatatcgagacgtttgaaattgaacaatggaagctcttgagcagttcaaatggtcataacttttcactaggatgtccgattcaggcacataatatatcgagaagctcgaaattgaacaacggaagctctcgagaaattcaaatgatcataacttttcacacggatgtccgattcacgcacataatatatcg

SEQ ID NO: 6789 - DNA, 246 bp, Glycine max
tgggagcttccaagtgccaattcgtcttcttctttagtccagtcttcttctggcttcaattcttcagtgggctttccttctgtgtccagcatcttgggatgttcccagcctttgatgacagctttccaggttctgctatccagtgatttgaggaaggccaccattcttgctttccaatattcatagttgcttccatcaagaattggtggtctgttcactggtccgccttctttctccatgttcatc

SEQ ID NO: 6790 - DNA, 303 bp, Glycine max
ctcaagctggagtccatgcgtcacgttttggaccttttgatttacatgttacaagctgttaatcccggtgatcatgcagtaagttaaactgtactgcttggctttcttgaatcctccgtgctactaagtaaaataattaaatgtttggtttttatgctttgtaggctgtaaaagacgaagttattattgatcttgttgaccgctgtcgcacaaaccagaaaaaattgatgcagatgctaacaactactgggttagttccactcagctattccatctggcacacacccaaatgtactgtgtgtt

SEQ ID NO: 6791 - DNA, 300 bp, Glycine max
  unsure (1)..(300): unsure at all n locations
tatgctgcaaatatttacaatagacctcctcaacctcagcagttaaatcaaccatcgcagagcaattatgacctttccagcaatagatacaaccctggatggtggaatcaccctaacctcagatggtccagccctcagcaacaacaacagcagcctgctccttccttccgaaatgctgctggcccaagcagaccatacattcctccaccaatccaacaacagcaacaaccccagagacaaccaacagttgaggcccctccacaaccttccctcanagaacttgtgaggcaaatgactatg

SEQ ID NO: 6792 - DNA, 397 bp, Glycine max
tctgaacaatttttcaggcaactgcagggattttcaatacacctcttatgtcagaaactttgatcacttaaaaggaaaaaacttagataaaaagagcatgttttaaaaacaagaacattgatagtcatctcaccggatgccatgattcatcattttcagcatgaccatgatgttggtgatgagtcctatgactgattctcctgtataaaatatcagtttcaaacatgaattcaaaactaaaaaaaagagtaaaatgtgtttttatccctacaaatatctcaaaatttgattttagtctttacaaaaaataatatatttttagtctctacatttatcaaaattaatgtggttttagtcattcatcaagactaaaaaatcttattgttaaaatgtagag

SEQ ID NO: 6793 - DNA, 400 bp, Glycine max
gcctattctatgtgatttaccaagcacaccatgatcttttaattcaagttcatctagtttatcaccacctaacagaatttgtatctcaagtgctgggagcctttttcactaacatgaactaatctcaaatgccagagttttgctttatcaatcaacgtactactagctaccgatgcatgtccaataatagtggaaccttcaagaataaacaagccattacttttattcttgttacccttagctatgagtaaagatacatttgaaatcttaagaacaccatttggaattctagttgcatatcctagatcatcaaacatgtctatggaaataagattcctcttgagctttggaatgtaccttacatttttcagtagatactctctgttatcacacatcttca

SEQ ID NO: 6794 - DNA, 323 bp, Glycine max
taaacattctctttcgagcctccgtattattattggactcaatctaacatccgtgaaaaaagttactgtcgttagaatttgctcacaggttcaacattcaatttcgagcgtctcgatatattactggagtcaatcagatatccgagtaaaacgttattgtcgtttgaattggctcacaagttcaacattcaatttcgagcgtctcgatatgttatgggactcaatcagacatcccagtacaaagctattggcgcttgaatttggtcagagattcaacattcaatttcgaacgtctcgatatcttacgggactcaatcacacat

SEQ ID NO: 6795 - DNA, 276 bp, Glycine max
  unsure (1)..(276): unsure at all n locations
tgtcacatgttcatgcaacaattgttatccgtggctatacgagacatcttgctttacaaattcggttatccataactcgcttgtgctnnttcttccatgccatatgtagcaaagtcgttgatcctgtgaaagttgatgagctggaaaatgatgccgcaattatactgtgctagttggagatgtatttccccttgctttctttgacatcatgattcacttgattgtgcatctggttagagaaatcaaatgttgttggcctgttatttgcggtggatg

SEQ ID NO: 6796 - DNA, 317 bp, Glycine max
  unsure (1)..(317): unsure at all n locations
gccagaatcagacatgcgagtgtatatgttatgaccattngaatttctcaggagctttcgttgttcaatttcgaatttctcgatatatgatgcgcttcactcagacatccaagtgacaagttatgaccatttgaatttcacgacaggttatgttgttcaatttcgagcgtctcgatatatcatggggcttagttatacacccgagtcaaatgttatggctgcttgaattgcctagagctaccgtattcaagttgagcgtctaatatattatgccctaaatcggtattcgattgaaggtatgacctttgaatcctcga

SEQ ID NO: 6797 - DNA, 320 bp, Glycine max
gcaacaattgttagccgtggctattctatacatgtagccaatttatgtcaggataacgataactcgcctgtgctctttctcccgtgctatatggagcatagacattgatccagtcatgtttgatgagttggaaaatgaggccacaattatactgtgccagttggagatgtattttccccctgctctctttgacatcatgtatcacttgattgtgcatctgggcagagatatcaaatgttgtgcgcctgtttatctacgatggatgtacccggttgagcgatacatgaagatcttaaaaggggatacaaagaatctatatc

SEQ ID NO: 6798 - DNA, 441 bp, Glycine max
  unsure (1)..(441): unsure at all n locations
ncgatccaattcatacgancaataactttgaatcggatgtccgattgtgtcccatangatatcgagacgctcgttattgaaaacggaagctctaacaaaagtcaaacgacaataacttntaacttggatgtccgattgcgccctgtaatatatcgagacgctcgaaattgaaaactgaagctctaagaaaagtcaaacgacaatatactttaactcggatgtccgattgagtcctgtaatatatcgagacgctcgtaattgaaaactgaatctctgagcaaatacaaacgacaataacttttgactcggatgtccgattgtgtcctgtaggatatcgagacgctcgtaattgaaaaccgaagctcggagaaaaatctaacgacagtaactttaactcggatgcctattgagccctgaatatatcagacgctctaaatgaaa

SEQ ID NO: 6799 - DNA, 370 bp, Glycine max
  unsure (1)..(370): unsure at all n locations
cttggccatgctggactcgtttgttattgatttccttggcaatttgatgcttagagacatcaatatctatctctccatcagtaggtctgcccagatatttgttgatcacagcaggngagaatctaacacactttcctctgacaaacacttttggaaaatcatcacttttcctgttggatatgccaaagggatggtggacaatgaattccctgactaggccttcataacagcctcccaactgggggactgtcttcagtagtccagcagccttagaagagtgtccatggtctctttgcaatccaaggcatctcttcacagttctctttcacccgcaagtctgcggtgatacacatatttccacttctcaaca

SEQ ID NO: 6800 - DNA, 433 bp, Glycine max
  unsure (1)..(433): unsure at all n locations
aaacgtntacatataggataagatctttaaaaccagtgcaagaccagacaatttatttcatgttaatattattgccaaaaaaagttattgtttatttgaaaagtatattgtatgtgaattaaaagaatcttgattgttggagaaagcaactttagattgaggagaaattttatcaagctacagacatatactccaaatataacaaattagaataatgataagcaaagtaaactaagtaaaaaaaaaacaccttcttttccttcgcaatctttgagagctcttcaattatgtaaccttttgctcgagcatcttcacagagagaattgaagtccatggatataccattntcttgggcccaatgttcaagtgcttgcttaactgggttaacaacagccacaaggataggcctcaaactgtttcataaacccatatc

SEQ ID NO: 6801 - DNA, 406 bp, Glycine max
  unsure (1)..(406): unsure at all n locations
cttctatctttttagcatatctnttcaaatattnttcaatatttttgcatntttaagttgtgttgtgacattatntctttaatatgatttgaacatctaaatttttttatcatcatcatatcggtgtaaagtattcactgactctatatataattaatctccactaaaaaccaacctaataacactaattgattcaaatntacactatattcaaattaagaaatgctgcagagttattttaaaattatttaattatatataatagtggtagtgaaaagtacacaattattaagaagaatttccttacaaaaattgaataaaaaatacatttaaaatataatctcttttgcataataagagtatatatatatatatatatatatatatatataattatatatatatc

SEQ ID NO: 6802 - DNA, 294 bp, Glycine max
  unsure (1)..(294): unsure at all n locations
ttgtcgcatgcaagcttatagaaatgaaatggcataacttctaactctgatgtccgatgcagacacacaacatatcgagacgctcagaagtgaacaacagaagctctctagaaattccaatagtcataactgctcacacagatgcccgatgctgggacataatatatcgagacgctcgaaatagaacattgaaagctctcgagaaatccaaacaggcctaactnttcgctcggacgtccgactcaggagcataacatctggagacactcaaaattgaacagcggaagctcataa

SEQ ID NO: 6803 - DNA, 398 bp, Glycine max
  unsure (1)..(398): unsure at all n locations
cctctaaatgagctacaggtgtataagttnctntgtagtctatnccttcttgttgtgagtattctttagcaactaaccttgctttgtttttcacaacctttcaaatttcattcagtttggtttgaaagactcattactctccaatagctttctttctttttggaaattcgactgactttcaaacatcattcctctgaaactgatcaagctacttttgcattgctgtaacccaattgtcatcctgcattacatcatcaatgtcgttgggtctcatttcagaaatcaatgcaatatgctcttatgttctgagtgatgatcctgtataacatgatcaactagatcaccaataattgactttttggatgattctttatgatgcattcaggggtcctcttacc

SEQ ID NO: 6804 - DNA, 432 bp, Glycine max
  unsure (1)..(432): unsure at all n locations
agcttattgtatatgagtgcatgtccaatggatgtttcttatgatgacctatactctagtgataagaaaaaggaaccactaacatggaaacagaggctaaagatctgcacaaaagcagcacatgaccacactactntgacacatgtgtcattaggccgatgttaaaactgctttttgtagtagtgttggatatatgatctctaagaaaatgatgtcttatctctatatgtttgggtctagaatgcatgataggaattttagatagattgataacacttgtgttgtcacatttcaagggaatatgatcaaggactaatatcttgcacacaagcaaacactaagcataatatttggtcaactgtagttaagtaaagaagtgaccaattatacctctataccttgactcataaaatgatttacatttctcatcta

SEQ ID NO: 6805 - DNA, 361 bp, Glycine max
cacaacagggagtgaagattgctgaaaaccctagccttgcaacaagtcctatggaagtagacacggagatggacaagataatccgcagtattgtgagtagcattttaaaagacgcctctgttcctgaagctgatgaagatgttccaacatcttccaccccgaatggttctgtgcctgatgttgagaaagatgttccaacatcttccggcccaaatgctgaagtactctcttcccccagcaaagagagatcaacagaggaagatgatcaagcgacaaaggagacccctgcaccaaaggcaccagaacctgctccaggtgacctcattgacctggaagaagtagaatctgatgaggaacccat

SEQ ID NO: 6806 - DNA, 472 bp, Glycine max
  unsure (1)..(472): unsure at all n locations
tatagcctcggcagcttcatcctcagatccctcttgttggactaggcttatattaaacaacattataatcacaacttatttaaaaactaaaaatcttgcaatctatccctagcaatgcaattatctagccttgctctatcaagttctaaggaaacagtacacttcccagttcctaacagtacacaccaatgggtgatcagaccataagcatgcaacagtaaagcatcgatagaagcaatgaaaacatgaaacacactngctagtgtttagctctactgagctttaaaagattggctaagattttggtaaaacataagcacttatacaatgaaggaaagctggagttgctgcacatgatgtccaacgttatgtcaaggaataagatctggctgacaacgtacaaagcaagataaaatggcanatgaagaatcgaagttgcaggatccacgatgtcggatacaatgtcctgaca

SEQ ID NO: 6807 - DNA, 417 bp, Glycine max
  unsure (1)..(417): unsure at all n locations
acccaccatcgacatagggcttaagctcatctatacattgtcctgtngttccatcattattttgcataggtacaagagccacgattatgcacttgaataaatatttgatggatgttgattgattgcaccattctatgttgaggtaatcttgatatttcaataataagtttggattgtatggcactacatatctattgtctagggctatgtgatttttctcaatatattttccatcattacgcctttcataaactcaatatccatcttggtcaacaacagtttcaggttgccaattttttgaaaaaaaatctagaacacttgccatctttcatgcatggcaactttctgttagcattaccacatatgccatgcatcatatgtgatgtagctccatgtggagcttgtaggccttggatc

SEQ ID NO: 6808 - DNA, 328 bp, Glycine max
  unsure (1)..(328): unsure at all n locations
agctatagcatccaataccctgatgatgatgtcctatatgttcttaagactggactgattcatttgcttccaaagtttcatggccttgcaggtgaagacccgcacaaacatttgaaagaatttcacattgtctgctctaccatgaaacccccagatgtccaagaggatcacatatttctgaaagcttttcctcattcattagagggagtggcaaaggactggctgtattaccttgctccaaggtccatcacgagctgngatgaccttaagagagtattcttagaaaatatttccctgcttccaggaccacagtcatcaggaatgatat

SEQ ID NO: 6809 - DNA, 352 bp, Glycine max
  unsure (1)..(352): unsure at all n locations
agctatgctganacattataatagacctcctcagtatcaaaaccaacaacagtagaataattatgaccttccaagcaacagatacaatccaggttggaggaatcatccanatctgagatggacaagtcctccacaacaacatcagtctgtcctttctttccagaatggtgctggtccaagcaagccttatgttcctcctccaatgcagcaacaacaaagacaacaagcagttgaggccccttttcaaccttccttagaggagttagtcaggcaaataaccatccagaatatgcaatttcagcaagagacaagagcctccattcagagtctgacatattagatggtgcagatg

SEQ ID NO: 6810 - DNA, 330 bp, Glycine max
tgagggaaaacttgatgccttggttattctagtaactcagcttgccataaatcataactcagcttgccataaatcagaaattctgctgatcaccatacagatctctgtccttctttgcagctatctggagtcaatgagcaacttgaagcccatgctgcaaacatttataatagactccctcagcaacaaaaccaacaacaacagaataattatgatctttcaaacaatagatacaatccaggttggaggaatcatccaaatctgagatgggaaaatcctccacaacaacaacagcagcaacaacaacagtctgtccctcccttccagaat

SEQ ID NO: 6811 - DNA, 343 bp, Glycine max
tgcacttgaggccaacaagggagattgaccattctttttgcctgaaagaaccaacgacaatgcttacaaagtcgagctgcccggcgagtataatggtaattccaccttcaatggccctgatccatccctcttttgatgcacatggagaatccgaatcgaggacaaaccccttctcaagaaggagagaatgatgaggacatgttcaagagcaagggccaggatccactcgaaggaattggaggacccatgacaagggctacagcacggaaagccaaggaaagcctccaacaagtggctgccatactatttgaatacaagcccacagctcaaggagaaaagccca

SEQ ID NO: 6812 - DNA, 238 bp, Glycine max
agcttttatttaaggttcgttcctaatttatctacaattgcatcacctctcaatgagctggtgaagaagaatgtggcatttaccttcggtgaaaaacaagagcaagcctttgctttgctcaaggaaaagcttactaaggcacctgttctagctctttctgacttttctaaaacttttgagctagaatgtgatgcctctggagtgggagttggagctgtattgttacaaggtgggcacc

SEQ ID NO: 6813 - DNA, 341 bp, Glycine max
tttaaaacacaaactatgttcaaacctataaggagtatacttgaaataagtttatttgagtcttacctatatagttgatttattttaaaactcgaacttgactatatataaattataacattatatatttatatttagaagctcctaaaaaatcttactaaatataatctataaggtgtgataccaatcttttaatatcaaacctataaggtttgaacatatttcaagtatacatttaaacttatttaattattaaaacaaaaacttgaacaaatatttattgatttgaacttaataattatgaatgactcagttcatttccactttttgacaccatcatc

SEQ ID NO: 6814 - DNA, 235 bp, Glycine max
agctttttggttcaattacgagcgtctctatatattatgtgcctgaaacggacatccgaatgaaaagttatgagcatttgaatttctagagaacttccatttttcaattttgagcgtctcgatatatcatcggcctcgttcgtacatccatgtcacaagatatggccgtcttaattggacaagagcttccgtgttgaatttcgagcgtctcgataaattatgtgcctgaatcgga

SEQ ID NO: 6815 - DNA, 235 bp, Glycine max
agctttttgaatgtatatattttaatttgcacacgcaattatgaatcagtgaatacaaggaagagaatcaagcatacatactgatgaaatttgatgtcctccaagtcaattgattttcccttggtcgttctaccttgtgcctctaataatactctatcatttaacccaagtttacactcaggcataccactgcattgtacaaaccatggattgaataatactctagcacagaatt

SEQ ID NO: 6816 - DNA, 343 bp, Glycine max
tgggatgaaacaagtgtgattcatcataaattttatctctgctgagaagaaatttcttttcggatagtgaccagatcctatagcctttcaccccatcaccataacccatgaacagaccctttcttgatctaggtatcagttttccttcattgacatgataataagcattgcagccaaatactcctaggtttgagtagtttgctgtttttccattccagatttcaataggagttttaagtcctatagcagtagagggtgttctattgattagaaaacaagttgtattgatagcttctccctaaaaacttctgttgagaccaacattggatagcaagcatcttgt

SEQ ID NO: 6817 - DNA, 330 bp, Glycine max
tttgttgttcaatttcgagcgtttcgttatattatgtccgcgaatcggatatcctatgaaaagttatgaccatttgaatttctcgagtgcttccgttgttcaatttcgagcgtctcgatattttatgtcctcgaatcagacatcggagtgaaatgttatgagcatttcaatttgtcgagagcttccgttgttcaatttcgagcgtatcgatatattatgtctccgagtcggtcttcattgtgaaaagttatgaccatttgaatttctggacagcttttgttgatcaatttcgagcgcctagatatattatgtccgcgaattagacatccg

SEQ ID NO: 6818 - DNA, 315 bp, Glycine max
  unsure (1)..(315): unsure at all n locations
tgaaattgaacaacgaaagcgcncattaatttatttggtcataacatgtcacacggaagtctgcttcaagcgcataatataccgcgacgcttgatattgaacaacggaggctctcgagaaagtcaaatggtcttaacttgtcacacggaagtcgagattcacgcgcgtaatatatacgcgaagcttgaaattgaacaacggaagctctcctaacatatgaatggtcattacatgttacagggaagtagaattctagcgcataatatagggacactctcgaaattgaacaacggaagctctcgagagatttaaatg

SEQ ID NO: 6819 - DNA, 237 bp, Glycine max
agcttttcgttatattatgcaccttaatcggacttccgtttgaaaagttttgaccatttgaatttctcaagagctttcgttggtcaatttcgagggtcttgaaatattatgcgcctgaatcggacttccgtgtgataagttatgaccatttgaatttctcgagagcttccgttgtttaatttcaagcttctcgatatattatgcaccttaatcggacttccgtgtgataagttatga

SEQ ID NO: 6820 - DNA, 238 bp, Glycine max
agcttttcatttattcaaatggtcataacttttcactcggaggtccgattcaggcgcataagatatcgagaggctcgaaattgaacaacggaaggtcgcgagaaattcaaatgctcataacctttcacatggaggtccaattcaggcgcataatatatcgagacgctcaaaattgaacaatggaagctcttgagcaattcaaatggtcataaccttacactcggaggtccgattcagg

SEQ ID NO: 6821 - DNA, 350 bp, Glycine max
  unsure (1)..(350): unsure at all n locations
tagctacacacactcatctattaacttagcttaccttcnngacaaaatacatgaaaatacaaaaaaaaaagtccctactacaaagactacccaaaatgccctcaaatacaaggctaaaaccctatactacaagaatggccaaaatacaaggcccaaaagaaggaaaaacctattctaatatttacaaagataagcgggctcgtacttagcccatgggctcgaaatctatcctaaggctcatgagaatcctagggccttcccttggatctctagcccaatctacttggagtcttctacccaatgcccttgcggggtaggattgcatcaatcttgatacatataaagcaagc

SEQ ID NO: 6822 - DNA, 349 bp, Glycine max
  unsure (1)..(349): unsure at all n locations
ctcaagcttggagataccatcattttcatattattctaaagttntttcccgaatacttccaaaaaatgcgagttgtatactcactaaataatatcaaagttttgaggaaaagaagaaaagaatataatgtcaaactaaatggaaaatgagattgtccaaaatcctaacaatgattgatctccaatatcaaatttaaggtaaagacaaatgctagcgctaattttatgtaattctcattaaataaagagtgaagtaattaaattatttaataaaaattacattttatctaataatataaaaattgtgctgttaactttttttagaaaaactaagcatttttaaatattat

SEQ ID NO: 6823 - DNA, 350 bp, Glycine max
tactcaagcttcaaggataatggtctcatcataatatttatttcctgaatggaattcaataaataggcctcctattttcaatggagtgggttaccattactggaaaacccgtatgcaaatttttatagaggcaatagatttaaatatttgggatgcaatagaagtagggccctatattcccactatggtggcaggaagtaaaaccatagaaaagcctagggaagaatggagtgaagaagaagagagattagtgcaatacaacttaaaagccaaaaatataattacatctgccttaggaatggatgagtactttagggtatcaaattgtaaaagtgcaaaagaaatgtggg

SEQ ID NO: 6824 - DNA, 336 bp, Glycine max
ttcgagaaattcaaatggtcataacttttcactcgcatgtccgattcaggcgcataacttatcgagacgctcgaaattgaacaacggaagctctcgagaaattcaaatggtcataacttttcactcgcatgtccgattcgaggacatattatatctagacgctagaaattgaacaacggaagctctcaagaaattcaaatggtcataacttttaactcgcatgtccgattcaggcgcataacatatcgagacgctcgaaattgaacaacggatgttctcgagagattcaaatggtcataacttttcactcgcatgtccgattcacgcgcataacat

SEQ ID NO: 6825 - DNA, 230 bp, Glycine max
tagctttctttgttgaatatctagtgtctcgatacgcgatgcacctgaatcggacatgcgagtgaaaagttatgaccatttgaatttctcgagagcttccgttgtaaaatttctagcgtctcgatacgctatacgctgaattggacatgcgagtgaaaagttatgaccatttgaatttctcgagaacatccgttgttcaatttcgagcgtctcgatatgttatgcgcctg

SEQ ID NO: 6826 - DNA, 344 bp, Glycine max
tgtaacaccccgacgaattacaccaaattgagtaggatctggagtctgtgtatgtatgagattgtatagttaagaataacttaaaagaattaattgatactacctataccaacaaaatacatctcttttttggtagccctcacttaagaacttcatagttaagtgtgatttccttgaagtagttatgggatgagtgaccttctgagaaattttctagaatatgtgagtgatgacaaaatatgttgaaaagtctcgtgttggtttgtggagttagttatttatcttgaaagcagacatggttgaatttcaaggttttggaaagggctacctacaaaggattctga

SEQ ID NO: 6827 - DNA, 231 bp, Glycine max
  unsure (1)..(231): unsure at all n locations
agctcaattctttatnntgagcgtctcgatatattacccgattcaatcggacatccgagtaaaaagttattgtcttttgaatttcctacaagcttccgttttcaatttgcaacgtctcgatatattacaggactcaatcggacatccgtgtataaagttattgtcaattcaattttctcagaacttcggatctaaattttcagcgtctcgatatattacgggactcaatca

SEQ ID NO: 6828 - DNA, 351 bp, Glycine max
tcagaattggttaagcatggcttatttggtgatcgatcatctttgtaatgagtttgagggcacgtacaggttcaccgattgggacaccattcttttctccacttttcttgtatgaaccctctgttctggagatcccgggtcctggtttacaagcggagtacatgcaatcttggacataaaaagccgtgtagtaattgacgccaatgaaatccaatcctctcttgagtttctctttttcgtagctggaaaatttgggcaagaggcttccaagaacgttctccatctctgtagggtactttccgaatatgattgggtccaagaacctgcattataataaagtgttactctggg

SEQ ID NO: 6829 - DNA, 238 bp, Glycine max
agcttttattttttatacaagaatgaagctctgataccacttgttggacaagtggcctcagatatcttaagaagggggggttgaattaagatatcacaaattatttccccaattaaaaattctatttaactttctattcaagttataaattcccttaataatgaatttcttaaatattgattcaaatagaacaatttgaatatgaatataaaacaataataaataaaggagtttaagg

SEQ ID NO: 6830 - DNA, 238 bp, Glycine max
agcttttatttttggttcattcctaatttctctacaattgcatcacctcccaatgagctggtgaagaagaatgtggcatttacctgggtgaaaaacaagagcaagcgttagttttgctcaaagaaaagcttactaaggcacctgttctagctcttcctgacttttctaaaacttttgagctagaatgtgatgcctctagagtgggagttggagctgtattgttacaaggtgggcaccc

SEQ ID NO: 6831 - DNA, 342 bp, Glycine max
tgaagaccataagcatactgttcaatttttgtacggtccaagcagtcaatgcagttggtacggagaactccactctgaaaatgtggtgcatcactaccaaaattatcttttttattctgatggttcatgtcagtctctttgtcttgattaaccacagaatttagcatttcattactgttcccaatcctcacaagatccccagaactagctctcagatctctcactgaagtatccctataaaaatacacaatgagttgaaaataaaaatagaacttcctttctctaaatcttgcacttttacaattataaaatagaactgcaataatattaagcaaaaaaaag

SEQ ID NO: 6832 - DNA, 235 bp, Glycine max
agctttatgaaattttgcaacatcgttttggatatttaacaagaacattctatttcttgacattggtaccttggtaattagattatttctcccatctctgatggaaagactagaatctttcatgtgaatatcatagccttttttgagtaattgtcccaaactcaaaatattgttcttcatatttgggacgtagtagacatttgatatgaattcatgtcttgcatccttcaaatgg

SEQ ID NO: 6833 - DNA, 238 bp, Glycine max
agcttgttttttgatacattgatcattcgtttgtgttgaagctgctcgacctttttgactcagaagaccaaagagagagggattacctgaagactatcctccaccgtatttatggaaagttcatggtgcatcggccattcattagaaaagccatcaacaatatcttttacaggttcatatttgagacagagaaacacagtgggattgcagagttgcttgaaatattgggcagcataat

SEQ ID NO: 6834 - DNA, 349 bp, Glycine max
tatgctgcaaacatctacaatagaccttctcatcctcagcagcaaaatcagccacaacagaacaattatgacctctccagcaataggtacaatcccgggtggaggaatcatcccaaccttagatggttgaatccttcacaatagcagcaacaattttagaatgttgctggcctaagcagaccatacgttcctccaccaatccagcaacaacaacaacaacaacaactaccccagaaacaacaaacaattgaggcccctccgcaaccttcccttgaagaacttgtgaggcaaatgactatgcaaaacatgcagtttcaacaagagacgaaagaaaagaatccagtaattg

SEQ ID NO: 6835 - DNA, 344 bp, Glycine max
tcaagttcaggaggagagcgaagaagtgtgttttaccagcaagttagaggaactagatctctctctgatatttatcaaagatgtaatgttgctgtaatggagcctgtagactacaatgaagctgcaactgattcgaagtgggtaagtgcaatgaaggaggagcttgatatgattgaaaaacatcaaacatgggagctcacggagaaacctaaagataaaaatgtcattggagtgaaatgggtttatagaaccaagcttaatgttgatggttctgtaaacaaacataaggcgaggcttgttgtgaagggatatgcgcagatgttcggggtagacttctcagaaac

SEQ ID NO: 6836 - DNA, 336 bp, Glycine max
tgccgccacggagttttccgactatgttcttgtgtggtggaagtgattatgcaagttgaagtggacgtttccattgggaaatacaatgataaggtactttgtgatgttgttcctatggaggccagtcacttacttttggggagaccatggcaatttgataaaagagccaatcatgacggttacaccaacaagatctctttcattacttttggtgttgcataaaaaatgtacaatgtaggtcggctaggtttttttgtgcgagctcaaccgacattttgtttcggccgaaactggcatgttcccatttattttggccaggaaaacattaacccacct

SEQ ID NO: 6837 - DNA, 234 bp, Glycine max
atttttctgtaaattcgaatggccataacttttctcacggatgtctgattttgggacataatatatcgagaagctcaaaattgaacaacggaaactctcgagaaattcaaatggtcatgactttttattcggaagtccgattcagggacataactcatctagacgctcaaaattaaccaacaaaagctctcgagaaattccaatggttatcactttttactcgattcggggaca

SEQ ID NO: 6838 - DNA, 345 bp, Glycine max
ttaggcctagttagttacctttggtgtgcttaaatggataatctggtgggaagtgaatggtcaccaggaatacaccaccagcataaggactgtcagttggacccataattgtagcttgccaatgaaacatgtcatcaccaacagggcctactcaagaatggaatacataagattcatgataagcttcccatagatacataactacaaggtaatattcaatattacatattgttttccatttttatatgtaactaaacaaaccctacttagttgttgggcctacatgaaccgtttatcaaaacatcataacctatctacatatagcttctgctactctcaaccaag

SEQ ID NO: 6839 - DNA, 235 bp, Glycine max
atttttttccttaggttgttccatgttgctcatgttgttgctctccttatctctaattgatagaactctcaaacctagggggttgttccacatagacttcttccttaataattccattaaggaatgcactttttatgtccatttgatacaacatcatgtcataatagcattaaagaatagtaaaatgcgtagccttcctgttgtgaataacctttggccataagcctagccttgt

SEQ ID NO: 6840 - DNA, 338 bp, Glycine max
tgaaatcattgagttccaacatttactatctttttcgaacattcctctgaagaattcgtaagcaatatccagtcttccacattttgcatacatatatgtgatggcagatcccacatcaactttgctctccaatcctttctttagaatatcacaatgcaacacctttagaaatacaaggttgacctggcagttggaaaagagtgaaaggagaagggaagaaagagaggtcacggttttgaatcctccaactgacatttctaataaaaactaacaaattaacatttgttgataaaaaataacaaaaaacaatgcaactccttccctaatttcagagcagc

SEQ ID NO: 6841 - DNA, 342 bp, Glycine max
tgtcaaaaagggaagcaagttataaactcttttcaaagcaagaactttgtttctacctcgaaaccccttgagctacttcacattgatttatttggtccctctacaacttttagttttggtggtaattactatggcttagtaatagtggatgattactcaaggttcacatggaatttttttttgaaaaccaaaaatcaagcttttgattcttttcgcaaacttgccaaggtgattcaaaatgaaaaggtctcaacatcgtttcacttagaagtgaacatggaggtgaatttaaaaatgagtcttttgaaaatttttgtgaagaaaatggaattcaccacaaga

SEQ ID NO: 6842 - DNA, 348 bp, Glycine max
ttatccccttcaatgaatttgtacaaataatattatattaaatccagatcgattatcgatactggtggaatttcatgtgaagaagcatcgatggcagaatatcttaatcttgttatatatgtttacgtatttttaaaagtacattttagttaaaaaaatatatttaataaactataatagctatataagaaatttcaaaattaaatagttttaatagtttttagaagctaaaagaaactttaaaaaattcttaaaacaatataatttaaaatattttgagttaaactttataaagatttgatgttcattttaaatataactttcccagaaacttatataaatatttgg

SEQ ID NO: 6843 - DNA, 361 bp, Glycine max
ttataagcgcgggtctgggagacaattgtcattcgttcgcgatatgcgatatcaagcgatatgtcgtaagcaaagaatacccgccagagattgccgacaacgataaaaggacattgaggaggttggcagccggtttcttcatgagcggaagcatactgtataaaagaaatcacgacatgacactcctgcggtgtgtggatgccaaagaggcaaatcacatgatcgaagaagtccatgagggctcgtttggaatgcacgccaacggacatgctatggccaggaagatcctaagagcaggttattactggcttaccatggaaagtgattgttgtgtccatgtgaggaaatgccacaaatgtca

SEQ ID NO: 6844 - DNA, 236 bp, Glycine max
agctttttttgggacatcttgacttgctttccaatctgacattcaccacagattctgccttcttctattttcagattgggaatgcctctaacagcacctttgtcaatgattttcttcatgcctcttaagtgcagatgtccaaatttttgatgccatatttttacttcatcttctttggaggatagacatgtggaggagtaactggtttcttgaggtgtccataggtaacagttgtc

SEQ ID NO: 6845 - DNA, 238 bp, Glycine max
ttttgttaagctatatactaaaggatgcaactagtacagagtcctgcatcgtacaacccctattccaacaccaaaatcctcacattcaatttcaaaagctttatcaaaattacgcaaacaaagcaaaggtgcattggttagcttatctttcaataaattaaaagctttcttatgcacattagtccacttgaacaccacattctttttgacaagttcatttaaaggtgcaacaagtgaa

SEQ ID NO: 6846 - DNA, 337 bp, Glycine max
tttgcaagttggaatcatttattctatctccggcagccaatgggtgagtcccgtctaggtagtcccgaagaagaccggcctcacaatgataaaaaatgagaaggaggaactgattcctactcgggtgcagaaccgttggagagtctgcattgactataggaggctgaaccaggttaccaaaaaggaccattttcccctgccattcattgatcagatgcttgaacgcctggcaggtaaatctcactactgtttccttgatggtttttctggttatatgcaaattactattgctcttgaggatcaggaaaagaccacattcacctgccccttcgacact

SEQ ID NO: 6847 - DNA, 239 bp, Glycine max
agcttgtgttacaattcactgtgacagtcaaagtgccattcacttagcaaatcaccaaatgtaccatgagaggacaaagcacatatatgtgaaactacacttcattagatatgtgattgaatctgagaaggtgaaggtggagaaggtttcaacagaagaaaactcagctgatatgttcacaaagtccctctctagtgtcaagttcaagcactgtctggacttgataaattttgaagatg

SEQ ID NO: 6848 - DNA, 339 bp, Glycine max
ttgaggattttcaaacgacattaactttgtactcggatgtctgattaagtcccgtaatatatcgagacgctctaaattgaatgttgaagctctgaccaaattcaaacgacgataaatttttactcggatgtctgattgagtcctgtaatatatcgagactctcgaaattaaatgttgaagatctaagcaaattcaaacgacaataactttttactcggatgtctgattgagtcccgtaatatatcgagacgctctaaattgaatgttgaagctctgaccaaattcaaacgacgataactttttactcggatgtctgattgagtcccgtaatacatcgag

SEQ ID NO: 6849 - DNA, 235 bp, Glycine max
  unsure (1)..(235): unsure at all n locations
atttttaacattcaattncgagggtctcgatatattacgggactcaatcggacatccgagaaaaaagttattgtcatttgtatttgctcagagcatcaacattcaatttcgagcgtgtcgatatattacgggactcaatcggacatccgagtaaaaagttattgtcgtttgaatttgctcagagcttccgtattcaatttcaagcgtctcgatatattacaggactcaatcagac

SEQ ID NO: 6850 - DNA, 338 bp, Glycine max
tttgaactagtctactacattttccctttttattcaaaatgctacaacacctaaagctttccttagcttctcaaatctttcaatctttgctgccttagtcatcacatctattactcgtgattcagtaggacaatagacaactttgatcacacttttgttcacttgttcctttagaaagtgaaattttgtctcaatatgcttgctcctttcatgggagactggattcttggccaagtcaattgcaaatttattatctacaaacaattttataggcttcttcaacttgatcctcaattctgttagtaatgaatcaagccaaatagcctgacaagcaacaa

SEQ ID NO: 6851 - DNA, 333 bp, Glycine max
tcaaccaaggggagatggaccatttttgtgcttgaaagaatcaatgacaatgcttacaaagttgagctgcccggtgagtataatgttagttccaccttcaatgtctctgatttatctcttttttgatgcagatggagaatccgatttgaggacaaatccttctcaagagggagagaatgatgaggacatgttcaagagcaagggcaaggatccacttgaaggacttggaggacctatgacaagggctagagcatggaaagccaaggaagctcttcaacaagtgctgtccatactatttgaatacaagcccaagtttcaaggagaaaagtccaa

SEQ ID NO: 6852 - DNA, 393 bp, Glycine max
agcttctatagaaggttcgttcctaatttctctacaattgcctcacctctcaatgagcgggtgaagaagaatgtggcattttcctgggttgaaaaactagagcaagcctttgctttactcaaagaaaaccttactatggcaactgttctagctcttcctgacttttctaaaacttttcagctaaaatgtgatgcctctggagtgcgagttggagctgtattgttacaaggtggacaccctattgcttattttagtgaaaaacttcatggtgtcaccctcaactaccccacctatgataaagagctttatgccttaataagagccctctaaacttgggagcattaccttatttccaaggaatttgtcattcatagtgatcatcaatcacttatg

SEQ ID NO: 6853 - DNA, 378 bp, Glycine max
  unsure (1)..(378): unsure at all n locations
tgtgcctcttcacgtctggaatatgaatgtagcatatagattcaaagacctttaggtgctttgctgatggcttcttgccgttccaagcttcaattggagtcttgtcttttatagacttagttggacatctgttgagtatgtaaacagcagtgtagactgcttcagcccagaatgtgttaggtagtcccttttccttgagcatcgatctagccatctccataattgtgcggatctttctctcggacactccattttgttgaggagaatatgcgactgtaagttgtctctcaatgccttcatcctcacaaaatctttcaaactcgcgagaggtgtactctntgtcgcgatcacttcttagtacttttatcccgtttccac

SEQ ID NO: 6854 - DNA, 392 bp, Glycine max
  unsure (1)..(392): unsure at all n locations
agctnttgaacaatctctggattgtttatccccctacttctgactctcacattgaaagccacagctgcacctctttcatatttgatttttggaccatagatttggacaagacttgctttttcacacccatcagaagcacgcaacttcagttgcagtaatgaggtaacaagccaatttatcaaaaaccgaagtctaagtgcagttttattgagaccaagcatattgacatgatcgatatgtcgacatattatctctggttccttcctgccccagtcctgtccatcaccatattctccatcacttgtcacctcttcatcatcaaagctagttgcagacatgtcccctggctctagggtctggcttaggtactctttatgattatcttccatgct

SEQ ID NO: 6855 - DNA, 387 bp, Glycine max
  unsure (1)..(387): unsure at all n locations
ntcaaacctactaattaatgattacctgccagccttgagctttaaattataattaaaggatttacaatatggtatgaggagaacaatgaagtcataaatcagtccaaaacgaataaaaaaacacaatatcattcaaacaaaatgtacaaagactcatataacattatataaataaaacattaaaaagaacaaatgagtataaatcttttctgcatagccaaagaaaatcttaaagtacatttggggatttaaccaaacacgtagctttcaacccacaaagtagtacaaaataaaatcaaataaatatttatctatttctccataacccatcaataaagccacaccaaaatcaatggaacancananactaataatatcatatgaatg

SEQ ID NO: 6856 - DNA, 394 bp, Glycine max
agcttcaacatcagaccacttcctctgtgctggatctacttcacatggacttgatggggcctatgcaagttgaaagccttggaggaaagaggtatgcctatgttgttgtggatgatttctccagatttacctgggtcaactttatcagagaaaaatcagacacctttgaagtattcaaggagctgagtctaagacttcaaagagaaaaagactgtgtcatcaagagaatcaggagtgaccatggcagagagtttgaaaacaacaagtttactgaattctgcacatctgaaggcatcactcatgagttctctgcagctattacaccacaacaaaatggcatagttgaaaggaaaaacaggactttgcaagaggctgctagggtcatgcttcatgc

SEQ ID NO: 6857 - DNA, 409 bp, Glycine max
  unsure (1)..(409): unsure at all n locations
tgccttgccccttgatatattagaaggactcattttcactatgaatgacaaattccttgggataaaggtagtgttgccatgttttcaaagcccgtactaaggcatacaactccttatcataagttgaatagttaagggtaggaccacttaacttttcactaaaataagcaattggatggccttcttgcatcaacacagccccaatcccaacatttgaagcatcacactcaatttcaaaagatttttgaaagtttggcaacgcaagtatgggtgcattagatagcttttccttaagaacattgaaagcttcttcttgtttctctccccatttgaaaccagcatttttcttgagcacttcattgagaggtgctgccaatgtgctaaaatccttcacanaaagtctataaaa

SEQ ID NO: 6858 - DNA, 336 bp, Glycine max
  unsure (1)..(336): unsure at all n locations
tgccttgccccttgatatatttgagggactcatgttcactattaatgacaaattccttgggataaaggtagtgttgccatgttttcaaagcccgtactaaggcatacaactccttatcataagttgaatagttaagggtaggaccacttaacttttcactaaaataagcaattggatggccttcttgcatcaacacagccccaatcccaacatttgaagcatcacactcaatttcaaaagatttttgaaagtttggcaacgcaagtatgggggcattagttagcttttgcttaagaacattganagcttcttcttgtttctctccccatttgaaac

SEQ ID NO: 6859 - DNA, 391 bp, Glycine max
agcttgccttgccccttgatatatttgatgtactcatggtcactatgaatgacaaattccttgggataaaggtagtgttgccatgttttcaaagcccgtactaaggcatacaactccttatcataagttgaatagttaagggtaggaccacttaacttttcactaaaataagcaattggatggccttcttgcatcaacacagccccaatcccaacatttgaagcatcacactcaatttcaaaagatttttgaaagtttggcaacgcaagtatggggacattaattagcttttgcttaagaacattgaaagcttcttcttgtttctctccccatttgaaaccaacatttttcttgagcacttcattgagaggtgctgccaatgtgctaaaat

SEQ ID NO: 6860 - DNA, 403 bp, Glycine max
  unsure (1)..(403): unsure at all n locations
tcatgagagagtcaaagatcaaattgttaggattattaaaagctatgctaaacaagccaacaaagggagaaagatagttgtcttcgaacccggagattgagtttgggtgcacatgagaaaagaaaggtttccggaacaaaggaaatcaaagcttcaaccaaggggagatggaccatttcaagtgcttgaaagaatcaatgacaatgcttacaaagttgagctgcccggtgagtataatgttagttccaccttcaatgtctctgatttatctctttttgatgcagatggagaatccgatttgaggacaaatccttctcaagagggagagaatgatgaggacatgaccaagagcaagggcaaggatccacttgaaggacttggaggacctatngatgangacatg

SEQ ID NO: 6861 - DNA, 387 bp, Glycine max
  unsure (1)..(387): unsure at all n locations
agcnttggagaaattctaatggctacattttttcactcgaatgtccaattcatgtgcatcatatattcagatccttgaaattgaccacggaagctctcggcaaattcaaacggccataacgtttgactcgaatgtatgatcgatgcccatgatatatcgagacgctcaaaattgaacaaaagaagctctcgagaaattcaaatggctataacttttctctcggatgtctgattcacgtgcatcatatatcgagacccttgaaattgaccattgaagctctcgacaaattcaaacggccataactttttactcgaatgtatgatcgacgcccatgatatatcgagaccctcaaaattgaacaacgaaagctctcaaaaaattctaatg

SEQ ID NO: 6862 - DNA, 397 bp, Glycine max
  unsure (1)..(397): unsure at all n locations
ttataaaatctaactaacaaaggatcttaatgtttcatagttaataggacaaggatggagtttgtgaatgtccacctcacctacgaagcagaaaatctttcacgaatgacaacacttgattgagttctccaataaaattcgaaaccaaattctcttgctgctactagaaaagccctttcgtcagttagctgattcaaccagttaccattcctaagggaaaaaccaaatccctttagagcaggctttcgaactaataaaagatatcaatataaggacagtacatgatataatccatctttnctttctattgtgcttctttttgaaggagatctggtagaaattctgcatgactttgctgtcatgtccagtgaaaatgaccactccatagacatgatca

SEQ ID NO: 6863 - DNA, 239 bp, Glycine max
tgccatttaaaaaggcattgttaatatcaatttgtttaagatcccaatgagaggaagtgactgaagtcagaatagttctgattcttataggtttcacaactagggaaaatgtttctttgatatcaaaaccaggttgttgatggaagccttctgctacaagacgtgccttgtacttactgacagacccatctgaattatgcttgactctaaaatcccgcttgcaaccaattggttgccta

SEQ ID NO: 6864 - DNA, 396 bp, Glycine max
  unsure (1)..(396): unsure at all n locations
atggacctgagtgttgcccagctacattatatcttctgtaatacttatcacctctatcatatctaataattttcacatttatgtctaattgccattttacttcattgtagtaaatctttaaggcatccattgcctaagaaatctcgggcagtaagtagacataaccataacgtgaataatcatcaataatggtgataaagtatctttccttttcgaagagctaacatcaaaaggtccacaaatatcagtatgcacaatttcaagaagcagagtgcttcttgtagctcctttctttgtatgntttgattattgtcccttaatacaacccacacaaatatttagatccgtaaagtctagataagagagactttcattctttattaatctttccatcct

SEQ ID NO: 6865 - DNA, 394 bp, Glycine max
  unsure (1)..(394): unsure at all n locations
agcttttaactgaatttgcaacattccaattgtttttcaaatggtgtaatcgattacaatatattggtaatcgattaccaatgtatctgaacattgaaattcaaattcaattgtgaagagtcacatcttttcataaaatgctttgtgtaatcgattacatggttttggtaatcgattatcagtgacaagttttgaataaaaatcaagagatgtaactcttccaatggttttctcaagattttctcaaggttataactcttccaatggttttcttgaccaaacatgaagagtctataaaagcaagaccttgacttgcatttcaacaattcttacaatctttntgaacatctttttgaacttcttcttcttcttcctttgccaaaagctttctaag

SEQ ID NO: 6866 - DNA, 429 bp, Glycine max
  unsure (1)..(429): unsure at all n locations
gacctataaaactcagctgngtacaattctctcatcctatcctccaactcttatgtagaatcaccctcatcggttccccactgcaccttcaccaacgcgatctcctttcctctcaacgacttcatccttcggtcagtgatcttctgaggttgtgctctataggtgaggttatccttcacctgtacctcgtccactgcaagtatatgtgatggatctgggttgtaccgtctcagttgagagacatgaaacacaggatgcaaattcgataaactcggaggtaaggcgatatgataagctacaggcccaatcttcttcanaatctgatatggacctagatactngggtgtcaacttcctagccttaagagctcttccgactccagttacgggagaaaccttcaaaaacacatgttctccttnctgaaaatct

SEQ ID NO: 6867 - DNA, 365 bp, Glycine max
agcttcagaattcaatttctatcgtctcgatatattacaggtctcaatcagacatctgaggaaaaaagttattgtcgtttgaatttgctgagagcttcaacattcaattttgagcgtctcgatgtattacaggacttaatcagacatccgagttaaaagttattggaggttgaatttgctgagagcttcaacattcaatttcgagcgtctcgatattttacgggactcaatcagacatccgagtaaaaagttattgttgtttgaatttgctgagagcttcaacattcaatttcgagcgtctcgatattttacgggactcaatcagacatccgagcaaaaagttatcgtcgtttgaattagctgag

SEQ ID NO: 6868 - DNA, 345 bp, Glycine max
aaagaaataaaattcgacaaaaatataagagttcgagataaaatttgtcaaataaataatattatgatcttattaaaatgtttaatggtgcttaattttaaaaattttctaaggtttctaccataagagctctttttttcaccccatccatgttgtcacatgtgggtgaaaagaggaaagagagggatgggatttctcttgctttaagcataacgggccaaagtgggaggcccacacgaagggttattagctcagtagtaaagtgtgtccttgataattgtgtcggcttggagtggagtgagacatgtcatcgaatatcaaagagatatccacttcgttatgaaa

SEQ ID NO: 6869 - DNA, 404 bp, Glycine max
tcgaatggtcatcgcttcattcttgtgtgcatatattacttcaccaaatgggtcgaagcgggttcttatgctaatgtcacgagatgcgtgagtcttagcactcatcaagacggagctgatttgtcgatacggactccctacgaagatcattattgacgatggcactaatctgaacaacaaaatgatgcaagaaatgtgcgaggatttcacgatctatcatcatagctccagcccttaccggccaaaaatgaatggggctgtagaggctgccaataaaaatattaagcaaattgttcagaagatgacagtgtcatacaaagattggcatgagatgctgcctttcgccctgcacagatatagaacctccgtacgaacttctactggggcaacgccgcattccttag

SEQ ID NO: 6870 - DNA, 381 bp, Glycine max
agcttgaatcggacatctgtgtgtttagttatgaccatttgaatttcacaagagcttccgttgttcaatttctagcctctcgacatattatgcgcacgaatcggacatccgtgtgaaaagttatgaccatttgaatttctcgagagtttccgttgcttaatatcgtgcgtatcgatatattataagcccggatcggaactcactgtgaacagctatgaccatttgaatttcacgagagcttccgttgtctatttacgagcgtctctatatgtgatacgccagaatcggacctctgggtgaaaggttatgaccattcgaatttctcgagagcttccgaagttcattttccagcgtttcgacatgtgattctcctgaatcgga

SEQ ID NO: 6871 - DNA, 429 bp, Glycine max
  unsure (1)..(429): unsure at all n locations
ntattgagataactgcctcgagaatcttctttgtaaaaacttccttgggaagctagagcttagctacacacacccctttcataactaagctcacatccttgagaagattactaaagaagctagagcttagctacacacacctttctaatagctaagctcacctccttgagatgagaagctagagcttagctacacaccccctataatagctaagctcacccccatgacaaaatacatgaaactacaaaaaaaatccctactacaaagactactcaaaatgcctcgaaatacaaggctaaatccctatactactagaatggccaaaatacaaggcccaaacgaagganaaacctattctaatatttacaaagataagcgggctcatacttagcccatgggctcaaaatctactctaaggctcatgagaat

SEQ ID NO: 6872 - DNA, 388 bp, Glycine max
agcttaagcatttcttttgatctatcaatagacctaatcttgtcaggaatcctcgccataaaattacatagacttgccaattctaaaagaaaaatgtaataaatccaaaaccatgcaaatgctatttaaagaatgattgtcaatttagaatagaaaataatgctaacaaaaaatagaatagcaacacagactcaaatgagacatgcaataacatttcaatgaatgacaaaataccataaaaactatgatactattcattgaactactaagtcaatacatgcaacaacctgaaccaaaaaagaaaagccaaatcagcaaatagaagataagcagaaacaaaaattatatctctgaacaaataatattgcaaccatcaacaaacaaatag

SEQ ID NO: 6873 - DNA, 212 bp, Glycine max
gcgcctgaatctgatcgtcttgtgattttttgtgaccattcgaatccctagagagctaccgttgttcaatttagagcgtctacatatatcatgcgcctgacttgggcgtacgagcgaaaagtcatgaccaactcaatttctcgagagctaccgttgttctatttctaaggactagatatgttatgcgccgaagtcggacatgcgtactaaaa

SEQ ID NO: 6874 - DNA, 418 bp, Glycine max
agaccttagaaactcagcttcttcacatagtctgcctttgcttgaccttctttatgcttttttacagaaacattaagcataggcaaaagatcaagaggagttagtgggttaaaaccatataccacttgacaaggagaacaattactggtgctatgaacagctctattgtaagcaaattcaacatggggttaacaagctcccccagtttttaagttcttcctcaaaactgtcctaagcaaagctcccaaagtcctattaacaacttacgattgcccatcggcttgtgggcgacaagtggttgaaaataacaatttattgcccaacttgctccacaaagtcctccataaatggcttacgaacttagagtccctatcactaagaatgctgcttggccaccatggagtctcacaatctcctt

SEQ ID NO: 6875 - DNA, 396 bp, Glycine max
  unsure (1)..(396): unsure at all n locations
agctttgtgcaaggaattttctagttctatttaggaagaattngagatgtctataatgggagaactaactttctttcttgaacttcaagttaaggaaatgaagcatggaacatttcttttccaaacaaagtactgtgcggaattgattaagaaattcaatatgaaaaagtgcaaagaagcattgacacctatgacaacatccacttattttgacttggatgaaaaaggtaaattagtagatgagtcaaagtacaaaggtatgattggttctgtcctttattagactacaagccgacgacccactattatgcttagtgtttggttatgtgcaatatatcatgcaaatcccaaggaatcccatttaactactgtaaaaaggattatcaagtatcttag

SEQ ID NO: 6876 - DNA, 397 bp, Glycine max
actcagcttaacattcaatttcgagcgtctcgatatattactagactctatcagacatcagagaaaaacgttattgtcgtttgaatttgctcagagcttcaacattcaatttcgagcatctcgatatgttacgggactcaatccgacatccgagaaaaaagttattgtcgtttgaattagctcagaagttcaacattcaatttcgagcgtctcgatatgttacgggactcaatcatacattcgagaaaaaagttattgtcgtttgaatttgctcagaggttcaacattcaatttcgagcgtctcgatatgttacggtactcaatcagacatgcgagtaaacaatgatcgtccgatgaattagctcaaagattcaacattcaatttcgagcgtctcga

SEQ ID NO: 6877 - DNA, 392 bp, Glycine max
agcttggagccaatacaaacgactttttactttttactcggatgtttgattgaggctcgtaatatatcgagacgctcgaaattgaatgttgaagctctgagccaatataaacgacaatgaccttttactcggatgtttgattgagtcccgtaacatatcgagacactcgaaattgaatgttgaacctctgtgcatattcaaacgacaataaatttttactcagatgtctgattgagtcccgtaacttatcgagacgctcgaaattgaacgttgaagctctgagccaatacaaacgaccataactttttactcggatgtctgattgaggctcgtaatatatcgagacgctcgaaattgaatgttgaacctctgagccaattcaaacgacaata

SEQ ID NO: 6878 - DNA, 390 bp, Glycine max
agcttctcgatatattatgcactttatatcggacttccgtttgaaaagttatgaccatttgaaattctcgagagcgtccgttgttcaatttcgatcgtctccatatattatgcgcctgaatcggacttccgtgtgaatagttatgaccatttgaatttctcggtagctttcgttgttcaacttcgaccgtctccatatattatgcgcctggatcggacttccgtgtgacaagtgatgaccatttgaatttctcgagagcttccgttgttcaatttcaagcttctcgatatattatgcccctgaatcggacttccatgtgaaaagttatgaccatttgaatttctcaagaccattcgttggtcaatttccagcgtgtcggtatattatgcg

SEQ ID NO: 6879 - DNA, 422 bp, Glycine max
  unsure (1)..(422): unsure at all n locations
gcttatagaatatataatagaagaacaatgtcaattgtttgattctatacatgtttcctttgatgagtctaatgccattcttccaagagactatgaagaaacatatgctccagttgcaagattagaagccattagaatgctcttagcatatgcatccataatgaattttaagctctatcaaatgaatgttaaaagtgcttttctaaatggtttaattcaagaagaactatatgttgaacaacccccaggttttgaaatcccggataaatcaaatgatgtttataaattgcaaaaggctctntatgggttgaaacaagcccctagggcgtggtatgaacgtttaagtaattttctcctacaaaaagaatgtctagaggaaagtggatccacattgtcatacagagaagctaatgatattttgt

SEQ ID NO: 6880 - DNA, 386 bp, Glycine max
agcttaataaatcaatctatggcttgaagcaagcctcctgccaatggtatttgaagtttcatgatgtcgtcacttcatttggctttgaaaagaacatcatggatcaatgtatataccaaaaggtcagtgggagtaagatttttttcttgtgttatacgtggatgacattttgcttgcaactaatgataagggtttgctatatgaggtgaaataatttctctcaaagaactttgatatgaaggatatgggaaatgcattttatgtcattggcattaagatccatagggaaagatctcgaggaattttgggtttgtctcaagagacttatattaacaaatttttagagagatttaacatgaaagattgttcaccaagtgtagctccca

SEQ ID NO: 6881 - DNA, 404 bp, Glycine max
  unsure (1)..(404): unsure at all n locations
tctccaagtgttgaattccagagggttctgcttttagttgggagaggttttctaaaagaatttcttccacagaacacagtgctcctctgtcgataaagatgcacttcaattgatgaaaatatccgaggtgcagtcgctttagtttctgaaaccctccacattgaaaatgcaaagtttcaccttcataagcattgccacttaaattgaggaacaacaaccttgacatattttttagtgatttcaatgcatcattagtcaaactggagccgtccaaacgcagttgcacaagatttgggaactgtgaaatccaatttggcaaccttgtaaacgtcccacatatgacaagcttcctaagtgtagacatangtgacgtaatgtacaagtcaattacttcactcctatca

SEQ ID NO: 6882 - DNA, 390 bp, Glycine max
  unsure (1)..(390): unsure at all n locations
agcttgaccaggaattatttgtatgggttggatgttgaattctggttgttcctggtgcggagatgatggtacagagggtgaaccaggagctgaagtttcttttggtgcggtagccatggaaaagcagagcgtttggaatgatttcgtaaatttctgagagctgttagggaatgcagaaaacgagattaacacgaaaatataagtttgaatgaggaatgtagagggacgtgtgaagcaacggtcgaatttgctttggttcagtagtgaacgtgctattaatgttaagtgattcgtttgggcacgttcagatatcagtagttgctacaattcctctagcagacaaatgcccagcttgcccctcagttnttcaaactgttttgcatccaatgc

SEQ ID NO: 6883 - DNA, 334 bp, Glycine max
  unsure (1)..(334): unsure at all n locations
tgtaaaagagggaagcatatatgatctttnatctaagacaaaacgcgatttctacttcaaaagaccttgaactacttcacattgattaatatggtacctctatatctatgagtttcggaggtaattactatggctgagttatagtggatgattacttaatgttcacatggactttgcttttgaataccaaaaatgatgaaggtcttatcattgtttctcttagaattgatcatggaggtgaatttcaaaatgagtcttttgaaatcttttgtgaagaacatggaatacaccacaatgtttgtcgctcaagaacacctcaacgtaatggtgttat

SEQ ID NO: 6884 - DNA, 391 bp, Glycine max
agcttatacaacataggtgcttattagttttatatggaaaatcacattcgttgtacattccaatgatcgaaagtctctatatgttaaataagatccttctagatcttaagaaaaggattaagaagtacttggtccttaagtaccatgccttagtgttattgaaacactaatgtatcttactatgcgtaaacgatttgatatatcatttcccgctaattcattagcaaaatctaattcttcaccaatatgaagaaatttaaatatttacttcattattttagaggttatatattagatcctcataaaatgatattacatgaggtgatacaacaatttcatgacaatatgtgaaataagccaaaataggcacatcagctaatcatgtagaaat

SEQ ID NO: 6885 - DNA, 383 bp, Glycine max
  unsure (1)..(383): unsure at all n locations
agcttgtgcattcaatatcctgatgagggtgttccatatgttctcaagactggactaatacatttgctgcccaagtttcatggtcttgcaagtgaagatcctcttaagcatcttaaggagttccatattgtttgttccaccatgaagccccctgatgtccaggaagatcatatctttctaaaggcttttcctcattctctggagggagtggcaaaagattggctatactactttactcccaagtccatttttagctgggatgaccttaagagggtgttcttggagaaattcttccctgcatctaggaccactgccatcagaaaagacatttcaggcatcatgcaacttagtggagaaagctcgtataagtactgngaaagatt

SEQ ID NO: 6886 - DNA, 410 bp, Glycine max
  unsure (1)..(410): unsure at all n locations
tgaagganaactggatgcattggttaacttggtttcccagctggccttgaatcagaaatctgtacctatcgcaagggtttgtggtttgtcctcctctgctgaccaccatacagacctttgcccttccatgcagcaacctggagcaattgagcagcctgaagcttatgctgcaaatatttacaatagacctcctcaacctcagcagcaaaatcaaccacaacagaacaattatgacctctccagcaacagatacaaccctggatggaggaatcaccctaatcttagatggtccagccctcagcaacaacaacaacagtctgctccttccttccaaaatgttgctagcccaagcagaccatacattcctccaccaatccaacaacagcaacaaccccagaaacagccaacag

SEQ ID NO: 6887 - DNA, 391 bp, Glycine max
agctttattacaagtcatagagtttgtagataaatctatattctattctataactttttttacttgcagttcaggagttagtccttgccttgtttagtttagaaaaaagaatacataaatcgaataagaaattgaaagaattcactatcaattcaaatgaagaaaaaaaaattgtttcaaaaggatatcaattgttaagattcaaagaaaaattattactttttatcaatacaccaaggaacacttcaggttaggaatataataatcggattttgaaatcaaataacgcctcaactataaaaaattgaaatattttgaaaaaaaaattattttttttttcaaaatatttcaaaaggtacacaaaacaaataggacaattctaaagcttttt

SEQ ID NO: 6888 - DNA, 405 bp, Glycine max
  unsure (1)..(405): unsure at all n locations
ngatagacgactccaaagagcctccatcgttgtcacacgcaaagtattgaccaattgttgagagagcatagagtttctctctcacaccatcttcattggtgcgaatggagcaattgagaagaaagtaacttgccaacacaggcaatatgcgttcaagcctattagccaattgacggtgtggatttggaagcagcaaagaagcaatttccgaggctgacaaagatgaactctctgccttggctatgatatcaaacaaattcatatcaacagcagcgttcaagattgcacggaaaattcagctgaagcatagtgtcaaagctgagagagaagtgtcatccccctttgcttcctctgtgggaagaacctgattttgtttccaattgcaaatataggaattcatgattc

SEQ ID NO: 6889 - DNA, 380 bp, Glycine max
  unsure (1)..(380): unsure at all n locations
agcttgtgcatccaataccctgatgaggatgtcccatatgttcttaaaactggactgattcatttgcttccaaagtttcatggccttgcaggtgaagacccgcacaaacatttgaaagaatttcacattgtctgctccaccatgaaacccccagatgtccaagagaatcacatatttctgaaggcttttcctcattcattagagggagtggcaaaggactggctgtattaccttgctccaaggtccatcacgagctgggatgaccttaagagagtattcttagaaacatttttccctgcttccaggaccacagtcatcaggaaggatatctcangtattagacaactcagtggagagagcctgtatgagtactgggagag

SEQ ID NO: 6890 - DNA, 378 bp, Glycine max
agcttccttgagaagctagagcttatctacacacacccctctaatagctacgctcacccccatgccaaaatacattaaaatacaaaaaagtctctactacaaagattacacaaaatgctataaaatacaaggctaaaaccctatactactagaatggccaaaatacaaggcccaaaagaaggaaaacctattctaatatttacaaagaaaaatgggttcatacttaacccatgagaccaaaatctaccctaaggctcatgagaaccctagggccttctcttgcatctctgacccaatcttcttggagttttctatccaatgcccttggagggtagtattgcatcaatatatagaaaaagaccatggtcttcttagctg

SEQ ID NO: 6891 - DNA, 369 bp, Glycine max
  unsure (1)..(369): unsure at all n locations
agctttagatgcctttaaagtttttaaggctgaagttgataaacaatgtggaaaacaaattaagatcgtgagatcagatagaggtggggagtactatggtagatacatagaggatggacaagcaccaggttcatttgcgaaatttcttcaagaacttgggattgttgcccaatacactatgcctagttctccggatcagaatggtgtggcagaacgaagaaatcgaaccttattcgacatggtgagaagcatgaggagtaatgtaaaacttcctcaatttttgtagattgatgctcttaagacggctgcgtatatattaaaccgagttccaaccaaggctgtctcaaagacancctttgagttattcaa

SEQ ID NO: 6892 - DNA, 418 bp, Glycine max
tcaagcttgtcatttcatccacctcaaactccttgtttaatttctcatcagcagcgtccagtacttttccttcgacgtacaattgccacatccaattcacaagaggcacaagaaattccccatctttgtaagtcctccttccgcatgcaatttcaggagccaaaaccccgaaactataaatgtatgattcttgctagccctacctctatggatatattctggggaaagataccgataaatccccactactcctgtcctttgagtccttaaccttggatccaccaactttgccatctcaaaatcaccaagcttagtgctaaaatctgtgtccaacaacacattagccaacttaatatccctatgaagaacactttgctctgcatcctcatgaagataacgaagtgccaaagccacgctt

SEQ ID NO: 6893 - DNA, 374 bp, Glycine max
agctttaacttaatcaattcaaaagccttttgtgcttgttcattccacccaaacgcacccttcttcaaacattcggtcataggacttgctatagtgctaaaattctggataaagcgtcgataaaatgatgcaagaccaaggaaagatctcacctccgaaactgttgtagggctcggccaagtcttgatagcatccacttttgtttgatcaacggatactccatctttagacaccacatatccaagaaacaccaccctttcaaccaagaaatcacacttttccctcttcccatagagtttttgtgctcttagggtctcaaatatttgtttcaaatgagtgaaatgctcctctatagatttgctatacaccaatat

SEQ ID NO: 6894 - DNA, 402 bp, Glycine max
tccactggtaggtagcatgcttttatgtacaccatttgaaacagggagaggacaatggatgttttgaaggctgttgtatatgctcataaacaattatcaagctttgtagcccaatctttccttgaagtagctacggtcttttctagtatccttttgatctccctatttgaaactttaactcatccatttgtttgtggatgatagggtggtgctactttgtgtcgaatatcgtagtgttggaggacctttgaaagtcttggcactctaaacctagcaaagatgtttctctttaaggacttaatcattatttttgcatcattagttgcactagcaattgcttccagccacttgttcgcttccggcaagtgcaccagatcgcacaagtagtataaaacggtaaga

SEQ ID NO: 6895 - DNA, 364 bp, Glycine max
agcttaagctccttcaactgcacatggctcttaatgtttgaagagtatccttgtggaaccttcacccgacgaagacactgacaaaaacttatcttctcctttttggacaaggtatggcaagctaggggcaagtaaattttcttcccattagaccttggatgcaactgtgatcgtatgcccatatcagctagatcttgacaggtattgaagccatccttcatcttgccttgaatgttaaggagagtcccaatcacactatcacaaacatttttctccacatgcataacatcaatacaatgtctaacatcaagatcagatcagtacgaaagatcaaagaaaatggacctcttcttccatatgcaac

SEQ ID NO: 6896 - DNA, 366 bp, Glycine max
agcttctcaagggggtgagcttagttattagagggtgtatgtagctaagctctagcttctcaaggaagttttctcaaagaagcttctcaaggaagttttctcaagaaagcttctcaaggaagctacctagtccataaatagaaccatgagcaagaggctccaagaagattgggctagagctgctgaagaaggccctaaggttctcatgcaccttagggtagatttctgagcccatgggccaaggttgggtccaattatctttgtacgtattagactaggatgtcattatatttggtccttgtatttagggctccatattgtaggtagggtaccctagaaatataggatttttcagcccttgtattt

SEQ ID NO: 6897 - DNA, 255 bp, Glycine max
aaaccgagcagttctaataagatttgttatatgaatacccttacgctttgcagatatataaggtgacattttaggattccattttctagtaccgtggccaaaatgaactcctgcttccatcatctcttccaagattatgttccaatatctttttgtcatttatatttatccccacacttttctttcatttcaaaatcgaaattctataaattttttgaaatgaaagaaagagacccggtatactgaaatagaaat

SEQ ID NO: 6898 - DNA, 372 bp, Glycine max
agcttcttacaaagcatacggctttctggatgtagatgatgatatctatacagatggatcttatatatctatatatctatagatagatatatagatatagatatatagatatagatcatacaatgaagtaccgcacgagtgggtatataggaatccaaatctgccgaatcactcatgttatgatcttctacatcctaggtcttcccgttccttcatctggcttatgttcttcatgtagcattcagactgaatgactctatgaaattacgtcgctacttccacatggtacgggtaacgtaggagacatctctatttttcccggggggaatccttagaattaccacagcttagctttcaattcgcctctgacca

SEQ ID NO: 6899 - DNA, 417 bp, Glycine max
ctcaagcttatttagaataagagttgcaagtgcatcactttccacatcctcggcaataatcaataaaggtctttgtctctggagatatgtaggtgtcagcaaatatcaattattttaaaagtcaaatgcaaaagtgaatggcactgctcaccttcaaagccaactctaagactttaactatagcatttatactagagattttcttctcatgaattagaataaggggatcttcaagttcctatagacaacaagacatggcaagtgtaagtacgtacgaaacaaaagaagggtttgtgaacaagtgacttcatacaatccttctacatatattttaatgttgtgaagtagagagaagagataagtagataacatacacatttctggttcttatcgtttgtaatgaaataaggagatatg

SEQ ID NO: 6900 - DNA, 354 bp, Glycine max
  unsure (1)..(354): unsure at all n locations
agctntggcaactccttgacaacatagtcatacatgcgccaattcttccatttctcttgtgtagcattgagataaaatcctgcacctgttccagaatgtatatgaaaatcagatatgctaaattgccaatatttaccaattatggagaaatattcagaaaagtaaaatatgccaatatccactaacccagcaataatgttcaagacagtccacatctgatttaggtgggaaagagaaacagaaagaaagagaaagagaggcgaaaggggaagaacagaatagcgaggatagagagaaagaggagagaaacagagggatcaaagaaactgtgaactgcacatcagtcataatata

SEQ ID NO: 6901 - DNA, 366 bp, Glycine max
attccttattttcagaacggaattctatctatagacctcccatctttaatggagagggttaccactactggaaaacccgaatgcacatttttatcgaggcaataaatctaaatatctgtgaagccatagaaatagggccttatatacccaccacagtcaatagagtttcaatagatggtagttcgtcaagtgaaagcataaccatagaaaaacctagagatagatggtctgaaaatgatagaaaacgagtacaatacatcctataagccaaaaacataataacatctgccctatgaatggatgaatatttcagagtttcaaattgtaagagtgctaaggaaatgtgggacactcttcgattaacac

SEQ ID NO: 6902 - DNA, 353 bp, Glycine max
agcttatagtatatcgagatgctcgaaattaaacatcggaagcgctcgagaaattcaatgggtcataatttttcacacggatgtccgattcgggcgcataacatatagaggcgctcaaaattgaacaacagaagctctcgtgaaattcaaatggtcataacttgtgactcggatgtccgattcaggcgcatcacatatagagacgtatgaaattgaataacggaagctctcgagaaattcaaatggtcatagcttttcacaccgaggtccgattcaggcttataacatattgatatgttcgaaattgaacataggaagctctcgtgaaattcagatgggcataacttttcaca

SEQ ID NO: 6903 - DNA, 373 bp, Glycine max
agcttgcctgcattgtgttgttatcaaggtccagcatccagaacccaatagtaaatacaagaacaacccttgttcatgtccctttaaatgctctacaattttagacatatgaatttcattaatgtatgactaaggtcatcatatctgtgaaatttaaaagtcaaagaaataaaatgagtaagaaaagaactagaggatgagaacagaaacctgcaatgctcatgtgtatcacctaatacatatccagtgtctgtagaaaatccaattaatatcacctaaattataagacttgacatagcacatatgtaatgtagtataaaaaaacaaaatcaaagtaagcaattaatgtcacaaatgcttacagctagacata

SEQ ID NO: 6904 - DNA, 404 bp, Glycine max
  unsure (1)..(404): unsure at all n locations
ntaagccaattcatacgacaataactttttactcggatgtctgattgagtcccgtaatatatcgagacgcacaaagttgaatgtttaagctttaagccaattcatacgacaataactttttactcggatgtctgattgagtcccgtaatataacgaaacgctcgaaattgaatgttgaagctttgagccaattctaacgataataactttttactcggatgtccgattgagtctcgtaatatatcgacacgctcgaaattgaatgttgaagctctaagcctattcaaacaacaataacgttttactcggatgtccgattgagtgacgtaatatatcgggacgctcgaaattgaatgttgaacctctgagccaactcaaacgacaataactttntactcggatgt

SEQ ID NO: 6905 - DNA, 362 bp, Glycine max
agcttaaacattcaatttcgagcgtctcgttatattacgggactcaatcagacatccgagtaaaaagttattgtcgtttgaattggctcacagctttaacattcaatttcgagcgtctcgatatatttcgggactcaatcagacatccgagtaaaaagttattgtcgtttgaattggctcagaggttcaacattcaatttcgagcgtcccgatatattacgtcactgaatcggacatccgagtaaaaagttattgtcgtttgaattggctcatagcttcaacattcaatttcgagcgtgtcgatatattacgggactcaatcggacatcccagtaaaaagttattgtcgttagaattggctc

SEQ ID NO: 6906 - DNA, 361 bp, Glycine max
agcttagaattatacaataacactttttgcccgaccatgaagttctttttaattatcatgctatcatggaacttcttggtcttttttttgtataactcggcattctcataggcttctaagcggatctcatctaactcactcagttgcaactttctttcctcaccaacttgatccatacagaagttgtaggtcttcactgcctagtatgctttgcgctcaatctccactggaagatgacatgcctttccatagacaacccgataaggagacattcctatgggtgctttgtaggcagtcctatgtgcccaaagagcatcatcaagcctggtactccaatctttcttgcttggctgcacagtct

SEQ ID NO: 6907 - DNA, 383 bp, Glycine max
  unsure (1)..(383): unsure at all n locations
ntcctgctcggngatcttttttggcttcacctctgactcgccatacaaggtcaccaggttgaaagactcatggttaaaccttcgtattgcatcttcttgatgctcgaagcatggtagcatcttctttgattatggccatctcttggacttcatccgttgtctcgagttctacccttatgttttcttcattttgttgtttctggaacaatattctccttgtcgacggttccccaactttgatgaggatcatggcgtctgtgccatatgtaagttggaaaggagtttcattggtggttgtctagggtgaacaatgataggcccagagtatactgtggagtttctccttccatagacccttagacatatcgagtctagtgtgcatg

SEQ ID NO: 6908 - DNA, 355 bp, Glycine max
tcatggcatacctacctctatagtgttagatagggatcctaaattgacctctagattttggagggcattccaacaagcttttggggtccaagctaagttttaacactacttatcatcctcaaatggatggttagtcagagaggaccatatagacccttgaaaacatacttaaagcatgtgttcttgatgaaggtggaacttgggataagtttttaccctttataaagtttgtgtataacaatagttatcacactagcataggaatgacaccttacgaagccctttatgggaggaagtgtagatcccctttatgttggtgtgaggtgggtgagaagaccttgatagggccaaacat

SEQ ID NO: 6909 - DNA, 365 bp, Glycine max
  unsure (1)..(365): unsure at all n locations
ttgagccaattcaaacgacaataagcttttactctgatgtctgattgagtcccgccatatatcgagacgctcgaaattgaatgttgaagctctgagccaattcaagcgacaatatctttttactcggatgtctgattgagtcctgtaatataacgagacgctcgaaattgaatgttgaacctctgagcaaattcaaacgacaataactttntactcggatgtctgattgagtcctgtcatatatcgagacgctcgaaattgaatgttgaagctctgagccaattcaaacgacaataactttttactcggatgtctgattgagtcctgtcatatatcgagacgctcgaaatagaatgttgaagctc

SEQ ID NO: 6910 - DNA, 395 bp, Glycine max
cggacttcctgtgttttgggaacctctccttcctcatgtgtacccaaaccctatcacttggttcaagcacgactttctttctgcttttgttggcttgccttgcatagctcgcatttttcttttcaatttgaaccttcacttgctcatgcaacttcttcatatactcagctttagcctgtgcatccttatgcttaaacatagcaatgttaggcataggcaacaaatcaagaggagtcaaaggattaaatccatacactatctcaaatggtgaacaattagttgtgctatggacagcccgattataagcaaactcaacatgaggcaaacaggcttcccaagatttaagatttttctttaaaacagtcctaagcagtgtgcctaaagtcctattgact

SEQ ID NO: 6911 - DNA, 374 bp, Glycine max
agcttctatattgcatgtcctagttggccctgacttctccgttttttttttaattgtggattacagaatttggatagggcaattgaccacaaggcattgcatgataccttttctacatttggaaatatcctttcgtgcaaggtagctacggattcatctgggcaatcaaaaggctatggctttgttcaatttgataatgaggaatctgcccaaaaagctatagagaagctgaatggtatgctgttgaatgataaacaagtgtacgtgggacccttccttcgcaagcaagagagagaaagtgctgctgacaaggcaaaattcaacaatgtttttgtgaagaatctatcagaatcaaccaccgatgatgagttgaa

SEQ ID NO: 6912 - DNA, 429 bp, Glycine max
gtgactgtatacatactcaagcttatatatcaaagatctgataatttagaagttgtctgctactcaaactcggattttgctggttgcgttgactctcgcatgtcaacatctggatacatcttcatgatggctatcaaagcaatatcttggagaagtgcaaaacaatcattagttgctacttaccatggaggctgagtttatttcattatttgaagcgacatcacaaggtatttggttaaaaagtttcatggtcgatctacaagtgattgattatgttcctagaccattaaagatatattgtgataattcagctgctgtttttttgactaaaaaaaataaaagtggaagttgaagcaaacacgtcgacattaagtatttagtcttgaaggaacatgtcaaagcaaattaaatcatcattgaaaacatcag

SEQ ID NO: 6913 - DNA, 376 bp, Glycine max
agcttgtaatgtctcttggtgatggtattgagatgcccgatctttttagtgttggccagtttggagagcaagtctactctagtgttgttctcccttggtatgtggaacaactcaaagcaatcaaagtcatcaatgagggtttttgcaacatgatagtacttgaaccttggcttgatatttgtttgcaacttgcccttaaacaaggtatgagtcagtgtaacaccttatctttttggctttaacttcttttgctagctttaggcatgttataagtgcctcatatttagcttgattgtttgatgctttgaaattgagcttgagagcttgctctaaagtaacattgtcgagcccttcaaggatgatgcttgtccctact

SEQ ID NO: 6914 - DNA, 374 bp, Glycine max
tctccatgcaaacttcattagagaggtcaggttttgtacttggcttgccaatgccgtcatggtcaaaaaggccaacggcaaatggcgaatgtgcaccgactacactaatctgaacagggcataccccaaagacgtgtaccctctccccagcatcaataggttggtcgatgaagcgtccgaattccaggtgctaaccttcttggatgcctacttcggatacaactagattagaatgcatcctctagatgaggagaaaatgaaattcataactaaaaatgtcaacttttgttacaaggtcataccattcggcctaaaaaatgcaagcgcgacattccaatgaccaatggaccgagtcttcaaacaacagatcggac

SEQ ID NO: 6915 - DNA, 378 bp, Glycine max
agcttcaaccaagaggggatggtccatttcaagtacttgaaaagataaatgacaatgcgaacaagattggattgcctagtgagtataatgtgagtactacatctaatgtgtttgacttaactctttttgatgtagatggagaagccgatttgagaacaaatccttttgaagagggagagagtgataaggacaaggcaaggaataagggcaaggaacctttagaaggacttggaggacctatggcaagggctagaacaaagaaggccaaggaagctcttcaacaagtgttaaccatgctatttgaatttaggcccaagttacaagtggagaaacttcggattgttaattgcaccatgttccaagaagaatagaggatgc

SEQ ID NO: 6916 - DNA, 410 bp, Glycine max
tgtgcctcttcacgtctggaatatgaatgtagcatatagatccaaagacccttaggtgctttactgatggctttttcccgttccaagcttcaattggagtcttgtcttttatagacttagttggacatctgttgagtatgtaaatagcagtgtagactgcttcagcccagaatgtgttaggtagtcccttctccttgagcatcgatctagccatttccataattgtgcgattctttctctcagacactccattttgttgaggagaatatgcgactgtaagtttacgctcaatgccttcatcctcacaaaatctttcaaactcgcgagaggtgtactctttgccgcgatcacttcttagtacttttatccattttccactttgattttcaacaagggccttgaactttttg

SEQ ID NO: 6917 - DNA, 246 bp, Glycine max
agcttgccgccacggagttttcctactatgctcttgtgtggtggaacaagctacaaaaggagagagcaagaaatgaagagccaatggttgatacatggacggagatgaaaaagatcatgaggaagcggtatgttccggctagttactcaagggacttgaaattcaagctccaaaaactaacccaaggcaacaagggggttgaggagtatttcaaggaaatggatgtgctcatgattcaagcaaata

SEQ ID NO: 6918 - DNA, 391 bp, Glycine max
ttgcagcagatgtcactctactataaacccttgttagatatgtatgcaaggaagcataaatatattcgccaagatagcatcatagtggatggaaaatgctgtgttgtgatccagaatatccttccacccaagcataaagatattgggagtgtaactattccttgttcaattggacaagtcaatgtgggaaatgctcttattgacctgtgagccagtatcaatttgatgccactcttcatgtacagaagattgagagagttggaaataatgctcactcgaatgactttacaattagttgatcgcaccattaccaggccatatggagtaattgaggatgtgttggtcatagtaaaacattttatcttcctggaagactgtgtggtaatggata

SEQ ID NO: 6919 - DNA, 366 bp, Glycine max
agcttctgttgttcaatttccatcgtctcgatatattatgcgcctgaatcgaacatccgagtgaaaagttatgaccatttgaatttctcaagagcttccgttgttcaatttcaagcgtctcgatatattgtgtgcctgaaatggacatccgagtcataagttatgaccatttgaattgctcaagagcttccattgttaaattttgggcgtctcgatagattatgcgcctgaatcagacctccgagttaaaagttatgaccatttgaatttctcgagagcttccgttgttcaatttcgagcgtctcgatatattatgcgcctgaatctgacatccgagtgaaaagttatgaccatttgaatttcacg

SEQ ID NO: 6920 - DNA, 360 bp, Glycine max
tcggcttattagtgcacagctccttcaagaatttatcatatcttgggatttgctatattgcatccactagaggtatgtttacctctacttttctaaatgtttccaagatctccttctttggctcttccatttttttgttggaaattgctctcggagggaatggaagaaggatatgttgcttctctttagattcacctgcatacaaattggtaggtatcttactctctaaatttttgtcatcatctttttctggagtagagtgaagctgggcaggttcatttgcagatgacgaagatgttgcttgttgaggttcttgacactgctttctccacctcaatgcaatggcactcacatattttg

SEQ ID NO: 6921 - DNA, 375 bp, Glycine max
ttagacatgcacattttaagaggaagcttgtgttgtgaataattacgagccaacaagaataaggtgaagatgatgcttagatatacagattaaattcattagagcataaaccaagtcatacggtttgtggatcaacaacaaaaacaagatgtacttgatcaaagtgcttccaagctttgccattagatggatgacataacatttaaaaacttcttctgttttggtggttccatgtcatttgtcctgcagtttgcattgatgcaaacattctgtgtagctaaggaattataggcaaatagaacattgccttaactagaacttgttttttgttacttgatccagtgttgcagtcatgatacattgacttttaacaaa

SEQ ID NO: 6922 - DNA, 374 bp, Glycine max
tgaatcggacctgagtgtgaaaaggtatgaccatttgaatttctccaaagcgttcgttgttcaatgtcgagcatctcgacatattatgcgctcgaatcgaacatccgagtgaaaagatatgaccatttgagtttctcgagagcttccgtggttcaattccgagcatcgcgacatattatgtgcccgaatctgaccttcgtgtgaaaagttatgaccatttgaatttctcgagagcttccgatgtttaatttcgagcgtctcaatatattgtaagcctgaatcggagctccgtgtgaaaagttatgaccatttgtatttctcgaaagctttcttggttcaatttcgagcatctcgacatattatgcgcccgaatc

SEQ ID NO: 6923 - DNA, 366 bp, Glycine max
  unsure (1)..(366): unsure at all n locations
gtcccatatgttcttaanactggatctaattcattgcttccaaagtttcatggccttgcaggtgaagacccgcacaaacatntgaaggaatntcatattgtctgctccaccatgaaacccccagatgtccaagaggatcacatatttctgaaggctnttcctcattcattagagggagtggcaaaggactggctgtattaccttgctccaaggtccatcacgagctgggatgaccttaagagagtattcttagagaaaattttccctgcttccaggaccacagccatcaggaaggatatctcangtattagacaactcagtggagagagcctgtatgagtactgtgagagatntaagaaactatgt

SEQ ID NO: 6924 - DNA, 354 bp, Glycine max
  unsure (1)..(354): unsure at all n locations
tgtgagaggtgctaataccttccttaacgtaaatacaactcccgaatctggaaaattcttcatgactggtttccttcggttntttccgacgttntcaagaaataaacgttggtggcgactccgtgcatttacctcctttggaagatgcacctgtgagcctcgtttcgctcgcccgcanaagggtaggttgcaacagttggcgactccgctggggactggttntgtgagttaggcctattttangannatgtgtgttagtgcttagctttactgagctntaaaagaatggctaannatttgttaaacataaacacttanacaatggangaaagctggagttgctgacatgatgtc

SEQ ID NO: 6925 - DNA, 401 bp, Glycine max
  unsure (1)..(401): unsure at all n locations
gactggactaatacattctgtgcccaagtntcatggtcttgcaaggaagatcctcataagcatcttaaggcgttccatattgtttgttccaccatgaagccccttgatgtccaagaagatcatatctttctaaaggctnttcctcattctctagagggagtggcaaaagaatggctctactaccttgctcccaggtccattntcagcanggatgaccttaagagggtgttcttggagaaattcttccctgcatctaggaccactgccattagaaaagacactctangcatcanganacttagtggagaaagcttgcatgagtattgcgaaagaatcaagaaaatgtgtgcangctatcctcaccaccataattctgagcaacttcttcttcaatatttcta

SEQ ID NO: 6926 - DNA, 402 bp, Glycine max
  unsure (1)..(402): unsure at all n locations
agcttgatgtaacagagaagaagagagcgcgagagaatacacggagaagtaatgatcgttatcaaaatanggtgcgtcanatataatntanaatgtaatttcaacatcggttntcaataaaaaaactgatgttaacaaattgatgttaaatgatcatacgttaacatcggttttctacaaaactgatgttaacggatacacattatttacaattatgccaccgcgtgtatgttaacatcgattntgtcaaaaaccaatgttaatctgtcgatgttaaaattgctttttgtagtagtcgacggtcgcacgaagaacacaaaacaagaaaacgacgtanggaatgatcgtggttgcaattcggtagcgcctcggcttcgttccctctctttctctcttctctta

SEQ ID NO: 6927 - DNA, 420 bp, Glycine max
  unsure (1)..(420): unsure at all n locations
atgagacttactccttatttaatagacaacatcttatcattttgtgtttccaatanattttaaatacagtgtaataaatagagagtgtgttgcaacactactcctctntaatctttgcatcatttacttagtcttaccgaagtgtattgtgttcgtatttgattaacttanaacatgaaattgttaaatgtaaggatattcgctctttaaaatgtgagatgttacataaattatttataaaagataacaaatttacaattagtttatgaatatgtacnaaatgtgataaattaatcatacagacaacttaatgacatacttactcttanatttataaattatatcanattgatctttaaaaatataattatttcaaattatcatgacgataacactatcatattctcttgtatatatatc

SEQ ID NO: 6928 - DNA, 334 bp, Glycine max
  unsure (1)..(334): unsure at all n locations
ctcacatatggcggtgagctgcgatatgaatctggcaatataattcaagcgtcccaggaaacctcagacttgcctctctgtacggngttctggcatctcaaggatagccttcaccttttcggngtctacctctatccctttctggcttacaatgaaaccaagcaatttccctgatttgaccccaaaggtacacttagcggngttcaaccttaatngatatttcttaagcctttcgaacaacttccgcaggttgacaaggtgttcttcctcggatttagatttagcaattatgtcgtccacgtagacctcgatctctngatgcatcatatcatgg

SEQ ID NO: 6929 - DNA, 320 bp, Glycine max
  unsure (1)..(320): unsure at all n locations
attcatggctatggcattgaagatctggtcacttcaacactcaagctntatgctgctgcctcaaaataatatgatgagagatctaccatgcctatatgactataatgaatcttgtgaaggatgtcttcttaaaaagcaacaaaattaccattttcaactaacaaagcatgtagagctaaagactcgtcagagttaatccacactaacatttgtggaccaatgacgacatctgcactaaacaacaacaggtatctcatcctctctattgatgacttttctagaatgactcggtctacttctctatagaacaatcaaaggtc

SEQ ID NO: 6930 - DNA, 320 bp, Glycine max
  unsure (1)..(320): unsure at all n locations
tctcatgtgcacccaaactcaatctccgggttcgaagacaaccttctntctcccgttggtggctggtgtagcatagctattatttttgctctcaatttgatctttgactctctcatgaagcttcttcacatagtccgcctttgcttgaccttcttaatgcttaaaaacagaaacattaggcataggcaaaagatcaagatgagttagtgagttaaaaccatacacaacttcaaaaggagaacagttagtggtgctatgaacagctctattgtaagaaaattcaacatggagtaaacaagcttcccaagcttttaagttct

SEQ ID NO: 6931 - DNA, 310 bp, Glycine max
  unsure (1)..(310): unsure at all n locations
atccgagangagaattattgtcctttaaatatgctgagacttcacttntcaattacgagcgtctcgatgtattacgggtctcaatcggacttccgagttaaaaattattgtcgtttgatttctctcagagctnttgtgttcaattacgagcgtctcgatatcctacggtacactattggacatccgagtgaaaagttattgtcgttcgaattttgttagagcttatgttttcaattacgagccgtttgatatcccacgggacacaatcggagattcgagttaaaagctattgtcgttagaatattctcat

SEQ ID NO: 6932 - DNA, 468 bp, Glycine max
  unsure (1)..(468): unsure at all n locations
aagtatgtatggcanaacttcattactgttgttcaagacatacaagtgagcttgtaacanatgttctacacttggagtgatcacatgcagtcctcttgaacccttaccacccactctgtcatcatgccgagactcaggaaggccaacaggtttagccttctcaatgtattctgaacaaaattcaatggcttcttctgcaatgtacctctcaacaatagatgcttctggatgatatagattctttgtataccctnttaagatcttcatgtatcgctcaactgtgtacatccaccgtagataaacaggaccacaacatttgatttctctgaccagatgcacaatcaagtgaatcatgatgtcaaagaatgcatgcggaaaatacatctgcaactggcacaatataatngcagcctcattttccagctcatcanacttgacangatcaatgactntgctacatatagcatg

SEQ ID NO: 6933 - DNA, 152 bp, Glycine max
agttcacactgatgtgtgatgctagtgtctatgctataggtgcagttctgggacaacaacgagacaagatattccatgccatatactatgccagcatggtcctgaatgacgaacagttaaattatgtgaccactgaaaaggaaatgatgggc

SEQ ID NO: 6934 - DNA, 322 bp, Glycine max
  unsure (1)..(322): unsure at all n locations
tagacatgtggcctcagatatcttaagaaggggggtgtgaattaagatatccacacagtctccgctaattaanaatctattgcactctcttcttactcaagttatgaattcccttaatgacaatcttctagatattaattcacacagagcaactcgaatatgaatataacgcactaataaataacggagattaagggaagagaatatgcnttctcagttntatactgggtcggccacagcctagtgcctacgtccagtccccaagcaacccgcttgagagatccactatcttgtaaattccttctacacgatctaaacacac

SEQ ID NO: 6935 - DNA, 277 bp, Glycine max
  unsure (1)..(277): unsure at all n locations
atagataccaatccaggtggaggaatcatctaaatctgagatggacaagtcctccacaacaacaacagcctgtccctcctttccagaatgttgctggtccaagcaagccatatgttccttctccaatgtagcaatagcagcagtagtcacaacaaagacaacaagcaactgaggctcttcctcaaccttccttataagagttagtgaggcaaatgatcatccagaatatgcaatgtcagcaagagacaagagcctncattcagattctgacaaatca

SEQ ID NO: 6936 - DNA, 404 bp, Glycine max
  unsure (1)..(404): unsure at all n locations
gctcgactcttctgactcatgatgtagatccatgtcattctngagtagtcatcaattatggacagaatatatcttccaccacccagagaaggtactcttgcaggccctcaacagtcagcatgaatgtaatcaagagttcctttggtggtgtgaattgctttangaaatntaatcctatgttgcttgctgaaaacacagtgctcacaaaatntcagttcatctagtttctgatttcctaacagctgttggtttttgaagtatcatcatacctttntcactcatatgacctatcctcatgtgccacaattgagttaagtcaggtatgctcttattggatcttgatgcaacagctactagaccatcctcaacacatgttgtaccttgaagtatatagagattacccc

SEQ ID NO: 6937 - DNA, 410 bp, Glycine max
  unsure (1)..(410): unsure at all n locations
ctaactcttgattctttggtatcaccataacattcatggaagccattgcttccacacttagaagctcaattctaggattngataatatttgggacttgtatgctttagatgaacatttctctcccagttagagagttgtgggaaataggcccaagatggatgtcttttggctgaggggtatttagtcaaagagggaaaactntgcataccccaaggatccattagganattacttgtgaaagagatccataatggtgggctcatggtccactttgggatagacaagaccctcgtctactcanagaanagttntattggccctatatgaagaaagatgtccataagcattgcactatgtgtgtggctcgttacaagccaagtctatggtgatgccttatgagctatacaca

SEQ ID NO: 6938 - DNA, 395 bp, Glycine max
  unsure (1)..(395): unsure at all n locations
ctaatacattngctgcccaagtttcatggtcttgcaaggaagatcctcataagcatcttaaggagttccatattgtttgttccaccatgaagcccnctgatgtccaagaagatcatgtctttctaaaggcttttcttcattctctagagggagtggcaaaagaatggctatactaccttgctcctaggtccatttttagctgggatgaccttaagaaggtgttcttggagaaattcttccctgcaactaggaccactgccatcagaaaagacatttcangcatcangcaacttagtggagaaagcttgtatgagtactgngaaagattcaagaaattgtgtgcaagctgtcctcaccaattgagttctgaacatcttcttcttcaatatttctat

SEQ ID NO: 6939 - DNA, 282 bp, Glycine max
  unsure (1)..(282): unsure at all n locations
acatcaatactatatnntgaaacaccaagaagaagttgaatagtaaaacctgcatatgcaagaagaggtcaatattctttgattnnttgtattggtccaaccttgatgttagacattgtattgatgttatgcatgttgagaanaaatgtgtgtgataatgtcattgacacgcttcttaacatttaaggaaagacaaatgatggtttaaatactcgtcaagatctaactcagatgggtatacgtgactagttacatccaaggtctgatggtaagaaaatatac

SEQ ID NO: 6940 - DNA, 313 bp, Glycine max
  unsure (1)..(313): unsure at all n locations
gtgagctnngaacaaatcttctacacttcgagtgatcacatgaagcctcttgaacccttaccacccactctgtcatcatgccgagaatcaggaagcccaacaggtttagccttctctaagtattctgaacaaaattcaatggcttcttctgcaatgtacctctcaacaatngatacttctggatgatatagattctttgtataccattttaagatcttcatgtatcgctcaaccgggtacatccaccgtagataaacaggaccacatcattngatttctctgaccagatgcacaatcaagtgaatcatgatgt

SEQ ID NO: 6941 - DNA, 340 bp, Glycine max
  unsure (1)..(340): unsure at all n locations
gctctcgagaaatctagtggcataaatnntatacatatgtccgattcggngaaataatatatcgagacgcacgagatagaacaacggaagctctcgagaaattagaatggtcataacaattcactcggatgttcgatccggagacataatttatcgagacgctcgatattgaacaaccgaagctctcgacacaatagaatggtcgtaacttctcacgcgaatgttcgatacggtgacataactcatctagacgctcgatattgaacaacggaagctctcgagacatatgaatggtcataaggtttcacacggatgtccgattctgggacataatatatca

SEQ ID NO: 6942 - DNA, 408 bp, Glycine max
  unsure (1)..(408): unsure at all n locations
ctcttcttcctctntcgccccattagtgctaccacgtgatgttaacattggttntntacanaaactgatgttaatagaatttttcttaacatcganttttgaaaaatcgatgttaatgtggtgatattaacatcggtttttgaaaaatctgtttttcaaaaatcaattaacattgattntgtaaaaatctgatgttaacaccgccacgttaacaccggttnttntaaaaatggatgttaacaaaatcaatttatttacaaaaatgccattngccttttgttaacatcggtttaacananaaccaatgttaaagaagtgatattgaanacattctttctagtagtgaataatcttgattatggtgtggttaanggtgctttggggctttctttgatctgatttggttct

SEQ ID NO: 6943 - DNA, 337 bp, Glycine max
  unsure (1)..(337): unsure at all n locations
tgaagntatatagggtttggtctcattcacaatcctcatttttggtgatgagttcttggaaaagggaagcattgataagattgtaagagatgatgaacaagcaatatcatttgattgagatcccaggaataatgccattaaaggtgcagcaaatgctttatcttatatgcatcatgactgttcacctccaattgttcatcgagatatatcaagcaagaatattgcttaggatttggagtatgtggctcatgtctcagatattggagcagccaggcttcttaatcctaattcaaccaattggacctcattctgtggcactgttggatatgctgctcca

SEQ ID NO: 6944 - DNA, 354 bp, Glycine max
  unsure (1)..(354): unsure at all n locations
gcttccgtcagtggtaccttaagnttcatgggataatttcttcattngcgtttgangaacaccccatggatcaatgcatataccacaaggcagtgtgagtaataatatgttttcttgttctatatgtagatgatattntacttgcaaccaacgatcggggtttgctacatgaggtgaaacaatttctctctaagaattttgacatgaaggatatgggtgatgcatcttatgtcatcggcattaagattcatagagatagatctcaaggtattctgggtctatcacaggaaacctatattaacaaaattctagagagatttctgatgaaagattgttcaccaagtgttgctccca

SEQ ID NO: 6945 - DNA, 326 bp, Glycine max
  unsure (1)..(326): unsure at all n locations
tctatcctttctatgatggagccaatctcagtcacnctcattaagaactagctctnttcttcctctattgcctttagttgaatacaccctcttgttggttctctatttggttcttaaccctctcatgcatcttctttacaaattctgacctagattccccttctttatgtataaaagaagtgtccagtgggaggggaatgaggtctaacggtgttaggggattaaacccatagacaacctcataaggggactgcttggtggttctatgaacccctctgttgtaggcaaattctacatgaggaagatactcatcccaagactttatg

SEQ ID NO: 6946 - DNA, 359 bp, Glycine max
  unsure (1)..(359): unsure at all n locations
acacaatgataatactatgtatttattaaccatacttaatagagaatcttataacactacgaaataaccataaattgggagagtttgatacaatttatacaagcttnatacacaaaagatagtcatttntaccgactaacacctacccgcaagggcattggataaagaagacttcaagtagattacgccaaggatccaagggaaggccctatggttctcatgagccttagggtagatttcgggcatatgggttaagtatgagcctgctaatctgttaaatatacaataagtattccttcttttggcccttgattctggccttctatagcatagggtttagccttgtatttaagatattt

SEQ ID NO: 6947 - DNA, 320 bp, Glycine max
  unsure (1)..(320): unsure at all n locations
tcggatccctgtcagatacaatactagaaggaattccatgcaaccttactacttcctcgatgtacaactccactagctnttccattctatacttcatattcaccggaacanaatgagcagatttggtgagtcgatctactatgacccacacggcatcatgcncacgactagtcttgngtaaactagatacannatccatagatatgctctcccatttccattccggaatctccaatggcttcaattctcccgatggtcgttggtgctcaaccttagccttttacatgtanacatcttgctcatattcgctacatctttct

SEQ ID NO: 6948 - DNA, 312 bp, Glycine max
  unsure (1)..(312): unsure at all n locations
aagctccttaactgcacaatgctctttaatattgaagagtatacttgtggaaccttcacctgacgaagacactgacaagaacttatcttctccttcttggacaaagtatggcaagctggaggcaacgtaaatttcttcccatcagaccttggatgcaactatgctcttatacccatatcagctagatcttgaccggtattcaagccatccttcgtcttgccttgaatgttaaggagcatcccaatcacactgtcacaaacattnttcttcacatgcataacatcaatataatgtctaacgtcaagatcacac

SEQ ID NO: 6949 - DNA, 232 bp, Glycine max
  unsure (1)..(232): unsure at all n locations
ccacctgagagcatgcaagcttggatanctattgctttggaaacctttcctttctcatgtgaacccaaacccaatctccgagttggaaaacaacctttttgtgcctcttgtttgcttgtatagcatagctcttattcctcttttcaatttaggccttgactctttcatggagctttttcacatagtcttctttggcttgtccttccttatgcctaaaaactgaaatacttgg

SEQ ID NO: 6950 - DNA, 190 bp, Glycine max
tctttttattttatgcacctgaatcagacttccgtttgaaaagttatgaccatttgaatttctcgacagattccgttgttcaatttcgagcgtctcggtatattatgcgccagaatcggacttccgtgtgacaagttacgaccatttgaatttctcgagagcttgcgttgttcaatttcaagcttctcga

SEQ ID NO: 6951 - DNA, 191 bp, Glycine max
ttcttctttttgattcatcttctccttgaagtggcgtctccaatcatttttcttccttctccattctgctgccatgatcttctagaagcaaaggactccattgatgaagaagatccaaggcctttaagctccacatggagctacgtcacattgtgtgcttggttgtgcgatcttagtggttcctcattatt

SEQ ID NO: 6952 - DNA, 196 bp, Glycine max
tgccttgccttttgatttattttagggactcatggtcactatgaatgacaaattccttgggataaaggtagtgttgccatgttttcaaagcccgtactaaggcatacaactccttatcataagttgaatagttaagggtaggaccacttaacttttcactaaaataagcaattggatggccttcttgcatcaacac

SEQ ID NO: 6953 - DNA, 214 bp, Glycine max
  unsure (1)..(214): unsure at all n locations
agcttggatnnctttttattagggaatctatccttcctaagatggatccaaacccagtcaccgtcattaagaactagcttttttcttcctctattgcctttagttgaatacacctttgtttggttctctatttggttcttaaccctctcatgcaaattctttacaacctatgacctagattgcccttctttatgtataaaagaagggtccagtg

SEQ ID NO: 6954 - DNA, 187 bp, Glycine max
  unsure (1)..(187): unsure at all n locations
ngatcttttttttttnnatctttaatctttaatccctgaacgaactattcaagtttgtaattcgaactttaattatcttttaattcgttcctaaagatagatcgccaaatctgttgctaacagcacattaatctgttaaagatataacagatttatgtgtccagtattttcgggcaagatgtcctgg

SEQ ID NO: 6955 - DNA, 208 bp, Glycine max
ttaagcttacagtaccttcttagcaacagtgtcattgcctttctccccttaaatattttatccatcaatttgtggagaaaatgtccaaagggcccagagtaggtgaaaccatagagctgcaaatcaatttgatttcaaaactgctcagtactcaaaaattttcactacaaacttcatttctgcttcatcttttgagaaaaggtgaaac

SEQ ID NO: 6956 - DNA, 191 bp, Glycine max
tggaacatattgtctgaattttgggtcctcttaaggacatagtcaaaatatccgctggctgatcattagaatcaataaactcagtgacaatctccttggacagaagcttctctcgaatgaaatgacaatcaatctctatgtgcttagtcctttcatgaaaaactgggtttgaggcaatatgaagagcagcc

SEQ ID NO: 6957 - DNA, 214 bp, Glycine max
agcttgtcatctttatagagtagaagatagatcattgatccatcctccaccttgttgtgataaacacaacaatcatagagacttctcttgaatccttggctggtgataaagctatcaaacctcatgtaccattgccttggagattgtttcaaaccatacaaggacctttgcagttgacaaacatacctttcttttacttgaacttcaaaccctt

SEQ ID NO: 6958 - DNA, 212 bp, Glycine max
agctttcattttttatttcgaccatctcgatatattaccggactcatccggacttccgtgtataaacttattgtcaattcaattttctcagagcttcggatcaaaattttgagcatcttgatatattacgggactcatttagacatccgagtaaaaatttattgtcgttagaatttgatacgagcttccgttttcaatttggagcatctcga

SEQ ID NO: 6959 - DNA, 192 bp, Glycine max
  unsure (1)..(192): unsure at all n locations
ccccttatggatgtccgaggcggggacaaaanataacgagacgcccgaaatcgaacaacggaagctcgcgagaaaaagcgaatggtcataacatgacactcggatgtgcgaagcggggacataatatatcgagacactcgaaatggaacaacggaagcccgcatgacattcgaatgctcagaacatatcaca

SEQ ID NO: 6960 - DNA, 194 bp, Glycine max
tactaaggcttctattctagctcttcgtgacttttctaaaacttttgagctagaatgtgatgcctctggagtgggagttggagctgtattgttacaaagtgggcaccctattgcttattttagtgaaatgcttcatagtgccaccctcaactaccccacctatgataaagagctttatgccttaataagagccc

SEQ ID NO: 6961 - DNA, 214 bp, Glycine max
tttcaaccttaccatcaaaggaagcgagggataggatcatgaaggggggaaaagatgagtggagggagagtgacaaaaggagcacgaaaatttgagccgcaaatgaggtctgaactttgaagagtaaacatcaagagatgaaagatccaaaaattaacgcacgcggactatagttatagtctaaacgtcacacaaaattgggaggaaacctgaa

SEQ ID NO: 6962 - DNA, 213 bp, Glycine max
agcttcaaccaattgggttggtccatttcaagtacttgaaaggataaatgacaatgcatacaagattgaattgaccggtgagtataatgtgagtactacatttaatgtgtctgacttaaatctttttgatgtaaatggagaagccgatttgaggacaaatccttttgaagagggagagagtgatgaggaaatgacaaggactaagggaaaggt

SEQ ID NO: 6963 - DNA, 206 bp, Glycine max
gctttggagtttccaagtgccaattcgtcttcttcttttgtccagtcttcttctggcttcaattcattagtgggctttccttctgtgtccagcatcttgggatgttcccagcctttgatgatagctttccaggttctgctatccagtgatttgaggaaggccaccatccttgctttccagtattcatagttggttccatccagaat

SEQ ID NO: 6964 - DNA, 210 bp, Glycine max
tttgcaagttgcttttgggggaggcaattgagcgagaagttgaccttggaagtacttgtcaatgcgactgtaccatgctctcagtgcttgttttagtccataaaaagccttctttagcttgagaactttgtcttcttctaatttcacctttaatcccaacggttgttcgatgtacacttcttccacgaggactccattcacgaaggtaga

SEQ ID NO: 6965 - DNA, 199 bp, Glycine max
tctgctttaataggacctcagtgtgaaaagttatgaccattttaattccccgagagcttccgttgtgcatttaccagcgtctctatatgcgatgcgccttaatctaacatccgcgtgaaaagttatgaccatttgaatttctcagaagcttccgttgttcaattttaagttgatggatatgtgatgtttcagaatctta

SEQ ID NO: 6966 - DNA, 214 bp, Glycine max
  unsure (1)..(214): unsure at all n locations
agcttgaccagtttttattttgatgggccggatgttgaattcaggttgntcctggtgcggagatgatggtactgtgggtgaaccaggagctgcagtttcttttggtgaggtagccatggaaaagcagagcgtttggaatgatttcgtaaatctcagaaaactattgggaaatgctggtaaaaacacgaatgccaagcagatataaatttgaatg

SEQ ID NO: 6967 - DNA, 210 bp, Glycine max
agcttaacaaaaggcatgcgaagtgggtggaattcctagagcaattcccttatgttatcaaacataaaaagggaaaaggtaatattgtagccgatgctctttctcggcgtcatgcattactttctatgcttgaaacaaaattgattggtcttgaatgtttgaaaagcatgtatgaaaatgatgaaacttttggagaaatttttaaaaatt

SEQ ID NO: 6968 - DNA, 204 bp, Glycine max
taagcttatagaaagaggagggaaaataaatcaatccaaaatcaatggtacctttcaaggaactaagaattctttttgcagcttttaaatgaggagaggaaagagcctccataaagcgacacacaactcccaccgcatatagaatatcgtgccttgtattggttaaataccttaaactccccacaagactcttgaagatcgtgg

SEQ ID NO: 6969 - DNA, 390 bp, Glycine max
  unsure (1)..(390): unsure at all n locations
nagcttgcattgtgtagaagagtacatctttcttttatgtttagacgaagagaaatatcttcatatataaacaaacttatacaaataattgattcccagatttctaaagatgtagaaaaaagtattaaataaaacagacagcattgtttagattntataacgtgtacattattatatatatcattagtttaaaaaatattatacttgcattatctgggtcatctgtttgcattaaataggtaaaaaattctactcatgtaaaacacagactatcgtaagtcttgttatttgaaataaagaaatatattgcgtcccatatcgcattgaatgtctgtctcttggatattgcactttaaaaaaaaatcatcggttttttgataattacttgac

SEQ ID NO: 6970 - DNA, 402 bp, Glycine max
tctatgtttcggatgaattggttgttttgaacgtaataaaagcgatgatgggggcaatctataaatcaaacggtgatagtggagacctataaatacttcataaatatgtgaaagatgaattgaccggaaagaagtctcttctcgttctggatgacgtctggaatgatgatcgacaccaacggaaagctttgaaaactcctcttaaatatggggctcagggaagctaaattcttgtcacgacacgcagtaacaatgttgcttctaccatgcagtcaaataaagtctgccaactaaagacattacaagaagatcacagctggcaagtttttgctaaaaatgcattccaagatgatagtcttcacttgaatgttgagctgaaggagataggttcatagatcggtg

SEQ ID NO: 6971 - DNA, 393 bp, Glycine max
  unsure (1)..(393): unsure at all n locations
agctttgagcaaattcaaacgacaataatcntttntgtcggatgtctgattgagtcccgtaatatatcgagatgctcgaaatggaataccgaagccctgagcaaattcaaactacaataactttttactcggatgtctgattgagtcccgtaatatatcgagatgctcgaaatggaataccgaagctctgagcaaattcaaacaacaataactttttactcggatgtccgattgagtcccgtaatatatcggaacgctcgaaattgaatgttgtagctctgagcaaattcaaacgacattaactttttactcggatgtctgattgagtcccgtaatatatcgagacgctcgaaatggaataccgaagctctgagcatattcaacgacaataac

SEQ ID NO: 6972 - DNA, 429 bp, Glycine max
aagcctatagcttatcaagttcaccagcctgaaattgcaacaatctcataaaacaaattaagattaaactctacacactttcagaatgaatcatgcaaaatatgatatatcatcgcatacataagcattagcatattattgtaccatgaagcacacatgagaaatgcatatgaaaattagagacttgtcaacaccggatgcattatcagataccatcacctctaacgtacagtattacttgttttgcaactacttggaaatgatatttttgtttctaatcggcatttaaatactaattaatctcagaaactctgcatattattccaatggaatgatataaacccccttctgaaaccaactaaaatgcacatcagtgagatgaggacatataaacaaagattacatattatattataaaatatataatat

SEQ ID NO: 6973 - DNA, 424 bp, Glycine max
  unsure (1)..(424): unsure at all n locations
agctntttattcaaatttagaaattcatttagatgttctaatgtctgaaatctatgggattaagatggtcactgaccaatccctattttatgatttaacaaaattgcctagtgaaggtgtgccttttgagggtgcactgattgatgaatggaaattcgatttctctgtgcatgatgcccgccggttggtttgcaccaaccaagcggatatgaccggaaggcttcttgccggttcattggcttttgaaagccgcatcctccattatcttatagttcgcgttttgcttcctagatcttcaaaccttgcccaggtttctgaagaagacctcattgtcatgtgggcctttcataaaggtctacaaattgattgggcacatcttgttagatatcgcatgcataaggcattgcgaatgaatgccccatta

SEQ ID NO: 6974 - DNA, 430 bp, Glycine max
  unsure (1)..(430): unsure at all n locations
ttaagcacctgagctgcagcttgtttgaaaccattaactttttgactnttctatctttaggcctttcaaccagctcccatgttttgtttttgtgtatcatagacatctcctcctccattgcaattgtgcttcctcacagctagcatgttcataaattgctacattacatctttgatagatgtcggacaacagcctttttcctctgattggaaggtcatcttctaattcactctgcataagctctgttgtttgctctccaggatgattgtctccactattgaggaaaaacctagttgtttgtgaattgttccaatcccatttctcaccttcgttgaagtgcacatctctagtgattgtcatctttttagtttgaggatgatagactttgtagggctttgaaactgaattgtagcccacaaagatgcccgga

SEQ ID NO: 6975 - DNA, 418 bp, Glycine max
  unsure (1)..(418): unsure at all n locations
agctnggttatctccttcttcactacatgtagattcaccgggttgagtcttctctatggttgtcttactggtttagctccatcctctaaatttattcgatgcatacatgtggatgggctaataccaagaatgtccgccagggtccagcctatagccttcttatgcttcttgagaactgacaacaacttctcctcttgctcatcagcaagggaggcagatataatcactggaaaattcttgctatcatccaagtaagcgtattttaaatttgatggcagaggcttcaattctggtgtgggcggctagacagtggtagaatgagatggtatctcagcctttacctcataaagaaagtcagaggaatgtgtagctcctgaaacatggttagtcctatctgactctatgaaatcaatctcga

SEQ ID NO: 6976 - DNA, 434 bp, Glycine max
  unsure (1)..(434): unsure at all n locations
agcttaacaatatttactttgtttttgtttataacaaattggttactttgaatatgtccatgcgtcacgggaaggtaggagattccatactctggtggagtataatgtgagaacatgacaggttagattgttagaaagaagtcaataaatattgatcaaattataattaacaaccacattaatttgtataaaaccaataagtattattttttatttacacccttatcatttagatgttaatttacagattcgtttgagtgaagggtttagtgaaatacaatttaaactgattataatgctacaagttgagttagctagggttagtttgtgtaattntgtgattaaacttatactgaacaaactcgatcaataattaataatggaatggtttgactcggattcattgagtaaatttaattaaaatcattttattt

SEQ ID NO: 6977 - DNA, 436 bp, Glycine max
  unsure (1)..(436): unsure at all n locations
agcttgtacctttgaaacacatcanatattcacttattagctacattggattgngcttctaccaattcaattaaatttattttcaaccacacacatcaaatattcacttagtgcatgtgaaattacaaaactacccctaatacaaaaaactagtctaggtgccctaaaatacaagggctgaaaaatcctatatttctaaggtactctacctacattatggagccctaaatacaaagcccaaaaataatgaaaccttaatctaatatttacaaagataagtgggctcatacttagcccatgggcccaaaatctatcctaagactcataagaaccctagggccttctcttgcatctcttgcccaatctacttggagtcttctatccaatacccttgcggggtaggattgcatcaaaaggttacagagaacttacattg

SEQ ID NO: 6978 - DNA, 430 bp, Glycine max
  unsure (1)..(430): unsure at all n locations
agcttaacaaaaggcatgcgaagagggtgtaatttctagagcaattcccttatgttatcaaacataaaaagggaaaaggtaatattgtagccgatgctctttctcggcgtcatgcattactttctatgcttgaaacaaaattgattggtcttgaatgtttgaaaagcatgtatgaaaatgatgaaacttttggagaaatttttaaaaattgtgaaaaattttcagaaaatggtttctttagacatgaaggctttcttttcaaagaaaacaaattgtgtgtgcctaaatgttctactagaaatttgcttgtttgtgaagcacttgaaggaggtttaatggggcattttggggtccaaaagactctagaaacattacaagaacattnttattggcctcgtatgaaaaaggatgtgcagaaattttgtgaaca

SEQ ID NO: 6979 - DNA, 388 bp, Glycine max
agcttccttaagaagattcctaaagaatctagatcttagctacacatacctctctaatagctaagctcacctccttgagatgagaagctagagcttagctacacaccccctataatagctaagctcacccccatgacaaaaaacatgaaaataaaaaaaaagtccttattacaaagacaactcaaaatgccccgaaatacaaggctaaaaccctatactactagaatggccaaaatacaaggcctagacgaaggaaaaacctattctaatatttacaaagataagcgggctcatacttagcccatgggctcgaaatctaccctaaggctcatgagaaccctagggcctttccttggatctctagcccaatctagttggagtcttctag

SEQ ID NO: 6980 - DNA, 363 bp, Glycine max
  unsure (1)..(363): unsure at all n locations
ctgcagcttttggttgaattataatcacatttctctttatgtttgtcatatccggngttgccaccgataacagagcggtaacttctctcacattactccctctgcttaaatttgtacatactagtattatcttatgagatttgggcgcctcattgataaagtttattaaaccagagacaataccaattcatactttatttattaactaaattacactcaatctggtaggactcaatgaaaaatgttacatgtacgctcctttattttagacactcatttgacacatttattcaaaggggttagatcatctgttatcaagctgataaatgatgtggagagtgtgcacaggggcattcttgagtg

SEQ ID NO: 6981 - DNA, 399 bp, Glycine max
  unsure (1)..(399): unsure at all n locations
agcttgtaatatgcaggaaactggttgtgatttgggtgatggtgtggacattgtgcaatgggtgagaaaaatgacagactcaaacaaggaatgagttctaaaagttcttgatcctagacttccctcagttccacttcataaggtgattcatgttttttatgtagccatgctatgtgttgaggaacaggcggtggagcggccaactatgtgcaaagttgttcaaattctgaccgagcttccaaaaccaccaagctcaaaacaaggagacttaacaatcatagaatcctctttgtcattatcaaacagtttagagtctccaaccacggcatcaaaggaacccaaagatcaacatcatcctcaattgccaccaaccgatctacttancattttgaatttgaa

SEQ ID NO: 6982 - DNA, 424 bp, Glycine max
  unsure (1)..(424): unsure at all n locations
agctntcagccaattcacccgacaatatctttttactcggatgtctgattgagtcccgtaatataacgagacgctcgaaattgattgttgaagctctgagccaattcaaacgacaataactttttactcggatgtctgattgagtcccgtaatataacgagacgctcgaaattgattgttgaagctctgagccatttcaaacgacaataactttttactcggatgtctgattgagtcccgtaatatatcaagacgctcgaaattgaatgttgaacctctgagcctattcaaacgacaataacttttttctcggatgtttgattgagtcccgtaatatatcgagacgctcgaaattgaatgttgaagctctgagccaattcaaacgacaataactttttactcggatgtctgattgagtcccgta

SEQ ID NO: 6983 - DNA, 330 bp, Glycine max
  unsure (1)..(330): unsure at all n locations
agcttgtttcatcctcttagtcttggactttgtcatangctggttgcacctccatcattccctccctctttgaaaggattcatccttgaatctgattcattacctacatcaaagaaagatagatcaaccacattaaaggtagtacttatgttaccatattctcttggcaagtccaactagtaagcattgtcatttatcttttctagaacttgaaaaagcccatctcctcttggttgcaacttggattttcttttagcagtgaacctttccttcctcatatgaaccgaaacccaatctgctggtttaaaaataactttgatgcgaccctta

SEQ ID NO: 6984 - DNA, 433 bp, Glycine max
agcttgatagcagaggggcttaggtccttcatttacaatgatcaatggtcacggtagggaccaagaagggttgctattctgacttctgagtgatattgaaagggtagtctagacataacatatgaacaattaatatcactattataatgtttatttgcaaatattattgtcattattatatgttaacattatatgggtcaatcgctaattgaaatattcgtttggtttgtggaatgacagacagacaaggcatccatgctagatgagatcatcgattacgtgaagttcctgcagctccaagtcaaggtgcgcatcccgcgtttttctcttgtactagcatttctttatttgaatttgttcctcatcagcatcaattaatagcatattttaattaccccagttgattatttaattagagactctaactaagtat

SEQ ID NO: 6985 - DNA, 216 bp, Glycine max
  unsure (1)..(216): unsure at all n locations
ctaccaactacanaccctaagataactatattatctacacaataagtacacttctctatattngcatagagggtgttnttcctaaggactgacagaacttgcctgagatgtcctaagtgatcatctangctcctactgtacanctaatatatcatcaaataaacaactacaaatctacctatgatatcccttatgacatgatgcataagcctcata

SEQ ID NO: 6986 - DNA, 291 bp, Glycine max
tgatgcaacaatcgaaaggggtggctatatgagacatcttgccgaacataggcaggtgagccataactcgctagagcgttttcttgcatgccatatgtaacaaagtcgttgatcctatgaagtttgatgagttggaaaatgaggccgcgagtatactgagccagttggaaatgtattttcccgctgctttatttgacatcatgattcacttgattgtgcatctggccagaaaaatgcaatggtggggtcctgtatattcgtggtggatgtacccggttgagcggatcatga

SEQ ID NO: 6987 - DNA, 378 bp, Glycine max
  unsure (1)..(378): unsure at all n locations
agcttatatataaatatcatggataaatgattacttaaattngcatacacaaaataatttctcaataattaacatattgaaagataagaaataaagaataaataataatttataacaacaaatttatattaacttgttcaataaattatttagggttaaatatattttttattcctaataaatactcaattttagtgttntctccctaataaatctttgctttgcgttgagtccctaataaaataacacttttattttatatccttgatattgtgttntagtccctaataaattagaaaattttgtgtttgcttcctaataaattaacaaattgtatttgagtntctattaagaaatgggaaatatttatcatggagc

SEQ ID NO: 6988 - DNA, 457 bp, Glycine max
gatccttaagcacctgcggctgcagcttttattgaacctgaaatcattactcactttgatttctgaggtttttgggataaaaatggtcattgaccaatcccttttccataacttaacccaattgtccagtgacggtgtaccatttgaaggtacactgaatgacgattggaaatttgatttctctgcatatgatgcccgccagttggtttgcaccaaccatgcggatatgactggacgccttcttgccggttcattggcttttgaaagccgcatccttcattatctcattgtgcgtattttgcttccacgatcttccaaccttgcccaggtttctgaggaagaatcttgtatcatgtgggcctttcataccgggcgtcaacttgattgggcacacttagtcagatatcgcatgcataaggcattgcgattaaatgctccattgccatatctacacctt

SEQ ID NO: 6989 - DNA, 440 bp, Glycine max
agcttctctcttcacatttttcactacctgcttctttggtgcattcttaatctccttgcactccttatccaacattaccaagaaatcacgtactatcataaacaatctcaacccttcatccttccctgagtccccatgaaagtaatcaccagtgttcttcactagggccatgatttgcttctcttcttctagcaaactcgtgacatcaacctcagctttctccacaaaactcttcactgtctcatgaaagcctttgtcatcatctatgtcacttaggtctttgtttacaaaatctcttgtttttatgagtccatggcctagtctagaggttgttcctatcaatgcatcagcatctaacgctgctgctttcttcacattctcgagttcactgctcaaacgtgaaaccacttgaaggccaagttcgcggattggtcttctga

SEQ ID NO: 6990 - DNA, 427 bp, Glycine max
  unsure (1)..(427): unsure at all n locations
agcttggaacatatagattgaatcctatttcctctttggacttagtcaaaatatctgttggctgatcattagaactaataaactcagtggtaatctccttggacaataatttctctctaatgaaatgacaatcaatctctatgtgcttagtccgctcatgaaagactggatttgaggcaatgtgaagagttgcctgattatcacaatataactttatttgcaccacttcacagaacctcaactcttggagaaattgcttaatccacataagtttgcaagtaaccatagccatagatcaatattcagcttctgcactggatcgagcaactacattntgtntcttgcttttccaagaaataatatntcccctaataaaaacacaatatcctgaggtagatctcctatccatggaacaaccagtccaatc

SEQ ID NO: 6991 - DNA, 417 bp, Glycine max
  unsure (1)..(417): unsure at all n locations
agcttataatatattgatatgctcgaaattatacattgtaagctctcgagaaattcaaatggtcataacttttcacacggatgtccgattcgggcaaataacatatcgagacgctcataactaaacaacggaagctatagagaaattctaatggtcaaaacttttcacacggatgtccgattcaggcgaattacatatcgagaggctcaaaattgaacaacagaagctctcgagaaattcaaatggtcataacatttaactcgaatgtccaatttaggcgcatcacatatagtgacactcgaaattgaacaacggaagctctcgtgaaattcaaatggtcantaactttcacactgaggtccgattcaggcttataatatatcgatatgctcgaaattaaacatctgaaactctcgc

SEQ ID NO: 6992 - DNA, 441 bp, Glycine max
  unsure (1)..(441): unsure at all n locations
agctnttggaaggatcaaaaagtgccttatgaatcctcccgtgcttatgccaccagtacctggaaggcctctcattttgtacatgacaatcttggacgagtcaatggggtgtatgctggggcaacatgacgaatccgggaagaaagagcgcgctgtttactacctaagtaagaagttcacgacctgtgagatgaattactccttgctcgaaagaacgtgttgtgctttagtatggtcatcccatcgcctaaggcagtacatgctgagccatactacctggttgatatccaaaatggacccggttaagtacatctttgaaaagccagctctcacgggacgaatcgcccggtggcaagtcctgctatctgagtttgatatagtctatgtcacccaaaaggcgataaaaggaagcgccttagcagattatntggctcaacagcc

SEQ ID NO: 6993 - DNA, 477 bp, Glycine max
  unsure (1)..(477): unsure at all n locations
tcttgggcaatcctcattccagcgatcagttggttnttgcgtaagagcttgaacaacggctcacaaatggcggtgagctgcgatatgaatctggcaatataattcaagcgtcccaggaaacctcggacttggctctctgtacggggttctggcatctcaaggatagccttcaccttttcggggtctacctctatccctttctggcttacaatgaaaccaagcaatttccctgatttgaccccaaaggtacacttagcggggttcaaccttaattgatatttcttaagcctttcgaacaacttccgcaggttgactaggtgttcttcctcggatttagatttagcaattatgtcgtccacgtagacctcgatctcttgatgcatcatatcatggaacaaagctnaccatggcccgtgataagtngccccggcattcttgagtccaaaggacatcaccttgtaacagaacgtnccccac

SEQ ID NO: 6994 - DNA, 332 bp, Glycine max
  unsure (1)..(332): unsure at all n locations
agtatggaatctatccttcctaagatggagctcaacctagtcgccctcattaagaattagctnttttcttcctctattgcctttagtggaatacacctttgtttggttctctatttggttcttaaccctctcatgcaacttctttacaaactctaacctagattccccttctttatgtataaaagaagtgtccagtggaaggggaatgangtctaacggtgttaggggattgaacccatagacaacttcaaaaggggattgcttggtggttctatgaacccccctattgtaggcaaattctacatgaggaagatacttatcccaagacttat

SEQ ID NO: 6995 - DNA, 427 bp, Glycine max
agctgtacaacaaatgccactctactcctagtttttaaaggatatgttaacaaggaaacacaagtatattcaccaggaaaacattgttgtggaaggaaattgtagtgctgtgattcaaaagatccttccacctaagcataaagaccctgggagcgtaaccattccttgatcaattggagaagtcattgtgggaaaggctcttattgatttgggagagttggagatcatgcacactaagatgactttacaacttgctgaccgctccattaccagaccatatggagtaattgaagatgtgttggtcagagtaaaacattctatcttcctggcatactttgtggtaatggatatctgtcaagataatgacattcttgtaatattgggaaagctgcatagtttatatggggagaaagaagttggagttggg

SEQ ID NO: 6996 - DNA, 403 bp, Glycine max
  unsure (1)..(403): unsure at all n locations
agctataacaccattaagggtaaagactcttcccgtggcctttggatgtccagtttgaccattcgggcctccaccatttcgctctttcttgggtcgtgaacaatctctttgagtgtgtcccttttgtccataattaaaacatgttgcgcctatatcaagacaattcgaggagatgtgccctggcttaccacatctgtaacaaatgatatgagtggagaaagtattgggcttgctaccactaccacctgcaaatcccctagcaacagtcctctgattgtcatggcggttaccatattgcttagggggtttcgaatatggttttcctcaatgttgaggcccattctttttgttcctcattggacctgtactccaataataggccgccctatctcgngagtcttca

SEQ ID NO: 6997 - DNA, 448 bp, Glycine max
  unsure (1)..(448): unsure at all n locations
aagatgaaaacagtataatgaaatatgcaaggaacatgactcacgctntaataggcctgaacttcttagtgctatgattcggcatagatccattcaagttatccagtcttggcaatctctttgatataaatgcagcttcctctctttttcccccttcctctaaagcagctatcagatcatctagacatgtcaatttctgatgtaaaccgttctccactaattcatagcataaactaaatgcttctgaaaccttgttaattntacaaagattcaaaatagttgcattacacaaatcaatatcaacattctggtgattntccaaactaaaaagcaacaatttgcatgcttctgacagctttcctcttttaagggagaaatgagccacttcttctatttaacatagtacccatcttataaagcanataataatctcaaatgctctttcatg

SEQ ID NO: 6998 - DNA, 442 bp, Glycine max
  unsure (1)..(442): unsure at all n locations
agcttagaaaaagttaatttaatgtatattaataaatttatcttaaattcataatttttttcaaaactatcattataattaatattcctctcttctaattatttaccaatgcattctttcctttaaattatagtttaaaaattattaattcaagaaacattatagagtgaatcttataaaaatgaacaaacataattttaaacttaattttataaataagaacaaaagaagtaaataataaaaatattatttaggtcattaacagtttatttgtaaaaaaaaaaaggtcattaatggtttatattaagcaattttgtatagagcaaattacaacaaccttcctttaggtatactctaattacacatgcattccttcctttntttttcaccctacacaaaactgcctaacttttgcatcctcattgaacaagtctcccctata

SEQ ID NO: 6999 - DNA, 467 bp, Glycine max
  unsure (1)..(467): unsure at all n locations
cgctgagctctnccaattgactngngattgaaccagagattgagttctgatacaagtacaggttctgcaactcactgcacttccctatctcttctgggatagggcctgaaagaagagttgtgtaaatggctatggtttgaattcttttcagcttccctattgaagaaggaagactcccagaaatgctggtttctgcaaggcctaacaccaccaagttggtgcagtttccaatgtcccatggcacctcacccttaaggtttgtgttccctcctgctctcaacacttggagcgcagttaatgagccaatactctntggaatttcaccactcagtttgttgtcatagagtgtcaagttcacaagacttgataaacttcctatgttggatggaatgtttccttcaagaaagttggcatgcagagctaaagtctgcagtttgctcagcctgcaaatttcctgtgggaattca

SEQ ID NO: 7000 - DNA, 468 bp, Glycine max
  unsure (1)..(468): unsure at all n locations
ctgcccgcaanaattactaannaaccatttaaggtccaacgccttatacggtcctctntgctttttatcggttaacatggaccgttcaaaagcataaaatcaacatgtaactttactgcttttgcaagaactacgtaggtctgatttcctcatgacaattgaggatacgtaggagcaaaagccccgcttttgtcgaccaccccaagagatcgttaatggtccaacgccttaacgtttctctcctttcaaaaaccaagagatctttaatggtccaacgccttaatgtttctctcctttcaaaaccaagagatcgttaatggtccaatgccttaacttttctctcctttccaaaaatcaaaagatcgtttaatggtccaacgccttaaatgacttttgttcagttaaaatcgatcttttggaagaggatcaaaacaacttaaccaatgtttagttttgaaagaactacat

SEQ ID NO: 7001 - DNA, 427 bp, Glycine max
  unsure (1)..(427): unsure at all n locations
ctgatggtgtcgagaagaaatcacatgtntgtcatcatcatanatgtggagaatgtgaatgtatgtatacatgattntgatgatgccaaagaataatcaaacaaggttgcttcaaatgataagcatttgcttcaagaataattcaagagtgcttcaacaaacaaagccttgtttcaagattcactaaagaccaagccttgccttataacaaagtgctttcaagacatgcaatgctctggtaatcaattaccaggaagtgtaatcgattaccagaagacatggttgagaaatagctgttgaaaaaggttttgaatttgattttcaacatgttatcgattaccatatgtctgtaatcgattaccagcaacgaaactttggaaattcanattcaaaagtcataacccttcaaattataactgtgttatcg

SEQ ID NO: 7002 - DNA, 444 bp, Glycine max
ctgcaagcatgcaagctatcactcggaggtccgtattatgtcttcataaatatcgagacgctcgaaattgaacaatggaagctcttgagcaattcaaatggtcataacttttcactctgaggtcggattcaagcgcattgtatattgagaagctcgatattgaacaatggaacctcttgagcaattcaaatggtcataacttttcactaggaggtccgattcaggcgcataatatatcgagacgctcgaaattgaacaatggaacctcttgagcaatttaaatggtcataacttttcactcggaggtccgatccatgcgaatcatatatcgagacactcgacagtgaacagaggaagctcttgagcaattcaaatggtcataacttctcactctgaggtccgattcacgcgcataatatatcgagacgctcgaaatcgaacaac

SEQ ID NO: 7003 - DNA, 465 bp, Glycine max
  unsure (1)..(465): unsure at all n locations
atgtaccaagaagtcaaaattaatccgtatgcacgtacactaaaaaaataatacgaatatattggatcgacactaacttactattattattcaaacaaacagaaaatgtactataaaaaactcataaattatgtgcagctttcaattcaagatgtttttcaatttcaaaatatatagctataataacgttaacttaataatctttttcttattaaaatgaactaatcacataaacgctattctntttaggtgcataaaaataatatattattgagaatagtgacatattcggaaagaagaagaaaaatagggaaaatggagtagagaataaataaacaacaaataggcggcttacagttaggattaggcgttaagttgtgtagttgaacagtaagctaaaactaatctntatanttttaattttcttatcatggtatgggtaagaagttcgctctatcggaagca

SEQ ID NO: 7004 - DNA, 345 bp, Glycine max
aaaactggcctcaccgtgataaaaaatgagaaggaggagctgattcctactcgggtgcagaacagttggagagtctgcatcgactataggaggctgaaccaggttaccaaaaaggaccattttcccctgccattcattgaccagatgcttgaacgcctggaaggtaaatctcactactgtttccttgatggtttttctggttatatgcaaatcactattgctcttgaggatcaggaaaagaccacattcacctgcaccttcgacacttttgcctataggaggatgcctttcggcctgtgcaatgcccctggtaccttccagcggtgcatgatcagtatttttagt

SEQ ID NO: 7005 - DNA, 433 bp, Glycine max
  unsure (1)..(433): unsure at all n locations
tctttctccatttncctctccttcttgctgctaaacctggcccacttcaaccgctgcttttccaactcaaacgcctgtatttgataactcacctgctgctcctccaactgcacaaccctcttcttcatccactgttttttctcccaagcactcttccctccgtcttgcaacacaccactcacttcaccactcaattgctgcatcatctgtgatgatgaaacaccaaaccctcccttattccttgctctcctcctaatcacatcattttcatcctcctccataccccttgatcctccttctcctgattcctcttcatcctcatcagaaaactcctccgaatcatcgtcctcatcctcatcctctttcaacattctcagactccccaccccgttctctgatgagtgcaaacactgctgctgttgatgttgatgtg

SEQ ID NO: 7006 - DNA, 434 bp, Glycine max
  unsure (1)..(434): unsure at all n locations
agctntaagcgctgtctattgatgatctatttcttctcanagntctcctctctagggtccaccaattctactgctccttgaggtctgacttctttgattatgaacggccctgaccacttggactttagcttacctgggaatagccttagccttgagttaaagagtaataactattgccctggctggaattctttcctttttagcttattgtcatgatacaccttcatctttttctagtagattctggatgactcgtaggcgtttagtctcatctcttctagttctagcaactgtagcttcctcttttctctgcatgtgttgttatcaaagttgagcaacttgagagcccaatatgctntgttctccagctccactggtaaatgacatgccttcctatacactagctgaaatggtgataagccgatgagagtctt

SEQ ID NO: 7007 - DNA, 459 bp, Glycine max
  unsure (1)..(459): unsure at all n locations
tatcaagctcccaatgtacgaatcggccgcggaactctatcgagattcgctctcagacgccataatcgcaagtgaaccagaatagggtttgggttttggggcctcttgtttgaagcctctaatctaatcagatgtttggttttgagacttgagagggagataatctagtccaaggctggtctttgattcaataatataaaggttaaattattatttagaatttnttaatatatttctaatgtttaattaggtattttaattattgagtgatttaattagatcatctaattatttaaaataattttattggatcatttaagtgttaacattattaactggtcacttagataggattctaccatatacaatgacaaaagattcaactaatgacttattaacaacttagatgactcgttaacgacattaacacanataactcaattgaatcattttaaataa

SEQ ID NO: 7008 - DNA, 435 bp, Glycine max
agcttccacgttcaatttcgagcgtctttatatgttacgggacttaatcagacatccgagaaaaaagttagtatcgtttgagttggctcagagattcaacattcaatttcgagcgtctcgatatattacgggactcaatcagacatccgagtaaaaagttattgtcgtttgaattggctcagaggttcaacattcaatttcgagcgcctcgatatgttacgggactcaataagacatccgagtaaaaagttattgtcgtttgaattggctcagaggttcaacattcaatttcgagcgcctcgatatgttacgggactcaataagacatccgagtaaaaagtttttgtcgtttgaatttgctcagaggttcaagattcaatttcgagagtctcgatatgttacgggactcaatcagacatccgagtaaaaagttat

SEQ ID NO: 7009 - DNA, 469 bp, Glycine max
  unsure (1)..(469): unsure at all n locations
ngaggatagagacttctcaaactatttatcttctctctcaaagaggctctctaactttctagctntctcactctaagaagtgaattcactctcgtctcggatggttaagaatgaaggctcctacccttatttatactactcctcctccacaatgaatggtggagattacttgtatcctatggtggagattaattctctagaatgctccacacattctaggagtctctacactcttctactcccttccatatccttccatactcttccataaggttccacacatatccagaatattctataggtttccacaaacttccacaagcttctagagagttctacactactctagagttctntaggacgttctagataattctacactnttctagatagctctagagatttctagaacctcttcaattaatgacggatcccaacacaatgatacaaaataagagtgttaattttt

SEQ ID NO: 7010 - DNA, 430 bp, Glycine max
  unsure (1)..(430): unsure at all n locations
agcttcatgatgatgaatttagtagttttgatgatgacaaaaagcccaaaagaatgattcatgaaaagacatcatgaagaatcaagattcaagagaagatgaattcaagattcaagagaagaaatcaagaagcaacaagtcaagacttaacaagggaagtattgaaaaggatttttctaaaaccaaacatagcacaattttgttntacaaaagagttttctcaaatttttctaagttaccagagtatttactctctggtaatcgattaccagtttcctgtaattgattaccaatgataaaatttgatttcaaaaagtctttaactaaatttgcaacgttccaaatgatttttaaatggtgtatttgattacaatatattggtaatcgattacgagtgtatctgaacattgaaattcaaattcaattgtga

SEQ ID NO: 7011 - DNA, 426 bp, Glycine max
agctggaaattgtacaacttaagctctttataaaatcgagtggtcataaattttcacacagatgtccgattcggggaaataatatatcgagacgcacgaaattgaacaacggaagctctcgagaaatttgaatggtcataacatttcactcggatgttcgatccggggacataatttatcgagacgctcgaaattgaacaaccgaagctctcgacaaattagaatggtcgtaacttttcacgcgaatgttcgattcggggacataactcatctagacgctcgaaattgaacaacggaagctctcgagaaatttgaatggtcataagttttcacacggatgtccgattcgggaacataatatatcaagacaatcgaaattgaacaacggaagctctcgagagaatcgaatggtcataactgttcaca

SEQ ID NO: 7012 - DNA, 409 bp, Glycine max
agctcctagtactccaccatatcctgatttaaattattaataattgagaggtgaccacagaataacaaaacaatatcaggtcgaacatatattattaaactaacgtttccaatttctcatatatgaggaggacagaaacaaaaaacaattctgagtcttctgatcactgaattaatagagaaattaacaaactgaacaaacaaaactagcaggttttttcggaaaacttaatttattctggtgtggacggcagacagacttatatttcttggtttcaataggacttctttagcatttttctatctactattatctacaaataatcaagttattaatgaccggacaaaatcaagaaataacctcttgcgtcaatattatagaagtcgttcgaatctcgcattacactact

SEQ ID NO: 7013 - DNA, 466 bp, Glycine max
  unsure (1)..(466): unsure at all n locations
tgcgaagtgggtggaattcctagagcaattcccttatgttatcaaacataaaaagggaaaaggtaatattgtagccgatgctctntctcggcgtcatgcattactttctatgcttgaaacaaaattgattggtcttgaatgtttgaaaagcatgtatgaaaatgatgaaacttttggagaaatttttaaaaattgtgaaaaattttcagaaaatggtttctttagacatgaaggctttcttttcaaagaaaacaaattgtgtgtgcctaaatgttctactagaaanttgcttgtttgtgaagcacatgaggaggtttaatggggcattttggggtccaaaagactctagaaacattacaagaaccattttattggcctcatatgaaaaaggatgtgcagaaatnttgtgaacattgcattgtatgtaaaaaggcaaagtctaaggtaaagcctcatggattgatac

SEQ ID NO: 7014 - DNA, 432 bp, Glycine max
agctttgatttcctttgttccggaaacctttcttttctcatgtgcacccaaacccaatctccgggttcgaagacaaccttctttctccctttgttggcttgtttagcatagcttttatttttcctctcaatttgatctttgactctctcatgaagcttcttcacatagtccgcctttgcttgaccttctttatgcttaaaaacagaaacattaggcataggcaaaagatcaagaggagttagtgggttaaaaccataaacaacttcaaaaggagaacaattagtggtgctatgaacagctctattgtaagcaaattcaacatggggtaaacaagcttcccaagtttttaagttcttcctcaaaactgtcctaagcaaagttcccaaagtcctattaacaacttccgtttgcccatcggtttgtgggtgacaa

SEQ ID NO: 7015 - DNA, 450 bp, Glycine max
  unsure (1)..(450): unsure at all n locations
ntattcaagacanagaaattaaagatattcaagatggatgatcaagacagtttttagagtcttagaaagggtatattaaataggaagggaattccaattgaagtagcaaaaggtttggccaagaattctaagttaaaaagtctttttcaacaaatttactctctggtaatcaattaccagatgatgtaatcgattaccaatggccaaaactgatttacaacagctattaaaatttgaattcaaaatttgcactgtgtaatcgattacacatatatggtagtcgattaccagcagttattgaacattttaattcaaattntaaagcttgtaatcgattacacaaataatgtaatcgattactagagcacatttttagaaaatattctcgacagacacatctttntgtgtggttcttgaatggctatcatangcctatatatatgtgacttg

SEQ ID NO: 7016 - DNA, 474 bp, Glycine max
  unsure (1)..(474): unsure at all n locations
cttgagacgcatgtganaactttggcatcatcaaaacattcagcttgatccttngtctacacatgtcacaaggtggatgatgcttcccacatctcanaactctcttacagggaagttgtgagactccatggtttgcctaggaccattgtgtcagatagagatgctaagttcattagccacttctggaaaaccttatgggctaagctaggaactaaacttcttttctctaccacttgtcatccacaaactgatgggcaaacagagttagtgaataggtctttatccacccttttaaaggctcttctgaaaggcaaccataagtcttgggatgagtatcttcctcatgtagaatttgcctacaataaggggggtcatagaaccaccaagcggtccccttttgaggttgtctatgggttcaatcccctaacactgttagaactcattcccctcccactggacactttatttatacat

SEQ ID NO: 7017 - DNA, 417 bp, Glycine max
  unsure (1)..(417): unsure at all n locations
tcggttgttcaatttcgagcatctcgatatgtgatgttcctgtatctgacctccgtgtcataacttatgaccattttaatttctcgagagcttccgttgttcaatttcgagcgtctcgatatattatgcgcctgaatcggacatccgtgtgaagggttatgaccatttcaatttcacgagagcttccgttgttcaatttcgagcgtctcgatatgtgatgttcctgaatcggacctccgtgtgataacttatgaccattttgaattctcgagagcttccgttgatcaatttcgaacgtctcaatatgtgatgtgcctgaatcggacctncgtgtgataacttatgaccatttagaattctcgagagcttccgttgttcaatattgagcatctcaatatatgatgtgcctgaatcgga

SEQ ID NO: 7018 - DNA, 436 bp, Glycine max
  unsure (1)..(436): unsure at all n locations
agctagatattgaacaacggttgctctctagaaattcaaatgctcataacatttcacacggatgtccgattcagatgcataacgtatctagatgctcaaaattgaaaaacagaagctctcgagaaattcaaatggtcataacttttaacatggatgtctgattccgaagcataacatatcgtgacgctcaaaattgaataagagaagctctcgagaaattcaaattgtcataaattttcacacggatgttcgattcggggataaaatatgttgagatgcttgaaattgagagataaaagctctcgtgaaattccaatggtcataacttttcactcggatttccgattcaagacacttgaaattgaccaacggaagctttntagaaattcgaatggtcgtaacttttcacacggatgtccgattcggcgaaataata

SEQ ID NO: 7019 - DNA, 442 bp, Glycine max
  unsure (1)..(442): unsure at all n locations
agctnggcatattctaacgtatagtatgcaatttacaaagaaaaaaaatacccatattaaaattcactactttgataaaatattatttttcatgaatcatttatttttattctataatcacaattctgaaagatattttaagatgttttttgaattaaatattattaaataaattatttaatctatgtatttgataattagatttagttatatttaggttcagatggaatatgttttaaaataacataaaaaaatttaaaattttatcaaaatcagcgcaaatcaaatataataaaaccatttagtaatataatatttttaaccttaattaagtatccacatgattacatcgatgtaaaagccctgaaaaccaatcactgataactttgaagttagaccagcaccatatgcatgattagtttagaaaacttaggaggaaaga

SEQ ID NO: 7020 - DNA, 446 bp, Glycine max
  unsure (1)..(446): unsure at all n locations
agctnttctttgagcaaagcaaaggcttgctcttgtttttcaccctaggtaaatgccacattcttcttcaccagctcattgagaggtgatgcaattgtagagaaattaggaatgaaccttctatagaagcttgctaacccatggaagctcctaatatctcccacactttttggggtgggccattctttgatggccttgattttctcaaggtccacttggaccccatttctaccaactacaaaacctaagaaaactatattatctacacaaaaggtacacttctctatatttgcatagagggtgtttttcctaaggactgaaagaacttgtctgagatgtcctaagtgatcatctaggctcctactatacactaaaatatcatcaaaataaacaactacaaatctacctatgaaatcccttaagacatgatgcataagcctcataaa

SEQ ID NO: 7021 - DNA, 430 bp, Glycine max
agcttatggtgatttatgattatatattatgacattgtaaaattattttatattgtcaatgcatctacgatcataaactcatccaaaaatgaatcacttcatgttaaattctcacacgacttcatcaaatgaaaatttcatgtctatttctctttttgaaggtatatttacaaaggtctctcatggctctaagaaattttattttttattttggatttattgcctggatacagtgattttattgaggagtgggtcaaaattggcttgcctgcaaaggcaaaggtgaagacacaacatggggatgcaccttctgctgagttgtgctcacactgtgagaaggtatgagacacattagtacaagctacatgctagctaaatagtattttctaatatttttcacaagactcagacttaacttcaacacatcttc

SEQ ID NO: 7022 - DNA, 207 bp, Glycine max
tagcctctcgacatattatgcgctccactcggacatccgcgtgagaagctatgaccatatgaatatctcgagagcttccgacgctgaatttcgagcgtatcgatatattatacgcctggatcggacctccgcgtgagaaggtatgaccatatgaatatcgcgagagcttccgctgtgcattttcgagcgtcgctatatgtgatgcgc

SEQ ID NO: 7023 - DNA, 421 bp, Glycine max
  unsure (1)..(421): unsure at all n locations
agcttgaatcggatatccgtgtgaaatgttatgaccatttgaatttctgaagagcttccgtagttcaatttcgagcttctcgacatattatacgcccgaatcggacattcgtgtgaaaagttatgaccatttgaatatctcgagagcttcctatgtttaatttcgagcgtatcgatatattataagcctgaatcggacattcgtgtgaaaagttcttaccatttgaatttgcgagagttttttatgtttaatttcgagcgtatcgatatattatacgcctgcatcggacatccgtgtgaaaagttatgaccatttgaatttctcaagagcttcggttgttcaatttctagactctcgacatattatgcgcccgaatcggacatccgtgtgaaaagntatgaccatttgaacttctcgagag

SEQ ID NO: 7024 - DNA, 385 bp, Glycine max
gggcgcgaaacatgtagaggaatctaactgccttggctcgtgtctgctgcagttagagatttatagcatgaacaagtatttccattaaacaaagggatgcatggacttgctacaccacttgtggaatacagacttgctgatggaactgaatttgaaatggaagcgataccaatgggggtcaatagtcgggacatctctaacacgtttaggattgcctctccatttgtagttgatgaaactatgcttgaaaaagcgcttggggtaattgataatgatatgtcataatgccgtgttacaaatttttttaatatattacatgtgaatgaataggctcggctctgatgtcatcatgaatgatttttcttaagcaaatcttgaaggaaaa

SEQ ID NO: 7025 - DNA, 463 bp, Glycine max
ctaagcttattaatgatgccttcaagcattgtataatctgtaactccaatctttccatgaagaagccacataagccaatccgcttggtgcaacaacagagcatgtttttggtttgaaccaacatgattccaccacgagacgagtttacacagagtggatgatccggtgcaaaccgtatgatttggaggagcaatagatttcaccgttgccaaagcatcagggcaactctcattgtaaagtaaaggtctccacaacggttcttccgagtcactgcaacaccagattcatattcctacttcagaattcaaatacacgataatcttaatctttaattaacagaaagattaaaatttaaaacaaaaagtcgatccacctatcgacaatgatagtagttgcagaagtcccatcaacagaaatggagacaacgtgtttgcgaatgtgaagtgtgacatcatgaagcata

SEQ ID NO: 7026 - DNA, 431 bp, Glycine max
  unsure (1)..(431): unsure at all n locations
agcttgngaatgtgatcaaggagaaattgttgggtctcctaagtttcccttataaacctatgatatgaaagtttacatttcacttatctaatagctaacttgattatttattttgttgatcctttcagaaaatcgactgtattcacaacaatgcagttatggagttgatgagaggtgttagaaatcagttaactgaactcatatctggtctagctgttcaagacatggccccaatgagtttgggtttatctcacagcttatccagatacaaattgaagtttagtgcagagaaggtgtattttccgttgactttatggttataaggaattgatgttatcattgtactcttattctaagtatattgaccacactgtagattnttattatgttgaggtctatatcctactctgctattcaccaaagaaatactc

SEQ ID NO: 7027 - DNA, 463 bp, Glycine max
  unsure (1)..(463): unsure at all n locations
ctgatggtgtcgagaagaaaatcacatgttgtcatcatcaaaaaggtggagaatgtgaatgtatgtatacatgattntgatgatgtcaaaaaagaatctaacaaggctgcttcaaatgataagcatttgcttcaagaataattcaagattgcttcaacaaacaaagccttgtttcaagattcactaaagaccaagccttgccttaaaacaaagtgatttcaagacatgcaaggctctggtaatcgattaccaggaagtgtaatcgattaccagaagacggtgttgagaaatagctgttgaaaaagggtttgaatttgaattttcaacatgtaatcgattaccatatgtctgtaatcgattaccagcaacgaaactttggaaactcaaattcaaaagtcataaccctgtcaattataactgtgtaatcgattacgcaaacattgtaatcgattactagtggaaa

SEQ ID NO: 7028 - DNA, 426 bp, Glycine max
aaatgttcgacaccgaaacctagtgaaggttatcacttcttgctccagtcttgattataagggagaggaattcaaggcccttgttatgcaactcatgcccaatggtaacttggacgtgagtctataccccgaagatgttgagtcaggatcctctctaccttgttgcaaagattgaacattttcattgatgttgcctctgctatggactacttgcaccatgactgtaatccacccgtagtgcattgtgatatgaaacctgtcaatgtccttctagatgaaaatatggtagcccatgttgcatattttggattggaaggtttctatctcaaagtacatctgagatgcagagtagcactctgggactgaaaggatcaatatgctatattgcccctggtacacattaatgtttctcttcctattaatact

SEQ ID NO: 7029 - DNA, 448 bp, Glycine max
  unsure (1)..(448): unsure at all n locations
cttgatctaccaccatcgctgccaccatcatctaagttttctattatttttaatattactagtactntgttttctagtcgtgtatttggctatattatgacattttggataatttagtatttctttatttgcatggtttgattgaacaattatgaattatgttatatgactatgtggtttttatatttgatctattcatgtttcttgcttcatgattggtttatattcttcaatgtatgtcttgtgaatgattaatagtatatgattgtcatatacttgttacgcacttgggctctttgttgatgccaaagggggagagaaataggaattaaatcaagaactcacataagtaattaacttaatttcaagtgaagcataaattaaaaaacacagggggagaatggaaaattaagtgagtgatcgactacganaaagtgtgtgtatgtgt

SEQ ID NO: 7030 - DNA, 433 bp, Glycine max
agcttcaagaataatggcctcagcaaacttcttattcccagaaggaaattcaataaataggcctccaatttttaatggaaagggttaccactactggaaaacccaaatgcaaattttcattgaggcaatagacttaaacatttgggaagccatagaagttggaccttatgtacccaccatggtggctggaaatgcaacaatagagaaacctagagaagagtggactgaagatgaaagaagattagtgcagtacaatttaaaggctaaaaacatcattacttctaccctaggaatggatgaatattttagggtttcaaattgtaagagtgctaaggatatgtgggacactctacaagttacacatgagggaacaactgatgtcaaacgatctaggataaatactttaactcatgagtatgaattatttaggatg

SEQ ID NO: 7031 - DNA, 426 bp, Glycine max
  unsure (1)..(426): unsure at all n locations
tatgctgcanatatntacaatagacctcctcaacctcagcagcataatcaaccacagcagaacaattatgacctctccagcaacagatataaccctagatggaggaatcaccctaacctcagattgtccagccctcagcaacaacaacaacaacctgctccttccttccaaaatgttgctggcccaagcagaccatacattcctccaccaatccaacaacagcaacaaccccagatacagccaacagttgaggcccctccacaaccttcccttgaagaacttgtgaggcaaatgactatgcagaacatgcagtttcagcaagagaccagagcctccattcagagcttaaccaattagatgggacaatnggctacacaattgaatcaacaacagtcccagaaatttgacaagctaccttctcaagct

SEQ ID NO: 7032 - DNA, 393 bp, Glycine max
  unsure (1)..(393): unsure at all n locations
gcttgaagatccaaggatcaatgttactgctagcgtgtggcaaattgtaagcanaagaccaaganagcacgtcatgcgattccccaggtatgtcgagtcccgtggcagcagagaaccctatcctcacccactcgggaagagaagtcttcaaatcgaccacatcggagaggatattgctggttctctgtgaagggtagaccacagaagcaaccaagaagctggtggaggcatcataggtaatgagaaccttggctactttattgttggccaaatcccaagacgtcgttttgatggatctgatagaattgacgttaattccgatgtgtggatttggtggatcccaagagttccggaaagtgtcaaactcaacagcgacgactngatcaccagact

SEQ ID NO: 7033 - DNA, 472 bp, Glycine max
  unsure (1)..(472): unsure at all n locations
tgtaccannagttgaaaagtaactaagcctatgtttgcatgtacgaatgatagctcctaattctgtatgaactatagctgtacatacccctctaatatcatatataacagcttcacaatctaattcaataataatccagactcaagcttttaattttttttagttaaagtcagattatatatattaaaaaaaagcttattaagttttatagactaacctatttagtaataattaatatttttttaataaaaatattgttttaatatgaaatataatattataattattttagtaatttggatatttgaatcattttaatgtttgaaataagttaattaatgtaaacatagatgaataatagaaataaggattattttcttttgttgggacataaaagaatttgatatcctatcacatgtaatgggttatagataaatttgatcaaatcttattatcttaaaatggtttatta

SEQ ID NO: 7034 - DNA, 423 bp, Glycine max
tcaacctagaggagacgaaccattccaagtgttggagaagatcaacgacaatgcctacaagattgacttgcctagtgagtataatgtaagtgccactttcaatgtgtctgatctatctctttttgatgcagatggaggagccttggatttgaggacaaatccttttcaaggagggagtgatgaggacataaccaagggcaaggaccatgaagcacttgaaggtcccatgaccagaggcagacttaaacaagcccaacacatcatagagacaaggctggtcatttgtatagctgtcattgatgatgattgaaggcccaagtggagaaagatgaaggcccagaggcagatgcactaccaagactactaattgttgctgaaggcccaaactaacttgaaggcccaagttaaataagtttttagtta

SEQ ID NO: 7035 - DNA, 427 bp, Glycine max
  unsure (1)..(427): unsure at all n locations
gcctctcgttagtggtaccttaagtttcatgggataatttcttcatttggttgtgatgaaaaccccatggatcaatgcatatacctcaaggtcaatgggagtaaaatatgttttcttgttttatatgtagatgatattttacttgcagccaatgatcgaggtttgctacatgaggtgaaacaatttctctctaagaattttgatatgaaggatatgggtgatgcatcttatgtcatcggcattaagattcatagagatagacctcggggtattttaggtttatcataggaaacctatattaacaaaattttagagagatttcaaatgaaagattgttcactaagtgtcgctccccttgtgaagggtgatatgtttaattngaaacaatgcccatagaatgactatgagagggaaaaaatgaataaca

SEQ ID NO: 7036 - DNA, 448 bp, Glycine max
  unsure (1)..(448): unsure at all n locations
agctngttntaaaccatatatagatttattaagcttgcaaaccaaatgctcaccactatcagaggagaaacctttaggttgtttcatataaacctcctcctctaaatcaccattaagaaaagttgttttaacatcaatttgttgcaactcaaggtcaaaatgagcaactaatgccaagattatacgaagagaatctttcttagatactggagaaaaagtctctttgtaatctattccttccttttgagtaaatcctttagcaacaagtcttgccttgtatctctcgatgttgcctaatgaatcccttttggtcttaaaggcccatttatatccaatgacctttgccccattaggcaactctacaaggttccaaactttgttactctgcatagaattcatctcatccttcatggcatcataccataaatntgactctttacaactcatg

SEQ ID NO: 7037 - DNA, 434 bp, Glycine max
  unsure (1)..(434): unsure at all n locations
cttggagtntccaagtgccaattcgtcttcttctntagtccagtcttcttctggcttcaattcatcagtgggctttccttctgtgtccagcatcttgggatgttcccagcctttgatgacagctttccaggttctgctatccagtgatttgagaaaggccaccatccttgctttccagtattcatagttggtcccatccagaattggtggtctgttcactggtcctccttctttctccatgttcatcagaatttatctccctagatctcactcagtgatttcgagtgcctgctctgataccaattgaaattctgatactgtggacagatgtcgtacaggatgtcacgacatcatgcttcagaacatgctgattatatttgagcgtatgaacaggttaaacaagtaaataacacaagagaattgtatacccagtc

SEQ ID NO: 7038 - DNA, 463 bp, Glycine max
  unsure (1)..(463): unsure at all n locations
ngctttccattgtgcgtccatagtattggctttgcagtttcatcagtatgcatattgactatgtttcaacctatctttgtaattttatagatttgctgtgttttcatttgtcttatcagacctcaattttcgtcatgttttttgttacaaattggctcaattctaccttgtcttgtatcaaaatcgacttcattntaactcatccaaatatgtagnttggtgttatgtttgattctatatgtaatttgtctccgcctcttattcacaaatatagttcggcctcatctttaagccagatatgatgttgacttcatgctttccattatgtgttttaattttagtttgtttctcttgatatgtttaattttaacaagctataccagagtgatagaatatcacaagtgtgtacatcataatactatctaatattattatatcttattatatatagcgtttaagtatc

SEQ ID NO: 7039 - DNA, 441 bp, Glycine max
  unsure (1)..(441): unsure at all n locations
ntanacggtatataattatttatgttttagtgtttntatgccaaatgttattgactaatgaggggttagggttacttcactctgtangatttatggttacgtgactaattaggatttagttttacttgaccatctatggtttatggttactngattaatggcgaatttatgctaccttactaagtagggattatgattgcttaactaattanggtttaaggttagcttactagtcaaggttcactaattgtggtttagtgttacataacaaattacgatggtttcactaattagtgccattaaaggtttaacatgataatatcaattggtgattaatttataatacacatacaacatacatgataataattaaaaatcttatcaaataacattaaataataaacattngttaatgatattgcatacataattcatattaaa

SEQ ID NO: 7040 - DNA, 316 bp, Glycine max
  unsure (1)..(316): unsure at all n locations
atcggaacactcgggtgcttacacaaggtgcaaagactccaactttaaacacttggaaacccccaaaagncccacatcgctaacctgaaccttctctaaatgaatctcaaccaacccggaattcaactttccaacactttccagagtcacatcccaatcccctgaacaccgaatcaacttgagcgtttcaagcttcttcgagttaattattaacggcgcgaaactgtggcctgtaacgagctccttgaggcaaatcgatttcaacgaagaagaggaagtaacggaaagaggcaccgattccgcgccgccaccgtta

SEQ ID NO: 7041 - DNA, 431 bp, Glycine max
  unsure (1)..(431): unsure at all n locations
tgtaagacaagaaagtgcaactgagatatgatatgccctaccactgtttggttatcctgaagatggcacatttgtggagcaagatttcgttattaaaggacaattatgtcttgccatacaatagatttgacccagcaggcctgtttgaaattatttaacttactgcaatgaatcctagcttggtaaataattcttcaccgactcatcccagatggagaaaagtagcttatggtggtatgcaacctggttatgatgacaatcatacagatgaatctttccttgaaggaatggtcatgaatgccagtgttgtaaaacgggacatgctaaaggtgatgctgganctcggttccatttctgaaatattatgtattggtgctcttgatgcttggtctggacctgtacacttgcatcaactattgatgaaaattctc

SEQ ID NO: 7042 - DNA, 381 bp, Glycine max
agctataactgtctggtaatctatgaacatatgatgactggatctccagtgggcagatacgtgatagaacagctataaaaatttgaattcgaaattttaaaagctgtaatcgattacacaattgtggtaatcgattaccagcagttagtaaacgttttaattcaaattttaaaagctgtaatcgattacacaattgctgtaatcgattaccagacaggaatttcagaaaaataatttcaagagtcacaacttttcaaaggctttactcatgaccaccaatggtctatatatatgtgacttaaacatgaaattgctcagagattttcagaacaacaaagtgtttatcctctcaaaaagcaatttcattttatcctcttaaag

SEQ ID NO: 7043 - DNA, 467 bp, Glycine max
  unsure (1)..(467): unsure at all n locations
tccccttattcacttccctacttaaaccccacatgtttctttactatttcatttaaggaagagctagtgtgctaaagtctttgataaagcacctatagaaactagctaacacatggaaaatcctcgcctcacccacattcttaggggtaggccaatctctaaatagctttcactttatcctcatcgacttgcatgcccttagagctcacaacanattctaggaacactacttgattagtgcaaaatgtgcattagccttatttgcattcaagctctctcttttaagcacttccaaaacactcctaatatggtccaagtggtcatcaaatgtcaaactatagatcgagatatcaccaaagtacacaaccacaaatttaataatgaagtgtttcaaaatatgggtcattaatctcatgaaagtggttggtgcattggttacgccaaaaggcatgaccaaccactcatat

SEQ ID NO: 7044 - DNA, 459 bp, Glycine max
  unsure (1)..(459): unsure at all n locations
cttctatttaaatntcgagcatctcgatatattacgggactcaatttcacatccgagtaaaaggttattgtcgtttgaatntgctcagagcttcannatttcaattgcagtgtctcaatatgttacgggactcaatcggacatccgagtaagatgttattgtcgtttggaattgctcaaagtttcttttttaaatttcgagcgtctcgatatattatgggactcaattggacatcggagtaaaaagttattgtcgtttgaatttgcttagagcttctattttaaattctgagcgtttcgatatattacaggactcaataggacatctgagaaaaatgttaatgccgtttgaatntgctcggagcttctatttttcaatttgagtgtcccgatattntaaaggactcaatcggacatccgagtaaaatggtattggtcgtagaagttgctcagagcttct

SEQ ID NO: 7045 - DNA, 438 bp, Glycine max
agcttgttgagtatgcagtgaaaaatggccctgactttgaagctatgatatgtgaaaaacaacgggataatccttcctatagcttcctctttggtggggaaggtcatggttactaccgttataagctttggttatcaactcgtcccccgggtggtccattcaacccgtcttttccatcatcttccatgcccatgatgcttcctccaaatccaatgatgaatctgtctcctgtaaatgtttctccgatgaaccctgcaggaattggttcttcaccttcgatgctaggtccacctcctttccaacagttctatgatcaacaacaccaccatcaacatcctcagtcttttggacttcctggtcggcctgagtatgatccgtcatccaagtctttcaaagggatctctgggccacttccatctgatgttgcaatggagctca

SEQ ID NO: 7046 - DNA, 358 bp, Glycine max
  unsure (1)..(358): unsure at all n locations
gcctcacgtcagtggtaccttaagtntcatgggataatntcttcattnggttntgatgaanaccacatggatcaatgcatataccacaaggtcagtgggagtaaaatatgttntcttgttntatatgtagatgatattntacttgcaaccaatgatcaaggtttgctacatgaggtgaaacaatttctctctaagaatntggacatgaaggatatgggtgatgcatcttatgtcatcggcattaagattcatagagatagacctcgaggtattttaggtctatcataggagacctatattaacaaaantttattagtgatttggatgaaaattgttcaccaagtgttgctcccatcgt

SEQ ID NO: 7047 - DNA, 227 bp, Glycine max
tagctttagatttggatccataggactatcaacaggtctacaattctgcatacctgtctcctccaaaatatcaagagcatacttcctctgtgagatcacgacatcatcttctgattgagcaacctcaataccaagaaaatacttcagatatcccaaatctttggtctggaagtgactaaacaagtgttctttaagttgggcaatcttagtagtatcatttcctgtta

SEQ ID NO: 7048 - DNA, 432 bp, Glycine max
  unsure (1)..(432): unsure at all n locations
ggtatgtatataacattgtatagggttatgggtgatgagaggtgcacagtgcctgagtgggtagcatgaacatgatgaccattatggagcttcactgtaactgggttaatgcgttcatatgaatggagattattcatggaacaagatacgtgatctgtagctcctgaatctagtatccaggagctagtaaaaggttgagacatacctgcgttggaacggttatcaatggtgcaggatgagaatgacgcaactcgtttggtttgctccgatgccgcgtttacggccgatggccgctggattaaagcaagtanggccttgtacttctcacgcgagaatcgcacgagatctgngactcatgatgctgagtttgatcatncagcggtttattatccaccgtcatcacgtcatttactgtaggtcttcttccattat

SEQ ID NO: 7049 - DNA, 449 bp, Glycine max
  unsure (1)..(449): unsure at all n locations
gcagccattgagagagctcgagtgccactgtcactagacaccatataattcaataatggcccatataagcacacaagaatatactgaacatttggcagactttagctagcatcggatataacatggtttgagcttctcttccctaattaaaaattgaagtttctacatggatatacaacatattattaattacccggatagagaagatgataaaagagagaaagatgtacatgtgatgataagtaatatatatatgatttgtttcttgctaccataagtatgatatcatatgataaaatgaacaggtcaatgaaaagacataagagtatcattgtgagtgttacattatgcatatatgtccaacaattataactctanacttttagacagctctattgtttgtatagatatatcatgataagacactagctactttataagaactatat

SEQ ID NO: 7050 - DNA, 229 bp, Glycine max
agcttgccgccacggagttttccgactatgctcttgtgtggtggaacaagctacaaaaggagagagcaagaaatgaagagccaatggttgatacatggacagagatgaaaaagatcatgaggaagcggtatgtgccggctagttactcaagggacttgaaatttaagctccaaaaactaacccaaggcaacaagggggttgaggagtatttcaaggaaatggatgtgct

SEQ ID NO: 7051 - DNA, 504 bp, Glycine max
  unsure (1)..(504): unsure at all n locations
gctgtcacctctgtntctctacctntcatcacanaccctggtggttgagtgacanaaacttcttcttctagtgagccattaagaaatgcagaatttacatccatttggtgtacttcccagcaattgaagctagccattgctattacaagtttcactgtttccaacctagcaacaggggcaaatacttcatcataaaccagaccttgcttttgcaaaaatcccttngcaaccagtctggctttgaactntgttacttctcctctaggattcaacttagttntgtagacccattntactgctatggctttctttcctattagtagctttgtgagactccatgtcttgtttctctcaatagacctcaactcttcttccattgcttcaacccaatgtgagtgcttcanagcttcttccacgccaataggttccatctcagcaagtaaggccatatggacaaagtcaccatcaactgtaatcgaggaatctgggaatatctcatagtca

SEQ ID NO: 7052 - DNA, 359 bp, Glycine max
  unsure (1)..(359): unsure at all n locations
ttctatactatctccgatccgaccagacacatgtaagaattgttgctntagattatcagcttctttctgttatgacaatgtaatattgttttatttcttatttacaaagggtattgtggttcaaagatctgacttaactgggcttataatgcggcgaaatgaactagcaagtgatcttcttaaggcattaactntgcaacaactgcctccaatgttacaggtatgggcttttccataatttatataatgtatttttaacaacttcattggattgccattacgagccttcattntctgattgtagagtcctagcatttgcaaaggttgtcgccatcttaatgtgtgtagcatttatcata

SEQ ID NO: 7053 - DNA, 352 bp, Glycine max
  unsure (1)..(352): unsure at all n locations
gcttagctaaacacacctctctaatagctaagctcacctccttgagatgagaagctagagcttatctacacacccnctataatagctaactcatccccatgacaaaatacatgaaaataaaaaaaattctctactacaaagactactcagaatgtctcgaaatacaaggctaanaccttatactactagaatgaccaaaatacaacgcccaaacgaagcagaaacctattctaatatttacaaagataagcgggctcatacttagcccatgggctcgaaatctatcataaggctcatgagaaccctagggccttcccttggatctctggtccaatctacttggattcttcta

SEQ ID NO: 7054 - DNA, 227 bp, Glycine max
ttgcttggtatctcagcaaaagttcgtttcatcagttagatttcttgttagttagttagaattagttctcgagtgtaactgattaaaaactaccagcgctttctctttcttctgctactctgcaaagatataaatacgtaataaatgcatcagtaaaaaggcatgcagtatttggtcactttgcacatgatttacgcttatctttctctctctatggcacaatacct

SEQ ID NO: 7055 - DNA, 397 bp, Glycine max
  unsure (1)..(397): unsure at all n locations
atgcattctatcagaagcatngcattgcattcaaatatgtcttntatgcgttcaacagcatccaaaggatagacctacaatgtcaactgttgttgtgatgttgattagtgagagtgccattccccaacctaaggaacccgctttccttatggacaataacgttntttgtgatgcaggttcttcttccatgcatcagttttcaaccaattgactaagtactaccatgttagagcctcagtagtggatcatttacctgcattggatcttttaagatgggtaaaacttcagcctcggtgagtcggtttgtattcactatactgtatacatatttcttcacatgtgttggttaagcctagtgcatttcctttaccattgcattgagcctattcaaattcac

SEQ ID NO: 7056 - DNA, 390 bp, Glycine max
  unsure (1)..(390): unsure at all n locations
tagaagatctatctatgggctaaaacaagcatgccgccaatggtatatatagtttcataatgtggtctccanatatggattggaggaaaatgttgtaagccaatgcatgtatcttatagtgtgtgggagtaagtatattttcttagtcctatatgtatatgatattatacttgcaagtagtgacttgcgtcttctgcatgataccaaaaatttcctctcacaaaactttgatatgaacgatatgggtgaagccttctatgtcattagaatagacattcatagagatagatctctaagaacatcgagattatctcaaaaggcttacatagaacaagttgtgataagatataatatgcacaattgtcatcaattgctacaactatagttaaa

SEQ ID NO: 7057 - DNA, 439 bp, Glycine max
  unsure (1)..(439): unsure at all n locations
gctggaactacttcacatggacttgatggngcctatgctagttgaaagccttggaggaaagaggtatgcctatgttgttgtggatgatttctccagatntacctgngtcaactntatcagagagaaatcagacacctttgaagtattcaaggagttgagtctaagacttcaaagagaaaaagactgtgtcatcaagagaatcangagtgaccatggcagagagtttgaaaacagcaagtttactgaattctgcacatctgaaggcatcactcatgagttctctgcagccattacaccataacaaaatggcatagttgaaaggaanaacaggactntgcaagaagctgctagggtcatgcttcatgccanagaacttccctataatctctgggctgaagccatgaacacagcatgctacatccacaacagagtcacactt

SEQ ID NO: 7058 - DNA, 361 bp, Glycine max
  unsure (1)..(361): unsure at all n locations
gttcttcctcanaactgtcctaagcaaagttcccttattcctattaacaacttccgtttgcccatcggtttgtgggtgacaagtggttgaaaataacaatntagtgcccaacttgctccacaaagtcctccaaaaatggcttaagaacttagagtccctatcactaacaatgctccttggcaaaccatggagtctcacaatctcctttgaaaacanatcagccacatgggaagcatcatcaactnttttacatggaataaaatgagccattttagaaaacctatcaacaaccacaaaaatggaatctctaccattgctttgttttggcagccccaaaacanaatccatggataaatcaatc

SEQ ID NO: 7059 - DNA, 232 bp, Glycine max
agcttttgttttcaattacgagcgtctccatatattacgggcctcaatccgacatcggagtaaaaagttattgtcgttagaatttgctcagagcttctgttctgaattttgagagtctcgatatactacggaacacaatcggacatctcagtaaaaagttattgtcgtttgaatttgctcagagcttctgttcttaattacgagagtctcgatatattacgggattcattcg

SEQ ID NO: 7060 - DNA, 423 bp, Glycine max
  unsure (1)..(423): unsure at all n locations
atcctgtctggatagaggcaatgaatgcanatattaatgctttatatcttaatgatactnngcgtttgactgatctgcctcaacataagaatgttgttaattggaaatgggtgtataagataaagaacaaatcatatgggtcagtggaaatacataaggcaaggttagtggcctacgactacacttaagtggaagggcaagattacttacacatcctttctacagtggccaagctaaccacaataagagttttattggccttagtctgtatcgatcagtggtatcttaagtgattagatgctaatgatgttttcttacatggtgatttgaatgaagaggtgtacattatgcttcctcaaggtatgtaggtagctaagcctaggcaagtctacaagctgcagaggtccctatatggactgaaac

SEQ ID NO: 7061 - DNA, 226 bp, Glycine max
tttcttattttcgacagggtgagctttctcaattttaaaccaaccatctactatgttgttgtactcagcacgtttaacagcgggtccttcaggtaaaccatccacaataccccaatcaccagtaaaagggatacaagacggcataactggaaaaaaaccgaacgaaatgctcaaaggatggccttcggcgataacaacgactcgtaatggggatgaaataattgtt

SEQ ID NO: 7062 - DNA, 222 bp, Glycine max
agcttaagctccttcaactgcacaaggctcttaatatttgaagagtatccttgtggaaccttcacccgacaaagacactgacaaaaacttatcttctcctttttggacaaagtatggcaaactgggggcaagtaaattttcttcccatcagaccttggatgcaactgtgatcgtatgcccatatcagctagatcttgacgggtattcaagccatccttcgtc

SEQ ID NO: 7063 - DNA, 290 bp, Glycine max
  unsure (1)..(290): unsure at all n locations
cgatgctctntctcggcgtcatgcattactttctatgcttgaaacaaaattgattggtcttgaatgttngaaaagcatgtatganaatgatgaaactgttggagaaacttttaaaaatcgtgaaaaattntcagaacatggtttctttagacatgaaagcttttcttttaaagaaaacaaattgtgtgtgcctaaatgttctactagaaatttgcttgtttgtgaagcacatgaaggaggtttaatggnngcatttggggtccaaaagactctataaacattacaagaac

SEQ ID NO: 7064 - DNA, 241 bp, Glycine max
tgaaggcatgcaagcttggacttcctgtgttttgggaccctctccttcctcaggtgtacccaaacccaatcacctggttcaagcacgactttctttctgcttttgttggcttgccttgcatagctcgcatttttcttttcaatttgaaccttcacttgctcatgcaacttcttcacatactcagctttagcctgtgcatccttatgcttaaacatagcaatgttaggcataggcaacaaat

SEQ ID NO: 7065 - DNA, 435 bp, Glycine max
  unsure (1)..(435): unsure at all n locations
gcctcccatggaagcacctgatctgagtgattctgaagcaaccaaggttnttcanaagtccctagatgagtaccttactgctaagtgcattatcttggcatcaatgagttcaaaactccaaaggtaacatcaagacatggacccatatgagatcgtcaaacatcttaagaagatgcatggtggtcaaagcaggacgaactagatttagttatctaagaccctgtttagatcctcacttgctacaaatganaaggttggaccccatgttcttaagatgattgatctcatagaacaacttgagaaagttgggtgcactcttgggaaagagctntctcaagaattgattctacaatcactttctgattcattntcataatttattgtgaatntcaacatgaataagatgagttgtgactngcatgagatgcttaatct

SEQ ID NO: 7066 - DNA, 227 bp, Glycine max
  unsure (1)..(227): unsure at all n locations
tagcttttatatattaangaataaaattatcgatgcatgtgccatgttatttttgccctctcacacgcagttctgaacctccttagggttttgactaatgtccactttgttcttctttttaaattcctatacaaaatgggtcaccattctgttttcaaagtcatgtccaccttaagtgagtgtttccagcaatagccttatcttggaatagcttatccttgatcgtt

SEQ ID NO: 7067 - DNA, 262 bp, Glycine max
  unsure (1)..(262): unsure at all n locations
ataacatttaacacacaagtctgattctggcgcatcacatatagagaagctcagaactgaataacgacagctatcgatatattcaacggtcataactattaactcgaaagtctgagntaggcgcatcacatatagagactctcaaaatggaacaacaaaagctctcgagaaataagaatagtcgtatcttntaactcggacgtccaattcatgcgcataatacatcgagacgctcgaaattgaacaacgaaagctctggaga

SEQ ID NO: 7068 - DNA, 225 bp, Glycine max
ttgcttttatctataaatgaataaaataatctatgcatgtgccatgtcatctttgccctctgacacacacttttgaacctccttagggttttgactaatgtccactttgatcttctttttaaattcctatacaaaatgggtcaccattctgttttcaaagtcatgtccaccttaaatgagtgtttccagcaatagccttatcttggaatagcttatccttgatcg

SEQ ID NO: 7069 - DNA, 384 bp, Glycine max
  unsure (1)..(384): unsure at all n locations
cactatntagccacctttctagtgacaaactaaatcactacttcatctattnttctcaccacctgtaatgcaagtttgaataaaatgaaattgaataccatgaattcaatgaaaatttaaatacaaaggtataaaaatatttaaacatgaaagttaatgtaataaggcataactatntcatttaattgtgactggctcctgccaaanacctaagcaatggaacatcttatctaaaggaaaaaataaaatcatggatgttttgctcagacaatcaaagcatatttcgaaggatcttcaatcaactntgttgtgtactaccttagcataccttaatcttaagtttcatcccgttataatacaatctctgtacctattgatgcaatc

SEQ ID NO: 7070 - DNA, 388 bp, Glycine max
  unsure (1)..(388): unsure at all n locations
tatcttccttgggtataactatatctctattggctaccgngtctacaacttgcaaactaaganactcgtcatcagtcgagatgttgaagttgatgagtacacttcttggaattgggatgaagaanaagtggagaagaacattcttatactcgcccaactacctcaagaagaagctgaggaagaagatccaggtgaaccaccttcatctccaccacaacaacaagatcatgaactatcatcatcagagtctactccaagacgagtaagatctttggtggacatatatgaaacctgtaacttggccatacttgaacctggaagctntgaagaagcgtcaaagcaggaagtatgggtcaaggcaatggaagaagagatacagatgatcgag

SEQ ID NO: 7071 - DNA, 436 bp, Glycine max
  unsure (1)..(436): unsure at all n locations
cagcttcatcagccttgaaacaaaggtaaaagaaactatggttgaaactatccaaataaacactaaaagaggtgtgaaagataaggtaaaaaaactaattggtaaaatgcaagctatctangcggttntaccttatctactagaatggccaaaatacaaggcctagacgaaggaaaaacctattctaatatttacaaagataagcgagctcatacttagcccatgggctcgaaatctaccctaaggctcatgagaaccctagggcctttccttggatctctagcccaatctactnggagtcttctagccaatgcccttgcggngtaggattgcatcattccctccaccttggaaaggaattgacctcaaatcccgaggttcttcatactctgngctccttccctcaacacctgtaaaaagaacaacaacacatgta

SEQ ID NO: 7072 - DNA, 431 bp, Glycine max
  unsure (1)..(431): unsure at all n locations
gcttagttactacttaagtagtgcacgatctgcttctagaggaaaacactttgcctattagttactatcangccaagaagatactgtgcccgatgggtatggagtatcagaagattcatgcttgccctaatgattgcatacaatacatgcatgaatttaaagaaatgtccaaatgccttaagtgtggngtatcacggtagaaagtgaaggatgatgaggactgcagttctaatgaaaactcatagaacggccctccagagaaggtgttctggtatcttccaatcattccaaggtgtaagtgtctttntgctaatgcagatgatgcanaagaccttacctgacatgcaaatgggagaaactctgatggaatggtccatcatccgactgactgctcccagtggaagaagatngatcgttngtatctggatttc

SEQ ID NO: 7073 - DNA, 396 bp, Glycine max
  unsure (1)..(396): unsure at all n locations
aagatgagcaataagagaggtgatttcaaaagaagaagagttggtgaagattatatcatcaacatacaccaacacataggttntagaggtaggtgtaaatcacatgaaaagagaagtatcactcttggctgaattaaatcccaaggacctcatagtcaaactgagtntgtgaaaccaagacctgnaggcctgtttcaagccataaagagctttgagcagtttgcatactttgtgtttgtcggatgaaacanagcttggtggttgagtcatatatacagtttcttgaaggtctccatgcanaaaggcattgttgatatccacttgatgaataggccaatgtngagaaaccacaaaggacagaaacagttctaatcgtgctggcttaatcactggact

SEQ ID NO: 7074 - DNA, 233 bp, Glycine max
agcttgatagcatacatcaacagtcactttctcaggcagcaatcgatcgtttctgtcacccaatcccaagtttccatatcggccccagccccatccatacaaattcccatctttagtgattgctacactatgttcagcaccagcagcaaccattttgataggtatttcctgcaaaaatacaaagttcatgtctccaagtagttaagggaataataatctgtttgatacatata

SEQ ID NO: 7075 - DNA, 435 bp, Glycine max
  unsure (1)..(435): unsure at all n locations
ggtgtacccttgatcatagttgtctatagagacctttgttntacctctaggttntgggagagtttacaagaagccatatagactaaagtggaacttagttcatcctatcaccctcaaatagatagttaaaccgagagaactatctaatccttagaagaccttcttagagcttgtgcgatggaacanaaaggtagttggaacgagtgtntagcccttgtagagtttacctataataataatttccatgccagtacagggatggcaccatttgaagccctgtttgggcagaagtgtaaaacactctttgtgttgtatgagatagatgaacctcttctgttaggtctcagcgtgttgtgaaagcacactaagcaagtggaaaccattagaganaagatcagggtggcatangatacgccananagttactatgacaag

SEQ ID NO: 7076 - DNA, 320 bp, Glycine max
  unsure (1)..(320): unsure at all n locations
gaattacctgaatacacatntcaatattcatcagagtaaatcttttaatgcatcaacaatgttatgcagaacttcaattccttattgtatctagtgtgacatgtggtgtacctcggcctcagataaaggcagcatgtagtcatcctctggtacttcttcaacaggcaaacgataaagccactaaaaccaagaatcacatgattaaaattgtgaaagccatactgtgcacataattcattaacgttattttagtagaatacaaccttctgttcaaaaaatactacaggaattggatctcgtatgcaagatagcaataaccc

SEQ ID NO: 7077 - DNA, 227 bp, Glycine max
ttgcttccattagttgaagaggcagttgacaacatctccggtgttaattttgcccgaccttaagaggccatttgaagtgtattgcgatgcaagcgggcaaggcttggggtgtgtgttaatgcaagagggaagagtagtggcttatgcttcacgccaattgcatcctcatgaagttaactatccgacccatgatttggaactggcagctgtggtctttgccttaaaga

SEQ ID NO: 7078 - DNA, 406 bp, Glycine max
gtcagcatcagaagtatagtgctacctcacctgtatgattgctgcaacctcttcctattccggaacaggtctgggaggatgtatcagttgattctatcacagggttgccttgttcgagaggctatgaagctattctggttgttgtggacaggctgaccaaatatagccattttgttgcattgaaacacccttatactgccaagggaattgttgagatcttcgtaaaggaagtagtgaggctacatggagttccaaaatctctcgtgagtgatagagatcctttatttatgagattgttttggaaggaattctttaagttacaggggacaatgctcaagatgagtacaacttaccttccgcagacggatggacagaccatagtcacaaataggtgtcttgaaaccta

SEQ ID NO: 7079 - DNA, 496 bp, Glycine max
  unsure (1)..(496): unsure at all n locations
tatcctgatgagggtgttccatatgttctcaagactgtactaatacatttgctgcccaagtttcatggtcttgcatgtgaagatcctcataagcatcttaaggagttccatattgtttgttccaccatgnaatcccctgatgtccaagaagatcatatctttctaaaggcttttccttattctctggagggagtggcaaaaaattggctctactaccttgctcgcangtcccatttcagctgggatgaccttaagagggtgttcttggagaaattcttccctgcatctaggaccactgccatcagaaaagacatttcangcatcangcaacttagtggagagagcttgtatgagtactgngaaagattcaaaaatgtgtgcaacttcctcaccccagattctgacaactcttcttaatattttatganggactacaacatgagaggagatgattgatctgcagtggtggatttgatgagagatactttcactccac

SEQ ID NO: 7080 - DNA, 226 bp, Glycine max
agcttgtagggttaaagtctcacgattgtcacgtgctcatgcaacaattgttagccgtggctatacgagacatcatgccaaacaaattcaggttagcaataactcgcatgtgctttttcttccatgctatatgtagcaaagtcattgatccagtcaagtttgatgagttggaaaatgaggccgcaattattctgtgccagttagagatgtattttccccctgcttt

SEQ ID NO: 7081 - DNA, 335 bp, Glycine max
  unsure (1)..(335): unsure at all n locations
accgagttngagctngtagcgaatgttgctagaaatngcaatntatgggcaagcctataatataatatactgcaagcagggaattttgcttttttgtctagtttgcttcaactcgattntaggtgtggtgcattttccgtttgaactatacatatcgcanataaattgaccaagactcattattgtaaaggttntttcacaataattatggtggagaaaatgccaattcanatagaatgtccatgattntgactatngctaacaagtttgacagggaatcaagtcctgttattgtaatgaaatgaacttgcagaaatttgaacctctcaacagat

SEQ ID NO: 7082 - DNA, 266 bp, Glycine max
  unsure (1)..(266): unsure at all n locations
acttcttcaatgtctatcactacgaaatcagctggaaagatcaaatgtttaaccctaaccaaaacgtcttcgaccactccatatagtcttgtgatggagcgatcagccaactggagggtcatacgtgtgggcattatctctatctctcncagtcgccagcacatggagagaggcattaaatagatactacgctcccagtcaatgagagctntacccacaacaacctcgccaatggaacacggtatagtgacactctcaggatcttt

SEQ ID NO: 7083 - DNA, 431 bp, Glycine max
  unsure (1)..(431): unsure at all n locations
tgtgaagaagatgtgggatcttctggatgatgaggaactcttcattattggcatacatggaatgtggggagttggaaaaacattcatggcagctcatttcacgaatgagattataagataggcgactntcaaggatgtcttctgtgtcactgtttcccatgatctcaccatattcaaattgcaacatcacattgcagaaacaatgcaggttaagctctacggacatgagatgaccagagcaacaattntgacgtcagagatggagaacagacagaaaacactgcttatnttggatgatgtctgggaatatattgatctgcataatgtggggagtcctcttacagtgaatggcattaaattgatcatcacaactcgcttgtaacatgtgtggctacagatggattgcctaccacataatacaataacaatat

SEQ ID NO: 7084 - DNA, 160 bp, Glycine max
  unsure (1)..(160): unsure at all n locations
ctcgagagtttccgacgtctaattncgagcgtctcgatatattatcagcctgaataggacctccgtgcgaatagttatgaccatatgaatctctcgagagcttccggtgttcaatttcgagcgtctctatatgtgatgcgcctcaatcggacatccgagt

SEQ ID NO: 7085 - DNA, 357 bp, Glycine max
  unsure (1)..(357): unsure at all n locations
tatgaatctccggtaatatcctgctaagcccagaaaactcctaatctcanaaagaaatntaggactctcccactcaaaaacggcttctatcttanagggatctatagctataaccccttgagatatcacatgccctangaaactaactttctctaaccaaaactcacacttggacagcttagcatanactggtcggtccctaagggtatgcagcataatcctcatgtgttcttcatgttcttctctaatcttggagtataccaaaatatcatctatgaatactactacaaaactatcaagggtaaggtgaaagactctattcatgtagtccataaacacacctggagcatattcaca

SEQ ID NO: 7086 - DNA, 394 bp, Glycine max
  unsure (1)..(394): unsure at all n locations
catacgatgacatttcatntaattatgntgttgatcataatntntcatntatcanaatcctttgtagaatagttattttaagacatcaataatcgattctaactctaacaccatatgattactctcatgaataatgantattcctgcacattaacacacattttnttaatatatnntgtcttcactactcaggttgttttacaattcttaaatgatactacctctaccttatgatgttcangtcagtacattaacagtaaatctaaataatagctatcaacaaataatatatgtgtagtataataatatcacttaattttaatgacataatatattataaacatattacttgatatcttaaagtcttctatctatatggatcgtgaacgtacat

SEQ ID NO: 7087 - DNA, 249 bp, Glycine max
  unsure (1)..(249): unsure at all n locations
ctctgatgttctatcttagccttctggcaaagtaaacatgcatacacaaactcactaacctctctcttcatgttgngccaccanaacatcaccttcanatcctgatacatcttggtagcaccagaatgtatgcttaagttattcctatgtccttcctctaggatcatcttcctaagctcgggcacattgtgaacacaaatcctatctttaagtctcaagactccatccgatccaacatttgaactacta

SEQ ID NO: 7088 - DNA, 430 bp, Glycine max
  unsure (1)..(430): unsure at all n locations
tcttctaacctctntgaccaggccgctgttgagagtcaaagcttcataataatctntactntccatcagaagtgctgcaagccttgcctcaactcgctgcctcagaaaggtacgctnttcagcacgagtccattgcatcatttctttgcatagtgtaatttgtagatcagaagtccctggtattttgcaacagtatcaattatgcccctcactatcnttgcagtttttgcctttaagaatcaaggaaaagataggcctcaactgtgtaagaaagctgtgcaaatcctctgccctattctgttccctgagatgctcagtgaggttngtgatggcctgctctttcatgcgcagagcatctggagaagaagaaagatcatcaagtacctgantaagaatggagatggactcagacgggtctttggcctcactg

SEQ ID NO: 7089 - DNA, 415 bp, Glycine max
  unsure (1)..(415): unsure at all n locations
cttcatctcgctctctgttctctccattgaaccacattttctcagcactttttgagaggtgctgccaatgtgctaaaatccttcacanatcgtctataagaactngctaagccatgaaaactcctcacctcggtcacagacttaggtgtaggccattcttgaatagccctaaccttctcctcatcaacttgcactccttttgaactcacaacaaaaccaagaaacacaacatgtgtagtacaaaagatgccattttcaagaatggcatacaattgttcttttctaagcacagtcaagacagatttanatgatcaatatgcaaatcaagtgaagtgctatagataagaatatcatcaaagtacaccacaacanactntcctatgaactctctcaagatatggttcattaatctcat

SEQ ID NO: 7090 - DNA, 369 bp, Glycine max
  unsure (1)..(369): unsure at all n locations
tactggtaatgtgtctactatcattatcatntnttcttcgtcattgaggtgccacttgagttgccaggtctctccacctttgggcgtattctttgaaagagctgtgccccttattgcgcatgttctattgatgcatcctatccggaaccatatcanacatgtactgatagtgcctaatgaaggcaaccattatgtcctttcaagaatggactcgagaaggttccacgtaagtgtaccaggtaacagctaccncagtaagaatttcttagaacgaatgtatcatgagttcctcatcttttgcgcatgcccccatctttcgctaatacatctttagatggatcttgggcaagtagtcaccttgtacttgtc

SEQ ID NO: 7091 - DNA, 339 bp, Glycine max
  unsure (1)..(339): unsure at all n locations
tgatcttcttcatcaatggattccttgcttctntgaatatgaatgacagtggaatggagaaggaagagagagaggagatgccacttcaaggagaagatgagtctataagaagctcaccaccatatgaggccatggataagagcttggaggaagaaggagatgaatgaagggagaggaagagaagagcacanaattntgtactctataagcgctatgaaatctgatgtttaattttcanatgatcaaagttgaaaaaatgcacacacaagacttctatttatagcctaagtgtcacacanaattggaaggannattgaatntctatttcaaatttacttg

SEQ ID NO: 7092 - DNA, 241 bp, Glycine max
  unsure (1)..(241): unsure at all n locations
tttgttcacattcacattactcattnttggtgtgtgagtntctggagatgggcgacgtcaagaatattntgaaggatgatgaacaagcaattgcgtttgattggaataaaagggtggatgttgttaatggtgtagcaaatgctatatgctatatgcatcatgattgctcacctncaatcgttcatcgtgatatatcaagcaagaatgttcttttggattccgaatatgtagctcatgtctc

SEQ ID NO: 7093 - DNA, 248 bp, Glycine max
  unsure (1)..(248): unsure at all n locations
tatcatctgcaaaagccacatgagatagtngaatacctgcacacgtgggatgaaaattannaatggcatcatccttgaggctgctcatatctntggaaaagtactccaaacaaagcacaaacaaataaagggagagaggatccccttgtctaagaccccactgtccttttgaagtgccataaatggatccattgactgccacactaaaggaagtggaagaaacacattccatgatccangtacaaaac

SEQ ID NO: 7094 - DNA, 331 bp, Glycine max
ttctccttgatatgcatcctgctgattcaaacattttgggattaagtccactaatattttaatgctcaatcagtatttttgcaactatatcgaaaaaactaacatagaaagtattaaaatataaatatgtcctcatcattacataaattatataagataaaaataacggaaaaataaactaatctcatattttaaactaataaaccaaaagcaaataaactatatattttttaaaatatcaatgaggtatggaattttatgcgaaaaaaatattcattatactaaaacaatggagtaagaaatttaaatatactaactacaagttaatatt

SEQ ID NO: 7095 - DNA, 357 bp, Glycine max
agcttcaagaattatggcctcatcaaactacttgtttcccgagggaaattctataaatagacctcccatctttaatggagtgggttaccactactggaaaacccgcatgcaaatctttatagaggcaatagatttaaatatttgggaagccatagaacaaggaccttatgttccctctataatagccggaagtccaacaatagaaaaacctagagcagattggactgaggaagaaagaagattagtacaatataatttaaaggccaaaaatattattacatctgccttaggaatagatgaatactttagggtttcaaattgtaaaagtgctaaggatatgtgggatacactacaagt

SEQ ID NO: 7096 - DNA, 410 bp, Glycine max
  unsure (1)..(410): unsure at all n locations
gcttggcacttcanaaccttctggttgtgtcatataaatgtctttctctaaatccccatgctagaatgaaattttaacatctaattgctccaagtgaagattctctgtagctgcaatactcagaataactctgatggtagttatctttacaactagagagaagatctctatgaaatcaattccttgtttctgctaaaaccctttcaccacaagtctcgccttgtatcttcttctatcgttagattcttcctttagcctatagacccacttattctgtanagctttctttccttcttgcaatttaattaaagaccacgtattattcttctgaagggatgtcatctcatctttcattgctagctcccactcaatagagtcattcccctgcatagcctcactgaaacattctg

SEQ ID NO: 7097 - DNA, 404 bp, Glycine max
gatctgcctctatatcctcaacaatcccatcctccctccagataatgagtttctggtggagaatagatggcacagccccaactccatggatccattcccttcctaatagcaagttaaaattagccttggactgtatcaccaggaataaagttggtcgaactatactgcctacagcaacatctacttgaatggctcccaaagaatagccagttttgccctcataattagagagcacaatgttgtgggcagatagatcagtgtcatgtttcccgatcttgtagagcatagatcgaggcattaagttgacagccgctcctccatctatgagcactttgttgattccaacattctcaacttttgccctgatgaaaagaggtttaagatgacttttcatctgaaaatct

SEQ ID NO: 7098 - DNA, 498 bp, Glycine max
  unsure (1)..(498): unsure at all n locations
actaagcttgcttctcaatctccnnccttttgatgatgataaacctgaaatcaagaaacgcatacaagctctatcttttaatcaatcactcactcaattctccccctttatttttgagtttaagcttcacttgaagttaagttatttaattatatgagttcttgatttaatcccaattttctctccccttttggcatcaacaaaaagccaaagtgcgtatagagacataaaatcatacacaaactcataatcatccaagcattttaatccatacaacaagcaaggaggacattaattcatacataaactaagcaaggaagataataattcatccattaatcataataaaatgtcagataattagaaagtcatccaagataaccaaattaaaacaactaatttagaaagtaatatactaataagtgtatcanataagtcataagacatcaaaacataaaacaaatcatttggttaagtcactagaacagagtcaccttt

SEQ ID NO: 7099 - DNA, 347 bp, Glycine max
agcttatgctgcaaatatttacaatagacctcctcaacctcagcagcaaaatcaaccactgtagaacaattatgatctctccagcaacagatacaaccctggatggaagaatcaccctaatctcagatggtctagccctcaaaagcaacaacaacagcctgctccttccttccaaaatgttgttggcccaagcagaccatacattcctccaccaatccaacaacagcaacagcccctgaaacagccaacagttgaggctcctccgcaaccttccctcgaagaacttgtgaggcaaatgaccatgcagaacatgcagtttcaacaagagaccagagcctccatttaga

SEQ ID NO: 7100 - DNA, 353 bp, Glycine max
  unsure (1)..(353): unsure at all n locations
gcttaacatcagaccacttccgggtgctggaactacttcacatggacttgatggggcctatgcaagttgaaagccttggaggaaaaaggtatgcctatgttgttgtggatgatttctccagatttacctgngtcaactttatcagagagaaatcggacacctttgaagtattcaaggagttgagtctaagacttcaaagagaaaaagactgtgtcatcaagagaatcaggagtgaccatggcagagagtttgaaaacagcaagtttactgaattctgcacatctgaaggcatcactcatgagttctctgcagccattacaccacaacaaaatggcatagttgaaaggaaaaat

SEQ ID NO: 7101 - DNA, 340 bp, Glycine max
agcttttgagaaattcaaatggtctgaacttttcactcggagctctgattcaggcacatcacatatagagacgctcaaaattgaacaacggaagctctcgagatattcaaatggtcataacttttaactcggaggtccgattcaggcgcataatatatcgagacgctcgtaattgaacaacggaagctctcgagaaattcaaatggtcataacttttcactcggaggtccgattcagacgcataatatatctagacgctcgaaattgagcaacgaaagctctcgagaaattcaaatggtcataacttgtcactcggaggtccgattcaggtgcataatat

SEQ ID NO: 7102 - DNA, 204 bp, Glycine max
  unsure (1)..(204): unsure at all n locations
nttcaccactttctcaattccatccttgatcctcttgagactcttatgagtcctcttccaacttttctagtggttcttccagtttatgggtggccctgatagaatccaatacccactatgatgtagaactcgatcaacttcattcaaataaatcccctctgccaatcaccatttcaaaaccagaaacaaaattagtcatacaca

SEQ ID NO: 7103 - DNA, 335 bp, Glycine max
agcttccatgcaactccaaagtattggtggtgaattgtgaaagtataaaacagtaattatgagaaaaacatgagaaggttaggcagtgattttctacttcaatcaaaagatcaaaataactagagaaagaaacagatttgaggattacgaaccaagaaagaggtgaagacggcaaagaaagcaccaaaaccaagaatgacagagtaaccaacaccctgattaagcactggtttgccttcaaagaaactggtctgcctcacacacacacctccattttcagacacatgatagtacttgctagaaaattcaaatggtggacactctactaatgcaga

SEQ ID NO: 7104 - DNA, 317 bp, Glycine max
cggcgatgttggtcttgcaaggacttactagcatggaattaatcttcagacaacgaatgttgtgggaacactagggtacatggcccctgagctcacaaagactgggaaagcaagaacaagcacagatgtatatgggtacggcatactcattctggaggtagcatgtggaaagaagccaatagagccacagaaaaatcccgaggaactggtattggtagactgggttagagaactacatcaccaagggaaaatcatcagggctattgaccccaagatagatgagtatgacaaagatgaagctcggcttgtgcttagtc

SEQ ID NO: 7105 - DNA, 353 bp, Glycine max
agcttaataagtccatctatggattgaaacaagcttcccgccaatggtatttaaaatttcatgaggtcatttcttcattcagctttgaagagaatgtcatggatcactgtatataccagaaggtcagtgggagtaagatttgtttccttgtattatacgtagatgatattctgcttgcgactaatgataagggtatgctatatgaggtgaaacaatttctctcaaagaactttgatatgaaggatatgggagaggcatcttatgtcataggcataaagatccatagagaaagatctcgaggcattttaggcttgtctcaagaaacctatatcaacaaagttttagagagattt

SEQ ID NO: 7106 - DNA, 446 bp, Glycine max
  unsure (1)..(446): unsure at all n locations
tccatcaactatggagtagttaacatcggttntggaaaaaccgatgttagtatcttgttgttaacatcggttntggaaaaaccgatgttatcgaattgatgttaacataggttttaagaaaaccaatgttacctagttgatgttaacatcggttattcttaanaaaccgatgttgttatcattatatattaaaaatatgaaattgcacaacccacgcgcttgaaccctgtcgttcttcttctttctccttctgcctgagttcgtctttgttgcaaacaggcctgtgcttccgtgactgcaaccacattgtggagttcgtctctgtcacttatcgattgaggtacgtcctttcattttaacattaggcattcctcgttttaacatctgctcattntcgtangtcgaagaanacaaggaaagaaaagtgtcccggaaagggtgggagt

SEQ ID NO: 7107 - DNA, 346 bp, Glycine max
agcttgtggatggtgaccaatcccagaggacttttgtgtatattaaggatgctattgaagttgtcttattgatgattgtaggttcccatatccaatctttttatacaactttatatattttaagttctgattttctgattgtagaatttcatctttaaactattactcttgttggatggttcaactaaatgtgaacgataatttttaacaggaaaatcccgccagggccaatggacatatttttaatgtgggaaacccaaacaatgaggttatagttaggcagcttgctgaaatgatgactcaggttagaggattaagtttgattgtttgatcctattagaatttc

SEQ ID NO: 7108 - DNA, 347 bp, Glycine max
agcttggatttccttttagtagggaatctatccttcctaagatggagccaaacccagtcaccctcattaagaactagctcttttcttcctctattgcctttagttgaatatacctttgtttggttctctatttggttcttaaccctctcatgcaacttctttacaaatcctgacctagattccccttctttatgtataaaagaagtgtctagtgggaggggaatgaggtctaatggtgttaggggattgaacccatagacaacctcaaaaggggactgcttggtggttctgtgaacccctctgttgtaggcaaattctacatgaggaagatactcatcccaagactt

SEQ ID NO: 7109 - DNA, 414 bp, Glycine max
taaacattcaatttcgagcgtctcgttatattacgggactcaatcatacatccgagtaaaaagttattgtcgtttgaattggctcgtaggttcaacattcaatttcaagcgtctcgatatattaccggactcaatcagacatctgagtaaaaagttattatcgtttgaattggctcataggttcaacattcaacttcgaacgtctcgatatattacgggactcaatcagacatccgagtaaaaagttattgtcgtttgaattggctcatagggtcaacattcaatttcgagcgtctcgatatattacgggactcaatcagacatccgagtaaaaagttattgtcgtttgaattggctctgagcttcaacattcaatttcgagcgtctcgatatattacgggactcaatcagaca

SEQ ID NO: 7110 - DNA, 338 bp, Glycine max
agctttaagccaattcatacgacaataactttttactcggatgtctgattgagtcccgtaatatatcgagacgcacaaagttgaatgtttaagctttaagccaattcatacgacaataactttttactcggatgtctgattgagtcccgtaatataacgaaacgctcgaaattgaatgttgaacctttgagccaattctaacgataataactttttactcggatgtccgattgagtctcgtaatatatcgacacgctcgaaattgaatgttgaagctctaagcctattcaaacgacaataactttttactcggatgtccgattgagtgacgtaatata

SEQ ID NO: 7111 - DNA, 361 bp, Glycine max
  unsure (1)..(361): unsure at all n locations
ctataatantgttatattaatatacatatatgtgatttctaattattcatattctttcaacattatagagagtaatatcccaaaaaatgctatgcctttaggtttatatacgaagaaccttcatattagttatatttatgtcaaaacatattcaaggtacatattatgttgatcaatgttttatttntctattaaaatttatactatngttttactaatttataaaaatggaaaataaaaaatatacatttaatattttaaaatacaaaaatactntaatagtagtaccttttatttagtaaatataaaattaattganaaattaagagtattctcctaatnttatgatatactatatggg

SEQ ID NO: 7112 - DNA, 353 bp, Glycine max
agcttatgctacaaacatctacaatagacctcctcaacctcagcaataaaatcagccacaacaaaacaattacgacctctgcagcaacaggtataatcccaggtggaggaatcgtcccaaccttagatggtcgaatccttcacaatagcagcaacaaccttattttcagaatgctgctggcccaagcagatcatatgttcctccaccaatccaacaacaacagcaacagccccagaaactgaaaacagttgaggctcctccgcaagcttcccttgaagaacttgtgagacaaatgactatgcaaaacatgcagtttcaacaagagaccagagcctccattcatagcttaacta

SEQ ID NO: 7113 - DNA, 401 bp, Glycine max
  unsure (1)..(401): unsure at all n locations
ggcattgaagcattcaacctcagccttgttgaatgtctgtcttccccttcctctgcctctaaaagaccctatacttctccctcttcctttacctcttccacttttctcatcagccaccatctgcatgacctgctcctcttctgctggaaacatcattctctgctcgtgaaccaatagactactttgcagttcgtctgttgtcatagtatccctgttgttggattcttcaatggagcacaccatgtagttaaacttcgtcttcatagatcgcataatttttgcagttatgacactctcttgcatattttctccatatgctttcatacttttggcaattntcaacgtccgagcaaagtatgaatccactgactcttcctccttcatttgcagcatctcaaagt

SEQ ID NO: 7114 - DNA, 340 bp, Glycine max
agcttttcaggtaagcttgccccacccgtttccactgagcattctacatttgtttaatcttaaggtaccaagattttctagaaatccaatggattttggcaattccctgatatttccattgaccatgttcagtgtagtaagaaatgctaggtatccagtagattctagtaaatattcaagatttatgcaattcatcatctcaattttcctcaataatttcgtctctccaatctcatttggcaaatttgtgatggttgttccatctaactgaattcaatgttttaattgaattttccaatttgctgatccaactgataactccctcatgtaatataaagaa

SEQ ID NO: 7115 - DNA, 343 bp, Glycine max
agcttgcataataagaaatcctgagacaatctcaaaccctgatggatcagtttcagatccatggagccaatgcacagtggaacaggttgagtcactgaaatctatgctcagaatccttcctatgtggtccactggcatctttatgattactgcctcccaaacctcattctctatcatccaagctaatacaatggaccgaaggttatttggcaatttcgagatgcctgcaggatcctttagtcttatcagtgtaatcaccctaacaataatcattcccacatatgagcgcgtaatggtacctctactagcaaaatacacaggcttgcctagaggattcagttgc

SEQ ID NO: 7116 - DNA, 343 bp, Glycine max
agcttttatttgccatgtatttataaacatggattctctcttgacctttactgcaacatccaagaagtcgaaccagattcttgtgatgaacattacttataagcttgacttcactttcaaattgttcatccatcttcccggattggcctaagattaattttttgactgcaactaatttcccatttttcaaagtggcctggtccaacaaatggggcttaagaatataccaattttaaaaagtggtttatctttgtctcaagaagaatagctcaattaaatttggcccgggcttaccttaacctggttcaaattatggttggtttttaacctggacttccattaa

SEQ ID NO: 7117 - DNA, 346 bp, Glycine max
agcttttacctctcattttaacccttagaactttttggtcagcaatgtcatagataaggcagtgttgatatgcaaaggacaatttaaatcccttttcaagcaactgacctacacttagcaagttttggtcaatttcaggtacataaagaacatctgagataagttttgcacctgaaattgttgcaatcaatatagttccttttccttttgcttgaatataatcaccattcccaatcttgatatttaagacatcaataggcttcaaatccttgaaagcagacttgtcatatgtcatgcgatttgtacaaccgctatcaatcaaccaacactctgaactactcctcat

SEQ ID NO: 7118 - DNA, 335 bp, Glycine max
agcttcaaccaaggggagatggaccatttcaagtgcttgaaagaatcaatgacaatgcttacaaagttgagctgcccggtgagtataatgttagttccaccttcaatgtctcagacttatctctttttgatgcagatggagaatccgatttgaggacaaatccttctcaagagggagagaatgatgaggacatgaccaagaacaagggcaaggatccacttgaaggacttggaggacctatgacaagggctagaacaaggaaagccaaggaagctcttcaacaagtgttgtccatactatttgaatacaaacccaagtttcaaggagaaaagtcc

SEQ ID NO: 7119 - DNA, 367 bp, Glycine max
  unsure (1)..(367): unsure at all n locations
tgtccataananatagggttttgaagtttgtcatttcaatttctcactaagtaaaatggatcatttttaaggtccaacaccttaaaatgatcaccacttaagtaaaaaagaatcatttgataagcaagaactacgtaggtctgatttcctcatcgcaattgaggatacgtaggagcaaaagccccgcttttgtcgaccaccccaagagatcgttaatggtccaatgccttaacgtttctctcctttcaaaaacaagagatcgttaatggtccaatgccttaacgtttctctcctttcaaaaacaagagatcgttaatggtccaatgccttaacgtttctctcctttcanaaacaagagatctttaat

SEQ ID NO: 7120 - DNA, 334 bp, Glycine max
  unsure (1)..(334): unsure at all n locations
agcttggaggaagtaaggaaatgaattaagggggaggaagagaanagcacgaaattttgtgctctaaaagagctctgaaatctaaagtttaattttcaaatgatcaaagttgaaaaaatgcacacacatgacctctatttatagcctaagtgtcacacaaaatttcacatgaatttgaaattgaatttgtggagccaaaatttggagccaaaatttcactaattatgattagtgaatttcagttatggttcataccactaatccaagatcaattccaagattctccactaagtgtgcttaggtgtcatgagacatgtaaagcatgaaggacatg

SEQ ID NO: 7121 - DNA, 367 bp, Glycine max
  unsure (1)..(367): unsure at all n locations
ggagtnttccgactatgctcttgtgtggtggaacaagctacaaaaggagagagcaagaaatgaagagccaatggttgatacatgggtggagatgaaaaggatcatgacaaagcggtatgtgccggctagttactcaagggatttgaaattcaagcgccaaaaactaacccaaggcaacaagggggttgaggagtatttcaaggaaatggtgtgctcatgattcaagcaaagattgaagaagatgaggaggtaactatggctcgatttcttaatggtttgactaatgatatccgtgatattgttgagctgcacgagtttgttgaaatggatgatttgcttcacaaagcaatccaagtagagcaacaat

SEQ ID NO: 7122 - DNA, 307 bp, Glycine max
tcaacctagaggagacggaccattccaagtgttggagaagatcaacgacaatgcctacaagaatgacttgcctagtgagtataatgtaagtgccactttcaatgtgtctgagctatctctttttgatgcagatggaggggccttggatttaggacaaatccttttcaagaagaagggagtgatgaggacataaccaagggcaaggaccatgaagcacttgaagggcccagaccagatgcagacttaaacaagcccaacacgtcatagagacaaggctggtcatttgtatagctgccattgatgatga

SEQ ID NO: 7123 - DNA, 352 bp, Glycine max
  unsure (1)..(352): unsure at all n locations
tcttatactaatgtcacgaggaatgtggtagttagattcataaataatgagtngatttgtcgatacggactccccaggaagatcattactgacaatggcaccaatctgaacaataagatgatgcatgagatgtgcgaaggcttcaagatccagcatcacaactctaccccttatcggccaaagatgaatggngctgtagaggctgtgaataagaatattaagaagattgttcaaaaaatgacagtgtcatacaaagattggcatgagatgttgcctttcgccctgcacggatatagaacctcggtacgaacttctactggggcaacaccgtattccttagtttatgggatgg

SEQ ID NO: 7124 - DNA, 334 bp, Glycine max
agctttgatttcctttgttccggaaacctttcttttctcatgtgcacccaaacccaatctccgggttcgaagacaaccttctttctccctttgttggcttgtttagcatagcttttatttttcctcttaatttgatctttgactctctcatgaagcttcttcacatagtccgcctttgcttgaccttctttatgcttaaaaacagaaacattaggcataggcaaaagatcaagaggagttagtgggttaaaaccataaacagcttcaaaaggagaacaattagtggtgctatgaacagctctattgtaagcaaattcaacatggggtaaacaag

SEQ ID NO: 7125 - DNA, 428 bp, Glycine max
  unsure (1)..(428): unsure at all n locations
ngaccacgatcagttggaggctcatgtcagacgcccccagggtgacgagcactctgctcatacattactctgagtgcacctgatcagtagttctgttggcccggtcaatagaactttcagagttcaatatcagtataaacccctagccccataaagacacaattcatggaagacattctggtagaatttgttgggaatgaccaaaccaccacagactggtggaacctttatgttgacggcgcgtccaacatgaagggaagtagggtatgaatcatcctcgaaggacttgataatgtaaccctagagcaggccatcaagctcaacttcaaagcctcaaacaatcaggctaagtacgaggggctcattgcaagtctaaaactagcaagagaagtcggngccaagaagctatgatgctacatagactcgta

SEQ ID NO: 7126 - DNA, 320 bp, Glycine max
agcttccaagattcataatctctagcagaaattaagtgatttggagaatcaagcttctcatagacttctatctgatagtgaagttataaccaagagagctttgcaacaagagctgtgggatatttcaaatgcttatgaatccttgttgaggcaaaaatctagggctaagtggatcaaggagggtgacagaaatacagcttacttccacagggtgataaatttcagaagaagctcaaatgcagttcatggtattctcattgatggtacttgggtccagcagcctgaccttgttaagaatgcagtggttaatttctttcttg

SEQ ID NO: 7127 - DNA, 345 bp, Glycine max
agcttggagccatgcattgtgattgcttagtgcaattcgccatcctcaaccctttttcggagccccatgaatggcgttttcgttcatgcgtccttcacccacgagtttggagccatgcatagtgattgcttagtgcaattctccatcctcaacccttttttggagccccatgaattgcattttcgttcatgcgtcctccacccaggagcttggagccatgcgtagtgattgcttagtgcaattctccatcctcaaccctttttcggagccccatgaatggcgttttcgttcatgcgtccttcacccacgagtttggagccgtttgtagtgattgcttagtgcaat

SEQ ID NO: 7128 - DNA, 344 bp, Glycine max
agcttaagctccttcaactgcacaaggctcttaatatttgaagagtatccttgtggaacctttacccgatgaagacactgacaaaaacttatcttctccttcttggacaaagtatggcaggctgggggcaagtaaattttcttcccattagaccttggatgcaattgtgatcgtatacccatatcagctagatcttgacgggtattcaagccatccttcgtcttgccttaaatgttaaggagcgtcccaatcacactatcacaaacatttttctccacatgcataacatcaatacaatgtctaacgtcaagatcagaccagtacgaaagatcaaagaaaatgga

SEQ ID NO: 7129 - DNA, 268 bp, Glycine max
cgtcaaacctgaagatttcttcctacatgtggaacccgggaacactgacaacccaaataatgcacaacttactcctgtgtctgttgatcaacttccagggcttaacacgcttggcatatctttggctcgcatagattctgcaccaaagggtataaacccttcccacactcacccttgagcctcggaaatccttatagtccttgacggtactctctatgttggatttgtcactcccaatcaagacggaaatcgtctctttaccaaagtg

SEQ ID NO: 7130 - DNA, 291 bp, Glycine max
agcttcatgagagagtcaaattttaaattgttaggaaaaatattagctatgctaaacaagccaacaaagggagaaagaaggttgtcttcgaacccagagattgggtttgggtgcacatgagaaaagaaaggtttccagaacaaaggaaatcaaagcttcaaccaaggggagatggaccatttcaagtgcttgaaagaatcaatgacaatgcttacaaagttgagctgcccggtgagtataatgttagttccaccttcaatgtctctgatttatctcttttttgatgcagat

SEQ ID NO: 7131 - DNA, 348 bp, Glycine max
agctttgatattggtaagtatttgcctcaaattttctattatatttcctgtttctgaagtacgttttttctcactaacatctctttttataacattaatctctttaatcctctcatttgtactaattactttatcttacatttttcttccttttctattaaaaaagttgcccgattttgatatataaatgcaatttctcttttcattttaccaaactttatataaagatattttatttgattcaccaggacatatttgctgctggaactgatacttcagcatcaacactagagtgggctatggcagaaatgatgagaaatccaagagtgagggagaaagcacaagctg

SEQ ID NO: 7132 - DNA, 246 bp, Glycine max
  unsure (1)..(246): unsure at all n locations
gagctgcatgcatgcaagctngagcttttataggattttggacttaccatcaacatcaagaccaaccatcaaaattcgcatttccttcttcgcgaaaagtcggctgaaaagctttgtgaatgtcagccccatttctccttcaactagtggatccctaatttcacaattcaaacaacttttcaattaaaaaaaatctccaaaacgaaatagagcttcttataaaattacttgtgcaaatgaggcttg

SEQ ID NO: 7133 - DNA, 323 bp, Glycine max
agcttcaagaattatggcctctacaaactacttttttcccgagggaaattctataaatagacctcccatctttaatggagtgggttaccactactggaaaacccgcatgcaaatctttatagaggcaatagatttaaatatttgggaagccatagaacaaggaccttatgttccctctataatagccggaagtgcaacaatagaaaaacctagagcagattggactgaggaagaaagaagattagtacaatataatttaaaggccaaaaatattattacatctgccttatgaatagatgaatactttaagggtttcaaattgt

SEQ ID NO: 7134 - DNA, 202 bp, Glycine max
  unsure (1)..(202): unsure at all n locations
agctnaaaatttagtctagtttttgnnaaaacataagcacttagacaatgaaggaaagctggagttgctgcacatgatgtccaacgttatgtcaaagaataagatcgggctgcacaatgcacaaggcaagatgaaatgtcaaatgaagaattgaagctgtacgattcacgatgttcgatacaatgtccaggacattcctctt

SEQ ID NO: 7135 - DNA, 353 bp, Glycine max
  unsure (1)..(353): unsure at all n locations
agctttatgtctctttgnatatccctttttacttttgggatctttccaatatcttctagcatcaagtcaagacaatgtgcagcacatggagtccaaaatatttttggtctcgtgacttgtaaaattttacctaaaaagatcaaaatcaataaacttgtatgagtagtgtaacaattaaaagttataactataaaaaaaaaacttcattaagcatgattgaattctcatccgccaacacataattacttccattgtccgtcaccacttgaataacattcttttctccaatctcctcaacaaagctatccataagctcagagatctttcgaccagtcttcatgtgttcaaaagca

SEQ ID NO: 7136 - DNA, 355 bp, Glycine max
agcttgccaacccatggaagttcctactatctcccacactttttgggatgggccattcttggatggccttgattatctcaaggaccacttggaccccatttatgccaactacaaaccctacaaaaactatattatctacacaaaaagtacacttctctatatttgcatagatggtgttgttcctaaagactgaaagaacttgcctgagatgttctaagagataatctatgctcctactgtacactaaaatatcatcaaaataaacaactacaaatctactctcgtaactccgtaatacattatgcatacacctcataaaggtgcttgggcattagtgaacccaaaatgcatcact

SEQ ID NO: 7137 - DNA, 367 bp, Glycine max
agcttgccaacccatggaagtttctaatatctcccacactttttgggatgggccattcttggatggccttgattttctcagggtccacttggaccccatttctgccaactacaaaccctaagaaaactatattatctacacaaaaagtacacttctctatatttgcatagagggtgtttttcctaaggactgaaagaacttgcctgagatgtcctaagtgataatctaggctcctactgtacactaaaatatcatcaaaataaacaactacaaatctacctatgaaatcccttaagacattatgcataagcctcataaaggtgcttggtgcattagtgagcccaaaaggcatcactagccattcata

SEQ ID NO: 7138 - DNA, 358 bp, Glycine max
agctttttctctgtacaccttctttcctatacttgaaaaactttttctgtatacacacacattaaaaactctttctctttatatcaacatggtctatataaaacctctattccttttcaaagatttcttcttcctttttcaacatacactcattgtttatacaaaaattttctttatatacactcattgctcacacacaagaatttcttttcacacattatttatacacacaaaatcttttcatacactttttatatacaaaaactcttttcttttcttcatatacagatatgacattttgttcacaacgcctcttttttttctaatcttggaatatcaagaggttgtcattttattt

SEQ ID NO: 7139 - DNA, 285 bp, Glycine max
agcttttgattacaggttatctctggcatcgcacttcctgttggatccgacaaactttattctggcagcactgatgggacagttaggatatgggactgccatactggtcaatgtgctaaagtcatcaatcttggtgctgaggctacctctttgatcagtgaggggtcatggatttttgttggtctgcaaaatgctgtcaaggtaagctcttatctgtcattgctttgttttgatgtatgataatgtctaatcataggagtagtacatgcaaactgattatgtggc

SEQ ID NO: 7140 - DNA, 389 bp, Glycine max
ctatctctgatctcgttatgctactcatggagtactgcaaacgctgattatattatatattaaatattaaggatgttcttaatatttgaaatcagtatatcatatagttatttatcatatgcaatagggtcaaattagatagtctatgaatagtgttaataacaacttacagtactgctgacttaatatatattttaataatttatatcatgcttaccttattgttatctaatgcattctcatgtatgtcatatagcatatctcatgcgaataaaggtatatgacttttgacattctaagactggaggtagatatccatgattaattacatttttatttacttcattatattcaaaataaatagatacatttaggccatttttaattta

SEQ ID NO: 7141 - DNA, 369 bp, Glycine max
agcttagatatagagatcaaatgttactgaatttctggcatatatagaacattctttaagaatagaaattgagaaaattacgttgtgcctgcatgagttgtagtgactgtatggccagtgggaagcttaacaactatgggatttatcttcttacaagaagaaaataagtgaagaaaagttgtgacatgaccagtggctcctgaatcgagtatccattcatctggacgtgccttgcttacactacaagtgatggataagacattacctctgtgtgcactgctggaactagtgattgtactaatttaaatcacatgtgaattgttgggacttgagctctagtgctgtagctgggcccttaaagccttatat

SEQ ID NO: 7142 - DNA, 369 bp, Glycine max
agcttagatatagagatcaaattgaactgaaagctaggtatatatagaacatcctttaagaatagaaattgagaaaattacgttgtgcctgcatgagttgtagtgactgtatggccagtgggaagcttaacaactatgggatttatcttcttacaagaagaaaataagtgaagaaaagttgtgacatgaccagtggctcctgaatcgagtatccattcatctggacgtgccttgcttacactacaagtgatggataagacattacctctgtgtgcactgctggaactagtgattgtactaatttaaatcacatgtgaattgttgtgacttgagctctgttgctgtagctgggcccttaaagccttatat

SEQ ID NO: 7143 - DNA, 318 bp, Glycine max
  unsure (1)..(318): unsure at all n locations
agcttctatagaaggttngtttctgatttctctacaatngcatcacctctcaatgagctggtgaagaagaatgtggcatttacctggggtgaaaaacaagagcaagcctttgctttgctcaaagaaaagcttactaaggcacctgttctagctcttcctgacttttctaaaacttttgagctagaatgtgatgcctctggagtgggagttggagctgtattgttacaaggtgggcaccctatttcttattttagtgaaaaacttcatagtgccaccctcaactaccccacctatgataaagagctttatgccttaata

SEQ ID NO: 7144 - DNA, 205 bp, Glycine max
agcttgatatgttttgtgcatgtgctgctattgttggaggcactagaatttggttgccagacctcagggtgatggcactcacatttttcagattttgcacagtttgtgaaggcaatatgtcagaattttgggactgagcttggttgaactgagtagccatctgccccatctgattggtcagactctaaatggaggctcttgtctc

SEQ ID NO: 7145 - DNA, 354 bp, Glycine max
agcttctattcttatacatgtatgaagctctgataccacttgacagaccagtggccttacacatcccaagaacggggtagaattaagagatagcgaactattcccccacctgaattctatatcactcatctatgcacctcacacattaccttaacaatgaacctttacatactgaatcagatacaacaatgctgatctaaagatgacgcaataagtaatacaagagtgcagaggaaacaacagtgcacactcggatttatactggatcggccacacccttgtgcctacgtccaggccccaagcagcccgcttgagagttccactatcttggaaaatccttttacaagttctaaa

SEQ ID NO: 7146 - DNA, 358 bp, Glycine max
agctttgagcaatcaaattcattacttttaactcggaggtccgattcatgcgcataatatatcgagacgctcgatattgaacattggaagcttttgagcaattcaaatggtcataacttttcactcggaggtccgattcaggcgcataatatatcgagacgcttgaaattgaacaacggaagctctcgtgaaattcaaatggtcataactttcaactcggaggtccgattcaggcgcataatatatcgagatgcacgaaattgaacaacggaagttctcgagaaattcaaatgatcataacttttctcacgtaggttagatttaagcgcataatatatcgagacgcttgaaattgaac

SEQ ID NO: 7147 - DNA, 360 bp, Glycine max
  unsure (1)..(360): unsure at all n locations
agcttgaaggtaaactagatgtcttggttaatttgttaacccaactggccatgaatcagaaatctgcacctgtcgccagactctgtggtttatgctcctctgccgaccaccacacagacctttgcccttctgtgcaacaatctgaaacaattgaacagcttgaagcttatgctgcaaacatctacaacagacctcctcaacctcagcagcaaaatcagccacaacaaaataactatgacctttcctgcaacaggtacaatcctggatggaggaatcatcccaaccttagatggtcgaatccttcacaacatcaacaacaaccttantttcaaaatgttgctggcccaagcagaccatacg

SEQ ID NO: 7148 - DNA, 252 bp, Glycine max
  unsure (1)..(252): unsure at all n locations
ttagcttcaactttcaatnntgatcgtctcgatatatgacgagactacatcatacatccgagtaaaaagttatagtcgtttgaatttgctcacagcttcaacattcaatttcgagcatctcgctatattacgggactcaatcagacatccgagtaaaaagtttgttgtttgaattggctgagagcctcaacattcaatttcgagcgtcgcgatatattaagggactcaatcaaacatcccgagaaaaagtta

SEQ ID NO: 7149 - DNA, 286 bp, Glycine max
  unsure (1)..(286): unsure at all n locations
agcttgtggatggtggncaatttcctacgacttttgtgcatattaaggatgctattgaagccgtcttattgctgattgaaggctcccatatgaaactttatatattttaagtactgatctgattgtaaaagttcatcttttgactattactcttgtatcatggttcaactaaatgtgaacgataatttttaacaggaaaatcctgccagggccaatggacatatttttaatgttggaaacccaaacaatgaggttacagttaggcatcttgctgaaatgatgacac

SEQ ID NO: 7150 - DNA, 335 bp, Glycine max
  unsure (1)..(335): unsure at all n locations
agctttnttttttcaagtcttgtttatttagtaaaaaatctctagaatttttttggtttttttttacgtatggggtcctaacttaaaccaatcaataaatggtgattcatattatgtcatctctgtggataattattctaaatatgtatggctatttcctatcaaattcaaacctaacgttactaccattgtcctaatttttaaaacattatttgaaaagaaattcacatgttggatcagaaccctctatagcgacaatggaggtgaaattattaaatgctgaacctctttccaatcactaggctgtttgacctaaccaccattcctatacacct

SEQ ID NO: 7151 - DNA, 144 bp, Glycine max
tgcttgaaattgaacaacggaagctctcgagaaattcaaatggtcttaacttttcactcggatgtccgagtcaggctatgtcgagacgctcaaaattcgacaatggaagctctcgataagtgatatggtcttggcttatcactt

SEQ ID NO: 7152 - DNA, 168 bp, Glycine max
ttcttctttgcacttttccattttgaatttcttaattagttttgtacattactttgtttgacataggaagttgccatgtttcatttgcttgacttgaagtccaaggaagaaggacaattctcccatcatagacatctcaaattctttttgcataaagttggaaaattc

SEQ ID NO: 7153 - DNA, 182 bp, Glycine max
agcttgtgcctctttatgtctgggatatgaatgtagcatatagatccaaagacccttaggtgctttgctgatggcttcttcccattccaagcttcaattggagtcttgtcttttacagacttagttggacatctgttgagtatgtaaacaacagcgtagactgcttcagcccagaatgtgtt

SEQ ID NO: 7154 - DNA, 175 bp, Glycine max
ttcttttgcccaattcgcttttgatctcgataaagctgctcaaaatcaattagcaagaggtcaatgattgcgcgagttgcttaaacaatcccaatcagctcctcttaccgtggaagaacagataataaggatttatactggaataaatggttatcttgattcattagaaattgga

SEQ ID NO: 7155 - DNA, 173 bp, Glycine max
tgtcttcccaatatcagcatttccatgcacattacatccagcaaggagcgctccccaaacagtcaatggcacctcttccccaagcccctcaatgatattggaagcttctttcagccttcctgcacgaccacaaagatcaaccaaacatgcatagtgatcttctctgagttgta

SEQ ID NO: 7156 - DNA, 175 bp, Glycine max
agcttccattgttcaattttgagcgtatcgatatattatgcgcctgaatcggacctccatgctaaaagttatgaccatttgaatttcccgagagcttccgttgttcaatttcgagcgtgtctatatattatgcacctgaatctgacgtccgacttaaaagttatgaccatttgaa

SEQ ID NO: 7157 - DNA, 170 bp, Glycine max
ttctttgtgcaacttaagcatggaaagaagatagtctacactaggcatcaaatatttctcaaagaatatcacccatatcgattgtaaaaagcttttaatggaagtccaaagtctggattttccctgatacccttatcgagaaatgaactttatgagcaggtgaaggacat

SEQ ID NO: 7158 - DNA, 175 bp, Glycine max
ttctttcattaagttatgaccatttgaatttctcgagatcttccgtggctcaattccgggcgtctccatatgtcatgtgcctgaatcggacctgcgtatgaaaatgttatgaccatttgaacttctctagagcttccgttgggtcatttcaagcgttcttgtatctgatgtgcct

SEQ ID NO: 7159 - DNA, 176 bp, Glycine max
ttcttgaatcttccttggtcgggtacatgagcatatgcaatgctcccaaatactctcaagtgatcaactcttggcttcactccactccatgcttcttgtggtgtttgatctttgacattctttgttggggagcgattggacaaataaacggcacatgcaacagcttcggcccaaaa

SEQ ID NO: 7160 - DNA, 453 bp, Glycine max
  unsure (1)..(453): unsure at all n locations
ctcagctttacccctccaatgttgaaatactaaacatcagaagtgtaaatcttaaagttaaaaagctatccacgaagcaggctggcataaccaatcagattgattaatctattcttccacaatcatgcaaaaatataatttggtgtttcatcatataaccacgagttgctgctttgaaatgctcattttgtaaatcttgatctgtataggctgagagcaacatatcccaccgtcacaattctgccatcaaagaatcgtccgtgcaaactatgtgctgccgaacaacatgcttcagctcttccatactcaacaagaacagaacctggtttaaatacatgaccataaatatcctcttccgtgtcaatgctcttttggggactaaccaattctgcactgatatcccattcagaaaagccttnctgaaatgcacaaactgtgtctttagattcatat

SEQ ID NO: 7161 - DNA, 266 bp, Glycine max
cctttagtacggaatctatccttcctaagatggtgccttacccagtcaccctcgttaagaactagctcttttcttcctctattgcctttagttgaatacacctttgtttggttctctatttggttcttaaccctctcatgcaacttctttacaaactctgacctagattccccttctttatgtataaaagaagtgtctagtgggaagggaatgaggtctaacggtgttaggggattgaacccatagacaacctcaaaaggggagtg

SEQ ID NO: 7162 - DNA, 205 bp, Glycine max
  unsure (1)..(205): unsure at all n locations
aacaacggaagctctcgaaaaatcagtttcatatattntcacacagaggtccgattcggtgtaataatatatctgagactcacnaaatcgaacaaccgaagctctcgagaaatttgaatggacataacatctcactctgatgttcgagcccgggacataatataacgagactctctaaattgaacaaccgaatctctctacaaat

SEQ ID NO: 7163 - DNA, 341 bp, Glycine max
tgaatcggacatccgtgtgaaaagatatgaccattttatatttctcaagagcttccgttgatcaatttcgatcctctcgacatattatgcacccgaatcggacatctgtgtgaaaagtcatgaccatttgaatttctcgagagtttccgatgtttaatctcgagcgcatcgatatattataaccctgaatcggacctcagtctgaaaagttatgaccatttgatattgacgagagcttccgtcgtcaatttcgaatatcactgtatgtgatgcgcctaaattggcattcgagttaattgtttgaccacttgattttccaaaagcttctgtctgtcaattct

SEQ ID NO: 7164 - DNA, 446 bp, Glycine max
  unsure (1)..(446): unsure at all n locations
tgcttaatctatctagatagaagggaatgatgagtggttatgcatggaagttaggaaaacgattcaaagatttttactatgaagtatatatggatataattgcaggaatcaattgatttattaagaaagaaagtaaattattaaaggtgatgaaaaatgaactgagtgaaatacctaaaaaacaaacgtgatttattaagaaagaaagtaaattattaaaggtgataaaatttaatatataggaatagggtttaatatacgattcagaaaacttgtcaaagttacaaacagttagcaatttatttattttttgatagtcacatctagaaaattaatctctatgctttntatgtaagtttttaattttaagttgctgaaactgtgaagtgagcaaattaagctctgtcgggttttaattaattaattattagtccattcactgtttt

SEQ ID NO: 7165 - DNA, 442 bp, Glycine max
  unsure (1)..(442): unsure at all n locations
tgcaccagggaacaatttcactttaatagtngattccaattggcttcctagttttcagcttacctatttggatgtgggatcatggcagttaggtcccagctttccatcgtggattcagtcacaaaaaaaacttaaatatttaggcatgtctaacacagggattattgattctattcctacacagatgtgggaagcacaatctcaggttttgtatttaaaccactctcataatcatatccatggtgagcttgtgactacattaaaaaatccaatatctatcccaactgttgatctaagcacaaatcacttatgtggtagaataccctatctttcaaatgatgtgtatgggttagacctttcaaccaattcattctctgtatccatgcaagaatttttatgtaacaatcaggacaagccaatgcaattagaaattctcacatct

SEQ ID NO: 7166 - DNA, 307 bp, Glycine max
tctatccttcctaagatggagccaaacccagtcaccctcattaagaactagctcttttcttcctctattgcctttagttgaatacacctttgttaggatctctatttggatcttaaccctttcatgcatcttctttacaaattctgacctagattccctttctttatgtataaaagaagtgtccactgggaggggaatgaggtctaaccgtgttaggggattgaacccatatacaacctcaaaaggggactgcttggtggttctatgaaccctcctgttgtaggaaaattctacatgaggaagatac

SEQ ID NO: 7167 - DNA, 433 bp, Glycine max
  unsure (1)..(433): unsure at all n locations
gtatgaaaatgcatcgacactgttaactggttagcaagttcttgagcgggttgaggacatcaatacgatgtttggaaaaacctcaaataatgaaaaaagtaaaacttgcatatggaagaagaggtcaatattgttttatcttccatattggtccgatctagatgtcatacattgtattgatgtcatgaatgtggagaaaacaatgtgtgatagtgtcatcaacatgcttcttaacaatcaaggtaagacaaaagatggttcgaatactcgtcaagatctagttgagatgggtatatgacactaattacatcctaagtccgatgttaagaaaatacacttgcctccagcttgtcatacttttgtccaaaaggagaagataagtttctgtcagtatctgcaccgcgtcatagtgtcatanggatactcttcaata

SEQ ID NO: 7168 - DNA, 328 bp, Glycine max
cttctctgacttagcatcacattttcctaagttatcttttccattattcaataccaaacatttacaaccaaagatatgaaaatgtgagatgtttggttatctgccattgaacaattcatatggagttttctttaagatgggtcttattaaagccctatttaaaatgtagcatgcagtgttaacaggttcagcccaaaaatatgttggaagacgtgtatcatttaataaagtgctagcaatctcttccaaagatctattcttgctttcaacaacaccattttgttgaggagctcttggcgcagaataattatgctcaatcccatgctta

SEQ ID NO: 7169 - DNA, 401 bp, Glycine max
taagctccttcactacgcaagactcttaatatttgaagagtatccttgtggaaccttcacccaatgaagacactgacaacaacttatcttctcctttttggataatgtatgacaagttgggggcaagtaaattttcttcccatcagtccttggatgcaactgtgatcgtatccccatctcagctagatcttgacgggtattcaagccatccttcgtcttgacttgaatgttaaggagcattccaatcacactgtcacatacatttttctccacatgcataacatcaatacaatgtctaacgtctagattacaccagtatggaagataaaagaaaatggacctcttctttcgtatgcaagtcttacttttatccttcttttgggtatttccaagtacattat

SEQ ID NO: 7170 - DNA, 362 bp, Glycine max
tgctagtgatacactctattcagagtttgaatatgtattacaaggaatggattttgagagaggttggggtgatatagctgagcgggtattggaaatgatgcatatgctcctagtccctaaatattcttcacgctcctgatcataatacactacagacttttcttgggagagagccaatggtattcaatgttgatatattatctcctcatggctactttggacaagccaatgtcttgggtttgcctgacattggtgggcaagttgtttatatactacgtcaagtgcgtgcccttgaaaatgagatgctccttcacatcaagatacaaggacttgatctcactcctaaaattctaattggtacc

SEQ ID NO: 7171 - DNA, 446 bp, Glycine max
  unsure (1)..(446): unsure at all n locations
tctggtgggacatcttgacttgctttccaatctgacattcaccacagattctgccttcttctattttcagattgggaatgcctctaacagcaccttggtcaatgattttcttcatgcctcttaagtgcagatgtccaaatctttgatgccatattttgacttcatcttctttggaggatagacatgtggaggagtaactggtttcttgaggtgtccataggtaacagttgtcctttgatctgctgcccttcattagaacttcactcttctcatttgtcaccaagcattctgactttgtgaagtttacattgaatccttcatcacacaactgactgatgctgatcagggttgcagtcagtcccttcaccagcagtactttgttcagactangaagtccatcatggactagctntcccattccaatgatctttcctttagagccatct

SEQ ID NO: 7172 - DNA, 426 bp, Glycine max
  unsure (1)..(426): unsure at all n locations
gtaactnttattaagatntcatataataataaaataaaataactgagaaatatgcaaataatagaatccaaaaatcaacatttgaatatttaacacaattgagctaatgagtttttatagcaatagtttgtatatcttagaccaaaccaagaaactttaaatccttactacctaaaatagtaattacaaaacataccaaaataagggcaaaagtatattttggatgaactataagattgagatgtcatacacaaattctaagagcaaagaagaaacatgtgtaaaaaaaagattcctatattaatattattaatatataatgtacaaataataaataatattataatttaattggtttttttcttattatcaatcaatntgtttaaatttaatgtatntatctaaattacttctggttaaaacaca

SEQ ID NO: 7173 - DNA, 446 bp, Glycine max
ctgataaaatccaatgaacacaaatcactatgtgcttaatgcaaaaattgtaagggaaagaataaacaaaaataaatattaacggaacagaaacaagtaaatattggtacccaagtcacaaggctttgctgtcctcgtggcagtgtatgatccactggtttacgccccgttaagagttccagcagtataactccaaagctataaacatcactttctgaagtgagttgtccagtcattgcatatctgtcataaaaaaatcaagcccaataaattataaaaaaaccacaacttgtgtaaagagagttaataattggccctaaagtggattgaagttcagtacatcactgtccaaagatatttctaatttacaattaatcagtttcatgtttactcaattgtgattttcatattctcttattccaagtttttcatctttcaacttaagc

SEQ ID NO: 7174 - DNA, 355 bp, Glycine max
  unsure (1)..(355): unsure at all n locations
taatatcatcctcttggacaaacccttatatnatttctgtccaggagaccacattatggacttgcatctgggaagaccgtctatcaacatcactcatacatgcaaattttgcatatgaatcaacaatagcagactccacaaagacatctgttgcaccacattagattgcccacccatgaactcctctcccaatatgcaaatctttaagcacacaacatgctcgcagattgctcggaaacgcatagctatccggcattagagatgcatggtacattccacgaaacagattctaagcaacccagcgtcctccactataaactgccaacgatacaatagcattccaacatgccacgtt

SEQ ID NO: 7175 - DNA, 398 bp, Glycine max
  unsure (1)..(398): unsure at all n locations
ttctatgtcatctntaaataaagatctggtggtaaagaccccaactagtggttntgtgttaacttgtaatgtgtatttaaattgtcttgtggaaatttttagtagaacattcttgattgatctgatttgtttgcctttgaaccaaattgatgttattctgggaatggactagttatcttccaaccatgtcttgttaaattggtttaataaaaatgcagtgtttgatgattctggagtgagtaaggataggatgtttatctttgccaaccaagttgtgacatctttaaaagaagatgcttaagtctacatgatcatgtctaacctanaagtagagacaaaggtttccatgggtgacctccctattgtcagagagtttcctgaagtgttccctaatgata

SEQ ID NO: 7176 - DNA, 413 bp, Glycine max
ttaacaacacagaccattgttgtaaaatttatagtcatttggttgcctgttaactcaagataatagatacacaacccacatgtttcaaggagctgagtgattttctcatgcaactgcaaagataattgaaagaatatcatctgactgaatttctaaaagcatacaaatgcttttcccctcacaaggaaaggtaaacaaggaaatcagtcagttaaatatgccatacttgggtcctgcagacattgtccgacaattctcaggagtacagaactctgtaagggtaccataaagcagattcacctgattgaagaaatcaacagctgtaatgcatgaagaagaaaaaaagaagtcagtttactgcatttcagaattgtatgaattatgaatatatagttgaggaaactagagaataa

SEQ ID NO: 7177 - DNA, 439 bp, Glycine max
  unsure (1)..(439): unsure at all n locations
aacctttgctnnttttgctagactagaagctataagaatcatgctttcctttgctactcataaaaatataaagttatttcaaatggacgttaaaagtgctttcttaaatggctttattgaagaggaaatatatgtcaaacaacctcttgggtttgaagatcatactcttccagaccatgctttcaaacttaaaaaagctttgtatggtctaaaacaggaaccacatgcttggtgtgacagactgagttcatttctcttagaaatggttttattaaagtcaaagtggatacaactctttctaaatgagaagttggcaaagatttcattatagtccaaatgtatgttgatgatagtattttcgaagctactaatgaatctctttccaagactatntttgatctgatgaagagtgaattccgaatgagcatgatgggagaac

SEQ ID NO: 7178 - DNA, 379 bp, Glycine max
tctcagatccggtcatggaaagacttggcaactgccttaattatgcagtaccaatacaacacggatatggctcctgatcgaaaccaacttcagagcatgaccaagcgggaacatgagtccattaaagaatatgctcataggtggagagacctagcagcccaagtcgtcccgcccatgactgaaagggagatgatcacgattatggtagatacgttgcctacgctctactacgagaagatgataggatatatgtcggctaactttgtagacctcatcttcgctgaagaaagaatcgtgtccggactaaaaaaaggcaagtttgaatatgctttcaacgttgcccccaacaacaatagaagaacctcagtggtggacacac

SEQ ID NO: 7179 - DNA, 361 bp, Glycine max
  unsure (1)..(361): unsure at all n locations
gcgcataacacgncgagaagcccgaaannaaacaacgaaagcccgngagaaanncaaangggcataaccnccgacacggacggccgaancaggcaaancacanancgagacgcccaaaanngaacaacggaagctcctgagaaattcaaatgcttataacatatagtgacactcgaaatgtccgattcaagcttataatatatcgatacgctcgaaataaaacatcgaaagctctcgcgaaatttaaatgggcataactcttcacacggatgtccgattcggacgcataatatgtccagagggctcgaattgaacaacggaagccctcgtgaaattcaaatgggcataacttttacactga

SEQ ID NO: 7180 - DNA, 359 bp, Glycine max
  unsure (1)..(359): unsure at all n locations
ttgagccaattcaaacgacaacaacggtgtttctcgaaatantttattgaggcccataatatatcgagacggtttatattgaatgttgaatctctgagcaaattcaaacgacaatagctttatactcggacgtctgattgagtgccgtaacatatcgagacgctcgaaattgaatgttgaacctcttgagacaattcaaacgacaataacttcttactcggatgtctgattgattcccgcaatatatcgagaccctcgtaattgaatgttgaagccctgagccaattcaaatgacaatagatttttactcggatgtctgattgagtccccgtataatttcaggacgctccaaattgaat

SEQ ID NO: 7181 - DNA, 429 bp, Glycine max
  unsure (1)..(429): unsure at all n locations
ntgagcaaattcaaacgataataactnttgactcggatgttcgattgtgtcccgtaggatatcgagacgctcgtaattgaaaacggaagctttgagaaaattctaacgacaataacttttcactcgaatgttcaattgagtcccgtaggatatcgagacgctcgtaattgaaaacggaagctctgagaaaaatcaaacgacaataacttttaactcgaaagtcctattgagccctgtaatatatcaagacgctcgaagttgaaaacggaagctctaataaaagtcaaacgacaataacttttgactcggatgtccgattgagtctcgtaatatatcgagacgctcgtaattggaaacgaaagctctgagtataatccaaccgacataacttttaactcggatgtgctagatgaatcccgtatatatcga

SEQ ID NO: 7182 - DNA, 448 bp, Glycine max
  unsure (1)..(448): unsure at all n locations
agatactaagctatgttaaaggataaataaggaaaataaaaattttttattaaaatngaactcataatcatttattcataaaataggcaataaatcactaactcacttgtttaccttaattaacaactttaacattattttttatgtattattagtctagtgttattaattttttttcaaattatcaaattttataaattaaaaatatttaatatataaatctttttaattttactttatatcattttacatttttttattttgaatagtctacatatttttatttttactttaccaattttaattaaatctcataaattaatatgtaattatttacatgatttttttaattcattttaatatacaaattattcttactctaattattaacataaaattattcatggacaagacaataaaacacctgttttgttctgtagctatatta

SEQ ID NO: 7183 - DNA, 381 bp, Glycine max
  unsure (1)..(381): unsure at all n locations
tattctntatctagagtagttgagcacaacaacttactactgacatatattcgactttagtagcggacaatgtagttgagccttgcatcttgcatattcatgttactaaggtagcaccgataaagtaatagcttccactagtgctttttctttcaactttatcaccgacatagtcaacatcataatagcttgtaagtctgaaactttctcttctttggaacataagaccaagattagaagttccaattaaatatctacaagatatgtttaatattagttaggtgaacttccctttgttcttattgaaatcttgcacatagatgaacattgaacataatatcataaatggatgcagggagatagaccagtgagttgcatcca

SEQ ID NO: 7184 - DNA, 392 bp, Glycine max
  unsure (1)..(392): unsure at all n locations
tataaagaaaaatgatggcatgattttaacccaatcacactatgttgaaaatctgttgaagaagtttaattattttgatgtgaaacctgtttctactccttatgactcatccatcaagctaaagaaaaatttgggtaaaggaatttcttcacataaatatcctcaaattatcggttctttgttgcatttgacaaacttctccaggcctgacattgcatatgcagttggtagattaagaaggtatactaataatcctgatcattctcattggattgcattacaaagagttcttagatacttaaaaggaaccatcaattatgacattcattatacatcgtttcctgcagtaattgaggcgtttagtgatgcanattggatttctgattctgatg

SEQ ID NO: 7185 - DNA, 440 bp, Glycine max
  unsure (1)..(440): unsure at all n locations
tgccaaatgctctattggctgatgagttggtccatcctctctaagtccaatcgaatcatgagtcatcacataaataactccaacttcacacagtgcagaaatccttatggcagctctcatgtagtcagtgaagacaaagggcatttagattttgctgaaacaaatttcttgtagcatctgtagggctttctggagcgtatgtctgaaagttgaaatttaattagaagggtagtcaataatccagaaacaaatgatggaagtcaagttttatttatcttaaaagtttgaaggctatacatgcatgaagcaaaaagatagatgatgagtgaagatgcaatgtacttaatatgaattntaactgtaattaggaaagttaatgattataacaaaccatggaaacgaatcaccactattcagtannaatgggatacacatcattc

SEQ ID NO: 7186 - DNA, 410 bp, Glycine max
agcttgctcgtcttgctgatatttatcatgttgacttttctgatgatgaccgaggaacaattagggatcaacttgaaacttatgtgcttcaagtgagaagaaatgcttctttttccacttgtgaagatgttcaaagtttggctatgaagatggttcaaactgagaaacatttggtatttccattggtttataaacttattgagctagctttgatattgccggtgtcgacagcatccgttgaaagagctttttcagtaatgaagattatcaagtctaaattgcgcaataagatcaacgatgtgtggttcaatgacttgatggtgtgttacaccgagcgggagatattcaagtcacttgatgatattgatattattcgaacatttaccgcaaagaagtctcggaaaggacac

SEQ ID NO: 7187 - DNA, 429 bp, Glycine max
  unsure (1)..(429): unsure at all n locations
ctaataaagagcatttaaagaaaataattttataatctctattgatatgaaatgacaaatgacagcaataatatatgcttttgttttccattgtctaacaatgacttgtagtttaaatatgaaaatatatattaaatttcattttctcttaatgtatttaaaataaattcatttttgtttcacaagaagatttgaacatgggagagatgggagattaataagaaaaaaaatcctcattttccttccattatccttattattattgttaatatagagatcataaatattttttttatcaaaaatcatcctgcaataaaaatattagttaaattaaaacaattttatacccattgatgatggtcagtcaatccattctccttatcataaatctttcaaaagatattagnaacatttttccttctttgatac

SEQ ID NO: 7188 - DNA, 442 bp, Glycine max
  unsure (1)..(442): unsure at all n locations
agcttccatcttanaccaaataatgttaacttataaatttcatggtagtgagcaatgcaagaacaaatgataatgagtctcaactcttactacacaccaggctaaaaacaacaagacagccttattttatcaacacttgttcagccaacacctattatatgtccatttttaaaattaactctagaaaaataacttattttactataaagacctagagtaaacccctattaatgaaacacaactattggcagaaaaaaccgttttaaggacaaaaacctgattaacagcttcaccaaaagccacaaatgcaaactccccaccaggagcaagaagtagaccaactctgatggcagaaatgagtgaaatcccaaacattctacctatcaaacaaaccaagatagtcttgccacatattaagagtcctagtgtgcccgtaatgact

SEQ ID NO: 7189 - DNA, 259 bp, Glycine max
  unsure (1)..(259): unsure at all n locations
tatatatcgatacgctcgaaataaacattgtacactttcgaganaggcaaanggccggaacttttcacacggatgtccgagtcgggcgcataataatgggagaggctcggaattgaacaacgaaagctcttgagaaattcaaatggacataacttttcacactgatgtccgattcatgattatactatatcgatacgctcgaaattaaacatcggaagctctcgagaaattcaaatgcgcataactgttcacacggatg

SEQ ID NO: 7190 - DNA, 413 bp, Glycine max
tatcagaaggggaatggtaaaataccacctctttctgatattatgaaggtggcaaagtgtttcttttgcaagaagaagggacacatgaaaaagaattgccccggattccagaaatggcttgagaagaaaggtaaatcaatctcattagtatgttatgaatctaatatggttagtgttaatattaacacctggtggattgattctggatctactattcatattgcaaattctttacagggtatggaaaacctaatgaaaccagtgggaagtgagcaaagcattttatcaagcaataagctaggctcacatgtggaggccattggaacttgcattctgactataagtagtggctctattttaaaattagaaaggactttttatgtaccaagtttttcccgaaacttgatttctat

SEQ ID NO: 7191 - DNA, 421 bp, Glycine max
tagctagatagaatgtcaaagatggaagatactttaacattgtttatgcaagtatccatcgcaaaccaaaagaacattgatgcttctgttaaaaatctagaagttcgagttggacaactggctaaagagctatctgaacttggaagtggatctttctcagcaaccacacaggtcaacccaaaggaacattgtaatttaattacaacaaggtgggggattatggttggtttgaaggataatgatgagaaaaagaataaagaaggagttgaaaaagaaaatgaggaaaaagatgaagtggtaactagtgaaaaagtggtaagtgaagaagagaaaaagaaatcaaatgaacaaaccactgataaaggtaaagttatagtaaaccatccaccaattgagcatcttccttatctgcatgctccat

SEQ ID NO: 7192 - DNA, 438 bp, Glycine max
  unsure (1)..(438): unsure at all n locations
cctcctcaactcatctgtcaacttcctaatatgactattcatgtattatattngtttacattnttgtatatatagtaacaagtctggtttgttttggccttcgattatttcaatttttccattgttggttcctgcaccttgtgtctataattatttgtttgcttatttggggttcaggctgatgccaagaccgatgaagtgtactcgcaaatgaccttgcaacctctgaatcttgtacgataagtgataacactgtcttaacttttcattgataactagtgttattgcttttgtagttatttaggttttaactaagaccgtgtttgtggtaagaccaaaaggaggcatactatccagcagagctggtcaccccaagtaaacaaccaacaaactatttctacaaaactttgacaatcagtggcgcaagcactcatgggg

SEQ ID NO: 7193 - DNA, 432 bp, Glycine max
  unsure (1)..(432): unsure at all n locations
ttctggcggacatcttgacttgctgtccaatctgacatttttcacagtttctgccttcttctattttcagattgggaatgcctctaacagcacctttgtcaatgattttcttcatgcctcttaagtgcagatgtccaaatctttgatgccatattttgacttcatcttctttggaggatagacatgtggaggagtaactggtttcttgaggtgtccataggtaacagttgtcctttgatctgctgcccttcattagaacttcactcttctcatttgtcaccaagcattctgactttgtgaagtttacattgaatccttcatcacacaactgactgatgctgatcaagtttgcagtcagtcccttcaccagcagtactttgttcagactangaagtccatcatggactagctttcccattccagtgatctttc

SEQ ID NO: 7194 - DNA, 314 bp, Glycine max
gtagatgaatatgaagccgtgtccaccttttggactcctctaagaacaataacatcatttcttgcactgaattgttgggagttggaagccatcttctcaatcaaattcctagcctcagcaggggtcatatcaccaagagttccaccactggcagcatcaatcatactcctctccatgttgctaagtccctcatagaaatattgaagaaggagttgctcataaatctggtggtgaggacagcttgcacacaatttcttgaatctttcccagtactcatacaagctttctccactaagttgcctgatgcctgaaat

SEQ ID NO: 7195 - DNA, 432 bp, Glycine max
  unsure (1)..(432): unsure at all n locations
agctgggntcttcgggtttctattgtcgcttcaccatnnnacacaggaacattgattaaaagatgtatggacaagaattccaacattagaacctaccctgatataggtgaacttgcatttggaaagacaggaaggctaatagtatcagtgtccatgtacaccgagctctacttagtttcgatagggttcttgattctggaaggtgataacttacctttttccgtttcaaactcagatacataacaaaattaggaatgtattgtatggcctactattttatttcttcaagactattgcattgcttattgcttataaaaggtagggaagggttgctgttagtcttttcatttaaataccaatatgatgcacatcattttaactatgcaacggtgcctggatagataattgagtcatttggtactgtataaaaaa

SEQ ID NO: 7196 - DNA, 300 bp, Glycine max
  unsure (1)..(300): unsure at all n locations
tcgacatcagaccacttccattgtgctggttctacttcttatggatttgatggggcctatgcaggttgaaagtcttggaggaaagaggtatgcctatgttgttgtggatgatttctccagatttacctgngttaattttatcagagagaaatcagaaacctttgaagtattcaaagagttgagtctaagacttcaaagagagaaagactgtgtcatcaagagaatcaggagtgaccatggcagagaatttgaaaacagcaggttcactgaattctgcacatctgaaggcatcactcatga

SEQ ID NO: 7197 - DNA, 417 bp, Glycine max
agcttcaaggatgaggactacccttgtttctctgacatagcaaactttaagggcacaggacaaccaccagaaggtatgcaatttcacgagagaaaaaggttcttctgagaagccaccaggtatgtttgggatgaccttattctttttcgtattggtgattgcaatttgttaaggtgatgtgtaacatagggagaacaaactaacatactttggcattgccatgactcaccatataaaagccacttcaacgaagaaagaacaactgcaaagatccttcaagcctgattctattggcccatactcttcaaagatgctcataagcatgcacgatcatgagacaactgtcaacaaactggaaacatatccacacggcatgaaatgccattacagaacgtgtaggaggtaaaagtctttgat

SEQ ID NO: 7198 - DNA, 413 bp, Glycine max
  unsure (1)..(413): unsure at all n locations
agctntacaaaagaggagagtntattngactaaggttatctcaatngaacaaagaaaaatcacaaattttccccctttatacattntttccccaacaatcatggggtttcaaaaaagttgaagcacaaataaaatgaataaatgaacttacatcgagtataaacaaaagtgccataattggaggagctgcatatccaagcccttccaaaatggcatctaacgatagatggaaaccacccagagagtcaattcccgtgattgaacatataaaactccccgcaacagccatggcaccatatatccctgaaacaaagcaattccatcgcaaagttcaactcacagtaaacaaaatcaagattcccattttcccaagtggaaaattcattgatttgattgaagagagtaagtttttt

SEQ ID NO: 7199 - DNA, 390 bp, Glycine max
  unsure (1)..(390): unsure at all n locations
aaccagaataattggcattccatactttgtcaggtctaataaaaaacaagatataaacttctcattattcttaggctgttgaagatagttaaaaattgaacccttaagccagtgagtggaagcattataagcatttaggaaacttaccgctgtttctacccatcaacttgacaacacctatgccattttctacactttcagcttcaacatgtgctgcatttatagctcgttgagcctcctcaacagcagtgtcaaagccaaaagacttatcaataacctattaagcaagagacagcagaagaaattaccaattaatgatgctaatggngtttaaattatgagtttaaagccacaatgtagaaggaaaanaaaaacttactggaatatcat

SEQ ID NO: 7200 - DNA, 439 bp, Glycine max
  unsure (1)..(439): unsure at all n locations
aaagttgaaactgtgtgacagngncctcctacctacctgtcaccggaaagggacagagacgacgcagatgcactctccacgtcaaaaaacgacgccgtcgaatacgaatgaacataacccttaaactccccatctcccccgccaccttctttcttcccatcccccacctccggcggcgccacctccctctccatgtacctcaccacctgcctcatactgggcctctcttccggcgcctccgcggaacacaacaaccccaccttcaccaccaacaaagcctccacctcatcaaacaccccacccaacctacggtccaccaccgccaacacgttccccacgcgccaccgttcccacacccactccaccagcacaagctcctccggctgcgccttcacctcaatcggtctcctcccacacaccacctacaacaccaacgccc

SEQ ID NO: 7201 - DNA, 389 bp, Glycine max
  unsure (1)..(389): unsure at all n locations
gataaatctgccatatattcagccggtattaggcctcatgagctntctcatattcagcaacttactggatttagcttgggtgacttcccttttagatacttgggtgttccccttttatcatctagattaaatgtatgtcattatgttcccttgctttccaagattactagcctgattcagggatggagcaagaagtctttatcttatgcaggtaagttagagttgatcagagcagttattcaaggaattgtgaagttttggatgaggattttttctttgccgcaatctgttctggaccagatcaaaacttcgtgccgtaattttctgtggggcanagcggatattggcaaaaacaagtccttggntgcttggtcagtagtttgttctcc

SEQ ID NO: 7202 - DNA, 383 bp, Glycine max
  unsure (1)..(383): unsure at all n locations
ggaattcatttagatgtttccttatatgatcaagtacaagaatggtaaggaaaacatagtggttgatgctttatctagaaggtatgtttttcttacttctttgcaaactaaattgcttggttttgagtttatgaaggacttgtatgctaatgattctgaatttggcaaagtatgggattcttgctctaaacatgtttttaggaactattatagatgttcatgtttcaaaaaaaaaagttgtgtgtgtctgtgttccttgcatgaaatgttagtttgagaaatcatggtggtggaatgatgggacattctggtgtgaaaaagactntataaattctggataagcatttttattagcctagcatgaagcatgatgtgcaacctat

SEQ ID NO: 7203 - DNA, 433 bp, Glycine max
  unsure (1)..(433): unsure at all n locations
ttatgaggagaagcataagatgaagcangagatcaccatgtgactcttcatgttgcaactgaaggagaaggaagaaagtcaaggaaatgaaagaagtcattgaggccgaggtagaggttgaggtcacggtcgaggataggttggaggtggcaatagtgtacgaggttcaaatttcatcaacaatagttacgagaaatgaaaaagctcaagagaatgtggaaaaggctatacaagcacaaggtatgataaatctcaaactcgatgttataaatgtcaaaagattggccactatgcttcaaaatgtagattcgccaagaatagagttgaggaggagactaactatgtggagcaaaaggatgagaagtttcaaatagtgctcctagagtgtggaagtaatgaaggtagccaagaaaacacatggtaccttgacact

SEQ ID NO: 7204 - DNA, 344 bp, Glycine max
agcttgaaggtaaactagatgccttggttatcctgttaacctaactggccatgaataaaaaatctgcacttgtcgctagactctgtggtttatgttcctctgccgaccaccacacagacctttgcccttctgtgcaacaatctgaagcaattgaacagcttgaagcttatgctgcaaacatctacaacagacctcctcaaccttaacagcaaaatcagccacaacagaataattaagacctctccagcaacaggtacaatcccggatggaggaatcatcccaaccttagatggtcgaatccttcacaacagcagcagcaacaacaacagacttattttcaaaat

SEQ ID NO: 7205 - DNA, 434 bp, Glycine max
  unsure (1)..(434): unsure at all n locations
aagcttnttccattaatatgaatttatacttcataaaatcataagcatgcgtgaattgtatgctaccagcttaacatttacggccagaaaattgattgcagtagtgaacattgttgaaatcaggaactggacactatttccaaaaggaaaatgcttcaatttcaaatttacaatttttttttaaacctcattgctaccttaaatttttttggtgccattaacaagttgatttcattatgtttataccattacagttgtgatcataaatgaaagttttacctctgtggatcaacttcaggttttcccatttggttcttttcctctaaaaacctatcttcctgatggagatatcgacttgacagctcttagtcatgaagatgaagaggaggatttggtacgagcagtatgcaatatacttaanagtgaagatgact

SEQ ID NO: 7206 - DNA, 436 bp, Glycine max
  unsure (1)..(436): unsure at all n locations
cattgccattacagccgcggataccccgattctccacactcattccggaatgagtnngtacccaaacaagaatggtcaggctcacaagttctcccaaagagaatgcaaaatatgcagcgttgaagtaggtagagagcttctttaattgcttggggttgtcttggtcgaattggtcgcctccgtaagcaaccatgtttggcttgacacaaccactacctaatgccaccaagtacagggctacgaagaatatcatggtcttcatgccctttgcttctgagcactgttctcctaaatcgttgatattgcatgggggtggcttcaactgaggaacatgagcttggacagaaagcaatatgaaaccctgtaaacataatattatttgtatatatatgtgtgaaggctgtctaaatagtgaataaaaagtaatagaatgagt

SEQ ID NO: 7207 - DNA, 391 bp, Glycine max
  unsure (1)..(391): unsure at all n locations
acacttctccatgaaagtgtatttatctaattgtccatgttgatgacatagttattacagggaatgatgttgctacaatttgtctgctgaaaaagcacttattcatccactttcataccaaagaccttgggtgtgtaaaatactttcttggtattgaggtgactcaatcaaacgaaagcattgttatttctcaaagaaagtatgctttggataggtttttttccagcaatacactccatctcccctatttgctcaaaatacacctctttgtatactaatacccaaaatacaactttttctcacctttgagaagttgagactggccaccccgacttctgtacgacgcgccctttttaaatttaatttttaaatttattttaaatntatgttt

SEQ ID NO: 7208 - DNA, 435 bp, Glycine max
  unsure (1)..(435): unsure at all n locations
ctttcttggccaatgctggacttgtttggcagtgatttccttggcaatttgatgctcagaaacagcaagatccaccactccttcagttggtctgcccaggtatttgttgatcacagcaggggagaatctaacacattttcctctgacaaacactttctgataatcatcactttttctgtttgttatgtcagagggaatgctgacaatgaattcccttactagactttcatagcaatcgcccaacttggtgacagttttcatcagtccagcagccttgatgaggtccatgatctccttgcagtccaaggcatttcttcccagttctctttctaaagcaagccttcgttgatatacaaatttccacctttcaacattgccaatggagtggaatgagatgttgtccaatggtgcatcanggacattttcaggcacctt

SEQ ID NO: 7209 - DNA, 444 bp, Glycine max
  unsure (1)..(444): unsure at all n locations
agcttcgtcgatctctttatgggttgaaactatctcctctagcatggntnnggtaaattagtcatgttgttcanatgtttggactaaaacgaagtgaagctgatcactctgtattntactatcatacatctcctggaaaatgtgtctatctaatggtctatgttgatgatatagtgattacagggaatgatactactaagattgtccagctgaaagagcacttattcagtcatttccagaccaaagatctgggatctttgaagtatttccttggtattgaagtggctcaatcaggagatggtattgtgatttctcagaggaagtatgctctggatattntagaagaaacaggtatgcagaactgtagacctgttgaaagccctatggatcctaatttgaagctcatggcagatcanagtgaagcttatcctgaccccgagagat

SEQ ID NO: 7210 - DNA, 416 bp, Glycine max
  unsure (1)..(416): unsure at all n locations
gcttctacaaagtgaaggttgtattccccatgaaaaactcttatccattggtactttntttatcatgttcatctccagcccaatcattatcactgtaacctacaagcttatagtttttacttgttgagaaccataaccaaagatgattgttcctttgatatagcaaagaattcgttttgcagccttgtggtgagtagtggttggagtctccatgtatcgactaatgagtccagtagcatataggatgtctggtctcatgcacgtcaaatatcgcaaactacccaacaaactctttaaatntgtagcatccaccttttttgctttgtctaactttgataacttcattttgcactccaccaatgttccaatgggcttgcagttatccatcttgaatttcttgagcatctcctttgcgt

SEQ ID NO: 7211 - DNA, 375 bp, Glycine max
acgcacaaaaacagcaggatccaccattacgtcacccggcctgcccaggtatttgttgatcacagcaggggagaatctaacacattttcctctgacaaacactttctgaaaatcatcacttattctgtttgttatgtaacatggaatgctgacaatgaatccccttactagacattcattgcaatcgaccgacacggtgacagtactcatcagtccagcagccttgatgaggtccatgatctccttgcagtccaaggcatttcttcccagttctctatctaaagcaagccttcaatgatatacatatttgcacctttcaacattgcctctggagtggaacgatatgtcgtccgatggggcttcacgcacattctc

SEQ ID NO: 7212 - DNA, 417 bp, Glycine max
tgatgcagctgaattggtttctaccttatgcactcctctaacgactatagcatcatttctggtgctaaactgctgggagtcggaagccatcttatcaattaaatatctggcttcaccaagagtcatgtctccaagggctccaccactggcagcatctatcatacttctctccatattactgagtacttcataaaaatatcggagaagcagctgctctgaaacctgatggagacggcaactggcacatagttctttaaatctatcccagtattcatacaggctctctccactgagttgtctaatacctgagatatacttcctgatgactgtgatcctggaagcagggaaaatgttttctaagaatactctcttcaggtcatcccagctcgtgatggaccttgggcaaggtaatacaac

SEQ ID NO: 7213 - DNA, 440 bp, Glycine max
  unsure (1)..(440): unsure at all n locations
agcttctggtgggacatcttgacttgctttctaatctgacattcaccacagattctgccttcttctattttcagattgggaatgcctctaacagcacctttgtcaatgattttcttcatgcctcttaagtgcagatgtccaaatctttgatgccatattttgacttcatcttctttggaggatagacatgtggaggagtaactggtttcttgaggtgtccataggtaacagttgtcctttgatctgctgcccttcattagaacttcactcttctcatttgtcaccaagcattctgactntgtgaagtttacattgaatccttcatcacacaactgactgatgctgatcaagtttgcagttagtcccttcaccagcagtactttgttcagactangaagtccatcatggactagctntcccattccagtgatctttccttt

SEQ ID NO: 7214 - DNA, 424 bp, Glycine max
  unsure (1)..(424): unsure at all n locations
agcttcaagaataatggcctcattttttcttttattcttagaaggaaattcaataaataggcctcctatttttaatggagagggttaccactactggaaaacccgaatgcaaattttcattgaggcaatagacctaaacatttgggaagccatagaagttggaccttatgtacccaccatggtagctggaaatacaacaatagagaaacctagagaagagtggtctgaagaagaaagaagattagtgcagtacaatttaaaggctaaaaatatcattacttctgccctaggaatggatgaatattctagggtgtcaaattgtaagagtgctaaggatatgtgggacactcaacaagttacacgtgagggagcaactgatgtcaaaagatctangataaatactctaactcatgagtatgaatta

SEQ ID NO: 7215 - DNA, 433 bp, Glycine max
  unsure (1)..(433): unsure at all n locations
agcttcaaccaaaggatggtttttctttgtcttgaaaggataaatgacaatgcatacaagattgaattgcccggtgagtataatgtgagtactacatttaatgtgtctaacttagctctttttgatgcagatggagaagtcaatttgaggaaaaatccttttgaagagggagagagtgatgaggacatggcaaggactaagggcaaggaacctttagaaggacttggaggacctatgacaagggttggaacaaagaaggccaaggaagctcttcaacacgtgttaaccatgctatttgaatttaggcccaagttacaagtggagaagtttcggattgtcaattgcaccatgttccaagaagagtagagggtgccacctttgttgagtgtttttattagcattntgttagttgaaataaaggcccaaacttgtg

SEQ ID NO: 7216 - DNA, 303 bp, Glycine max
  unsure (1)..(303): unsure at all n locations
accttgagcaattcaaacgacaattacgtttttaagtatgttcgatngagtcccgtaatgtatcgaaacgttcgaaattgaatgctgatgctctcagcaaattcaaaagacaataacttttatctcgggtgtgtgattgagtcccgtgatatatcgacatgctcgaaattgaatgttgatgctctgagcaaattcaaactacaataactttttactcggatgtctgattgattcccgtaatatatcgagacgctcgaaattgaataccggaactctaagaaaattccaaccgaccataccttt

SEQ ID NO: 7217 - DNA, 425 bp, Glycine max
agcttcagaattcaatttttcgcgtctcaatatattacgggactcaatcagacatccaagcaaaacattattgtcgtttgaattagctcagagcttcagaattcaatttcgatggtctcgatatattacgggtctcaatcagacatctgagtaaaaaagttattatcgtttgaatttgctgagagcttcaacattcaatttcgagcgtctcgatgtattacgggacttaatcagacatccgagtaaaaagttatcgtcgtttgaatttggtcagagcttcaacattcagtttagagcgtctcgatatattacgggactcaatcagacatccgagtaaaaagttattgtcgtttgaaaatcctcagagcttcggtattcaatttcgagcgtcttgatatattacgggactcaatcagacatccgag

SEQ ID NO: 7218 - DNA, 439 bp, Glycine max
  unsure (1)..(439): unsure at all n locations
agctntgccgccacggaatttccgactatgttcttgtgtggtggaacaagctacaaaaggagagagcaagaaatgaagagccaatggttgatacatggacggagatgaaaaagatcatgaggaagcgatatgtgccggctagttactcaagggacttgaaattcaagctccaaaaactaacccaaggcaacaagggggttgaggagtatttcaaggaaatggatgtgctcatgattcaagcaaatattgaagaagatgaggaggtaactatggctcaatttcttaatggtttgactaatgatatccgtgatattgttgagctgcaggagtttgttgaaatggatgaattgcttcacaaagcaatccaagtagagcaacaattaanaaggaaaggagtggctaagaggagttttaccaactttggttcttctagttggaa

SEQ ID NO: 7219 - DNA, 336 bp, Glycine max
  unsure (1)..(336): unsure at all n locations
tcacctctcaatgagctggtgaagaaaatgtggcatttacctggggtgaaaaacaagagcaagcctttgctttgctcaaagaaaagcttactaaggcacctgttctagctcttcctgacttttctaaaacttttaagctagaatgtgatgcctctggagtgggagttagagttgtattgttacaaggtgggcaccctattgcttattttagtgaaaaacttcatagtgccaccctcaactaccccacctatgataaagagctntatgccttaataagagcccctcanacttgggaacatttccttgtttgcaggaatttgtcttcatagtgatcac

SEQ ID NO: 7220 - DNA, 458 bp, Glycine max
ccgggaccttaagcacctgcagctgcagcttgatgttggttaatgtctaaattatttataccaaaagcaagaaattaggtgcatatagagatacaaacgccttggaattgatgcatacagacatttgtgggccatttcatacacctttatggaatggtcaacaatattttatatcattcataaacgattactccagatatgcatacatgtttcttatacatgaaaagtcacaatctctggatgtgttcaaaacatttaatgttgaagttgaaaatcatctcaacaaaagaattaagagtgttagatctgactgtggtggtgaatactatggtagatatgacggttcaggtgaacaacattcggggccttttgctatgcacctagaggaatgtggaatcattccatagtacaccattccagggtcacctagcgtgaatgatgtggctaaaagatgaaat

SEQ ID NO: 7221 - DNA, 436 bp, Glycine max
tcatagttattattataacacagctacccatattaaacatacttcatctaatacttttttttggggggaatcaatgagaatgagaaacatccacacaactttgcagggacataagcatgaaagcattgtgacaaaaatactcaattagaagagaagaaaatgagagttaattgacaaagctcgctcaataataatcaatattcattataagaatatttcccagcaatgtttcatcaaattctgctttacacaaaaaaaaaaaaaatcaccaaactttgcttgaggcttcaagcaatcccctaacaaattccaaacacaaacttttgtgtatcactctgaaaaatataaacgaatactatatagatcataacagtcatgatctctccctagaaaaacctaagcttgttcaagacagttctcctttgctggagaaaga

SEQ ID NO: 7222 - DNA, 331 bp, Glycine max
  unsure (1)..(331): unsure at all n locations
tagtttgttacaactggggtaattatcagtttaatttgttagttatgnggaccaacttatcaacaaatctccaccttggttacataactaaacaaggatcaaagtggttgctcccttttttgacatcagactagctgacattacttcaaatttataaggtccaggcagtagaaaaacttgatgcttggtagaactttagtgatcatatgagagggattatgcttagtggagactttctagacaaacacaactccttcataaataatctctctcacaaagtgtagcttcacatctacatgttatgtcctttcgtgataaacttggttctttg

SEQ ID NO: 7223 - DNA, 434 bp, Glycine max
  unsure (1)..(434): unsure at all n locations
agctnttgtcactccaccttaatcttgtctttatgttaaccaaagctagcacagctgataacatagtaaagcttttgcatccaacatacaatggcgtatgcgcatctgtttgaagagcatcgtaaatatctgcatgacattcccgaaagccctcttgcccaagatcacgtatcatgtcttccatgagatctccgctttgtagatcaaccggatgaggtggacatgttgctgtatgaccaaccaactcaccatgccatatccactttgtgtacgtcgggctaaagccatcacatatcagatgcgatctaatgtcatccaacgaatgacgcctcccgttgacacatttaacacaagggcagaaaaagttgccatctgtggttgctgaatgtatnttggcanatgacaaanactcttcaactccatgttgataagct

SEQ ID NO: 7224 - DNA, 430 bp, Glycine max
agcttatcaacatcaaacttggagtatgagttcttggggtcaagacatgagaagcaatcaagtataatgttacttccttcactaaagcggtgatccatctccacacatattttatcaatagcaacataaaaaatctctgcacggtaatgatgaagattagtgatagtcctcccttctgctcttgaacgaccccgaactggtatttcgtcatccatatttggtaccagaatacttttagcaacacaaaatccttggacatcggcaaaaaaattattccagccactctctctcattgtgcccaaccgagctttgacaacatcaactaattccatgacattcacaatattaagatcttttctttgcaatatatttgaaaagctcattgtttcctatgacctggatcacgcacaatctcattggggttaaactc

SEQ ID NO: 7225 - DNA, 439 bp, Glycine max
  unsure (1)..(439): unsure at all n locations
tcgagaagaaatcacatgtttgtcatcatcataaagggtttataatgtgaatgtatgtatacatgattttgatgatgtcaaagaagaatctaacaaggctgcttcaaatgataagcatttgcttcaagaataattcaagattgcttcaacaaacaaagccttgtttcaagattcactaaagaccaagccttgccttaaaacattgtgctttcaagacatgcaaggctctggtaatcgattaccaggaagtgtaatcgattaccagaagacagggttgagaaatagctgttgaaaaaggttttgaatttgaattttcaacatgtaatcgattaccatatgtctgtaatcgattaccagcaacgaaactntggaaattcaaattcaaaagtcataacccttcaaattataactgtgtaatcgattacacaaacattgtaat

SEQ ID NO: 7226 - DNA, 291 bp, Glycine max
  unsure (1)..(291): unsure at all n locations
ggcttctacaaagtgaagggtgtattccctttgaaaaactctaatccatngggactttatttatcatgttcatcttcagcccaatcattatcactgtaacctacaagcttatagttgttacttggtgagaaccataaccaaagatgattgttcctttgatatagcaaagagatcattatgcagccttgtggtgagtaatggttggagtctacatgtatcgactaatgagtccagcatcatatatgatgtctgggctcatgcacgtcaaatatcgcaaactacccaacaaac

SEQ ID NO: 7227 - DNA, 348 bp, Glycine max
tctggtgggacatcttgacttgctttccaatctgacattttccacaaattctgccttcttctattttcagattgggaatgcctctaacagcacctttgtcaatgattttcttcatgcctcttaagtgcagatgtccaaatctttgatgccatattctgacttcatcttctttggaggatagacatgtggaggagtaactggtttcttgaggtgtccataggtagcagttgtcctttgatctgctgcccttcattagaacttcactcttctcatttgtcaccaagcattctgactttgtgaagattacattgaatccttcttcacacagctgactgatgctgatcaagt

SEQ ID NO: 7228 - DNA, 424 bp, Glycine max
  unsure (1)..(424): unsure at all n locations
agcttctaatcgattacacacatactgtaatctattaccagaggagtttttcagaaaacattctcaacagtcacatttttttatctgtttcttaaatggtcatcaaaggcttatatatatgtgacttgagacacgaatttaacaagagttttcaagagcaaaaaggtcttatcctcttaaaaagcaaaatagttttatcctcttacaaattccttggccaatacacttgtgattcaataaggaattatttgagtgctcaaattgttcaatctatctctttcaagagagatttcttcctctcttgaaaagggattaagagaccgagggtctcttgttgtgaaagaattctaaacacaaaggaaggattgtccttgtgtgtttagaacttgtaaaaggaatntaanagatagtggaactctcaagc

SEQ ID NO: 7229 - DNA, 342 bp, Glycine max
gcctcacctcccaatgagctagtgaaaaaaaatggggcatttacctggggtgaaaaacaagaacaagcctttggtttgctcaaagaaaagcttactaaggcaccctgtctagctcttcctgacttttctaaaacttttgagctagaatgtgatgcctctggagtgggaagtggagctgttttgttgcaaggtgggcaccctattgcttattttagggaaaaacttcatggtgccacccttaactaccccacctatgataaagagctttatgccttaataagagcactccgaacttgggaacaatacctgggttccaaggaattttcattcatagtgatcatc

SEQ ID NO: 7230 - DNA, 427 bp, Glycine max
tcccctactcccaaaacatagaaaaacaaccgaagaatctgtctgctcatccagccattttaatatcctatcatgttgggcttgatccaaattttggttaggttgacccttcagattaatcaatggaccaacagcatagatagggggtgtttgaatttgaccatcacataatgcatcaatagcatactgctccaactctgaaaaagagttaacaatgatccctttggagtccttgaacctctgagcaagtttataataagtggcatatccaccttgtttgttaaaaaaagcatcatgcaaaacactagaaggaactggatcagggagacccggttccaaccactgaggatcagaatcattgaatgcatcaccaactttacgtttctgaatggaaaacatgatattcacaaacccatcatttgaaggc

SEQ ID NO: 7231 - DNA, 519 bp, Glycine max
ttaagaattatgggctcatcaaactacttgtttcccgagggaaattctataaatagacctcccatctttaatggagtgggttaccactactggaaaacctgcatgcaaatctttatagaggcaatagatttaaatatttgggaagccatagaacaaggaccttatgttccctctatagtggccggaagtgcaacaatagaaaaacctagagcagattggactgaggaagaaagaagattagtacaatataatttaaaggccaaaaatattatttacatctgctctaggaatagatgaatactttatggtttcaaattgtaaaagtgctaaagatatgtgggatacactacaagtaatacatgaaggcacaacagatgttaaaagatctatgataaatacatttacccatgaatattaactgtttaggatgaatgtaaatgaaagttttcaagacatgcaaaaaaggttcacacacatagttaatcatcttgcatctctaggaaaaactttttcaaatga

SEQ ID NO: 7232 - DNA, 587 bp, Glycine max
ttagctttgtccccaaggcttcatgtagacttgtccattatctctaagtgaacctcggatccctgtcggatacaatactggaaggaattccatgcaaccttaccacttccttgatgtacaactctactagcttctccattctatacttcatattcactgggataaaatgagcagatttggtgagtcgatctactatgacccacacagcatcatgtccacgactagtcttgggtaaactagatacaaaatccatagatatgctctcccatttccattccggaatttccaatggcttcaattctcctgatggtcactggtgctcagccttagccttttggcatgtcaaacaccttgctacatattcagctacatctttcttcatgccctgccaccaaaaacttatcttcaaatcttggtacatcttagtcattcctggatggaaactaacacgacttttatgcgcttcttccaagatcttaactttcaaatcatctcaagatggcacacatattcctccccttgaaactaattaacccggttgtgtccttttcaaaccctacatccttaatccccatttacatccatta

SEQ ID NO: 7233 - DNA, 447 bp, Glycine max
ttgaaactaagcttgcagactagtgctaccaacctagatagaatccctctgttgtttcatgtaaacctcttcttttagatcaccattcatgaacgccattttcacatccatttgatgcaactcaagatcaaaatgagctactaatgccaaaattactcgaagagagtctttcttagatacaggggaaaaggtctctctgtaatcgattccttctctttgagtgaatcctttagcaacaagtcttgccttatgtctctcaatgttgccttctaagtctttctttgtttcgaagacccatctgcatccgatggcttttacaccaacagacaactcaacgagatcccaaacttggttagatgccatagaatccatctcatccctcatagcattgtaccacaaatttgattgcttagaactcatggcttgtgaaaacgtgtcaagatcatt

SEQ ID NO: 7234 - DNA, 219 bp, Glycine max
gctttaactttgtttaagaaaaagattgtattttttgtataaaacctacggaaggttctcttttgaccacttttccagctattggcaatatcgggtgcattaaaaaattcccatcagttcatgggtatgtagagaaaagaggcttcaatgcctttgatgtacgcattacaaatgcattacttgatttggatgcccagtgtggatgcatagctagtgtga

SEQ ID NO: 7235 - DNA, 452 bp, Glycine max
  unsure (1)..(452): unsure at all n locations
ggagaaagagacaccttttggttgcaaacaatgtatttttttaagtgtgacacctaaattccaagcatgcaaaggttcaacatagaaataacaaaactaagataaataaataaagggggggaagagttgaatttaatgaatggattacaattaccaatggtgggggaaagatcttcaacagaacttgaaataaagctgacaagtaggctactttttcccaccccggaatctccaatcaacaagatcttgaaagagagatcatagccactgctctgacctgaggatgaactcattctctcttcctctgatgaatgtcttangtgtgtgtgtcaaaaagtacagtgaaagaaacgtatgcaagggtgagagagagaaagaagcttatggtgttgggctagggaaggctaaactgtaaagaagtgcaatggtgcaagccctttcttttatttggg

SEQ ID NO: 7236 - DNA, 455 bp, Glycine max
ttaatgtaaaccttactctcagattcaatgcactttatcttctaacaacgcttcaatctcctcttaccttttgcctttggtgtctgataaaaataaattttagaaaagtgtggcacacaccatcaccccaccaagcacaaacaacatgcctccaaatgttattgcctctaaaacactaaggaatgtcatggacacaatcccacttatcaaacggttcacaaaaatggccaagttggaaccttgggccattagccttagagggaaaatcttagaagagtagacccaagttgtcagcccacgcccaatacaaaagcatgatactgcaacatagacagcaaccacccacaaagcaatgacccattgatccttgttatcaccacataacttaagcaaggtacattccaagcccatcacaaacaatgagattgccatgctacatgagcctaacaacaaca

SEQ ID NO: 7237 - DNA, 454 bp, Glycine max
tagctgtagcctccagttgcatgacttgttaagcatcttgaatgatccccacttcctaatgttttgtttttttctctctcatattcttatcatatgtgttagatttcatcttaaaaccaattaacattaagtgaagttgtccaacagatctataagttgcactctaagacagccgatgtcggacttccaatgcacccccttcacgcccaacacttattaagcttggtgcgtgaacaacaaatggtgggtgctcatcggaggcgagagcgatgtcgcaggtcaaagcatgctttgatatcatgttagatttcatcttaaaatcaattgacattaagtgaagttgtcaaatatatgtatataagcggtactccaaaacaaataatatgagacttggatatttttcaataatatggaaacaatttgtgatacccgggcatcataaattgatggtttt

SEQ ID NO: 7238 - DNA, 535 bp, Glycine max
cttcttggctgttgccttgaaggacaagaagaattacttttttttttatacgtggctaatggcagccttaactccttcatatttggtatgcaataaatgaagaatgcttaaattaggttcacttgtgttctttcttttctttgagttatacttagcagcttattaatcttgaatatctaatattgaacaatactttttaactccttcagatcaaataaaaagtaaattattggattggccacgacgcttcaacataatacttggaattgcaaggggactattgtatcttcatcaagattctcgattaaggattattcatagagatctcaaagcaagtaatgttctactagatgaaaagttaaatccaaaaatatcagattttggaatggcaagagcttttggaggagaccaaaccgagggaaacacaaatagagtatttgggacttactgagtgtctgtctaattataatatacaccacatttactatttatctattcatttatatttgggttaatgtgaattgattgctctaat

SEQ ID NO: 7239 - DNA, 373 bp, Glycine max
aacaagacaacaaaggaagaaagaaggttgtcttctaacccggagattgggtttgggtgcacatgagaaaagaaaggtttccggaacaaaggaaatcaaagcttcaacaaaggggagatggaccatttcaagtgtttgaaagaatcaatgacaatgcttacaaagttgagcttcccggtgagtataatgttagttccaccttcaatgtctctgatttatctctttttgatgcagatggagaattcgatttgaggacaaatccttctcaagagggagagaatgatgaggacatgaccaagagcaagggcaaggatccacttgaaggacttggagggcctaagacaagggcttgagcaaggaaagccaatgaagc

SEQ ID NO: 7240 - DNA, 541 bp, Glycine max
gggaatttttttatatggtatctttataatttcctctattcatgaaacattgtcatgtgtgtgtagggcacatactgaatccagcaagacatttgaggtcttgaaatctcggtatatcacttttgtttcagcactgtgaagaaatgcaagccctttggcagcgcctagagcaactttcaaacgtagaccccaagaaagaggttgaaagtatgaccctcctgttacagcaattaatcatgtaaatgttatgcacacacttctcaagttcaacaatgtgaaaagatgggagatgaaaaactcactcatgaacaagtgattctccaagctaccacgaggcataaattcatagaccagaagtcggtctttatcttcaaagcaatacccaattaatttcactagatgaggatgagaaagctggcctaaatagttcacttcagcctaaaatagaaaagaaattaaaacaatgtaaggcaaacccatataatggtagcacttaaactcttctctgtttccaaatattcataacattattaattatgaa

SEQ ID NO: 7241 - DNA, 385 bp, Glycine max
ttttttactctctcgagctctaactctgagtggaacgcgcactgtggaggttccctatccctcgaacctaggttcaccatcactgagtttcccttttcagcttgtctacgatcccactctaatgcagccttctgcttggacctaagcaaacagaaattttgcaacttttctggcattgatcatgcaccttccaccatcttgcgtgagccacattacttgcaaactcctgcagatgtcacgttccagttgcagtcgtagtctcggagcaaagccatggcttattacccagtaatggatgacataaggattggggatcactcaaagaacgagttttattgctttctctcttctcatcacttcccaaaggcttaagaaaacatgtgtt

SEQ ID NO: 7242 - DNA, 497 bp, Glycine max
agcttgccttgccctttgataatatttgatgtgattcatggccactatgaatgacaaattccttgggataaaggtagtgctgccatgttttcaaagcccgtactgagacatacaactccttatcataagttgaatagttaagggtaggaccacttaaattttcactaaaataagcaattggatgaccttcttgcaacaacacagccccaatcccaacatttgaagcatcacactcaatttcaaaagatttttgaaagtttggcaatgcaagtatgggggcattagttagcttttgcttaagaacattgaaatcttcttcttgtttctctccccatttgaaaccaacatttttcttgagcacttcattgagaggtgctgccaatgtgctaaaatccttcacaaatcgtctataaaaacttgtaagccatgaaaactcctcaccttagtcatagacttaggtgtaggccattcttgaatagccctaaccttttcctcat

SEQ ID NO: 7243 - DNA, 489 bp, Glycine max
tacggaccttaatctaactgtgaacaaagccgcttggttttaaggtggattttgaaaaggcctatgactcaatcttatgggcatttttggattatatgctgcaaagaatgggtttttgtcccaaatggagacactggatttctgcctgtcttaattcagcaagcatttcaattcttgtgaatggcagtcctacaaaggaatttactcctactagaggcttgaggcaaggggaccctttagctcccttactctttaatatagttggagaaggcatcacaggattgatgagggaagcagttcataagaacttatatagaagctatatggctggaaagaaaaaggaacccattaatattttgcagtatgcagatgacacagtatttgtgggagaggctgcttgggagaatgttgttgttttgaatgctatgctcacgggatctgaattggcctcaggtctgaagattaattatgcaaaaatccaatttggga

SEQ ID NO: 7244 - DNA, 358 bp, Glycine max
cattaaataacttggtattatatttatgaatatgtatggcaaaattcacataaataagatattcgctgatggattatttactaatagacattaacctatattttattatagatatatactaagatttaatcattttatttattagtacaatgcggcaactaattactaaaatgtttgtgtaaaaatattatatattaacacatgaatttaaattaaataaattttattatgtcgttttttttaaagatcggcgcgtattattattgttattaaaaaatattgggcaacaacaatacattaaattgttaaagtgacgagacgacctgattaggaactcctcaatccacactctcatgga

SEQ ID NO: 7245 - DNA, 599 bp, Glycine max
cgaaggcgaactggatgcattggttaacttggtaacccattatgcttttaatcaaaaatctgtacctgtcgcaagggtttgtggtttgtgctcctctgctgaccaccatacagacctttgccctttcatgcagccacctggagcaattgagcagcttgaagcttatgctgcaaatatttacaatagacctcctcaacctcagcagcaaaatcaaccacagcagagcaattatgacctttccaacaacagatacaaccctggatggaggaatcaccctaacctcagatggtgcagccctcagcaacaacaacagcagcctggtcctttcttccaaaatgctgctggcccaagcagaccatacatttctccaccaatccaacaacagcaacaaccccagaaacaaccaacagtttaggccccttcacaacctttcctctgagaacttgtgaggcaaatgactattcagaacatgcacgtttagcaagagaccagagccttcattcagagcttaaccaaattaatgggacaataggctacccaattgtatcaacaacagtcccagaattctgacaagctgccttcttaagctattccaaaat

SEQ ID NO: 7246 - DNA, 543 bp, Glycine max
agcttggtaaatttcggtttaccaattattctttatgaaaactcatttattgaccattataaatatagtacaaggttatctagcaataacttcaaaagctccatttaaacaattatatggacaacaaaacacaaaacgaacaagctgtaacacaatcataattgctatttgttaatcacacttaaacaaaagaatagctaggcaaactaaaatcaccaacaatcacggacaactaacacctaccatttggtaaacaataaataatcttgcatttttattcaataaataaacacttaaaattttttcctgaatttgaataaataaattcactaaggtaatgttgtcatatttatatcgggcatcgactcgattaagatactaagttactaaatcatgcatcaacccaatgaatcactaattgactcccatgattcaacctatattaaaaaattctaaataatttcataacctgcaaacatgtatacttaaagtttatcaaaattcatgacaagttttgaattgtttaaaattttgacaacatat

SEQ ID NO: 7247 - DNA, 432 bp, Glycine max
tgcatgttagctcttttttatttatttgcatgtagcttttcttatcctccctccgatattatttagaagacccaaatttgaaatgatatttttttttttataagaatcaatttataatatttcttatattaattatttttagactagaaatgtctctaattaaaattgaaagaatgtattgacaaacaattaaaagtgaaaagagtattaatgacaagaatagttttggaaaaattataaatttaagataaatttattgttatgaactaaaataatcatttttcttaattgtgataaattaggtacttgggtcttatatataagatcagatggattatttgaaaaatattgttgattctctcatgatatcaaaggtaaggtgggatttttatcattttgttacccatctcttctgaataactagcataatgg

SEQ ID NO: 7248 - DNA, 474 bp, Glycine max
  unsure (1)..(474): unsure at all n locations
tgctacgaccctaaatgggccttcctagttgggtccaagctttcccttagggatcttttctggcttcacctcagactcgcgacactaggttgccagattgaaaggctccaagttgaacctttgtattgtatctccttgatgctcggagcttggtttcctcttctttgattttggaaatctcttggacgtcatccttggtctctagttccaccctcatgttctctttgttgtgttgttcttggaacaacaacctccttgtcgacagttccccaactttgatggggattatggcatctctgttgtatgtgagtcaaaaagtagtttcgttggttgttgtctggggtgaacagtgataggccaagagtatactatggagtccctccttccatagacccttggactttgtgagtcttntgcgcacggcgttaatgataaccctattatctgccttcgcctgaccaataattttggggg

SEQ ID NO: 7249 - DNA, 521 bp, Glycine max
  unsure (1)..(521): unsure at all n locations
aagataatcctcaggcttggccaatgcagactgtttattggaaacggattggactctatcatttattatcagagcctgtgacatggataacaaaggagagaaatttttcacaatctatagattcctcagaccaaaataaaaaatacaattatgacgttgagtactcagtttaagaggatatatctttcagagaggaagggagggaaagagaaatacagggccaagtttcatttttgaaacaatagttgttgtcatgtaatataatcactttattagaagtgcataacacagcatactcacatggcccttgtatttgtgagctcggaggaaatcaagcaagggctgcaaggaatctttgttgcgaaacattattgatgaaaggtggcgattaagaaattggacaccattgccaatggatgctgagcgggttgggcgaggaaacgtggcattaaatggctcaaaatcaagctccaatacaaaattctcattaattcttaagcacaatacanaacagaaacaga

SEQ ID NO: 7250 - DNA, 525 bp, Glycine max
gctttgagaaaacttccttgagaagctagagcttatcttctctcacccctctcataactaggctcacctccttgagaagcttccttaggaagattcctaaagaaggttgagcttagctacagatacatctctaatagctaagctcacctccttgagatgagaagctagagcttagctacacaccccctataatagctaagctcacccccatgacaaaaaacatgaaaatacaaaaaaaattccttactacaaagactactcaaaataccccgaaatacaaggctaaaaccctatactactagaatggccaaaatacaaggcccagacgaaggaaatacctattataatatttacaaagataagcgggctcatacttagcccatgggctcgaaatctaccctaaggctcatgagaaccctagggccttcccttggatctctagcccaatctacttggagtcttctacccaatgcccttgcggggtaggattgcatcaagtgccttcttggatttcaagatttgaat

SEQ ID NO: 7251 - DNA, 499 bp, Glycine max
  unsure (1)..(499): unsure at all n locations
agcttgtggtgcaaaagattacatctattcttaagaatttttgatggggcagcctccaagactccattaagattccttgggtgaggtgggacatagtctgcctacctaaaagtaaaggtgggttatggatcaaagatttgattaaattcaacgaggctttgcttgctaaatgggggtgggagttggcaaataatcagaatcagttgtgggccacaattctattgtgtagatatggtggttggagggatttgatttctcataggaactgcagtttagactctccttggtggaaagacctcaagggtatcttcaagcagcagcaaaagcaacacaatttgtaaaaatagctttatttatgccataggtaaggacggtccatggaatacanaccaagtacttattggttgaccacaaacaaaacactcattggaatatatatgtttaacaattaacataaactcgctgacaggaatggagaaatatacatattaaatttttc

SEQ ID NO: 7252 - DNA, 400 bp, Glycine max
agcttataatattgcagcaatattatattccatcagcccgagaactatcacgcttagttggagtctgcaaagccccaatcattcaacactttgctgaaacaatttctggtacttcaactattagaagctttgatcagcagtcaagatttcaggaaacaaatatgaaactgactgatggatattctcggccaaagatcaatattgctggtgccatggaatggttgtgtttccgcttggatatgttgtcttctatcacatttgccttttccttaatattcttaatatctattccacagggattcatagatccacgtgagttattcctatctgttacaaatcaaaatttaatctgctattctaatatggaattgaacataattgtttctcttttataactttt

SEQ ID NO: 7253 - DNA, 595 bp, Glycine max
  unsure (1)..(595): unsure at all n locations
ntaatgtgttctcccttatagaactactaactgtagtaacatttgcagcccagctatccggtagtgatgacaatagaatcaatgccttcacctcatcctcaaatttaatctgcactgactccaattgggcaagaatagtattaaattcattaatatgattagttacagagataccttctcccatcttgaggttgaacaatcgacacatcaagtataccatgttggctgcagacgacttctcgtacatagctgataatgccttcattaagtctgcagtagtcttctcatttaccgtattgaatgtgatattcttggctaatgtcaatctgatcacgccaagagcctgtcaatctagcaagttccatttttattgccttatgttgtctggcttatcccctgacgagagagaataatgagaagagaaaggaataatgagaagagagagaagacacaaagtttttacatggttcaacacacaatgtatgacctacgtccatggctaccttagaaaaatttcttgttgttgcacattttaaagcttacaagtgttctattattatacactaatgagacacaagtttacaaaccaagcgat

SEQ ID NO: 7254 - DNA, 460 bp, Glycine max
ttagataccctgagactaggctcaggccctttgatttactctatattacaggtgagcgagcctattagcagtgacccctttgttctaataattattatttgtgttgttgctcatgaagcactatctagtatgaattttaattggttgcaataggatttcaatgtaaaggtgaattttttggagaataattttcctttgatcttacttcgtctgctgaattcctaaggataattgttggtctgggtttctatataagcctaaggaatcaatcctgggaaaccctatgatccggattcccatcggatctagggtgaaccaatttggcgttcctgctttgcacatgataaagaatgttggcttgatagttacgttcatggttgagataatggatcacaacacaaattgcatttctcatagaatacatgcatacagtttttgttacatgttcaaatattatttg

SEQ ID NO: 7255 - DNA, 463 bp, Glycine max
tggaactaagcttattttctctaccacttgtcattcttttactgatgggcaaacaaaggtagtgaataggtctttatctacgtttttaagggctcttctgaagggcagccataagtcttgggatgagtatcttcctcatgtagaattagcctacaacaggggggttcatagaaccgccaagcaatccccttctgaagttgtctatgggttcaatcccctaacacccttagacctcattcccctcccacttgacacttcttttatacataaagaaggggaatataggtcagagtttgtaaagaagttgtttgagagggtttagcgcctaatagagaaccaaacaaaggtgtattaaactaaacgcaattaaggaagaaatgagctatttcttaatgaacgggactgggtttggctcatcttacagaggatagattccatactaaaaggaaatccaagctaaccc

SEQ ID NO: 7256 - DNA, 401 bp, Glycine max
cagctttggagtttccaagtgcccattctttttcttctttagaccaatcttcttctggcttcaattcatcagagggctttccttctgtgtccagcatcttgggatgttcccaacctttgaagacagctttccaggttctgctatccagtgatttgaggaaagccaccatccttgctttccagtattcatagttggttccatctaagattgggggtctggtcactggtcctccttctttctccatgttcataagaatttatctccctagatctcactcagtgatttcgagtgcccgctctgataccaattgaaattctgatactggggacagatgtcgcacaagattgtacgacatcacgctgcagattgtgtttgactgtgtgaacacattaaaccagctc

SEQ ID NO: 7257 - DNA, 508 bp, Glycine max
agcttctctagaagcacttttacgaaatgtatttgtgaagaaaaaataaaataaatttttttataagttgaaattaattctccattaattaatttgtagaaattttcacataatttctttgaaagatgaaaggatatttgtaaattagttaatggtgagctaattttatcttatgaagaaatacatttcatttttatttatttatttctctcctaaaaatactttcttaagaaatttatccaaacaggtatttatcagattaaattttgaaagccctaaacctttttggtcttgaactcattattctagttcaaaggaggtcctttaaaatttccttaaatgtaatgagtcctatacaactatgacatggggccataaagtatctccccaaaatcttagttattaatagattcaagatcaattatgcgtgtacggtttttgccaaccaatttgatgtagtctatcacttggcaccgatgttttattttttaattttgttttcagtggc

SEQ ID NO: 7258 - DNA, 393 bp, Glycine max
gcctttactctgatttgctctgacaggatttttcttcttaaaaaaaaagggaagagattaaagtctgcattttatattgtcttcgatcgattcccttttctcttttgatgaatattatttctcaaatcccaatggtgaagtagtgtgaaattaaatttctaaccaaggggctaaatttcatgatgatccaacggttattaagtccgagatcatagctttataggacaggttttgaatctctatgggaaaagaaaaagttacaatgcgaaagttttttatctctaacattgtttcacaatttacaacagcgagaatgctaaaaatgcgtctcaaacctagtgttaaaatatcacgatgatcaaaccgttaacaagtctgagattggtcgtttac

SEQ ID NO: 7259 - DNA, 538 bp, Glycine max
ttagtttcaacacaagcaggttgcccaagtatacaaatttttatgtatggctctctttattttaataaaatctttgtagttttcttaattttaataacaaatttttcaaaagctcccatcaggaactgtccctccaagaagttgacgcactattgatgatgaatgtttactataggcagattagaaattcaaatattcaaattcaacttttaaacaatgtgtatgaacaccaaaagcagtaaaagggttaaacacatacagaattttttagctgtgcaccagacccaaagcttaaatctcctgctggaattggcaaaaccttcgaattcacaatagggtctgatatatgatcagtccggatctcaagggccgactcccgaagaagagcattgaacatggcaacatctagtctagctatgcattgttccatgacctggtaaaggaatttaatctactttaatctgaccaaaagaaagggaagttatttacacttgcagaatggaacgatatcattaataataaaaaaggcccccatttt

SEQ ID NO: 7260 - DNA, 468 bp, Glycine max
tctggtaggacatcttgacttgctttccaatctgacatttaccacagattctgccttcttctattttcagattgggaatgcctctaacagcacctttgtcaatgattttcttcatgcctcttaagtgcagatgtccaaatctttgatgccatattttgacttcatcttctttggaggatagacatgtggaggagtaactggtttcttgaggtgtccataggtaacagttgtcctttgatctgctgcccttcattagaacttcactcttctcatttgtcaccaagcattctgactttgtgaagtttacattgaatccttcatcacacaactgactgatgctgatcaagtttgcagtcagtccctttcccagcagtactttgttcagactatgaagtccatcatggactagcttttccattccagtgatcatttctttagagccatctccaaatgtcacatacctagtgg

SEQ ID NO: 7261 - DNA, 575 bp, Glycine max
tcaagctgctcaattgctccaggttgctgcatggaagggcatatgtctgtatggtggtcagcagaggagcacaaaccacaaacccttgcgacaggtacaaatttctgattcaaggctaactgggttaccaagttgaccaacgcatccagtttgccttcaagcttcttagtttcagatgatgcagatgggtttgtagctacctcatgcactcctctaatgactatggcatcatttcaggcgctaaactgctgggagttggaggccatcttctcaattaaatttctggcttcagcaggagtcatgtctccaagggctccaccactggcagcatctatcatacttctctccatattactgagtccttcataaaaatattggagaagaagctgttctgaaatctgatggtgggggcaactggcacatagtttcttaaatctctcctagtactcatacaggctctctccactgagttgtctaatacctgagatatccttcctgatggctgtggtccttgaaagccaggaaatttttttctaagaatactctcttaaagtcatcccacctcgtgatggacc

SEQ ID NO: 7262 - DNA, 473 bp, Glycine max
ttgcttctcaagactcttgcacaggagtagatttctatattatggcaagctgagttactaggttgaccaaggcatcaagttttccctcaagctttttattttcagcagatgaagatgaatccgtggccacctcatggactcctctaaggactgttgcatcaagtggcctcagaataattaagaagggggggttgaattaatcattcctaaacctttactaattaaaaaattactcttctaaggcttttactatgttgttaagtaaataaagagtagaaaagaaacttaaccaaaactaaaagcaggaattaaaatgcacagcgaaaattaaaagtgtagggaagaaggagacaaacacacaagagtttttgtactggctcgacaacaacccatccctacatccagtcctcaagcgacctatggtccttgagatttcttttccaaccttgtaaaaatccttttacaaacaaaag

SEQ ID NO: 7263 - DNA, 343 bp, Glycine max
aaaataacgcgattccccttttgtaaacacaaaaaggccatagtctagaattaacaaagaaacagaaaaattcacaaatgatattcaaaatcaaaacatgcggtactgttttagcaatccaatgtggtagtgaaaagacagataaagcataaaagaagtaaatcgaacaagacagtaaataccaccacagtgaagctgctttgagttaatgaagtctaggcacttcgtaatcttgctagtttcgaacttcacaaaatgaagccttccaccaagaataggatagcttctcctgttaccatggggcggaaatcccagtcgattattcacatttatcatcctttta

SEQ ID NO: 7264 - DNA, 420 bp, Glycine max
agcttaacacattgtttgcttctgtctattattgatggtagccctaggtacttgcgtcttcccaattgattagtgacccccaaagatgagatgttttgcttgagagcttgagaggtgttggtgctatagaatatttttgatatacaaaggttaatcgtttgccctaatgctttctcataagtgttaaaaatatctctcaaataatcatcaacaaataaaaggtgtgagaggcttggaatccctctatacaccttgacaccatgaatctatccctcactttttgctctccttaagcgtgtggaaagcctctctttacaaataatgaacaaatatagtgatacttggtgaccttatctaagacctctcccatgaaaaatatttctcataggattcccatttattatgatagaatagtgaact

SEQ ID NO: 7265 - DNA, 502 bp, Glycine max
tgccttgaattatattaatagttgaattacttagaaattttctttgctttattataattttagtatttttttaatttattggtctaatagttttaaagtaattacttagaaattattatttattatttatcatcttttcattttcataaaatattgaaactttttctatacctatgtaaatataatttaattatatattgatatctatatgtaaatttaccagtataaaaattatgtataaataaaactcaagagataaacatctttttatgaaatcaaatcagattttttttatccgtaatcaaataggaaaatttaactttaacttaagagaatgaatattttctacaaaatttttatatttaaacttatttgtcaattatattaatgaaaataaattcttatatataataattaattatactacccgtgcattgacaatttgttgctcatataattgaaagttatttgcatagaaaatgctaattcttatagttaatat

SEQ ID NO: 7266 - DNA, 594 bp, Glycine max
agcttctcatcaagtaacattcctgagatcctctccccaggccttcttgacttcccttcccttgctcttagccctgtcacacaatttaatgatgacccatttgacaagtcctctccttcattggggaactcatcagaggaggataaacccatagctgaaagggcttctacttgcatccctctcccatctttaatccaagagactcagaaccatagctcttgcctcttttcccagttactcacctagagtctcatcggaatcaccttcttgaggacattggagaatagattgtgttcctgagttatggatgatttaaatagagagagaatggttggtggttaattacatcatgggtatcttttttatttgaatggttcatggtttcctccatcaacaagaactattgtagtggtactactggtggtgacagtggaacaagaagcagtagtggggaattaaggctttgtgaaagacaggtagcctttcattttctttattatggatttttgtttgggagagtaaagtgcataaccttcttttggtacttgatttgaagaataattgatactgtctaatactaaagaacacattttc

SEQ ID NO: 7267 - DNA, 134 bp, Glycine max
ctgtgcagcaacttttacgatggaccttctctagctcagcagcagtatcacctcgggctaaagattgtgacctcttcagctacagatacaaccctggatggaggaataaccctatccttatatggttcaaacct

SEQ ID NO: 7268 - DNA, 385 bp, Glycine max
tgccacttcgtcctctttggtatatcaccctacttgagggttccattcatcactggactttccttgtgtgtccatcctcttgggatgttcccaacctttgatgaacaggacctcagggtctgctatccagcgattcgacgaaggccaccattcttgcttctcagatttcatagccgcttccatcaaaaagaggtggtctgttcactggaccttcttcattctccatgctcatcacaatttatctccccagatctcactctgcgatttcgagtgttggctctgataccaattgaaattctgagtccggggacagatgtctgacacgatgtcacgacatgacgcttcataacatgcacatagtgtgtggccgtatgaacatattaaa

SEQ ID NO: 7269 - DNA, 616 bp, Glycine max
tgtaactagatgctattgtcctacaacagatgttgcgtcttagggcattgaaagccggactgcagcaatcccaaataaagatttttggtctacctgtccgaccttcctttgttaagcctgtccggccaaaggtatgcaatattcttatagccatgaattattcgcaaatttatttacaattcttggaatacaacatgctgtgctatatatattattcccaaataaatgtaagtggattgtttgaaatggtgtaataggataataggaatgatccagcctcaattaggagaagtaatttattttacgtttctcaagttatttttagagaaattatagccacttgcatgttccatgccaatagtgctcacttgagctaatagtaatgggtgcctgtaaacaattatttcttcccttgtcagcatatgaataagtgaatgatggcgtttaagccataatcaaatacgaaatagcaaataagttaatgctaaaattaatagctttggtgttgttccgtgttccgattctatgactgcaagctgtagtgcaggattggaaccttttggtcgcgtatgtcattacagttcctcaaagctttaaactacctgatgcatattca

SEQ ID NO: 7270 - DNA, 613 bp, Glycine max
agcttaaacaaacacgctaagatctcttttaatattttatatatatatgtaactaaacaaatgatcaatcttaatcaacacattttttttggaaactcttactcaacatatttaaagaatttaacttcaaatttatcatttaaggatgtatacttaattagcacgttcaagagttgaagatttagataaatttgcctcaaatattaatttaacttaaaaatgacaaaaggaaggtcaaatgtcttgcttaggttaagtttctttgaaaagttctaccattagagaaaatagtattttctagtgtagtgtctctctagtgtagtgttttactttctactatttaatgttataatttattatattatcaagtatgtgaattaattggtgtgaaattattttaatttaattagaagtctcagatttgagtgattgcttttggtggagaatatctatggtttaagccaaaaaaataatattatattttattatactaaatactactaataagaatgatgtagtggcataggaaaaaaagaatgagagagaatgtgggttcaaaattctccactaacaaaaattaataatactaattattaatatttatcgataaaaa

SEQ ID NO: 7271 - DNA, 482 bp, Glycine max
  unsure (1)..(482): unsure at all n locations
atccaacgctcatgttggtggtgaagcaacttcatccatggctgattccctagtgcatggtgctgcctcttacgcatggtcgattgtctgccactgcatctccatagtggataatgacgattactggaccgcattgactctcacctatacggccttcatacactctccactgacaatcatacatcaggcgatgcgtcggatctctggcccaatgtacttaggagtctaaaagcaaactgctagattggcctaagcgtttcaacattatctgcggaattgctcgaggtcttctttatcttcatcaagattctagattgaggataattcatagagacctcaaagcaagtaatgttttgctcgatgaccagatgatccctaaaatatcaaagttttgcattgctagattatttggaggagagccgacagaaggaaatacaaatcgagttgttggaacttantaagtattatcttaatatcaatct

SEQ ID NO: 7272 - DNA, 593 bp, Glycine max
agcttaaacaaacacgctgagaacgcttttttatatttatatataaaggcaactaaacaaatgatcaatcttaatcaacacattttttttggaaactcttactcaacatatttaaagaatttaacttccaatttatcatttaaggatgtatacttaattagcacgttcaagagttgaaaatttagataaatctgcctcaaatattaatttaacttaaaaatgacaaaaggaaggtcaaatgtcttgcttaagctaagtttctttgacaacttctacccttaaagaagataataatttctattgtaatgtctatccattggacagcttactttctactcattaatgctataattaattatattatcaagaatgtgaatttattggtgtgaaattatttttattttaattacaagtctcatacttgagtgattgctttttgtggagaatatctatggttcaagccaaaaaattaaatttataattcattatcctacatactactaatacaattgatgcattgctctatgaaaaataaaatgataaaaatgtgggtttcaattcttcccctaacaaaaataatcatacttaactat

SEQ ID NO: 7273 - DNA, 408 bp, Glycine max
ttatgaacatatcagcaggattgtgtagagtgctaatcttatgaactttgattcttctttctaaccgaatgaagtgatatctaacatctatatgcttggttctatcatgatgaacttgatccttggccaagcatatagcactaaagctgtcacagtagatgttagcatattcttgattaattccgagatcatttatcagacctctaagccaaattccttcctttgcagctttagtaagagccatatatttagcctcagtagttgagagagcaaccgaaggttgaagtgttaccttacaactcaccaagccgccaccaaaggtgtaagcataccctgttatgaccttctcttgaccagatcagcagcgaaatctgcatcagaatagccagtgaggcagcaatctgggtg

SEQ ID NO: 7274 - DNA, 352 bp, Glycine max
cagaacttgcttaggaacttagcatctttatctagaccactggtcctaagcaaaccatggagtcacacagcttccctccaataaagatttgagatatgggaaacgtcctccaccttgtggcatggcctaaagtgtgccatcttgctaaacctatccaccactacaaagatagagactacacctctatgggttctagggagcccaatgacaaagtccatactgatgtctacccaaagtgcaaatggaatgggtcaagagtgtgatagcccatgaggcatcaccctaaactcaggctgttaactagccacacacctactgccatgcttatagacatttttcttcatatgggggc

SEQ ID NO: 7275 - DNA, 418 bp, Glycine max
agctctgatcgagtgctataaagcaaaatttgtgaaccattggtgcttcatcccaaataattagacttggctgatttaacaattctgctaatagactcccttgatgtatgttgcatgttgagttttcaaaacttggtacaggaatcttaaatttggaatgtgcagtcctacctcttggcaacaatagagaagctatgccgctagaagcaaccacagtaacaatttgattctttgctctcaatgaactcgtcaatgttctccatatgaatgtttttcctgttccttcaaatccatataggaaaaacatgccgccctcgatgttgttgacagcttgcataattcgggtgtgaattgatctttgtccatctacaattatggatcagttaacgttatatacaaatgaacaataattaatttt

SEQ ID NO: 7276 - DNA, 538 bp, Glycine max
atgagtggagggaaaaaatgactggagggagaaggagcccaaaagaggtctgaactttgaagtgtaattctcaaatgatcaaagttagaaaaatgcccacacatggtctctatttatagcctaagtgccacacaaaaattggaggaaaatttgaatttctattcaaatttcacttgaatttgaaattgaatttgtggagccaaattttggaaccaaaatttcactaattatgattagtgaattttagctatggttcaaccccctaatccaagatcaaaccccaaattctccactaagtgtgcttacgtgtcatgagacattgtaagcatgaaagacattcccaaagtgttactatatgatgtgaccattggggtgtagcatgcaaatgctcacctccccctctataattcaattggattggacttctcccaattcaatttaatttatttcccaccacccacattcaatattcacttaacgcctaatgaaatttaagcctacccataatacaaaaactagtcttagggccctaaaatac

SEQ ID NO: 7277 - DNA, 629 bp, Glycine max
agcttgtaattgattaaaccgatacgagacacttttttgcaagattaaaccaacttgtgtaatcaattaatgtaagggtgtgatcgattaaaatagaaagttttaccttctaaagaaaattttgtaactttagaaattttctacttactcctacatgatgatgcatgatgcatatatgaaatgatagagactaagatgcaacacacaatacaacaatcaataaaaatgccactaaagagtgttgggatgtgaaagaaaaaacttcttcaagctcttctttaagcttcaaggttaagtcttcatgttgctcccctatctctaacacaaataacaaccatcatattaagattaaaaataatagatgattgagattcacatatttaaatttcaaattaaaattgaatatatcatcaaatctttgaaagattaaccagaaaacaaaccaatctattaagatcttagttatcacattctaagatatctgaattaaccatcaccctgattataacaccctgagatattataagttataaatcgacatttaattttatttattgtgtggttgactatatgatagacttgaatgagtcgaattatgtggagtcttttttagctaagttgaaattatg

SEQ ID NO: 7278 - DNA, 428 bp, Glycine max
ttggcttgcaagctggttgctttggatgcaaatcctatgcaaacacaccctaaattgagtaagtgctttaattagcattgagtctctggtaagggtcaaagggtaagattggagctttgtcctcattccagacctcatcaatgtattgcactataattgcagattcacaaatgggcttgccattatggatcagaactggaattttcttgagaattgagttcatttgcgaagcacaggactcttgttcctaagaatctcttccttgacaccctgttcagctaatgcaatcctaaccctcattccaaacatgctagcccatgtatcctacagaacaacctcgtctgccatcgttgcaaaggatcaccaaaacaccaactcatgttatgaacttgccaaacagtgtagatatgttgtggactaacacgaca

SEQ ID NO: 7279 - DNA, 588 bp, Glycine max
  unsure (1)..(588): unsure at all n locations
agcttttagactcaggcgtgaaccctacctcaccaatattgagagacaatttttacaattaaattaagaagtaccattcatataatatctcacattaagtacaataatgcaaaaagaagaaattgaaaatgggaacaaagccaagatgaacctgtatcgaaaagagcaacaattatgtcactatttgatttcaatcttctcttagcaattgtaggtaacccaatgaagttccatgatcttgttgtgtgcagctggcagtactggttttgaaacaccaagagcacttcatccatggatacacatgcaaaaagggttaataacataatatatagtatttcaaagaaagatgaaagagctagagaaaattgaaaactatctataccagataactnttttgcttcatcctctaacagttttgcagcaaatgcatttaaggtatttgtgtaactatataccatgaattcttttgcttcaaggaagctaagtaagcacaaaccanaatccaaatgatttaagccaaaaggataaaaatagagaattcaaaaaaatgcttctcacatggtttaagagggtggttttactttttta

SEQ ID NO: 7280 - DNA, 548 bp, Glycine max
agcttttagactcaggcgtgaaccctactttaccaatattgagagacaatctttacaattaaattaagaagtaccattcatataatatctcacattaagtacaataatgcaaaaagaagaaattgaaaatgggaacaaagccaagatgaacctgtatcgaaaagaacaacaattatgtcactatttgatttcaatcttctcttaacaattgtaggtaacccaatgaagttccatgatcttgttgtgtgcagctggcagtactggttttgaaacaccaagagcacttcatccatggatacacatgcaaaaaggggtaataacataatatatagtatttcaaagaaagatgaaagagctagagaaaattgaaaactatctataccagataaactttttggcttaatctctaacagttttgcagcaaatgcatttaaagtatttgtgtaactatataccatggaatctttttgcttcaggaagctaagtaagcacaaaccaaaatccaatgatttagcccaagggataaaatggagaattcaaaaaatgct

SEQ ID NO: 7281 - DNA, 527 bp, Glycine max
tggcgataaactttgttgtgagagctaaaagtaacagtgacaaatacttgtaacttttgtgaaattagtgaaacttgattgctaaccaaaaactgaacttagtctgaatggtagagacaaaccaatataaatatgggtcttactttctttttagttatcttttgtcttaaactgacatagtatttgaatttgatcttgtttgaaaaacatattctattttttaaaatatgtttccatcgtctaaacttgtttttgcgcaaatttgttatctcgttttattaagttatacttcaaatgataactttaattttcacgaaaaaagacttaagaaaattctaaaattacaatttaaccccttatgatatttctaattgtagttactttttttaagactttacttttgatcacttaataacattgaaattcatagtctattaaatttattattaaataacctaattattgcacagagtttttgtggagacgactctatttatcgctattgctacctgaaggatttaatactc

SEQ ID NO: 7282 - DNA, 490 bp, Glycine max
agcttcttagtttcagatgatgcagatgggtttgtagctacctcatgcactcctctaatgactatggcatcatttctagcactaaactgctgggagttggaggccatcttctcaattaaatttctggcttcagcaggagtcatgtctccaagggctccaccactggcagcatctatcatacttctctccatattactgagtccttcataaaagtattggagaagaagctgttctgaaatctgatggtgggggcaactggcacatagtttcttaaatctctcccagtactcatacaggctctctccactgagttgtctaatacctgagatatccttccttatggctgtggtcctggaagcagggaaatttttttctaagaatactctcttaaggtcatcccagctcgtgatggaccctggagcaaggtaatacagccagtcctttgccactccctctaatgagtgaggaaaagccttcagaaatatgtgat

SEQ ID NO: 7283 - DNA, 502 bp, Glycine max
agcttcacgagttgtcttctccagataatctctagcaatgtgcattttctcatcagtaatatacctagcaatagcaacatcctccattctatccaacaggggattaggtatcatttccacaaaatttgtagtgcaaacaaaaagaacctgcaccgagaaaaacaatacgttcaagaattacttgaccatcctaagaactacctatcaacaatgaacacaactaataaccaaacaaaaatgttgactatatcacaacctcactattaaggctccaaattatcaaataaatacctttgatagatcaatggtgacatcaagatagtggtccagaaaaatagcattctaatctggatccagaagctctaacaaagcacttgctggatcactaacatgtgctctgcccaactacaattgaataaaaagataatagcgctaaaatcataattttttccttgatatttacaagattataacccatgggtaaattaatgaaactgaaatg

SEQ ID NO: 7284 - DNA, 486 bp, Glycine max
agcaggcatccatgtcgctgcgttgatgagcgagtgttttctaacttgaattcaatgaaacaaaatcctgatagctgccgatgaatactctgcatagctgatattaaaccttgtgggacacttgtatttccctttacaccagagaattttcctattgactgctatatgatacctatagaactaacacttgttgtcatttaaatgacagattacccggtcattacaaatatgtcgactgtcaatgatcaatatctaacagtaatgagaattcaatttctgcagaggaagaggataacatcatagtttcagcccatgcaatccatggaaacaaatgggcaataattgctaagcttcttccaggtagaacacactatgcaatcaagaatcactggaattctacactgacgcgcaagcgtatggaaaagggaaaatatgtcccagcacatgctgatgtgatcgaaaaaggtactggtaacttttaaaaaa

SEQ ID NO: 7285 - DNA, 385 bp, Glycine max
agcttggcaaactattgttgacacagaagggatatcttctctagatagaagcataatatcatctgcaaaagccaaatgagatagctgaatacctgcacagttgggatgaaatttaaaattggcatcatccttgaggctgctcatatctctggaaaagtactccaaacagagcataaacagataaggggagagaggatccccttgtctaagaccccgctaccctttgaagtgaccataaatggatctattgactgccacactaaaagaagtggaagaaacacattccatgatccaagttcagaactgggttaggaaagccatggacttaagcattcaatccaagaattcccggaaatggaatcattagctttatgcaagtcaattt

SEQ ID NO: 7286 - DNA, 480 bp, Glycine max
agcttctgagttaaaagttattgcagtttttatttgctacaagcttccgctttcaactacgagcgtctcgatatattactggactcaatcgatcatcagagcaaaaagttattgtcgttagaatttgttcagtgcttccgttttcaatttggagcgtctcgatatattacgggactcaatcggacatccgagtaaaaagttattggtgttagattttgctcatagcttctatttgaatttgctacgagcttgcgttttcaatttggagcgtctcaatatattacgggactcaatcggacatccgagtaaaaagttattgtcggttgaattcgctcagagcttctattctcaattttgagtgtctcgatatattacaggactcaatcggacatcggagtaaaaagttattgtcgttagattttttcagagctcccgtttcaatttggatcgattcgatatattacgggactcaatctgaca

SEQ ID NO: 7287 - DNA, 501 bp, Glycine max
agctttgatgcaacatttggagaggttaatgaaacaactagatgatgcgctccatgagaggttggatcaaatggtgaatagagatcataatgaataagaaaggacgagaaaagggaatgatggtgttcctatacaaaaccgaattgatggtattaaactcaacattcctccatttaaaggaaagaatgatccggaggcctacttggagtgggagatgaaaatagagcatgttttctcatgctacaactatgaggaggaccagaaggtgaagcttgccgccacggagttttccgactatgctcttgtgtggtggaacaagctacataaggagagagcaagaaatgaatagccaatggttgatacatggacagagatgaagaagatcatgacgaatcggtatgtgccggctagttactcaaaggacttgaaattcaagctccaaaaactaacccacagcaacaatggggttgaggagtatttcaaggaaatgattgtctcatg

SEQ ID NO: 7288 - DNA, 519 bp, Glycine max
  unsure (1)..(519): unsure at all n locations
tgtaatagaagaaggaagtccctggaaaattcacatggtcataattttttgctcggatgtccaattgaggcccataatatatcgagatgcaggaaattaagaattgcagccccaagaatttagacggccataacttttgactcagatgtccaattgaagcacataatatatcgagacactcgaaagtcaacaagaaagccccgggcaattccaaacaaccacaacattttatttagaagtccgattggacccataatatatcaagacactaagaaatgaacaaaagcctcctggaaaattcaaacgggcataacttttaactcaaatttccgattgaggcccataatatattgagacactcaaaatttaacaaggaagcatttggaaaattcaaaacggccataaatttttactcagatgtccgattgaagcccataatatatcgagatgctcaaatttgaaaatgaaagtgatgcaatcctacctccntagggcattggatacaagactctatgaaga

SEQ ID NO: 7289 - DNA, 525 bp, Glycine max
tcaagaatcaagatcaagattcaagactcaagattcaataatcaagataagtatgaaaaggttttttcaaaaactgagtagcacatggatttttctcaaaacatgtttaccaaagagtttttactctttggtaatcgattaccagatggttgtaatcgattaccaatagcaaaatggatttgaaaaagttttcaaatgaatttacaacgttccaattgatttcaaaaagctgtaatcgattacaatattttggtgatcgattaccagtgcctttgaacgttgaaattcaaattcaaaagtgaagagtcacatcctttcacataaaagctttgtgtaatcgattacactgatttggcaatcgattaccagtgattgtttctgaataaatcaaacgatgtaacttttcaaatggtttttgactttttcgaataggatctaagttttataaaagttataactcttctacatggtgctcttgaccagacatgaagagtctatacaagcaacgctttgtttgcatttcta

SEQ ID NO: 7290 - DNA, 525 bp, Glycine max
agcttctaaactttgtacaagaatgaagctctgataccacttgttagacaagtggcctcagatatcttaagaaggggggggttgaattaacatattcgaaactttttcccctaattaaaaatctatcttactttttacttaaattatgaattcccttaatgacaatcttcttaaatattaattcaaatgaagcaacttgaatatgaatataaagcaataataaataaaggagattaagggaagagaaaatgcaaactcagttttatactggttcggccacacccttgtgcctacgtccagtccccaagcaacccgcttgagagttccactaacttgtaaattccttttacaagttctaaacacacaaggacaaccctttctttgtgtttagagattctttacaacaagagactcacagtctcttaatcccttagagaatgagatgaagaagaggaacacatctctcttgagagagatggatgttacagattgagcactcaattaattccttaatgaattgcaatt

SEQ ID NO: 7291 - DNA, 438 bp, Glycine max
  unsure (1)..(438): unsure at all n locations
agctntattggtacaatttctttaaatctggtattataaacaatttttataattgggtgaaatctttttccgtcaacgaatttaggagtaaccttggccacaagctttatttgtacaatttctttaaatcgtttttcataaacaatttttagaattgggtaaaatctttttttcaattccaaatatttgattttatactcttatttttattccatagctttattgtcactataattctgaaatatgttattttttatcattaaatatgttatattgaatctaattaagtgatctaactctggttttagtatttaaccagcaaaattgcatgttaatactataccgtaaatatgttagatcatctgacattcacatatcaatcaacatgatatctatgcaagtatgtaactggtcacacgtgacaagtgttgcatgcat

SEQ ID NO: 7292 - DNA, 352 bp, Glycine max
ccgaacaccttgtttttctcatgtgcacgcaaacccaatcttcgggttcgaagacaaccttctttctccctttgatggcctgtctagcatagctgttatttctcctcatcaaaagacttttgactctctcatgaagcgacttcacatagtccggcttggcattaccttctttgtgcttaaaaacagacacattatgcatatgcaaatgatcaagacgagttagtgggttaaaaccataaacaacttcaaaaggagaacaattagtggtgctatgagcaactctatcggtagcacactcaacatgggggaaacaagctttccatgtttttaagttctttctcaaaactgtcct

SEQ ID NO: 7293 - DNA, 422 bp, Glycine max
tccatcacttgataggttagatccttcatcttcttcgaatggacataggtatatcttggttgctgctgagtatttcaccaagtgggtggaagaaattcctttgaatgttgatcaaggggatataataaacttcatagaacaaaatattatttttcgatttagtatcccataaacacttataacaggtcaaggcaccatttttattgatcgaaaagtggttcaatatgtcaattctcaaaatattaagttagtaacttataccccttattatgctcaagcaaatggtcaagttgaagccataaacaagattttggtaaggttaattaagaaacatggccaaaaacctagaagttagcatgaaagtttagaccaaattctttaggcttatcaaaattcaccaaaagggggcccactattgtact

SEQ ID NO: 7294 - DNA, 380 bp, Glycine max
  unsure (1)..(380): unsure at all n locations
anggacctttatacatagaccctttcctcanatgatattgttttattatcatgtncaccgaccaattgacgctcacaaacgtgcacacttggcttatgtcatgggcaaagaacccttgttattttattattacacaaaaactactgaaatacctcctggcccatgcagctgttaagtgaacaatatacaaatatttatattatgataactcctaatatatttataatgagaaactattttaaacatatatttacatatatctcttgtgctcatatatgtgtgtatgtatggatatgcttgcaacgataacattaaaactaacaataaagtaaattaaaaacatacagatttataacatatttttatattaaaacacatac

SEQ ID NO: 7295 - DNA, 274 bp, Glycine max
gactgctctagcacagctcatgacatgaaatacagtcgcgtctgaccttccttatcgaggagcagaacggtggtattggctctctcccatatgagctcatcgtcagtgagtaccgaagtatcacttgtgttttctttcatacgattgacgatcttattggcatttagagagatgctcatgctcatgacatggcaactaacgctcaagacctaaataaaaaatataccatttactgtacataatcatttgtattgcgcaatttgttgtgtaaacc

SEQ ID NO: 7296 - DNA, 453 bp, Glycine max
  unsure (1)..(453): unsure at all n locations
tagaaacttaagccttatagaaggttcgttcctaatttctctacaattgcatctcttctcaatgatctggtgaagaagaatgtggcatttacctgnggtgaaaaacaagagcaagcctttgctttgctcaaagaaaagcttactaaggcacctgttctagctcttcctgacttttctaaaacttttgagctagaatgtgatgcctctggagtgcgagttggagctgtattgttacaaggtgggcaccctattgcttattttagtgaaaaacttcatagtgccaccctcaactaccccacctatgataaagagctttatgccttaataagagccctccaaacttaggaacattaccttgtttccaaggaatttttcattcatagtgatcatcaatcacttaagtacattagagggcaaagcaagttaaacaaaaggcatgcaaaatgggtagag

SEQ ID NO: 7297 - DNA, 441 bp, Glycine max
  unsure (1)..(441): unsure at all n locations
agcttgtggtgcatgtgttgatgctgctgtttgtcaggttgaccttgttgaagtgaatgctctagcagagctaatgacatggaagacagttgtagcggacattccttatggaggagcaaagggtggtattggctgcaacccaaaggagctcagcgtcagtgagttaggaagtctcacttgtgttttcttccaaaagattgatgatcttattggcatttagagagatgttcatgcccctgacatgggaactaatgcacaagttctaatttaattatattccatttccttacataattttttgtttggggcaatttcttatgtaaaccaacatctagaacttttatttattattctatcattttcatttgtttactatttcactgacaaaggcttgcattcttgatgagtattcanagtgctntatagnttatattatcaata

SEQ ID NO: 7298 - DNA, 445 bp, Glycine max
tgcaagctactgctctcaagcaagcactacatgtgtatttagttcctttatacttctatggtctgtgagtataatgaattggtggcccagtaaatactggcgccacttcttcacggctgaggttatggcggcgagctcacgaacgtaggtcgaagtgtggagcaatttcgggcaaaaagctttattgaaaaaggcaatggggtgattctgttgagaaagaatagcccccattcctattcccaatgcgtccatttccaccacgaatggcagggaaaagtccggcaaccgcaagactacggcgctacagatgacttccttgagcttgacaaaagctgctagggctttcggcgaccagcataacttgtctctggccaggagctgagttagaggtgctgcaattgaagcataccccttaatgaatcttcgatagaaacctaataaaccg

SEQ ID NO: 7299 - DNA, 453 bp, Glycine max
  unsure (1)..(453): unsure at all n locations
tgcaagcttcaggaaatattgttgggtatatctgatgacaaatacatgagtttgcaagagggagttaagcaagcgcagagacattttgtggtgaataatcccccaaagaggtatgatgtattccatatgattattcattccatatggctaaggaggttgaatgtgcgtgtgaaataagtcatcaactctattatgttctctctctattcatacttttgctaatggttttaaagtttaattgtttgaccttcaatattttgatacttaaaagataatagattcgagtataattttatcttatatgactaataattnttaatcaagagtcatctcttttgtgacttaatataaatataacaataagagagatgactctacgaaatatgaatatttttttgtttgaagtgtcgttgcgtcaaacatatttttanaatcaacacattgagacacttg

SEQ ID NO: 7300 - DNA, 431 bp, Glycine max
  unsure (1)..(431): unsure at all n locations
gctgctatcaattactttctccatgattctgttgctctatcatatacagngagcttgcatccatccgggcaacctaatgcatatagttgtccattcagagagatacaatctttatcccatccattgaccattccattagcaactacggtccaagtatcagtttcaggtgaataggcttcacacatggaattaccactcccaattgcatttcccttgaaaaaccatgttccattgtgaacaacaccaaataaaggcaccatggatgtgctcatctctgatattaaattccacctgttttggctggggtcataaacttcagcagatcgagtcatttgaattccttcaagttccccaccagacacataaagacaattatttatcacacaagaacgaaacagattacgtttctgcagcatatcgggtgccctatg

SEQ ID NO: 7301 - DNA, 438 bp, Glycine max
  unsure (1)..(438): unsure at all n locations
aataaatcactcatagtgtataaaactcacacaggcatgtgttttatcctattcccaaaccataactgcaccatgactttattttgcacacgacttcctatcgaatcaaaaataaaacgtacgatcacggaccaataggattttctcgagggtagtggttttttggagaggaagttgggtgtttatgtcttttcctctttgttcaggtggggtgggatatcgccagtcgagaacgaccttgaatggcaatctgaagggaagagacaccaaaaatgggttttcctttgtcggcagtcacctaccttgccgaaaatttatctggcttgaagaatttctgtcctctttctttcattgatcgagaattgcttcgtttcccttttcacttcctttcgatctttgatcgggaatccttccttttctttcttttgtttntttctt

SEQ ID NO: 7302 - DNA, 449 bp, Glycine max
  unsure (1)..(449): unsure at all n locations
aagctttaatgttaaatctctatttattattataaaggaatnatgattatcnntttatatactcactgngggaaaagaataaccctctgtgacttcttcaagtatcctcctcctttcatgtatttcataataaggttaaagaaaggtaagaaaatgttatccaagtggcttcaataaatttaagaggggagtaaattgattttataaatattttctttgttaatataatctaattcatttttctatgataaatataataatatattaaaactttgattaaaaagagaaaaatatgcaattaagatctctaccaatataaatgaatatagtaaatttacaaaaaaaagtaaagagataatgtaagagagaattggaaattcgatttatactgatctggttatgtctatgcaggttcagtccccaagcaatccgcttaagagnttcattat

SEQ ID NO: 7303 - DNA, 341 bp, Glycine max
agcttgtgcctctttacgtctggaatatgtatgtagcatatagatccaaagacccttaagtgctttgctgatggcttcttcccgttccaaggcttaattggagtcttgtcttttacagacttatatggacgtctgtggagtatgtaaacagcagtgtagactgcttcatcccaaaatgtgctatgtagtccctctttcttgagcatcgatctagccatctccatagctgtgcgattctttctttcagacactacattatgttgaggagaatatgcgactggtaggagtctctcagtgccttcatcctcacaaaatcttgtcaactcgcgagaggtgtactc

SEQ ID NO: 7304 - DNA, 431 bp, Glycine max
  unsure (1)..(431): unsure at all n locations
ctttatgccctctcgggtcatctggccttataaacacttcttctatttggccgngtttttcatcagaacatggtcatcctcatcgacggaggaagcacgcaaaatttcatgcaggaacgactggttcgttccctcggtctcaaggcacagctcacgcatctgcttcgggtcgtggtgggaaatggcaacgagttagcttgtcatcaactttgctccggtgtcatgattagcattcagggccaaacgttctcggttgaccttcatgtccttcccctttgcggagtggacttggttctcggtgttcagtggctgaaatcccttggccctgttcttaccgactataaggatcttacattgaaaatcattcatgatgganaaataatagaattaanagggaatatggacgatgctcttcaccccgtcactccaac

SEQ ID NO: 7305 - DNA, 425 bp, Glycine max
  unsure (1)..(425): unsure at all n locations
tgctatctacccctaggccaaactagtatcatagaagatttataagatgggagaagtgcggtgtaaaaccgttaaaaaataagtcaacaagttattgcatgcaaactttatcagagaggtccgattctctacttggcttgccaacatcatcataatcaaaaaggccaacgccaaatggcaaatattcatcgactacactgatttgaatagggcatgccctanagacgcataccctttgcccaacattcatagactagtcgatgggacatccgagttccaggtgcttagcttcctagatgcttactatggatacaaccaattcaaaatgcatcctctagacaaggagaaaatgacattcatcactaaagatgccaactntaactgcaaggtcaagccaactntagtggtgttgggtatgttagagt

SEQ ID NO: 7306 - DNA, 347 bp, Glycine max
agcttatcccatgtctccgtagcagatgttttatcaaaaatcttttctaatgcatcatcatctaatgcttgatagatgacgaagaaagctttcttgtgtctctttcttgaattcctaaaagtctcattttgtgcttaggacagcgaaatctccttttgcaactccttatagccttcttcaaccatatcccaaacatcatgtgctacaagacaggcctccattttggtgctcaaattatcatggtgctcccctttagaagtggaactaggaaggatgccactccattgctcgccatgactatagagggatttcttatcagaacctaagctctaataccactttgttgg

SEQ ID NO: 7307 - DNA, 398 bp, Glycine max
  unsure (1)..(398): unsure at all n locations
tccatcacttgataggttagatccttctaccttcttcgtatggacataggtatatcttggttgctgctgagtatttcaccaagtgggtggaagaaattcctttgaatgttgatcaaggngatataataaacttcatagaacaaaatattatttttcgatttagtatcccataaacacttataacaggtcaaggcaccatttttattgatcgaaaagtggttcaatatgtcaattctcaaaatattaagttagtaacttataccccttattatgctcaagcaaatggtcaagttgaagccataaacaagattttggtaaggttaattaagaaacatggccaanaacctagaagttagcatgaaagtttagaccaaattctttangcttatcaaaattca

SEQ ID NO: 7308 - DNA, 328 bp, Glycine max
caagtgaccttagatatcttaagaagggttggttaattattatatcacagactattcttttatttaaaaaattctactgttaatggaaccctacaacccaggatttcttttaaacaagaactcctacataataatgaaaattaatcttactaaatagaaataataagcaataagcaataaaggagtttaagggaagagaaaatgcagactcagatttatacgggttcggccacacccttgtgcctacgtccagtccccaagcaacccgcttgagagtttcactatcttgtaaaatccattgacaagttctgaaccacacaaggacaac

SEQ ID NO: 7309 - DNA, 445 bp, Glycine max
  unsure (1)..(445): unsure at all n locations
agcttctcactccctcgacatttataggagttggtagcatctcgattcttcaatcttagctatgtctacttcaatccccctcatggagattttgcggcccaacacaattccttcttgcaccataaaatgacattttccccaattaagcaccaagtttgcctctttacaccgctgcaacactcgctctagatttgctagacaataatcaaaagatgagctgaagatggagaagtcatccataaacacttcgatacatttctccaccatgtcagcaaagattgccatcatacatctctgaaaagttgcaggagcattgcaaagaccaaatggcatttgcctataggaaaacacaccacaagggcaggtaaatgttgtcttncttggtcatttggatccacaacaatctgattgtagccaaagtatacatctaagaagcaatagaatg

SEQ ID NO: 7310 - DNA, 445 bp, Glycine max
ggaccaggaattatttgtatgggttggatgttgaattctgtttgttcctggtgttgagatgatggtacagcgggtgaaccagaagctgaagtttcttttggtgaggtagccatggaaaagcagagcgtttgaaatgatttcgtaaatctcagaaaactattgggaaatgctggtgaaaacacgaatgtcacgaaaatataaatttgaataaggaatgtagagggccgtgtgaagcaacggtcgaatttgccttggttcagtagtgaacgtgctattaatgttaagtgattcgtttgggcacgttcagatatcagtagttgctacaattcctctagcagacaaatgcccagcttgcccctcagtttttcaaactgatttgcatccaaagcctttgtgaaaatatctgctatttgttcctcagtgtcaacatgcttcagtgtgatca

SEQ ID NO: 7311 - DNA, 392 bp, Glycine max
  unsure (1)..(392): unsure at all n locations
tgtgcattcaatatcctgatgaaggtgttccatatgttctaatactggactaatacatttgctgcccaagtttcatggtcttgcacgtgaagatcctcataagcatcttaaggagttccatattgtttgttccaccatgaagccccctgatgcctaagcagatcatatctttcttaaggcttttcctcattctctagagagagtggcaaaagattggttgtactaccttgctcccagattcatctctagctgggatgaccttaagagagtgttcttggagaaattcttccctgcatctangaccactgccatccgaaaagacatttcaggcatcaggcaacttaatggagagagcttgtatgagtatttggaaagattcaagaaaatgtgtg

SEQ ID NO: 7312 - DNA, 436 bp, Glycine max
  unsure (1)..(436): unsure at all n locations
ntannaattgaattaaaaacgttcagtttctgctggtaatttattaccatatatgtgtaatcgattacacagtgcaaattttgaattcaataacttagacaaaagtaaagcataaataaaaagtgcacaacggaaaaataaagagggtagggaagaagaaagcaaacacaagatttatactagttcggccacaacccgtgcctacgtccagtccccaagcaaccaccggttcttgagatttccaataaccttgtaaaatcctttacaagcaaagatccacaagggatgtaccctcccttgctctctttgaacaaccaagtggatgtacgctccacttgaactgatccacaagagatgtatcctctcttgttcttagtattacaacccaagtagatgtacgctctacttgtaccacaaatgatatnatgctcaatat

SEQ ID NO: 7313 - DNA, 283 bp, Glycine max
tgaaagtttactggatgcgttggtcaacttggtaacccttctggccttgaatcagaaatctgtacctgtcgcaagggtttgtggtctgtgctcctctactgaccaccatacaaacctttgcccttccatgcagcaacctgaagcaattgagcaacctgaagcttatgctgcacatatttacaatagacctcctcaacctcagcagcgaaatcaaccacaacagaacaattatgacctttccagcaatagatacaaccgctgatagaggaatcaccctaacctc

SEQ ID NO: 7314 - DNA, 447 bp, Glycine max
  unsure (1)..(447): unsure at all n locations
tgtgcattcaataccctgacgaggatgtcccatatgttcttttactggactgtccacttgttgcccaagtttcatggtcttgcaggtgaagaccctcataaacatctgaaagaattccatattgtctgctccaccatgaaacctccagatgtccaagaagatcacatctttctgaaggcctttcctcattctttagagggagtggcaaaggactggctatattaccttgctccaaggtccatcacgagctgggatgacctcaagagagtattcttagaaaatttttccctgcttccaggaccatggccatcagaaaggatatttcaggcattaggcaactcagtggagagagcctaaatgaatactgngagagatttcaaaaactatgcgccagttgccctcaccaccagatgtctgagcaacttcttctccaatatttttatgaag

SEQ ID NO: 7315 - DNA, 444 bp, Glycine max
  unsure (1)..(444): unsure at all n locations
gaccttagatactcagctgagtttaataaatggatgataatttttccccaatatacatataataatattgccaaatccctatcctttgatgttgtcgaactattcttgaagaagattctatatagacgtagatcaatatatagagtgtggttacattaattagggatcaaataatggtatatcaaaatcttgaagaaagaagaatttcaaatgctactacgtaccattgtggcataaagatgacactagcagaaagattgttaattaaacaacaggaagaatataagcaaagattcttgaagcaatacattgatgcctctcatctcanatgacaaagagattcaatacaacaaagcaacgattgtttctgaaggtagaaaataacttactataatgttttggattgccgtttcatttgaattgatgtactaaaaaacaacattc

SEQ ID NO: 7316 - DNA, 429 bp, Glycine max
  unsure (1)..(429): unsure at all n locations
gatggaccatttcaagtgcttgaaagattcaatgacaatgtttacaaagttgagctttccggtgagtataatgttagttccaccttcaatgtctctgatttatctcttttttgatgcagatggagaatccgatttgaggacaaatccttctcaagagggagagaatgatgaggacatgttcaagagcaagggcaaggatccacttgaaggacttggaggacctatgacaagggctagagcatggaaagccaaggaagctcttcaacaagtgctgtccatactatttgaatacaagcccaagtttcaaggagaaaagtccaaggttgtgagttgtatcatggcccanatggaggaggactaaatgacaccactttgtctcaattntagagtgtttagtttgtctaaataatggcccaatccttgtaaagt

SEQ ID NO: 7317 - DNA, 444 bp, Glycine max
gcagctattcaaatgaaagaattcaaattttagtttgagatattaccacggaagagaatttcaaaatgactctgaattgttttgtgaacaaaatggcattaatcgtaacttttccgctccaagaacaccacaacaaaatgggattgtggggaggaaaaaaaagtcccttgaggaacttgttagtgtttagctctactgagctttaaaagattggctaagattttgttaaaacataagcacttagacaatgaaggaaagctggagttgctgcacatgatgtccaacgctatgtcaaggaataagatcgggctgcacaatgcacaaggcaagataaaatgtcaaatgaagaattgaagttgcaggatccacgatgtcggatacaatgtcctgacatcctgcccgagaatactggagttgctgtacaatgcaagataaaagtcaagt

SEQ ID NO: 7318 - DNA, 308 bp, Glycine max
tctagtctcaattgtgagcgtgtcgatatatcacctaattattcggacatccgagtaaaaagttatagtcgcttgaaaaagctacgagcttccattatcaacttggagcaggctcatatattacgggactcaatcggacagccgcgtataaagttatggacaattgaatttgctaagagcttccgttatcaatctggagcgtctcgatatattacaggacccaatcggacatccgagcataaagattttgtcgatgaatgagctacgagcatgcgtagaaacctggagcatctcgaatattaccggac

SEQ ID NO: 7319 - DNA, 313 bp, Glycine max
  unsure (1)..(313): unsure at all n locations
agcttcttcacattttccgccgaagcangatcttctntattcttaanaacagaaacattacgcttacgcaaaagatcaagaagagtgagtggattaaaaccatatacaaccttcgaaggagaacaacttgtggtgctctgaacagctctatagtaagcaaatgcaacatgggcgtaaacaagcttcccaagatcgtaagttattcctcctaactgctctaaccggagagcccaaagacctattaacaacttccgattgcccatcggtttgagggtgacatgtggatgaaaatcacaatctagtgcccaacttg

SEQ ID NO: 7320 - DNA, 359 bp, Glycine max
  unsure (1)..(359): unsure at all n locations
agcttcaaacttgttactaggagtcgagttggtaaaaaagattcgtcttcaaactcttagaggtgactttgagcgtttgtttatggaggagtccgagtcaatttctgattatttttctcgagtattggccgtagtcaatcaacttaaaagaaatggtgaagatgttgatgaggtgaaggtcatggaaaaaatacttcgaactttaaatccaagttttgacttcattgttaccaacattgaagaaaacaaggatttaaagactatgactattgagcaactcatgggttccttacaagcgtacgaagaanaacaaaagagaaaaatttaacaaaaggaggctactgagcaactactacaac

SEQ ID NO: 7321 - DNA, 446 bp, Glycine max
  unsure (1)..(446): unsure at all n locations
agcttctgtgtgtgaactccatgcagaaacctatgagaggatntgttttttgaatgtctgccctcatgaagtcatccacagcctcttctacaataagtacaacgactcacttattacggtattcgttaatgctcatgagatattcaactctttcaaatgcagatccaaaaacattgagtgattgcattctgtgtctatccattcaaatcctcctctttgatcgatgtttaaaacttattttgcttacatgatttttcatttatgttcttagatacattcggaggggcaagccggatgccgggttttctcttttccagtctgaatgtttgaaatggtctggatatgtagagtttgataatctaaaaaaaaatgtcctaacttacttagcagaaaataagtaccttcctcngtctcttatctttctattccacctctactgttaatct

SEQ ID NO: 7322 - DNA, 402 bp, Glycine max
  unsure (1)..(402): unsure at all n locations
tataatatattattacactcgaaattttacaacagaagctttcgagaaattcaaatggtcataacttttcacccggatgtccgattatggcgaatcacatatcgagacgctcaaaattgaacaacggaagctcgtgagaaattctaatggtcataacttttaactcggatgtccgattcaggcgcataacatatagaggcgctcgaaaaggaacaacggaagctctcgagaaattcaaatggtcataactntccacactgaggtccgattcaggaatataatatatcaagacgctcgaaattaaacatcggaagctctcgagaaattcaattggtcatcacatttcacacggatgtccgattcgggcgcataatatgtcgacacgctcgaaattgaacaacg

SEQ ID NO: 7323 - DNA, 322 bp, Glycine max
  unsure (1)..(322): unsure at all n locations
agcttgaatcggatttcaatgtgaaaagtttttactattttaatttcccgagagcttccgntgttcattttcgagcgtctctatacgcgatgcgccctaatctaacatccgagcgaaaagttgagaccattatgacatccgcaagagcatccgctgttcaatattgagcgtatcgatatcagatttggctgatatgtacatacccgagaaaggctaggaccatataatactggatagagctcacgcctgtatatagctagcctctggaataatcatgcgcaacaatgaagaatacttgtaactagtgatgaccattggaact

SEQ ID NO: 7324 - DNA, 426 bp, Glycine max
tctagatgagttatgtctgcgaatcgtacatcctgtgaatagttatgaccatttgaatttctcgagtgcttccgttgtttaatttcaagcgtctcgatattttatgtcctcaaatcagacatcggagcgaaatgttatgaccattcgaatttgtcgagagcttccgtttttcaatttcgagcgtctagatgagttatgtcaccgaatcagacatctgagtgaaatgttatgaccattcgaatttgtcgagagcttccgttgttcaatttcgagcgtctagatgagttatgtcaccgaatcggacatccgtgtaaaaagttatgaccattcggctttgtcgagagcttccgttgttcaatttcgagcgtctcgatatattatgtccccgaatcggacatccgtgtgaaaagttatgaccattggact

SEQ ID NO: 7325 - DNA, 456 bp, Glycine max
  unsure (1)..(456): unsure at all n locations
ngctaacccatggaagctcctaatatctcccacactttttgnggtgggccattcttggatggccttgattttctcagggtcgaattggaccccatttctaccaactacaaatcctaagaaaactatactatctacacaaaaggtacacttctctatatttgcatagagggtgtttttaataaggactgaaagaacttgcctaagatgtcctaagtgatcatctaggctcttactgtacactaaaatatcatcaaaataaacaactacaaatctacctagtaaatcccttaagacataatgcataagcctcataaaggtgcttggtgcattagtgagcccaaaaggcattactagccattcatacaaaccaaacttggtcttgaaagcggttntccactcatcaccctttttcatcctgatttggtgatggccacttttaacaatcaattttgaaaa

SEQ ID NO: 7326 - DNA, 294 bp, Glycine max
tgagtcctttcatatatcgagacgctcgaaatggaataccgaagctctgagcaaattcaaacgacaataactttttactcggatgtctgattgagtcccgtaatatatcgagacgctcgaaattgaataccgaagctctgagccaatgcaaacgacaattaatttttactcggatgtctgattgagtcccgcaatatatcgagacgctcgaaattgaattccgcagctctgagcaaattcaaacgagaatcacattttactcggatgtctgattgagtcccgttatatatcgag

SEQ ID NO: 7327 - DNA, 288 bp, Glycine max
  unsure (1)..(288): unsure at all n locations
agctagtagaagcaagaatttctttctggtctttaacgaggacnccgaaaaggcctatgactcattctcatggtcttttttggattatatgctgcaaagaatgggcttctgtccccaatggagacaatggattcctgtctgtctcaactcaccaaccatatcaattcttgttaatggcagccctacaaaggagtttgctcctactatagggttgaagcaaggggatcctttagcccctcttgcttttagcatatttggagaaaacatcacaggattgatgagggaagc

SEQ ID NO: 7328 - DNA, 434 bp, Glycine max
  unsure (1)..(434): unsure at all n locations
taccccctgctttgattgcattcaaaggtcatgntctcccgannggcccctctnggcacatgcttggcttgggttatcataacaaaactgacattgagagtgtgaggaaggctgctgttattcatttcaatggccagtcaaaaccgtggttgcaaattggctttgatcatcttaggccattttggaacaagtatgtcaattatacaaatgattttgttaggaactgtcacatcttggattcatagtctgccatgagatgcactatggtttgaaacaacagtgcatgcatactacgaaagggacgagtaaatacatgtttcatctaaatttctgcggattgagaaggcaatataaaattggttgagggcaaagtgtgggtggataatttgcttgcaccccgtaacatttttccacacacagttactatcctggca

SEQ ID NO: 7329 - DNA, 296 bp, Glycine max
  unsure (1)..(296): unsure at all n locations
agcntagaatcattatcttatctccgacatccattgggtgagtcctgtcccggtagtcccgaagaagaccggccctacagngataaaaaatgagaaggaggagctaattcctactcgggtgcagaacagttggagagtctgcattgactataagaggctgaaccangttaccaaaaaggaccattttcccctgccattcattgactagatgctcgaacgactggcatgttaatcctcactactgttttcttgatggtttcttctgctatcatgtaatatctattgctctttacgat

SEQ ID NO: 7330 - DNA, 444 bp, Glycine max
  unsure (1)..(444): unsure at all n locations
tgatgcaacatatggagaggttaatgaaacaacgagattangcgctccatgttatgttggatcaaatggagaacagagatcataatgaagaagaaaggaggagaagagggaatgatggtgttcctagacaaaaccgaattgatggtattaaactcaacattcctccctttaaaggaaagaatgatccggaggcctacttggagtgggagatgaaaatagagcatgttttctcatgcaacaactatgaggaggaccaaaaggtgaagcttgccgccacagagttttccgactatgctcttgtgtggtggaacaagctacagaaggagagagcaagaaatgaagagccaatggttgatacatggacggagatgaaaaagatcatgangaagcggtatgtgccggctatgtactcaagggacttgaaattcaagctccaaaaactaa

SEQ ID NO: 7331 - DNA, 450 bp, Glycine max
  unsure (1)..(450): unsure at all n locations
gacactatgatactaagcttgagaatatatataaaagatctatgactatngaagaatcattcatgtgnccttngatgagactaatgctatttctccaagaaaggatattttagatgatgtagcagaatctttagaacaaatgcatattcatggacaatattctaaaggaaaagggaaaggaagcaatgaagatcctccagaagaagccaaatcaaatgatgaacttccaaaagaatggaaagcttcaaaagatcatccccttgacaatattattggtgatatctcaaaaggggtaacaactagacattctcttaaagacttatgcaataatatggcttttgtgtctatggttgaacctaaaaatataaatgaagccataatagatgatcattggatagttgttatgcaagaagaactaaatcaatttgaaagaaaaaatgtgtgggaact

SEQ ID NO: 7332 - DNA, 435 bp, Glycine max
  unsure (1)..(435): unsure at all n locations
ntgaagaagcatcaaagcaggatgtatgggtcaaggcatttgttagaagagatacagatgatcgagaaaaacaacacatgggagttagtaaatcgtccccatggaaaagatatcattggggttaaatgggtctataagacaaagctcaacctgatggcaccatacagaaacacaaggcgaggctaatagctaagggttactcacagcaacccggaattgactacaatgagacatttgcactagtagctcgtcttgataccataagagctctaatagctcttgcgtcacaaaaaggatggagtatccatcaactagatgtcaaatccgccttccataatagcgtacttgaagaagagatctatgtggagcagccacaaggattcgtgtctgaaggcaaagaaagaaaagtgttaagactaagaaaagcactctacg

SEQ ID NO: 7333 - DNA, 453 bp, Glycine max
  unsure (1)..(453): unsure at all n locations
tgtcctgaacttgtacaaaatggggttcgctcgctgtcgtaacttacccttcggcgggagggcgacgcgagactcacgggtgcgtcttccaagaaaggaaaatgcatggagtcgccaccaacgtttatttggggaaaacatccgaaaaaccgaaaaagacgtggtctacaaactttaagtgtgaggttcgagagttgtatttacgcacggngaaggtattagcacctgttagacaagtggcctcagatatcttaagaagggggggttgaattaagatattccaaactgtttcccctaattaaaaatctattttattttttactcaagttataaattcccttaatgacaatcttcttaaatattaattcaaatgaagcaacttgaatatgaatataaagcaataataaataaaggagattaagggaagagaaaatgcanactcagttttatact

SEQ ID NO: 7334 - DNA, 442 bp, Glycine max
  unsure (1)..(442): unsure at all n locations
tctattcaatntagctctgatgggaaccacatgccatcnctttcagatttgcaccaataggaatacccatgtagataaatgagaaagataatattctacaattcaagaatgatgaataacgttcaatatcttccctatccaccccaatacccctaaatctacttttgtgaaaattgactttcaatctagatacaagttcaaagcacctcaacacactttttacaacaaccacattgtccatgttgaactctccaacaaaaattgtgtcgtccacatattgcaacaagttcacctccacctccttagccttcactttgaaccctctatatatgtattttcttattgccccccttattagcccacttaacccttccgctataatagaataaagaaaatgtgctagaggatcaccgtgtcaaagccctcttgcatcatgaattct

SEQ ID NO: 7335 - DNA, 454 bp, Glycine max
  unsure (1)..(454): unsure at all n locations
ctcagctaaacattcaatttcgaggctctcgatatatacgggattatatcaagcatcctttanaaaatttattggcgtttgaatttgctcagagattcaacattcaatttcgagcgtctcgatatattacgggactcaatcagacatccgagtaaaaagttattgtcgtttgaattggctccgagcttcaacattcaatttcgagcgtctcgatatgttacgagactcaatcagacatccgagtaaaaagctattgtcgtttgaatttgctcagagattcaacattgaatttcgagggtctcgatatcttacgggactcaatcagacatccgagtgaatagttattgtcgtttgaattggctcagagcttcaacatttaatttcgagggtctcgatatattacgggactcaatcagacatccgagtaaaaagttattggcgtttgaattggctc

SEQ ID NO: 7336 - DNA, 422 bp, Glycine max
  unsure (1)..(422): unsure at all n locations
agctataacatcagaccacttccagggtgttgtaactacttacatggatntgatggggcctatgcaagnngaaagccttggaggaaagaggtatgcctatgttgttgtggatgatttctccagatttacctgggtaaactttatcagagagaaatcataaacctttgaagtattcaaagagttgagtctaagacttcaaagagagaaagactgtgtcatcaatagaatcaggagtgaccatggcagagaatatgaaaacagcaggttcactgaattctgcacatctgaaggcatcactcatgagttctctgcagccattacaccacaacagaatgggatagttgagaggaaaaacaggaccttgcaagaggctgctcgggtcatgcttcatgccaaagaacttccctataatctctgggctg

SEQ ID NO: 7337 - DNA, 400 bp, Glycine max
  unsure (1)..(400): unsure at all n locations
agcttctattacctatctacagttttttctatagngctattattacaagaccaactcttaaaattaaatattatgatttgccctcatactcgccccattttcccaaatactttcagggggtgcattccatgttggacggctgtccaggaaaaacatgggaacctaacgagaagaggataaacaagcttgtcttcattggaaggaatttggatgaaactgcccttaaaaaaggcttcaaaggttgtttagtatagcattaaagatctgttaccagtcaagttcccaagcagcagcccttgtgtgtcttattttataaattccagcaagcaagtatatgtacatggtagcaccaatcgaataaacgttggttgttcgtgctatatactgaatatacagactc

SEQ ID NO: 7338 - DNA, 379 bp, Glycine max
  unsure (1)..(379): unsure at all n locations
agctagttggttnatgaaactngatctgctgtatggttatcaccaaatccacatgcattcttcggacattgctaaaacgacctttcgcacgcatcacggtcactatgaattcaaggttatgcccttcgggctatgcaatgctccctccacttttcaggcgacgatgaacatgcttttccggccattccttcgccggtttctcattatcttctttgatgacattttaatctatagcatcacctttaatgatcatgttcttcatttacaacaagcttttcaggttctgttggacaatcaattcgtcctgaagttgtccaaatgtacctttgctcagccacaggtggagtacctcggccatgtggtctcctagcgaggagtg

SEQ ID NO: 7339 - DNA, 454 bp, Glycine max
  unsure (1)..(454): unsure at all n locations
ntattcaagacaagaatccaagaaagtcaagatatatgatctagtttgatctcttagaatctttaggaagaagtttccaaattgaaacaaacaaaaggtttgaccaaggaattctatcctttcaaattgagatttgctctctggtaatcgattaccagcagtttgaaaatgttttaattcaaatttttaaaacctgtaatcgattacataagtcttgtaattgattaccagaggggattttcagaaaataatttccaagagacatatctattcaaatgttttatgaacggccattcaaatgttttaaagagagttttcattgcccaaacagctttatcctctcgaaagatcaagagtttttctgaactgaaatgtcttatcctctcaaaaagattccttggtcaaccacttgcttattcaataaggaattnttgattgatcttcattntacaat

SEQ ID NO: 7340 - DNA, 388 bp, Glycine max
  unsure (1)..(388): unsure at all n locations
agctacttagtctcagattatgcnagctgtttttgtagctacctcatgcactcctctaatgactatggcatcatttctggcgctaaactgctgggagttggaagccatcttctcaattaaatttctggcttcagcaggagtcatgtctccaagggctctaccactggcagcatctatcatacttctctccatattactgagtccttcataaaaatattggagaagaagctgctccgaaatcttatggtgagggcaactggcacatagttttttaaatctctcccagtactcatacaggctctctccactgagttgtctaatacctgagatatccttcctgatggttgtggtcttagaagcaaggaattttttttctaagaatactctc

SEQ ID NO: 7341 - DNA, 442 bp, Glycine max
  unsure (1)..(442): unsure at all n locations
gttgagccaattcaaacgacaataactgtttactcggaggttgtattgagtcccgtaatatatcgagaccgtcgaaattgaatgttgaagctctaagccaattcaaacgacaataacgttttactcggatgtctgattgagtcccgtcatataccgagacgctcgaaatngaatgttgaatctctgagccaattcaaacaacaataactttttactcggatgtctgattgagtcccgcaatatatcgagaccctcgaaattgaatgttgaagctctgagccaattcaaacgacaataactttttactcggatgtctgattgagtcccgtaatatatcgagacgctcgaaattgaatgttgaacctctgagccaattcaaacgacaataactgtntactcggatgtctgattgagtcccgacatatatcgagacgctcgaaat

SEQ ID NO: 7342 - DNA, 378 bp, Glycine max
agcttaaacattcaatttcgagcctctctttatatcacgtttattcaattaaacatccgagaaaaaagttattgtcgtttcaatttgctcagaggctcaacattcaatttcgagcgtctcgatatattacgggactcaatcagacatccgaggaaaatgttattgtcgtttgaattggctcagaggttcaacattcaatttcgagcgtctcgatatgttacgggactcaatcatacatccgagtaaaaagttattatcgtttgaattggctcagatcttcaacattgaaattcgaacgtctcgatatatgacgggactcaatcagacattcgagtaaaacgttattgtcgtttgaattggctcagagcgtcaacattc

SEQ ID NO: 7343 - DNA, 416 bp, Glycine max
  unsure (1)..(416): unsure at all n locations
tgatgcaacattcggagaggttaatgaaacaacgagaatangctctccatgagaggttggatcaaatggagaatagagatcataatgaagaagaaaggaggagaagagggaatgatggtgttcctagacaaaaccgaattgatggtattaaactcaacattcctccatttaaaggaaagaatgatccggaggcctacttggagtgggagatgaaaatagagcatgttttctcatgcaacaactatgaggaggaccagaaggtgaagcttgccgccacggagttttccgactatgctcttgtgtggtggaacaagctacaaaaggagagagcaaganatgaagagccaatgtgatgtgaatcttacggngcgcggatcgcttgatacaggctgtagaagttttggatgacgccactt

SEQ ID NO: 7344 - DNA, 431 bp, Glycine max
agctatcactctaatgtcagattcaggaactaattatatattgacactcgaaattgaacacggaagctctggtccaaatcatatggcctaaacttttgacatggctgtacgattgaggcccatgatatatcgagatgctagaaattgagaaatggaagttctcgaaaaattcaaatggtcataagttttcactcgaatgtcagatttaggaacaaaatatacagagacgctcgaaattgaacaacggatgctctctagaaatttaaatggtaaaaaattttcacacgtatgttagattcaggcacataatatatcgagacgttcgaaatagaacaccgaagctctggtccaattcaaacgtccataacttttgtcatgggtgtatgattgacgcccatgatgtatcgagatgctagaaattgaataacgga

SEQ ID NO: 7345 - DNA, 387 bp, Glycine max
  unsure (1)..(387): unsure at all n locations
agctcgcgnccatnatcatttattagagttacctcccctatgtcaacaancntgctggaganatggatgcccatcttcaccataccgaaatcccttttttgatatgatgaaaaaaaacctctatgaggagtaacatggaaggatgctctatagtctattatccatatacaatcattagatgcaatatttaaataattttcattattgataagaaaaacattctcatcatctgatgccacggcaatagtggcttcaccttagtctttttcattgagtcaatttgattagcatggacagttccagccttctgatctctcttcaagaatttgcactcagacttcttatggtcttaactttcgcagtagcagcaacccacgccttgggatg

SEQ ID NO: 7346 - DNA, 385 bp, Glycine max
  unsure (1)..(385): unsure at all n locations
agtttaattatctattgttatagctntgtttcttgcaggcgctagatactaaaatcaattgacaaagagaactaagacgggctataggctttgatacagattttatcttataaccaattagtattaagtaaagttgtccaacagatatataagttgcaccccaaaaactgagataggtgatgtgggactttctaacggctagaacacattgtcagttttctaacgagtgaaggtcgcaacaaaatggctcgatcgaaagattttgagaatactccagatcttttatgagtagaaaactagcttataatctctaacagaaacactggcgaattaagtttggcgtactcgatagataacagatagattatgatcagaacacataact

SEQ ID NO: 7347 - DNA, 465 bp, Glycine max
gacacttaaaactcagcttccagaatcaagatcaagattcaagactcaagattcaataatcaagagaagacttaatcaagataagtatgaaaaggttttttaaaaaattgagtagcacatggatttttctcaaaacatgtttatcaaagagtttttactctctggtaatcgattactagattgttctaatcgattaccagtagcaaaatgtttttgaaaaagttttcaactgaatttacaacgttccaattgatttcaaaaagctcttatatgttttggtaatcgattaccactgtctttgaacgttgaaattcaaattcaaatgtgaagagtcacatcctttcgcataaaagctttgtgtaattgattacactgatttggtaatcgattaccagtgattgtttctgaataaatgaaaagatgtaactctttcaatagtttttgatctttcaaattggtttaatt

SEQ ID NO: 7348 - DNA, 212 bp, Glycine max
  unsure (1)..(212): unsure at all n locations
tgcactcaaancggacattcgagtgaaaagatatgaccatttgaatttctcaagagcttctgttgctgaatttctagcatgtcgatatattatgtccccgaatcggacattcgagagaaaagttgtgacaatttgaatttctatagagctctcgttgttcaatatcaagtgtctcgatatattatgcgccagaatatgacattcgagtgaaa

SEQ ID NO: 7349 - DNA, 417 bp, Glycine max
  unsure (1)..(417): unsure at all n locations
gcatgcgaagtgggtggaattcctagagcattttctttatgttatcaaacataaaaagggaaaatgtaatattgtagccgatgctctttctcggcgtcatgcattactttctatgcttgaaacaaaattgattggtcttgaatgtttgaaaagcatgtatgaaaatgatgaaacttttggagaaatttttaaaaattgtgaaaaattttcagaaaatggtttctttagacatgaaggctttcttttcaaagaaaacaaattgtgtgtgcctaaatgttctactagaaatttgcttgtttgtgaagcacatgaaggaggtttaatggggcattttggggtccaaaagactctagaaacattacaagaacatntttattggcctcatatganaaaggatgtgcacgaaatttgtgaaca

SEQ ID NO: 7350 - DNA, 455 bp, Glycine max
  unsure (1)..(455): unsure at all n locations
ngagaactctttccatgcagaagttagaatactaagcaatattcctcataccttcattgtgagattgatgtgttgtatctctaatgaggattctatgctctttgtgtatgagtatctggaaaatcacaacctagataagtgactgcaccagaagcttaagtcaggttcagtaagtaaagtggtccttgattagccaaagaggttgaaaataaccattggaattgctcaaggtttaagctatatgcaccatgattgttcaccatttgtggttcatagagatataaaaacaagcaacatccttctagatactcaattcaatgcaaaagttgttgattttggacttgctaagatgttaatcaagccaagggaatctttttgtttcctgactaacaaatatattgctcttgcttagctatattttgtgtgtgccttatgagtaaactatnnttttagtc

SEQ ID NO: 7351 - DNA, 412 bp, Glycine max
ggctgcaagctacgtccacctatttgcagaaatgaaagaagggtgtaataaataacatttggctggaaggaaacaagagacaaatacctcccccgtccaaaaaaaataaaagaaaagaagttacctttccccatatatatccccttgtattcttctgcccctcttcttggtaggaaccatcctcattgacccaaaaatgtgggttgccagcacactgaactcctgccaactgcacacaacaaccaaaacaggattctttcaaaaattctgtttcacaataaacaagatatggttattaagagagagcctctcaatatgaattgtcgacctgcaacatacgaagctccactttagttatttcccgaccattgatgaaaacctgagtggttccattgctagcatccggttggat

SEQ ID NO: 7352 - DNA, 454 bp, Glycine max
  unsure (1)..(454): unsure at all n locations
tactcaagcttaagaacggagttccaaccacagtgagtcacaatccctcctgaggcagggtggtccaatatcagcaactggggcgcccagttccatatgatataacccttcttgctttctttcatcctttgcccaaaatcttgcaggaaactctctccatcctcatctccatctccataccttttccgaataacccagatgaaatcatgaccagaattttcaagcccgtgagcgatttcaacaagctgagcatgagggagcctgattcggcttccaaaacttacataaagaactgactcattntgcttagagttaagccagtttagccactcttattcttgcacaagctcctccttgtgtcccctattggccttttcttcatcgcactgattaattaacccaagctgacaccggtcctacactccaacacttgaccccctttgtgctctgataa

SEQ ID NO: 7353 - DNA, 415 bp, Glycine max
  unsure (1)..(415): unsure at all n locations
agctattgtagtagtagtcttcattacattttaaatcactatgttcaatgacatgaaaacactgcagctaacttagcaaatattcagtaactttggtcatacctttaactagttgcaggaagaaacacccttattagtgagttctttgtaaccttttttctacaggtagggcatttagcctgtgcagatatagcagccctgatgcaattcttgcaaaaaatatgaccacaccttgttgacatttcttcaaccaaaggggacatacatattgggcaattaaaaacaggctccttatgagcttcaggctccttgggaggttcaggtgtcttcttagcattttcactctgcaaaaggaaaaagtgtcagcaatttgaactcatacaaatgtctgcaatcaactgcaagtctntatatg

SEQ ID NO: 7354 - DNA, 347 bp, Glycine max
agcttaagctctttcaactgcacaaggctcttaatatttgaagagtatccttgtggaaccttcacccgatgaagacactgacaaaaacttatcttctcctttttggacaaagtatgacaagttgggggcaagtaaattttctttccatcagaccttggatgccactgtgatcggatccacatctctgctagattttgacgagtattcaagccatccttcgtcttgccctaaatgttaaagagcgtcccaatcacactgtcacatacatttttctcgacatgcataacatcaatacaatgtctaacatctagatcagaccactacggaagatcaaagaaagttgacct

SEQ ID NO: 7355 - DNA, 569 bp, Glycine max
agcttggacttcctgtgttgtgggaacctctccttcctcaggtgtacccaaacccaatcacctggttcaagcacgactttctttctgcttttgttggcttgccttgcatagctcgcatttttcttttcaatttgagccttcacttgctcatgcagcttcttcacatactcagctttagcctgtgcgtccttatgcttaaacatagcaatgttaggcataggcaacaaatcaagaggagtcaaaggattaaatccatacactatctcaaatggtgaacaattatttgtgctatggatgatacgaaatcagagtgtggtaacggaagcaaacaaccaataacgaaagtactaggtaccacccttattagtcgaattcctttaagtatttttggtatttgtgtgtttgggtttttacgaaaatcagcaaggaaaaataagcgatattaaactacaccaatagcttaatacgagattagcactcaccaccaattgagctaatcggactattttcaagacgacgctggcaaataatcgggcgaaaaatgtaacacaatttctaattggactgaa

SEQ ID NO: 7356 - DNA, 385 bp, Glycine max
tactttcttgattcatgaaagatccaagccatctagttgtatcaaaaagggtgctaaaatacattcaaggcactttgaactatggaatcaaatatgacaagaaggtggaagcaaatgtaattggcttttgtgacagtgattgggcaagctgtatggatgaaatataaagtactttcggatatgttttctcactgggtttaggagaattttcatggtgctcaaagaaacaacaaaccgttgcccaatcttttgcaaaagctgaatatatttcagctggcttagctacccaacaagcaatatggttgaagagaatatttgaagactttggtgaaaagcaagggacaatgactatccattgtgataacaaatttgctattgctatcac

SEQ ID NO: 7357 - DNA, 412 bp, Glycine max
agcttttgacggactataccaagctctatgaaccagggacggagaaagatctatatataggcttgctaagggtagagagaggaagactagagatttggatcaagtaaagtgtgttaaggatgaagaaggcaaagtcttagtgcatgaaaaagatatcaaggaaaggtggaaggcgtatttccacaacttatttaatgatggatatggatatgactctagcagtctagacacaagagaagaggaccggaactataagtattatcgtcggattcagaaacaggaagtaaaggaagcgttgaaaagaatgagtaatggtaaggcggtggggccagacaacatacctattgaagtgtggaaaactcttggagatagaggtcttgagtggctcaccgaactctttaacgaaattatg

SEQ ID NO: 7358 - DNA, 128 bp, Glycine max
tgcttttcccaaagagaggcaccactggttttatcacctgatcgccaaccggatgcccccaagcgtctttgacttttttgaagcggtcgatatccataataacgacgcactaaagcggattctgggct

SEQ ID NO: 7359 - DNA, 353 bp, Glycine max
atatactgtaatcgattaccagagcttattttcagaaaatattctcaacaatcacatctttttgtgtggttcttgaatggctatcaaaggcctatatatatatgtgtgacttgcgacacgaatttgctaagagttttaaagaacaaaaaggtcttatcctcttaacaagaaaaattgttttatcctcttacaaattccttggccaaaacacttgtgattcaataaggaattatctgagtgctcaaaatgttcaatctatctctgtcaagagagatatcttcttttctacttcttcattctgaaaagggattaagagaccgagggtctcttgttgtgaaagaattctttacaca

SEQ ID NO: 7360 - DNA, 471 bp, Glycine max
  unsure (1)..(471): unsure at all n locations
agcttttgtgtgggatacccaatgtgagcttattttccagacccttaaggaaagattaacaaccactccagtgttagttttgcctaacccgagagaaccctttgaggtgtattgtgatgcatcaaagatgggattaggaggagtgttgatgcaaaatggctaagtagtggcctatgcttctagacaactcaagactcatgagaggaattacatcactcatgacctggagttagctactgtagtttttgcccttaagatgtggaggcattacctgtttcgctccaagtttgaggtgtttagtgatcataagagccttaagtacttgtttagtcagaaagagttgaacatgtgtaaaaggagatggttagagttttttaaagattatgattttgagcttagctaccatcccggcaaagccaatgtagtggctgacgccttgagtangaaatccctacatatatcggcattgat

SEQ ID NO: 7361 - DNA, 521 bp, Glycine max
  unsure (1)..(521): unsure at all n locations
agcttcacaaaagaaaagtggataatccacatattacaaaaggttgacttccacattaccatcccccacaaggaaacttgcaaacaagtttttctcaatagtttccctctcaccatctcacacaatccttctaataacaatagtaaacaagaaaagtgtcaatggatcaccttgtcttaaaattttttgagcgaaaaattcataagtatttcagcaacatcaaatggtacttgatgtcaaacatcccttaatccaatgaatccacttctcatcaaaacccaacctcttcatatagaacaagaaattccaattaatcaaataataggtttttcataatctaacttaaagataagactttttctttttccttttttctttatcaatggtatcattcaccgccaacacactatgaagtaggaattttcctcccaagaaagcactttgcttatgatcaatcacacttaanagtaccttcttcaacctattagctaacaccttacaaaatattttatacatacatc

SEQ ID NO: 7362 - DNA, 456 bp, Glycine max
  unsure (1)..(456): unsure at all n locations
ttggaacccagatgctccatcgactagcctgtttattttgggcagaaggtatgcgtctttaaagcatgccttgttcagattagtgtaattggtgcacatttgtcaattgttgttgaaccttttgaccatgatgatgttggcgagccacgtggaaaacctgacttctctaatgaagtttgcattgaggagtttatccacttcttctttgacagctttacgccattcttctcccatcttccttttattctgtgatattgttttggcctaggaacatataacaagtttgtagtagattatgctaggatggattcctggcatgttagacggctgccaagtaaataaattcccgttttcatgtagcacgtcggcaatgcgttggtgctcatgactagtgaggtcgctactaagccacatgcactacccanngttaggttcgagttgcaacttgacatgctc

SEQ ID NO: 7363 - DNA, 498 bp, Glycine max
  unsure (1)..(498): unsure at all n locations
gtggtccataatgctttcaaccgagcttcagcatttattttatcaaccccaatcaaatcttctggaggtatttgaatcatcatgtacaccgtaaagctgtgtgctagttttagtatttttcaaccagcctcttaaacacttggttttgattttgttcacccaactcttgctaagattcagagattccttggatgataagtctaaggctaatctagtgcaaattaaaggacgattttcagtgacatcagaaaatttagatctggtgaaggtatgctttttagttttttcttattaatcaaatggtccctatcgacaacttcaactgacttcatcatatggaataggatattcctgtaagttcagtttcacgccgatcttcacaggttggttgatgatctaattgattattggctatatatntatgttttcttcttatcacctcatttgatggtctctttccttttacgttaaatatatggatcaccaatgagggaaatc

SEQ ID NO: 7364 - DNA, 451 bp, Glycine max
ccctatgactcggattcttggggattcctaaactatatgattatgatgatgggattttgctaaagatggagaaaatggatccatggatgcctttctagtgcaactacatcaattttgatcaaaggccacactactagagaatttgtgcctgaaaggggactgatgcaaggagatccccttgcacctttcctatttaatataacagctgatggactcactggggtgatgaagacagctgtctccaaaaacctttttagcatctataaagtggggaggcaaaaggaggagattaacatcttgaagtatgcacatgatacactgttttttggaactgcgactacagctaatgttagagacatgaaatctatcctcataattttcgagatggtttcaggactcaagattaactatgctaaaagccaaattgagtgcttgcgtaaatctttggact

SEQ ID NO: 7365 - DNA, 518 bp, Glycine max
agcttcgtaatttgaggagcatgaatggttgctttacacaaacaatgcatgtgaaggtgcatgtgccattttgaattctataacaatattacccatttgatgatgatccttcccatctttgaatttccgaccacatgcacttatcttaattagtcaataaattatttaaataacatctgacaattagcaaattcgaccattagtaatctaagatcacctcttacatttctatgaacttcttttagaatgggcacgaggtaatcatgtttaaatcataaaattattattggtaagaaaaaatcttttcaaatatttaacacatttatatatagaatttgaagactaaataattgatcagatgaaataatctcacatcaattaatttatgcactcatgatttacatttccatggacttaactgtgaagttctaattaaaacaactacataatattttaaaaagatgttagaaaatttataaaagtaaatgaatatttctctaaataaactgaatgaaatg

SEQ ID NO: 7366 - DNA, 324 bp, Glycine max
agcttcatccactttcttgcaagggatgaagtgtgccatcttaggaaacttgtcaacaacaacaaacacagaatcctttccattcttggttttgggcagccccaaaacaaagtccatagatatgtcagtccaaggatatttaggaacaggcaaaggagtatacaatccatgaggtttaaccttagatttagcttgtttacacacaatgcaatgaccacaaaacttatgcacatcacgcctcatatgaggccaaaagaaatgatcttgcagaatttccagggtcttttgaaccccaaagtgtcccatcaacccccccctattgtg

SEQ ID NO: 7367 - DNA, 473 bp, Glycine max
agcttccaagaatcaagatcaagattcttgactcaagattcaagaatcaagagaagacttaatcaagataagtatgaaaaggttttttcaaaaactgagtagcacatggattttttctcaaaacatgtttaccaaagagtttttactctctagtaatcgcttaccagattattgtaatcgattaccagtagcaaaatggatttgaaaaagttttcaaatgaatttacaacattccaattgatttcaaaaaaggtgtaatcgattacaatgttttggtaatcgattaccagtgcctttgaacgttgaaattcaaattcaaatgtgaagagtcacatcctttcacataaaagctttgtgtaatcgattacactgatttggtgatcgattaccagtgattgtttctgaataaattaaaagatgtaactcttcaaaaagtttttgactttctcaaattgattttaaagttttctaaa

SEQ ID NO: 7368 - DNA, 463 bp, Glycine max
ttatagcaaatgccactctactccaagtttttaaaggatatgttaacaaggaaacacaagtatattcaccaggaaaacattgttgtggaaggaaattgtaatgctgtgattcaaaaaatccttccacccaagcataaagaccctgggagtgtaaccattccttgtttaattggagaagtcattgtgggaaaggttcttattgatttgggagccaatattaacttaatgccactctccatgtgcagaaggttgggagagttggagatcatgcccactatgatgactttacaactcgctgaccgctccattaccagaccatatggagtaattgaagatgtgctggtcagagtaaaacattttatcttcatgacagactttatggtaatggatatctgtgaagataatgacattcctataatattagaaaggcgattcatgttaattgcgagctgcatagttgata

SEQ ID NO: 7369 - DNA, 489 bp, Glycine max
  unsure (1)..(489): unsure at all n locations
aaatctatatatggtttaaaacaagcttcccgttatttgtaccttaagtttcatgggataatttcttcatttggttttgatgaaaaccccatggatcaatgcatataccacaaggtcagtgggagtaaaatatgttttcttgttttatatgtagatgatattttacttgcagccaacgatcggggtttgctacatgaggtgaaacaatttccctctaagaattttgacatgaaggatatgggtgatgcatcttatgtcatcgacattaagattcatagagatagatctcgaggtattttgggtctatcacaggaaacctatattaacaaaattctagagagatttcggatgaaagatagttcacccagtgttgctcccattgtgaagggtgatagggttaatttgaatcactgtccaaagaatgactttgagagggaacaaatgaanaacattctttatgcttcagttgttggaagcctcatgtatgct

SEQ ID NO: 7370 - DNA, 554 bp, Glycine max
tataggattctacatgtgctaaatgactacactccatcttttaatctaccaatgtcactgcttccccaaacattcccaacttgcaacaactacttagaagagagttatgaataatttccgagggagagattcccccttccctcatatgatggtacaaactgaaagctacattcaagcgtcccactttgcacagtccattaataagcttgctgtaagtgttaagattaggcacacagccacattcttccattttctcaaagagcacagttgtgattccaaaatcaattttactccatatatctgtattatcaacagagatatttgttaaacttacatcaagccccatgggattgcttccttccttcttatgtttttcaatcactagatgcttcattatgatggagtatgttagataagaaggctcatcaccagtaccaaacatgcgcctgagaacaccacatgcactatcaagtagtcccatacatccatatgctttaattaataaattatatataaaggaatcgagcaatacgccttcatttttaatcttgaga

SEQ ID NO: 7371 - DNA, 479 bp, Glycine max
agcttacttcttttatattgtcgtgattattaaatataataaattattttttctaataaactatttatatatatatatccaaactcaatgaataaatccttaaatgatatcacaaactttgaatttcaattttcatatatagcaaagagctttttttcaacttaaataaattattcctcaaaaaggacacgtataataaaaaaatacacgaattcgtagtaatatttgaaataaaaacattatattcttactgaaatttaattttacgttgaactgtattttttactcctaatggttaaataattgataaattatatctcccaacattaattacacattttatcctaaactttaaagaaactcgtggcttttattctctatcattttatttctaatataactgtattttttaccccacttattattctttggcaaattataccttcaatttttgtgcttactaatgaaaaagtgattga

SEQ ID NO: 7372 - DNA, 500 bp, Glycine max
tctcctattgccaatcacccaacaagccttggctttttttgtagcaatgaatgtgttgatgaactactaaatggatctgtgaggatcttggatatctgtagtacaattaaagattgcctactgcaacacaaggaaagagtgcatgaacttgagtcagctattcgcaggagaagagatgccgaggccggattcacagtttcgagtggaaaatacttggcatctaggaagcaggtgaaaaaagcaattcggaaggccttatgaaatttgaaaggattcaagaatgaactcatatttgcttcctcaaacaaagacaacgagacattgtgcatgcttagcttcttaaaagaatcagaactagtcaccgtgagctcattaaaagccctcttgttgtttatcacttgctcaaagggacaatccaaacacaacaggtgggtcataatctccaagttgatccaaccaatagagtgggatgtgactctcaagagccgattcaaatgaat

SEQ ID NO: 7373 - DNA, 508 bp, Glycine max
agcttaggaacaagccttctctcacctaattggcctaagaagaaagctaacactatatagagccttcagtggcctcacacaaacacactacactgtttctcacagtccctctcatcaggagcaagatattgagagccaacccatcatagtgaaccgtgacggctctgaaaataagtacgaaactacgttccttatgacctcagaagaaggtggagaatacgagttggtgtacttcaagaggctcgatgatgaattcaacaaagtggacaagttttacaagtcaaaagtggaggaagtgatgaaggaagctgcaatgctcaacaagcaaatggatgctttgatagctttcaggatcaaggttgagaagccaagtttgttgttatttgatcattctgtggagatgactcgtcttgcttctgatgttgcttcttcatctgcagtgtgggcagtttccacacccaaaggggccaaattggacagtaattaattttcaccttcacctcatttt

SEQ ID NO: 7374 - DNA, 133 bp, Glycine max
agcttgttattttattaccttttttggtttctaagttatgaatcatctctcaggctgcagtcattccaaattgtcgcattctcgctgcagttggccagaaaatggcccgcactcccggcgctagtgcctccct

SEQ ID NO: 7375 - DNA, 469 bp, Glycine max
  unsure (1)..(469): unsure at all n locations
tctaacccacatgatgaatatgaaaaattttgccctgttgacattctccaaaaataaatctaaaatcttttaagggcacataagagtgaaaaacaaaagtacaaagagtactattctgagagaccaaattctcccattcccatgtagaccagcagaatctgtctgaatcatgattttgaacttgcaatctccagttgaaagatctttgtcagtgacaacagaaagaccggggaatttgcatgcactgtcaatctggtcattcacttggaagtaactattgaatgcataagaaagattaccacgagcatctaaaccaccacatgaagtttgatatccaagacttgtgcaatctgcattttgacaagcataagacacactcggtgccacttgatcactattgagggttgctgaggttttcaaaatgcaccactttnttngtagatatgccaccccagtagcagctactaag

SEQ ID NO: 7376 - DNA, 483 bp, Glycine max
agcttttgcaagctggaatcatttatcctatctccaacagccaatgggtgagtcccgtccaggtagtcccgaagaagaccggcctcacagtgataaaaaatgagaaggaggagctgattcctactcgggtgcagaacagttggagagtctgcattgactataggaggctgaaccaagttaccaaaaaggaccattttcccctgccattcattgaccagatgcttgagcgcctggcaggtaaatctcactactgttttcttgatagtttttctggttatatgcaaattactattgctcctgaggatcaggaaaagaccacattcacctaccccttcggcactttttcctataggaggatgtctttcggcctgtgcaatgcccctggtaccttccagcggtgcatgattagtattttcagtgacttcttagaaaattgcatagaggtgttcatggatgatttcactgtgtatggatcctctttga

SEQ ID NO: 7377 - DNA, 480 bp, Glycine max
agcttaccatcttcaattgaaagccttttttacctcagattgctttgtttggagagatgtactttatatgacaacttatccatcatagggaagctgaaaaaattaagaattctcagcttttctggatctcgaattgaaaatttgccagctgagttaaagaacttggataaactacaattactagacatcagcaattgttcagtagtcaagaggattccgcctcagcttatgtcaaggttgacttcgttggaagagttgtatgtaagaaattgcttcatggaagtgtcggaggaaggagagagaaaccaatgtcaaatttcatttatttctgaactaaaacatttgcatcaattgcaagtggtggacttaagcattccatgtgctgaagtttttcccaaggaattgttctttgcaacttatgtgattacaagattgagaatgggaacttctaaatgctttcacctggagatttcagaatgc

SEQ ID NO: 7378 - DNA, 571 bp, Glycine max
tttagagattctcactgggccggttgtcgtgacacacgtttctctattacaggcttcttcatctttcttgggaattctctcatatcatggcactccaagaaacaatccactgtctcacgaaggtcatctgaagcagaatatcgcgctttagctaccaccacatgtgaacttcaatggcttacataccttcttcaagattttcgcattccattcactcagccagctaacctattttgtgataatcaatctgctattcaaatttcttccaatcaggttttccataagcgcacaaaacatatcgaattagattgctatatcgatcgcgaaaaatcactaaatggccttctcaagcttcttccagatagatcctccatgcagcttgctgatatttttaccaagcctttatctcctactcaattcaagacactaatctccaagctgggaatgataaacatctattcccagcttgagggggggctcttaccactatgagagaattcgcgttgctgctactgcataagtgccgctactgcagagttgctgctattgcatttcattacatttcatttac

SEQ ID NO: 7379 - DNA, 503 bp, Glycine max
tagcttatacgcaaaacaagagaggtgttatttttaaaaaaaaaacgcaaacaaaataggtcgcgtatgatataatttaaaatgtaagtccaacatcggttttcaataaaaataaaaaaaaaatcgatgttaacaaaatgatgttaactttaacatcgattttcttcaagaaaccgatgttaacttatcatacgttaacatcgattttatgaaaatccgatgttaacggatacatattatttacaattatgccaccgtgtttatcttaacatcgattttatcaaaaaccgatgttaatctgacgatgttaaatctgttttttgtagtagtgtataaataatacttggattattaacatgtagagactagtgtaaaacctactttgggttgagctactaatggcttgagacaataatatttatatctttgagaaaaatagaaaaacttgatggtttattaacaatttaatgtaatcctcagtgtttgagaaaaattattataaa

SEQ ID NO: 7380 - DNA, 406 bp, Glycine max
ttggaattcaatgtgaaaagttatgactattttaattttccgagagcttccgctggtcattttcgagcgtctctatatgtgatgcgccttaatctaacatccgtgcgaaaagttatgaccatttgaatttctcaagagcttccgttgttcaattttgagcatctcgatatgtgatttccctgaatcgtacatccgtgtgaaaagttatgaccatttgaatttctcaagagcttccgttgttcaatttcgagcctctcgaaatattatgcgcccgaatcggacatccgtgtgaaaagttatgaccatttgaatttctcgagagtttccgatgtttaatttcaagcgtatcgatatattataagcctcaaccggacatccgcgtgaaaagttatgaccatttgaattt

SEQ ID NO: 7381 - DNA, 608 bp, Glycine max
agctttattcaagacaaagaaattttttatattcaagatggatgatcaagactgtctatagagtcttataaagggtatattaaataggaagggaattccaattgaagtagcaaaaggtttggccaagaattttaagttaaaaagtcttttacaagaaatttactctctggtaatcgattaccagtggccaaaactgatttacaaacagctattaaaatttgaattcaaaatttgccctgtgtaatcgattacacatatatggtaatcgattaccagtagtttctgaatgttttaattcaaattttaaagcttgaaatcgatttcacatatactgtaatcgattaccatagcagaatttcagaaaatattatcaatagtcacatctttctatgtggttcttgaatgggctattcaaagcctatatatatgtgactcaagacacaattttcttaaaattcttaaaacaaaaaggcttaccttttaaaagtaaaataattttattctcttacaaattcttgggcaaatactttgggattcaataagaaatatttaaaatcttaaatggttaaattatctttttcaaaaaaattcattttttttttttttat

SEQ ID NO: 7382 - DNA, 521 bp, Glycine max
  unsure (1)..(521): unsure at all n locations
agcttccatcactgctgttgttgttgctgagggctggaccatctgaggttagggtgattcttctatccagggttgtatctgttgctggagaggtcataattgttctgctgtggttgattttgcttctgaggttgaggaggtctattgtaaatatttgcagcataagcttcaggctgctcaatcgctccaggttgctgcatggaagggcaaaggtctgtatggtggtcagcagaggagcacaaaccacaaacccttgtaacaggtacaaatttctgattcaaggccagctgggttaccaagttaaccaatgcatccagtttgccttcaagcttcttagtctcagatgatgcagctgagtttgtagctacctcatgcactcctctaatgactatggcatcatttctggcactaaactgctgagaggtggaagccatcttctcaataaatttctgcttcagcangagtcatgtcttcaagggctcaccactggcagcatctattatacttctctccatattact

SEQ ID NO: 7383 - DNA, 437 bp, Glycine max
agcttctggtgggacatcttgacttgctttccaatctgacattcaccacagattctgccttcttctattttcagattgggaatgcctctaacagcacctttgtcaatgattttcttcatgcctcttaagtgcagatgtccaaatctttgatgccatattctgacttcatcttctttggaggatagacatgtggaggagtagctgatttcttggggtgtccatatgtaacaattgtcctttgatctgctgcccttcattagaacttcactcttctcatttgtcaccaagcattctgactttgtgaaggttacattgaatccttcatcacacagctgactgatgctgatcaagtttgcagtcagtcccttcaccaacagtactttgtccagactaggaagtccatcatgaactaccctttccatttcaatgatcttttc

SEQ ID NO: 7384 - DNA, 468 bp, Glycine max
tatccccgttttttctttgtatcaacgtgctgtcaatgtgggctctccgcataaattttgttgctgtgctgcttcgttactctaatactatttcttttttccttttaataatgaacaagagtatcactatttttctttttcgtacaaatttggtagtatttgttatgtcattattattattagttttaatttcatttgttatctataaatcctgttccttttaattattctttttcaacgaaaaacaaacttggttagagtgagtttcttcgtgcattgaaattgaagttacattgcgtgaatgtttagcagatttcgtcgtttagagagagcaagtcagatgatcggcgtttctatatatttacagcaacgaagaccctccatctgagaactgattcaaggaaagatcgcgtggcgtggatacaagcctggttttaacacgtgccctgatcctcttcaccactcatg

SEQ ID NO: 7385 - DNA, 511 bp, Glycine max
agctttacattactcctcatgcttcttaccatgtctaataaggttcgatttcttcgttctgccacaccattctgatccggagaaccaggcatagtgtattgggcaacaatcccatgttcttgaagaaatttcgcaaatgaacttggggcttgtccatcctctgtgtatctaccatggtactccccacctctatctgatctcacgatcttaatttgttttccacattgtttctcaacttcagccttaaaaactttaaaggcatctaaagcttcattcttataatgaagtaagtagcgatacatatatcgtgaataatcatctataaaggctatgaagtatttctgactatttgcatccatgtctggacaacatatgtctgtatgtatgatttctaataaattagaactcctctctgcccccttttaagactgttagtttgcttacccttaatgcattctacacaagtttcaaaatcagcggaaatccaaggactaagtacttcttctttact

SEQ ID NO: 7386 - DNA, 447 bp, Glycine max
ttaaatagaaaagaatatgtaaatattgatttaaagcacatgttgtttgctttgctgattttttgtatttcatttatattaatattttttatatgccaatttctttttataaatctataataaaatcagtgaaatcaaatcaaataccaagtacttgagcattctattcaaaactctctcctatgcccatagctactgttcatgttacgcgaatagcaaacattattaatacatatttagcattaagtcaattatatatttaatttagttttttaaatgagtgagtgttacgtataatttaagaattaattcaaatatacagattgtgtaaatatttttatgtgactatttaatcataaattagtatttttttgtgattatcttaaatttagagttaggtttttttcattaatcaacggtataaaaaatgtaacacttattgcagat

SEQ ID NO: 7387 - DNA, 454 bp, Glycine max
agcttgtgaatgttcacattaatcatatggacatgtctctctatctggcttttgattatgcagaacacgacctttttgtgagtatatataatcgtgaaactgttgacatggcactctacttaggcactagagttcaagttgaaattaaagttgtttgctttcgtagttcatcaaaatgtttcccgagataatgtgtactttctgatatctgaatatccaaggtgtttttagtttaatgttgccttttgacattcctagctagtgagataaggcttggttgttgcatcttgtattagacacattatggtctttgcaatggactttatgctattgtataagttttgcttccgtgtcttataaaatgttggtgaattttctctaggaagagatatacgtaggtagcaaggaattgcttgttctgattaattgagtgtaaagattgccattttgaatg

SEQ ID NO: 7388 - DNA, 536 bp, Glycine max
taactaaagataacatttgctgaatgggattaatgtttgttttgttgtgttgaaatgtgcagacaacgcagtgatcaatggggattttgaagagggtccatggatgttcaagaacacttcactgggtgtgttgcttcccacaaatttggatgaagaagcgtcctcactacccggttggatagtcgaatccaaccgtgccgtccggtacattgattctgatcattactctgttccacaaggcaggagagccattgagttgctctcaggaaaggaaggaatcatatctcaaatggttgagaccaaaccagacaagctctacagcttgaccttctcattgggtcatgctgatgacaagtgcaaggagcctcttgctgttatggcctttgctggtgaccaggctcagaacattcactacactcccaatttcaattccaccttccaaactgctaacgtcaatttcactgccaaggctgagaggactagaattgcattctatagcatatactacaacaccagaagtgatgatatgagttctc

SEQ ID NO: 7389 - DNA, 477 bp, Glycine max
  unsure (1)..(477): unsure at all n locations
tcatgatgaatcaagattgattcaaagagttttgatgattactaagatgatgacaaaaagctcaagagtcaagaacacttcatgataacaaagatgatgatctcaagaatcaaaggatgagttcaagattgaatcaagaacacttcaaggttcaaaaggaaatttgatttcaagaatcaagtttcaagattcaagaatcaagagaagactcaatcaagataagtattaaaaaaaattttcaaaaactgagtagcacatgaatttttctcaaaaaccttttaccaaagagtttttactctctgttaatcgattaccagattattgttatcgattaccagtagcaaaatgattttcaaaaagctttcaactgaatttacaacgttccaattgatttcaaaatgttgtaattgattacactaatttggtaatcgattaccagtgtgtttgaacattgaaattcanattcaaatgtgaagt

SEQ ID NO: 7390 - DNA, 535 bp, Glycine max
agcttgcttctacagagtgaaatatgattttagatgaaggaaaacaggaaaaagaaaaacaaaaagaaaaagagaaggttgatgaggagaaaaagaagagcaagagtgaggttttaagagagaaaaagaacgagattacttcagctgaaggaaaggaagtaccatatccattggtaccttccaagaaggataaagagcgacacttagccagatttcttgacatcttcaagaagctggagatcactttgccttttggagaagttctccaatagatgtcactctatgccaaatttttaaaagacatgctaacaaagaagaaccagtatatccacaatgaaacaatagttgtggaaggaaattgtagtgctgtcattcaacgcatccttccctcgaagcacaaagatcctggaagtgtcactataccgttttccattggcgaggttgttgtgggtaaagctctcataaacttgggagctagtatcaaattaatgcgtctctccatgtgccggcgacttggagagatagagataatgcc

SEQ ID NO: 7391 - DNA, 372 bp, Glycine max
tattctatgatattgggaataatgtctgttaatttataaatgttggcagtttaacataaataatgataaggatgggctcttttgtttattaattttatgtacaccctgccgttctctttttccatttaaaacaacaccaccttttctagttattaattaaatatttctcaacttgcaagcactaaatcgtttgatttcccctctttgatcttgtgtgcgtgtgtgtgttttgtgccatgtacttttgctatttctggttcacaactgatatagtctcttaagagaatcctactctttgttggcttgaaatgtccctgacttacgggatgtccataaaatacaattttgccacttactgacactttacttcat

SEQ ID NO: 7392 - DNA, 451 bp, Glycine max
agcatgtagtataataggtatgctcctttattataaatccaaaaggcataagttagaaagaaaatggaatcttgttttaaatatgaaccgcaaggaaatgtatttattaaagtactatccatcataatattatgtgaactctctatttaataataaattagaatgaatacatttcaatatcttttatattaatattttctttggatcattcgatattttcatatatttaagttgatttgatatgacataacaaaaattttaaacatgacaaaaaaataaaagacttaaatatgtttttcatatatataatattttttttttcatattgggatctatttttgctttccacctaatctttacagaattttgtctttgatacatgctgttaatatttatctattaagtaataacgtgatattacattattactgaaacatcattgtaatagtag

SEQ ID NO: 7393 - DNA, 433 bp, Glycine max
agctttcttcaatcgctgatacgggtgatatggtttgagaaatcttcggcgcctagtatatattgtcttctttccatgtttcatttggatgaagctcatgtttctctcacaaatagggcatgcatgatgccctttgacactatatccacttaaatttccatatgttagaaagtcattaatagtacaaaacaccattgatcgtaacctgaaggtctgttggagattcccatcctacacatcaaccctatcattccccgactgccttggacccgctatcatcatacacaggataatgtatttttgcttgatgcacaaccaaagagggaggttgtaaatcatcaccaaaataggccatgacctgtggtttgtgcttaagttaccaaaagaattcattccacccagagcaagaccaagccttaggtttcttggctca

SEQ ID NO: 7394 - DNA, 460 bp, Glycine max
  unsure (1)..(460): unsure at all n locations
agcttatcaaaggggaatggaccttttttgtcaacaattggcttcaccttcccactttctaagtaagggtttagtttcctcagaacttctccattggaagtaactacaaatctgaagccaggtggtgtaacagcacctgtgagtgccaccacactgccatcttctttcacagccttcactgccctgtcacattgccctgcaagtcaccagcaaggaatgaaacactatcaacaacatgagtagtataaattagtattgggggaagtgggattttgggaagaaaattttgtgattttcccttatagagtatattgttaacagggtgtgagcgttgtaaacactctagtaccgtgttcaattgctacagataaaaaaatagagtatattgtttcattgaatttcagaanattaagtatgatatacatgataacaaattttcttttccatctacctgtgcgga

SEQ ID NO: 7395 - DNA, 425 bp, Glycine max
tggttcctaacgctctgttcaggctatcccaaaatctattgttaccctaggatctctatcagacactatactagatggcacaccatgtaatctaacaatctcactaatatacagggaggtcaacttctccaaggaaaatctaatattaatgggaatgaagtgagcagacttggtcagtctatcaacaataacccagatagaatctaaacctctggggttctaggtagtcctacaacaatatccatggaaatactgtcccacttccactatggtatctccaagggttgtaacttccctgaaggtctctgactaaacatgcacacacaaactcactaacctctctcttcatgttaggccaataaaacatcatcttcaaatcctgatacatcttggtagcaccaggatggatgctaaagtttctccta

SEQ ID NO: 7396 - DNA, 390 bp, Glycine max
  unsure (1)..(390): unsure at all n locations
agcttcactctgatctgccatgttctttaaattaggatccatagggctttcaacaggtctacagttctgcatacctgtttcttctaaaatatcaagagcatacttcctctgagaaatcacaataccatctcctgattgagccacttcaataccaaggaaatacttcaaagatcccagatctttggtatggaaatgactgaataagtgctctttcagctggacaatcttagtagtatcattccctgtaatcactatatcatcaacatagaccattagatagacacattttccaggagatgtatgatagtaaaatacagagtgatcagcttcacttcattttagtccaaacatttgaacaacatgactaaatttaccanaccatgctcgagg

SEQ ID NO: 7397 - DNA, 411 bp, Glycine max
  unsure (1)..(411): unsure at all n locations
agcttgacatactaggcttaactttttttaccacctttccctcagaagcaacactacttcacttggntttctaatcttgcaatactcattgatgacgacgacccgatacgctttcacatctggcttcatcccatgactaaccatttccctcaaatgctaaacagcctcatcagacttccccacaatgcaaaaccccttcaacaagctagtgtttgtggcaacgtcttctttcaaaccattcaactgaatcctactcatcatcttcctggcctcgcccgcttcaccgctcaaacaaagaccttcaatcaaagcattgtaggtcacaacattcggggaacaccttccataatctctttcaagcactcaagcgcatctcggaaatcacctctctttgaataccctgcaatcaaa

SEQ ID NO: 7398 - DNA, 350 bp, Glycine max
agcttatgacaatttgaaattctttagttttttcgaagattaatttcgagcgtcgcgatatattataagcatgaatcggacctacgtgtgaaaatttatgaccatttgaattatttgagagcttccgctgttcaatttcgagcgtctcgacatattatgcgcctgaatttgacttgcctgtgaaggctatgaccatttgaatttctcaaagagcttccgatattcaacttccagcttctctatatgtgatccgcctaaatcatgacatccgagctaaaagctatgacaatttgaatttctcaaaagcttgcggagttcaatttcgagcatgtgcgtatactatgcgcccg

SEQ ID NO: 7399 - DNA, 559 bp, Glycine max
tgagttggtgaccattcacttttaagactttggtggttattttatttttaatctcaattgcaccatgaggaaaaaacattagtaataacaaaaggatcatcccatctagatcaaagtttgttggaaataagcttgagacaagagttaaacaagagcactttttagtcaatatggaactccttcctaaggatcctagagtcgtgaaatctcttcactttctccttgtaaatcttggatttctcataggcttctaagcggatctcctcaagttcttggaattaaagcttccttttcatacctacttcatcaaatgccatgttacaacccttcacttcccaataagcacggtgctcaatctccaccgaaaggtggcatgccttaccaaaacccactctatagggagacatcctcaaaggtaattagtaagcgatcctgtgggcccatatagcattctcaaagttcttgctccaatccttcctaatgggttgcactaccttcttgaaaacttgcttgatctttttattaaaaaacctccgcatgcccattagttcggggatga

SEQ ID NO: 7400 - DNA, 439 bp, Glycine max
agcttacaaatctatttttaagtcctttctctataaacgaaataaaataaaatctggacaagataagataagattggatgaaataaaatatggacgaaataaaatgtagatggaataaaatctagacgaaataaaatctagatggaataaaatctggataagataagatttgataaaataaaattgtctgctctcttcaagttgaagcccaatttcggattcaagcccaattgcttataattctcctgaaattaaattaaaaacacaaaattagtcaagtagggccaaatgataaaactgcataattaatttgacaattaaggctaatcagtaattaaaatggtgagaaaaagggttaaaaaataggagaaaataatgacacatcatcaagctaggttaatcttttgcctagttactcagctggacatgaatgtcggag

SEQ ID NO: 7401 - DNA, 109 bp, Glycine max
  unsure (1)..(109): unsure at all n locations
ctgatactggggacagatgtcgtacaggatgtcacgacatcacgcttcagaacatgccagatgtctttgactgtatgaacaaattaagcaagtanataacacaagagaa

SEQ ID NO: 7402 - DNA, 211 bp, Glycine max
  unsure (1)..(211): unsure at all n locations
gaagagaatgccatgtatcactgtatataccagacagtcagtgagagtaggaaattgttccttgtattatacgtagatcatantttgcttgcgactaatgataagggtatgctatatgaggtgaatcaatttctctcanagaaccttgatatgaaggatatgggagaggcatcttatgtcatangcataaagatccatagagaaagatctc

SEQ ID NO: 7403 - DNA, 250 bp, Glycine max
ccctatgctgggagggatgatcattccacaataacctcagtctgcgatctccgacactaatggaacgcctactaggtctttaaacatctgcacttccgacctcaagacaaataagactgtgccttccccagagttaagagtgaccatggactagatgatcggatcagcctatatactctatgctgcccatacgatggctgaactcatgtaccctctgcagccctcacagcacaacagaatggcatgattg

SEQ ID NO: 7404 - DNA, 407 bp, Glycine max
  unsure (1)..(407): unsure at all n locations
agcttattatataagataatntaattctattttatatcgtaaaaattatagttactatatatttaattaagtttgttattcatataagatttttattatctctttttattacataattcatattataacatttttttactattaaacatgtagatcaactaaggattatatctacttaacaaagtattgccaaattttaattttaaatatataattatgttaaattttcggtcaagataaaaaaaatatatattttctcatgaatataaagaactttgtaacttctcaatgaaaatgggccctgcttctttagttcactcaattcaaattaacttctttcttttcttactttntatctatctttnttaactgaaaaataaagtaatgtttttttatttctaatcaaa

SEQ ID NO: 7405 - DNA, 389 bp, Glycine max
taaacattcaacttcgagcgtctcgatatattactggacttattcaaacatccgagtaaaaatttattgcggtttgaattagctcagagatacaattatcaatttcgagcgtatcgatatattacgggactcaatcggacatccgagtaaagagttattgtcgtttgaactagttcagagattcaacattcaatttcgagcgtctcgatatattacgggactcaatcagacatccgagtaaaaggttattgtcgttttaactagatcagagattcaacattcaattccgagcgtctcgttatattaccggactcaatcgaacatccgagtacaaagtgatcgtcgtgtgaattggcacagaggttcaacattcaatttcgagcgtgtcg

SEQ ID NO: 7406 - DNA, 416 bp, Glycine max
  unsure (1)..(416): unsure at all n locations
agctttgagccaactcanacgatattttctttntactcggatgtctgattgaggcccgtaacatatcgagacgctcgaaattgaatgttgaacctctgagccaattcaaacgacaataacttttttcacggatgtctgattgagtcccgtaacatattgagacgctcgacattgaatgttgaacctctgagccaattcaaatgacaataactttttactcggatgtctgattgagtcccgtaacatatcgagacgctcgaaattgaatgttgaagctctgagccaatacaaacgaccataactttttactcggatgtctgattgagtccctgaacatatcgagacgctcgaaattgaatgttgaagctctgagccaatacaaacgaccataactatntactcggatgtctgattga

SEQ ID NO: 7407 - DNA, 420 bp, Glycine max
agcttgtattatagtctatattgttatgttacgaagaaagtaaagttagtactttttttgaagaggagtaaagtcagtcctaaatttcaataattgtgaactagttcagttttaaaataaggacacaagtgtaccctaaaattaagaatcaataatcgacagataagaaagcatacgaataattcagtataaaaaaagaaggtataggaataaattacttttgttaatgtttcaaattgtttgactcctaataaaattaaggattaaattttttattttttaatctgaagaataaaactaatcaatcacatcaatcttgaaaaataaattggcattcaatatattgtaaaatttacatcataaataaagattttatttcttttctcttgcaaagtaaacttgtattccatgtttaattta

SEQ ID NO: 7408 - DNA, 414 bp, Glycine max
  unsure (1)..(414): unsure at all n locations
agcttggaacatatagactgtttttgggttctcttanggacttaaacaaaatatccgctggctggtcattaaaaccaaggaactcactgacgatctccttggacagaagcttctctcgaatgagatgacaaccactctctatatgctcagccctttcatgaaagactgggtttgaggccatatgaacagcagcctgactatcacaatacaccttcatttgcaactcttcacatgacctcaattcttgcagaaatggttgaatccacatgagttcacaagtaaccatagccatcgatcgatattcatcttctgcactagaccgagctacaaccgactgtttgttgcttttacaagagacaagagatactccaatgaagacacagtagcgtgatgtagacctcctatccatgggac

SEQ ID NO: 7409 - DNA, 451 bp, Glycine max
  unsure (1)..(451): unsure at all n locations
ctcgtttccatattcaaatcaaataagtgtttcgttagttgttcttttatcaagtccatgaaaaaatatctaagttcatttggtttttgagaaagtccttcattgtttttcattctcaaatgttttcaaaagaaatccttttgttgtgttctgatccaaaaataagtttcacaaatactggttcatgattctttccaaaacatgttatgttcaagacnaaatttctatttaattcctaaaaaagagttataatttataactatactaacagaatatcaaagcacgcacaaattagtcaaaataaacttgcgtaactttctcaaaaaattaaaaacaataaataaggtaataaagtattgaaatttaatacaaagcgataagtaaacacatagacaagttcacgaatatttgaagatcatggctaaggagctcagtctctttgacgatcatg

SEQ ID NO: 7410 - DNA, 468 bp, Glycine max
gctaatggagctcatcatattagtctccctggccctctttttctctaatgtaagatgaatgggtttggattatgaaaaatgggagtgaaaaaataaaattcaatttcatccatattaaatatgtggaaattcatctaatgttttttttaattatttattcatatactttaaataaattataaattaagttattaattatagtttaattctatgtatgtaatgtatattttcataatgaataataaataacttatatatttagttaaatgtataaattttaattttgttataattagtattatgattataatattatttatttaactattaaaataattattctatatctttatgattataaaaaaagtaaaatataaaaataattagataattatataattaaaaattacatgtaaatatatacaaaaataattatagatagacttatagttatatttattaataata

SEQ ID NO: 7411 - DNA, 454 bp, Glycine max
  unsure (1)..(454): unsure at all n locations
cctaagggaggacctttcagtttggagattatcttatctttgcctataggttggacctcccagaagagtatggagtcagcaccacttttaacatttctgatttaactccttttgcaggtggagctgatattgaggaggaggaactaacagatttgaggtcaaatcctcttcaaggggaaggggatgatgcaatcctccctaggaagggaccaatcactagaaccatgagcaagaggctccaagaagattgggctagagctgctgaagaaggcctaaggttctcatgaaccttanggtagatttctgagcccatgggccaaggttgggtccaattatctttgtacatattagactaggatgtcattatatttggtccttgtatatagggctccatattgtaggtagggtaccctagaaatataggatttttcagcccttgtatttttgggcacct

SEQ ID NO: 7412 - DNA, 430 bp, Glycine max
  unsure (1)..(430): unsure at all n locations
catgcatctgcatccctaanaatcatgttaactgcatttattntctacatctaatatccagtcgtgtcgatttgggatgactgaccctctcgatgagtcgatctcttgctttctcataagggtgaacccttgggtactagtaccctcacctccagaggactacatgtcctcgccttcagagggccacacgccctcgccttcaaaggacttcacgtcctcaccttcagaggactacacgtcctcgccttcaaagggtcatgtacctttaacttcagaggactacacgtcctcgccatcaaagggtcatgtaccttcacctttgtagggcaacacgccctcaccttcagaggactacacgtcctcgcctttagagggccgcacaccctcgccttcagaggactacacgtcctcaccttcagaggactacacg

SEQ ID NO: 7413 - DNA, 417 bp, Glycine max
  unsure (1)..(417): unsure at all n locations
agcttcccgcatccacattnggaatgatcttanttctgccttcattaggtaatatcagtacaacaccgatatggctcccaaccgaacccagctgcataacatgagtaagcgagagcatgagtctttcaaagagtatgctcaacgttggagagatctagcagcacaagtggcccctcccatggtcgagagggaaatgattacaatgatagtggataccctaccgtgttctactgtgagaagttagtgggttacatgccctccagcttcgcggacttggtattcgctggagaaaaggatcaaagtgggtttgaagagggggaaatttgattacgtctcccccgccggtacgagcaataggaggactagagtagctggagcaaagaagaaggagggagatgcccacgccatcacttcaac

SEQ ID NO: 7414 - DNA, 323 bp, Glycine max
gattaatacctcccaaacatcaatggtaagaagtggctgcaagaaattaagataaaatcacatcagaatttaccagggaaatgaactcattagacccaactatcattcatatttcaagataagtaaggaacaataatattattactacttacataatagcctccccaaacaagggggttcacagcattgggactcttgagcaccactagcttgttggcctcatctggtgaaggaggatttgctgcattttccccatcaaatttgcttgctctatctatatttcatcaacaaaaaagtgaatgaacaagaaggatatgtaactc

SEQ ID NO: 7415 - DNA, 357 bp, Glycine max
  unsure (1)..(357): unsure at all n locations
tgccttgccccttgatatattngagggacttatggttattatgaatgacaaattccttgggataaaggtagtgttgccatgttttcaaagcccgtactaaggcatacaactccttatcataagttgaatagttaagggtaggaccacttaacttttcactaaaataagcaattggatggccttcttgcatcaacacagccccaatcccaacatttgaagcatcacactgaatttcaaaatatttttgaaagtttggcaacgcaagtatggggcattagttagctttagcttaagaacatngaaagcttcttcttgtttctctccccatttgaaaccagcatttttcttgagcacttc

SEQ ID NO: 7416 - DNA, 375 bp, Glycine max
  unsure (1)..(375): unsure at all n locations
agctntgaccaaattcattctatgtttttctttttactcggatgtctgagtgagtcccgtagtatatcgagacgctctaaattgaatgctgaagctctgaccaaattcaaacgatgataactttttactcggatgtctgattgagtcccgtaatatatcgagacgctcgaaattgaatgttgaagctctcagcagattcagacgataataaattggtactcggatgtccgagtaagtcccgtaatacatcgagacgctcgaaaatgaatgctgaagctctcatcaaattcctacgacaatgattctgctagtcagatgtctgatcgagacccgtactttatcgagacgatcgacactgattctgaagctctgagc

SEQ ID NO: 7417 - DNA, 439 bp, Glycine max
  unsure (1)..(439): unsure at all n locations
gatccttaagcacctgcggctgcagctatgactcgnttcttgggtattttttctatatgatgatgaggatgggattttgtgaaagatggagaaaatggatccatggatgcctttctagtgcaactatatcaattttgatcaatgacagccctactagagaatttgtgcttgagaggggactgaggcaaggagatccccttgcacctttcctatttaatatagcagctgagggactcactggtttgatgaggacagttgtctccaaaaaccttttcagcagctataaagtcgggaggcaaaaggaggagattaacatcttgcagtatgcagatgatacactgttttttggaactgcaactatagctaatgttagagtcatgaaatctatcctcagaattttcgagttggtttcaggactcaagattaactatgctaaaag

SEQ ID NO: 7418 - DNA, 414 bp, Glycine max
agcttataggatgtgatcggactattatgatcacttctgtcgccgcatagataggtaaatgggcttctctaattgctgagatgtgcaatgatccaggatcattcagcataccttgtatcatagggaatagcaagcttgacaatgccatgctagatctaagagcttctgttagtggtatgcctctgtctatttttaattctctatctttaggtccgttgcagacaactgatgtggtaattcatttagctaacagaagtgtcgcctatgctgttggtttcatagaagatgtcttaactagagttggtgaactaactttccctgttgataattatatcttgaatatggaagatggattttctcagagatcagctcccatcattctaggcagaccctttatgacaactgctagaacta

SEQ ID NO: 7419 - DNA, 382 bp, Glycine max
  unsure (1)..(382): unsure at all n locations
agctatgaggaaatncaaattaaattctttttaactcgnatattcgattgagtcccgtaacatatcgagacactcgaaatagaatacagaagctgtgagcaaattctaacgtcaataactttttacaataatgtccgattgagtcacgtaatatatcgagacgctcgaaattcaatgcagaagctctgagcaaattctaacgacaataattttttacttagatgaccaattgagtcatgtaatatttcgagacactcgaaattgagtacagaagctctgaggaaattcaaatgaaaatacatttttactcggatatccgattaagtcctgtaatatatcgagaaactcgaaataaatacagacgctgtgagcaaattctaac

SEQ ID NO: 7420 - DNA, 426 bp, Glycine max
  unsure (1)..(426): unsure at all n locations
agcttccctgttnntgctttaacagttgatgtctttattcatatgagaatatgccttttctttntattgtaaagatgaaatctcatacaattgtctaatttccatcagaaggcaatgaagatgccaatcactgtggaaggaaatgagctgagtagatttagtgacccgccaggagatgcctacttggatgatttatttcatccattggataaacaacctgnggaggttgtagcagaggcgtccacttctacatccacttcacatatgactaaaggtaatgcatctgcaattgatggtgtgaaaaatgacttggctaaagagttgagagctacaattgctcgaaagcaatgggagaaggaaagtgaaattggacaggcaaacaatggcgggaatcttttgcaccgagtgatgataggcgttctaaaa

SEQ ID NO: 7421 - DNA, 419 bp, Glycine max
  unsure (1)..(419): unsure at all n locations
agctnggatttcctttagtagggaatctattcttttattatggagccaaaccaagtcaccctcattaagaactagctcttttcttcctctatngcctttagttgaatacacctttgtttggttctctatttggttcttaaccctctcatgcatcttctttacaaattctgacctagattccccttctttatgtataaaaaaagtgtccagtgggaggggaatgaggtctaacggtgttaggggattgaacccatagacaacctcaaaaggggactgcttggtggttctatgaacccccctgttgtaggcaaattctacatgagaaagatactcatcccaagacttatggttgcctttcagaagagcccttanaagggtggataaagacctattcactacctctgtttgcccatcagttt

SEQ ID NO: 7422 - DNA, 468 bp, Glycine max
  unsure (1)..(468): unsure at all n locations
ctaagctagctaacacacctctctaatagctaagttcacctcctttaaatatatgctagagcttagctacataccccctataatagctaagctcacccgcatgacaaanaaacatgaaaataccaaaaaaaaagtccttactacaaagaatactcaaaatgccccgaaatacaaggctaaaaccctatactactagaatggccaaaatacaaggcccaaacgaaggaaaaacctattctaatatttacaaagaagagtagatccaaccttgacccatgggctcaaaaatctaccctaaggttcatgagaatcctagggccttctttagtagctctagcccaagtctcttggagtcttctatccaatacccttggggggtaggattgcatcagcagctataggcaggatttatatccattacttgaaacaccacattgcaagtgtgggggcctatctgaatgggaatgt

SEQ ID NO: 7423 - DNA, 422 bp, Glycine max
agcttgctgatacaattattaggggattgtttagtactggcctataacaaatagtccaaaggaggttatgttcctgggtgagttggaagaagtcttggaagcaactcaacccccagaatttcagcgttgtatggtgccattgtttcgtcgcattgcacgttgtttgaatagccctcattttcaggtttgaatttttcaatactttcctctggctccttttctgtttctcctcttatttcatgatgaaaatacacctgaatttcaaattaattctctctggcaacttccttcatactgattacctgaatcctatatctcaattcacttcctctagttgataagttgttttaattagcaagaaaaggactaacctttttgcatcatcctatagctaaatgcatattgtcttatggttttgaagt

SEQ ID NO: 7424 - DNA, 422 bp, Glycine max
  unsure (1)..(422): unsure at all n locations
agcttagaattatacaataacactttttgtttctccatgaagtccttcttaattatcatgctatcatggaacttcttggtcttttctttgtagaacttggcattctcatacgcttctaggcggatctcatctaactcactcagttgcaactttctttcctcaccagcttgatccatagagaagttgcaagtcttcactgcccagtatgctttgtgatgtaatcctaccccccaagggcattggatagaagactccaagaagattggaccaaagatgcaagagaaggccctagggttctcatgagccttagggtagattttgggcccatgggttaagtatgtgcccacttatctttgtacatattagattaaggtttcattaattntgggtcttgtatttagggctccataatgtaggtaggg

SEQ ID NO: 7425 - DNA, 457 bp, Glycine max
  unsure (1)..(457): unsure at all n locations
taccctgatgaggatgtcccatatgttctatttctggactgattcatttgcttccaaagtttcatggccttgcaggtgaagacccgcacaaacatttgaaagaatttcacattgtctgctccaccatgaaacccccagatgtccaagaggatcacatatttctgaaggcttttcctcattcattagagggagtggcaaaggactggctgtattaccttgctccaaggtccatcacgagctgggatgaccttaagagagtattcttagaaaaaattttccctgcttccaggaccacagccatcaggaaggatatctcaagtattagacaactcagtggagagagcttgtatgagtactgngagagatntaagacactatgtgccagttgcccccaccatcagatttcagaacagcttcttctccaatatctttatgaaggactcagtaatatggagag

SEQ ID NO: 7426 - DNA, 450 bp, Glycine max
  unsure (1)..(450): unsure at all n locations
actgcaacattataatgacccnctcgttcatttttttaacagcagaataattatgatatttcaagcaacagatataatcccagttggaagaatcatccaactctgagatgggcaagtcctccacaacaacaacaatctgtccctcctttccagaatattgctgatccaagcaggccatatgttcctcctccaatgcagcaacaacaacagcaatcacaacaaagacaacaagcaattgaggctcctcctcaaccttccgtagaagagttagtgaggcaaatgaccatccaagatatgcaatttcagcaagagacaagagactccattcagagtctgacaaatcagatggggcagatggctactcagttgaatcaagctcagtcccaaaattctgacaaatggccttcacaaactgtggaaaatctgaataatgtgagtgtcatcaccttg

SEQ ID NO: 7427 - DNA, 476 bp, Glycine max
tccttgagaagattcctaaagaagctagagcttagctacttacacttttctaatagctaagctcacctccataagatgagaagccagagcttagctacacacccccaataaaagctaagctcaccctcatgacaaaatacatgaaaaaacaaaaaaagttcctactacaaagactactcaaaatgcctcgaaatacaaggctaaaaccctatactactagaatggccaaaatacaaggcccaaacgaagaaaaaacctattctaatatttacaaagataagtgggctcatacttaccccatgagctcgaaatctaccctaaggctcatgagaatcctagggccttcccttggatctctggcccaacctacttggagtcttttatccaatgcccttgcgggataagattgcatcaatatggaagccttaagttgtcacaactcaacctcccaatttcaaaatgtatgactaacacag

SEQ ID NO: 7428 - DNA, 454 bp, Glycine max
aacaacagaagctcttgagaaatcaaatggtatatttttcacacggaagtccgattcaggtgcataatatatcgagaccctcgaaattgcacaacggaagccctcaagaaagacaaatggtgataacttttcaaacggaagtccgattcaggtgcataatatatcgagaagcttgaaattgaacaatggaagctctcgagaaattcaaatggtcataacttatcacacggaagtccgattcaagcgcataatataccgagacgctcgaaattgcacaacggaagccctcaagaaattcaagtggtgataacttatcacacggaagtccgattaaggtgcataatatatcgagacgctcgaaattgaacaacggaaggtgtcgagaaattcaaatggtcataacttatgacacagaagtccgattcaagcgcataatatatcgagacactcgaaa

SEQ ID NO: 7429 - DNA, 420 bp, Glycine max
agcttgaaattgaacaacggaagctctcgataaactttatggtcataacttatcacacgaacgtccgattcaggcgcataatatatcgagacactccaaattgaacaacgtagggtcttgagaaattcaaatgttcataacttgtcacacgaaagtccaattcaggcacataatacatcgagaagctcaaaattgagcaacgaatgctctcgtgaaattcaaatggtcataacttgtcacacggaagtctgattcaggcgcataatatatcgagacgctcgaaattgaacaaccaaagctctcgagaaattcaaatggtcataacgttttacacggaggtccgattctggcacataatatatcgagaagctggaaattgaacaaagaaagctctcgagaaactaaaatggtcataactta

SEQ ID NO: 7430 - DNA, 409 bp, Glycine max
  unsure (1)..(409): unsure at all n locations
cccgacagnngggtattattgaagcttcttccttatcgacaaagctcagtgaagagtgctcaagcagtgactggtaaattgtccaagcgcttctatggaccgtctcagatcatagaacgcgtgggtaaggtagcctatcgtttgaagcttcctgatggggctcgtatccatccggtatttcactgttcccttttgaagccattccacggagaccccattcttgattcacccaattcactgccgacacgctttattaacggtcaaccgatgcttacaccgcttgccattcttgattatctgcgacataaagagagggacacgtgggaagtattggtccantggcatggacttttcactgatgaatcctcttgggaggactgggaacagcttaagcaggatcatcaccttg

SEQ ID NO: 7431 - DNA, 458 bp, Glycine max
cgcttggagtttccaagtgccaactcgtcttcttctttattctagtcttcttctggcttcaattcttcagtgggctttccttctgtgtccagcatcttgggatgttcccagcctttgatgacagctttccaggttctgctatccagtgatttgaggaaggccaccattcttgctttccaatattcatagttgcttccatcgagaattggtggtctgttcactggtccgccttctttctccatgttcatcagaatttatctccctagatctcactctgtgatttcgagtgttggctctgataccaattgaaattctgataccaggggacagatgtcgtaccggatgtcacgacatcacgcttcagaacatgcagaatgtatgtgtccgtatgaacagattaaacaagtaaataacacaagagaattgtttacccagttcggtgcaacctcacctacatc

SEQ ID NO: 7432 - DNA, 411 bp, Glycine max
  unsure (1)..(411): unsure at all n locations
agctntgaganaaatataacgacttatactttttctcggatgtctgatcgagcccagtaatatatcaagacgctcgaaattgaaaatggaagcactaagaaaagtcaaacgacaataacttttgactcggatgtacaattgtgtcccgtaggatatcgtgacgctcgtaattgaaaacggaagctctgagaaaaatcgaacgataataacttttaactcggatgtccgattgagccctgtaatatatcgagacgctcgaaagtgaaaacggaagctctaagaaaagtcaaccgacaataacttttaactaggatgtccgattgagccctataatatatcgagacgctcgaaatggaaaacggaagctctaagaaaagtcaaacgacaataacttttgactcggatgtccga

SEQ ID NO: 7433 - DNA, 418 bp, Glycine max
  unsure (1)..(418): unsure at all n locations
agctntagatagatttatcagtatataagtttactttttgtatgtttaaatgtattgcctgtaatatttttacatttctctagttgtattccctgtagaatatggactaggttagtacgtctcatcttatgaatgttatcccactttctctttcttctcatgtagtttttgcttaatttttttggcttttgctttaggttgttgctcacatgatgcctgaccttcctaatgttggtgttgaaagggacatggaaagtttccgggagttttttgagagccccatgtttagagcagatgggcttaaaatatatcctacacttgtaattcgtggaactgggctttatgagctctggaaaactggcaggtatatatcanatgttttcttattattggactgctttttcctcaaacatctcaa

SEQ ID NO: 7434 - DNA, 379 bp, Glycine max
  unsure (1)..(379): unsure at all n locations
atcatatcttccgnaatacttatcacctctatcatatctaataattttcacatttatgtctaattgtcattttacttcattgtagtaaatttctaaggaatccatttcctaagaaatctcgggcaataaatagacataaccgtaacgtgaataatcatcaataatggtgataaagtatcattcctttttgaaagaactaacaccaaaaggtccacaaatatcagtatgcacaatttcaagaagttgagtgcttcttgtagctcttttctttgtatgttttgcttggttttcccttaatacaacccacacaaatatttagatccgtaaaatctagataaggaagaatttcattctttattaatctttccatcctttctct

SEQ ID NO: 7435 - DNA, 417 bp, Glycine max
  unsure (1)..(417): unsure at all n locations
aacaaaataaagggactgagttgaatatttaaaatatacacatcaaaatcaatcaataatgaagttaccatgtaataatttataaatgatccccctttctgtataaaccttgcaactgaaaatgccaagtcttcagcaggtcgatgaggaacaggacctccaaactctgtaaacctgcaagcataaaagaggaatagaggcaatgaataatcacttgatatctctagcttgaatgattcttattcttatggaaaccaaagaaataagaaacaaggcatcaataccagccagtccaagcttctgtccacatctttggcttgtaagccttatttggagagaaataatcacaatagaagccattgcaagtgttaatctgtgaaacattntattacatttgaaattagaagtngaatactt

SEQ ID NO: 7436 - DNA, 414 bp, Glycine max
  unsure (1)..(414): unsure at all n locations
cgctgcagctatatattactgngattctattancttagtcaattgntccttggatatagcgaagaattcattttgcagccttgagatgagtagtggttggagtttccatgtatcgactgatgagtccagtagcatatagaatgtctagtcttgtgcacatcaaatatcacaaactatgtaccaaactcttgaaatttgtagcatccaccttttttgcttcgtcgaactttgataacttcatttagcactccacttgtgtaccaactggcttggagctatccatcttgaattttttgagcatctcctttgcatatttttgttgtgaaatgaagatttcatctttcttctgctttacctcaatgtcgacatagtatgacattagtctaatagtggtcatctcgaactctttgatca

SEQ ID NO: 7437 - DNA, 404 bp, Glycine max
  unsure (1)..(404): unsure at all n locations
tgtcccacanacctctctaacatctggtccatgttgggtttattataatggtcttttcttgtggctttgttggccttgcggtagtcgatgtacattcttcagccaatgaaaatccttgttgggattaggtcattcttttcaatccgaatgactgccatgccccctttctttggtaccacctggactaggcttacccaaacactgttggaaatggggtagataagcccagcctctagaagcttgagcacctctttccgcacctcttccttcattgatgggttgatccttctctggggttgtcttactggtctatagtcttcttccatgattatcttgtgcatacagtaagcagggttgattccttttagaattgatatgtgccaccctatttgcctcttgtgtct

SEQ ID NO: 7438 - DNA, 441 bp, Glycine max
cccatgtgaattgcttacatagatctgttatatcccactaattgttctccttttgaagttgtttatggttttaacccactaactcctcttgatcttttgcctatgcctaatgtttctgtttttaagcataaagaaggtcaagcaaaggcggactatgtgaagaagcttcatgagagagtcaaagatcaaattgagaggaaaaataaaagctatgctaaacaagccaacaaagggagaaagaaggctgtcttcgaacccggagattgggtttgggtgcacctgagaaaagaaaggtttccggaacaaaggaaatcaaagcttcaaccaaggggagatggaccatttcaagtgcttgaaagaatcaatgacaatgcttacaaagttgagctgcccggtgagtataatgttagttccaccttcaatgtctctgaattatctctt

SEQ ID NO: 7439 - DNA, 390 bp, Glycine max
  unsure (1)..(390): unsure at all n locations
cccgactgcgataaggtttagacacatgtttggtttttttctacctccttcaacatgagcttatgccctatgttggtcataaaagtgatgtcaccaatgcctactagttttcttgtgacacaatttcccatttttaccgtaccaaagtcacccattttgataggttgagaaaaatcctccatgtgggctaacgtggaaagatgcacccgagtcaacaatccatgaacaatcatcacatgcatcattaagatagttgtcttctccaatgaggaatacatcatcatctagatctgctgcaatgaccatagtgctcttatcctcctttntcttagaatcaatttggtctggcttaacaatgccgattttttgtctctcttgagatgtcgacat

SEQ ID NO: 7440 - DNA, 404 bp, Glycine max
  unsure (1)..(404): unsure at all n locations
agcttgacgttaatctcattttgttttttatgaccttgngagaggtttaccaaggatgtcatacaaagatgaaacaaattaaaacctctttttcaagcaaaaactttgtttcctcaagaccacttgaactattacatattgatctgtttggctacaatgaatgactacattagatggacatgggtaatgttccttgctcataagaatgagtcctttgaggtattctttaaattttataaaagagcttaaaatgaaaaaaaagtatgcgttacttcaattagaagtgatcatggtggagagtttgaaaatgagaactttcgtctattctatgaagaaaatggaacttttcataatttcttcatgtcataccctaatttcattcggggacgaatgtttgtcaacat

SEQ ID NO: 7441 - DNA, 420 bp, Glycine max
  unsure (1)..(420): unsure at all n locations
cgacaataactntctactcggatgtttattttgttcccgaatatatcgaaaagctcgaaattgaatgttgaagctctaagcaaattcaaacgacaaaaactttntactcggatgtctgattgagtcccgtaatatatcgaaaagctcgaatgtgaatgtagaagctctgagcatattcaaacgacaataactttttactcggatgtctgattgagtcccgtaatatatcgagatgctcgaaatggaataccgaagctcggagcaaattcaaacaataataactttttactcggatgtccgattgagtcccgtaatatatcggaacgctcgaaattgaatgttgaagctctgagcaaattcaaacgacaataacattttactcggatgtctgattgagtcccgtaatatatctagacgctc

SEQ ID NO: 7442 - DNA, 220 bp, Glycine max
tttgtactcaatcagacatccgagtcaaaagttattgtagtttgaatctgctcagggcttccgtattccatttcgagcgtctcgatatattacgggactccatcggacatccgagacaaaagttcttgtcgtttgaaatttctccgaactctcagaattccatctcgagcgcctcgatatattacgggactcaatcacacattccaataaaaagttattg

SEQ ID NO: 7443 - DNA, 353 bp, Glycine max
  unsure (1)..(353): unsure at all n locations
actcagcttttatccaggctcatcttggtggtgaagctccttcttctatggcttattccctagaggatggcgcctcctctcacctcttctcctttgtcttccgctgcatttccatggcggaaaatcatcattaaaggacctcattgaagctcaaagatccagccttcatagaagccccacaagcaagcttccatcactgctgttgctgttgctgagggctggaccatctgaggatagggtgattcttctatccacggttgtatctgttgctggagaggtcataattgttctgctgtggttgattntgcttctgaggttgaggaggtctattgtaaatatttgcagcataagct

SEQ ID NO: 7444 - DNA, 416 bp, Glycine max
agcttctcgatatattacgagactcaatcgttcatttgatgaaaaagttattgtcatttgaatttgttcgaagcttctattttcaatttcaagcatcatgatatatgacgggactcaatcggacatccgagtaaaaactaattgtcgtttgaatttcctcagagtttctattttcaattttgtgagtctcgatatactacacgattcaatcggactttccagtaaaaatgtattatcgtttgaattttctcagagcttctattttcaatttcgagcacctagaattattaagggactcaattggacatccgagtcaaaagttattgtcctttgaatttcctcagagcttctattttcaattctgagcgtctcgaattattaaaggactcaatccgacatctgtgtcaaaagttaat

SEQ ID NO: 7445 - DNA, 411 bp, Glycine max
  unsure (1)..(411): unsure at all n locations
agcttgtcaaaaagggatgtctgttttaatctctnttcaaagtaaaaacgttgtttctacttcaaaaccctttgaactacttcacatagacttatttggtgcctctagaactatgagtttgggtggtaattactatggcttagttatagtagatgattactcaagattcacatggactttgtttttgaaaaccaaagatgaagcttttgatggtttttgcaaacttgccaaggtcattcaaaatgaaaaaaggtcttaacattgtttcacttagaagttatcatggaggtgaatttcaaaatgagtctcttgaaatgttttgtgaagaaaatggaattcaccacaacttttctaccctaagaacacctcaacagaatggtgtcatggagaggaaaaatagatcccttgaag

SEQ ID NO: 7446 - DNA, 401 bp, Glycine max
  unsure (1)..(401): unsure at all n locations
tganatggaacaacggaagctctcaagaaattcttatggcttatatcttttcactcggatgtccaattcatgcgcatcacatatcgagatgctcgacatagaacaacggaagctctcgagatattccaatggtcataacttttcactcggatgtccaattcaggcgcatcacatatcgagatgctcgaaattcaacaacggaagctctcgagacattcaaatggtcataacttttcacacggaggtgcgattcaagcgcacaatatatcgagacgctccaaattgaacaacagaagctctcaagatattcgaatggtcgtaactattcactcggatgtccgattcangcgcatcacatatcgagacgctcgtaattaacactgggagctctcgacatattc

SEQ ID NO: 7447 - DNA, 388 bp, Glycine max
agcttctattttcaatttctagcgtctcttatattatgcgcctgaatcggacctctgtgtgaaaagttatgaccatttgaatatctcgagagcttccactgttcaatttcgagtgtctcgatatgtgatgctcctgaatcggacatccaagtgcaaagttatgacccttttaatttctcgagagcttccgttgttcaatttcaagcatctcgatatattaatcgcctgaattggacatccgactgaaaagttatgaccatttgaaattttggagagcttccgttgttcaatttcgagcgtctcgatatgtgaagcgcctgaattgacctccgtggaaacgtttgaccattgaattctcgagggcttccgttgtcaattacaacgtctc

SEQ ID NO: 7448 - DNA, 555 bp, Glycine max
  unsure (1)..(555): unsure at all n locations
tgcttctacaagattcagattcaatgcataaggagtgataagtatgcagatctgataaaaatggatggttcctaccatgaagaacaaaatcaaaatcaaacatataatcatcaacaatctgatcaattatctcaacacgaaaaatagaatgatcctcagatggatgtttcatggcatcaagaatgttaaaatgaacaacaatatcaccaaattccatagacaatgtgccagcataaacatctatcttggttcgggctgttctcataaatggcctgcctaaaataattggaactgaaccatgggaaaatccctcttccatattaagaacataattaatcaacaggaaaaataagctcaccaacccgaaccagcacatcctctatgaaaccttcggggtaagcaacacttctatttgccaaatggatcacaacatctgtagattgcaaaggtccaagagataaagaattgaaaatggacaaaggcatgacactaactgatgctcctagatctagcatggtattctcaaantactgttcccaataatgcaaggtatac

SEQ ID NO: 7449 - DNA, 487 bp, Glycine max
ttcagccatttcaaacgatcataactttttactcggatatcatattgagtcccgtgatataacgagacgctcgaaattgaatattgaagctctgaactaattcaaatgacaataactttttactcggatgtctgattgaggcccgtaatatatcgagacgctcgaaattgaatgttgaagctgtgagccaatttaaacgacaataactgtttactcggatgtctgattaagtcccgtcatatatcgagacgctcgaaattgattgttgaacctctgagcgaattcaaaccacaataactttttactcggatgtgtgattgaggcccgtaatatatcgagacgctcgaaattgaatggttaagcttttagccaattcacacgacaataactatttactcggatgtctgattgagtcccgtaatataacgagacgctcgaaaatgaatgttgaagctctgaaccatttcaacgaccataactttttcct

SEQ ID NO: 7450 - DNA, 387 bp, Glycine max
agcttcaacattcaatttcgagcgtctcgatatgttacgggactcaatcagacatccgagaaaaaagttattgtcgtttgaattagctaagaggatcaacattcaattttgagcgtctcaatatgttacgggactcaatcagacatccgagaaaaaagttattgtcgtttgaattagctcagaagttcaacattcaatttcgagcgtctcgatatgttacgggactcaatcagacatccgattaaaaagtcattgtcgtttgaattggctcagagcttcaacattcaatttcgagcgtctcgatatattacgggactcaatcagacatccgagtaaaaagttattgtcgtttgaatttgctcaaaggttcaacattcaatttcgagc

SEQ ID NO: 7451 - DNA, 375 bp, Glycine max
atgctgcctacatctacaacacagcttctataccttcgctggcaaatcagccacgacagaatgattatctacctcttcggcgatatgtacggtcccagatggacgaatcatgcctaccttatatggtcacatccttcaccataacagcagcaccaacaacaaccttattttcgaaaagtagctggcccacgcagaccatacgttcctacaacaatccagcaacggcaataacaatatccccacaaacaacacacagttcaggctcctccgcaagcttaccttgaagaacttgtgaaggtcctctgtaaacctcacaatctctcaaaatctcatccaaagctaacaaaaatagattgctatgcgagctcaactata

SEQ ID NO: 7452 - DNA, 531 bp, Glycine max
tgccatcttatcaaagcaacattcttaatctatatgcaacagcgagaaaagaaagcacaaagaggaaattcacaaaaccaaatgagataaacatcaatccacatttggtttctggagaatataagagaaaacacccgcttcactcaggcagaggaaaacctctcaaaggcgcataattctcatgcaggcaattgtttcatcacaattccaataagtgatatgtcataaatcaatttttgcaagtcatttaccatcaaatcaaagataaattgcataatcatcatggatcattagggcttttacgatttggactaactttgaaagacatattggtttttctggatattcaaaaacaccttgagaataggaaagcaacataaaaacaaactgacaatttaaaataaatcattgcttcctatcccttcccattttaaccaaattatgactacttactataccaaaatcttcacttataataattaccaacatctgtatacagtttataacaatgcagacatttatctacttcca

SEQ ID NO: 7453 - DNA, 616 bp, Glycine max
taaacacaattatgcaacaaaaaatagaagtttccataagatataataaatttaaaatgtgctttctaagttgatacctaacatcataataacataagctgattgcaatttcaaagttctttatactcttagaaaaaaggtccatacactcttaatttctccttttctttcaaatctcatgattaagagaacacattctcaaatcaagaaaacaaaatcatatgattgaattgaatacttatcttctaatgatgtttctctgttcacaaataaaaccaaatggttgaacttagttacgtaataatcatatcatgaaatagcagaaaaaggtcagccatcataaattgaattaatcatttttacaccctaagtagtaatcataacaatcatgtctaatagagctgctaaatatttagctcacctctctgccatctatggaattcagtagttgaacttagatactcgtcctattaatggctccaaagatagtcttctatctttataaatcaataggaagtacgaagacaaaaaatcaatagaaaatagcataggtacagactatccatgataataaaaatacactctctagagaacaaaaacaagaataacagaattt

SEQ ID NO: 7454 - DNA, 513 bp, Glycine max
  unsure (1)..(513): unsure at all n locations
agcttcaaaattgcaacaaaggagttgttcttgtaaaaaatattcgtcttcaaactcttagaggtgactttgagcgtttgtttatggaggagtccgagtcaatttctgattatttttctcgagtattggccgtagtcaatcaacttaaaagaaatggtgaagatgttgatgaggtgaaggtcatggaaaaaatacttcgaactttaaatccaagttttgacttcattgttaccaacattgaagaaaacaaggatttaaagaccatgacaattgagcaactcatgggttccttactagcatacgaagaaaaacaaaagagaaaaattaaacaaaaggaggctacggagcaactactacaactcaacgtaaaggaagcaaactatgcatattacaagagccaaagaggacgaagtcncggccaagatcgtggacgttgacgatgacatggatgagaacgaagaggtggttacaacaaccactccaacaaattcacaatggagaaagaatttgaat

SEQ ID NO: 7455 - DNA, 457 bp, Glycine max
atactcagcttgtgcatccaataccctgatgaggatgtcccatatgttcttaaagcaggactgatacatttgcttccaaagtttcatggccttgcaggtgaagacccgcacaaacatctgaaagaattccctattgtctactccaccatgaaatccccagatgttcaggaggatcacatatttctgaaggcttttcctcattctttataaggagtgacaaaggactggctatattaccttactccaaggtctatcacgagctgggatgacctcaagagagtattcttagataaaattttccttgcttctatgaccacgaccattataaaggatatttcaggcattatgcaactcattggagagagcctatatgaaatattgggagagatttaaaaaactatgtgccacgagccctcactacccggatttctgaacagcttctccttccatattttta

SEQ ID NO: 7456 - DNA, 506 bp, Glycine max
tctatagaagggtcgttcctaatttctctacaattgcatcacctctcaatgagctagtgaagaagaatgtggcatttacctggggtgaaaagcaagagcaagcctttgctttgctcaaagaaaagcttactaaggcacctgttctagctcttcctgacttttctaaaacttttgagctagactgtgatgcctctggagtgggagttggagctgttttgttgcaaggtgggcaccctattgcttattttattgaaaaacttcatggtgcgacccttaactaccccacctatgataaagagctttatgccttaataagagcactccgaacttgggaacattaccttgtttccacggaatttgtcattcatagtgatcatcaatcacttaaagtcattagagggcaaagcaagttaaacaaaaggcatgcaaaatgggtagaagacctaaagcaatttccatatgttatcacatacaaaaagggtaaaacaaatgtggtagctgatgcc

SEQ ID NO: 7457 - DNA, 372 bp, Glycine max
agcttttgtttggaataataacctatctcctcgggattgggacaccgaaatgggaaaatcctttgccaatgctattcatggtgtggaaaaagaggagtttgctacttatatggccctcgcatagcacttcacggtcttgcatcggcgagtaaaacttacgctatttgagctgccgttcacagcaccattagatttctactggcaacactgaaagacgatggtgggcggggagaaagctatctttcatgcccaagaacaagttagacattgaatgctcaacggaaacaggatactctccggcctatcaaactgcattcaatacgcgagaacgtatgactttcacctcttatgatgcggatgactttagcacat

SEQ ID NO: 7458 - DNA, 531 bp, Glycine max
agctttttggcaaaggaagaacaagaagagagatgagtagaaaggaattcttagaagttctaaaaaattgttaaagagttgtaaaagttctattgaatgcaagtcaaggtcttacataaactcttcatgtcgggtcaagaaaagcattggaagagttataaccttgagaaaatcaagtcaagagttacaacttttgactttttattcaaaagttatcactggtaatcgattaccataatcatgtaatcgattacacaatgcattttatgaaaagttgtgactcttcacaatcagatttgaattccaacgttcagatacactggtatggtaatcgattacattatttgaaaaatattttggaacgttgcaaatcagttaaaaacattttgaaatcaaatatgggcacaggtaatcgattacatgaaactggtaatcgattaccaaagagtaattactctggtaacttgaaaattttagaaaactcttttgaaaacaaaatgtgcttgtttggatttttttgaaaaaaacttc

SEQ ID NO: 7459 - DNA, 451 bp, Glycine max
tcagaattcaatttcgagcgtctcgatgtattacgagactcaatcagacatccgagtaaaaagttattgtcggttgaattagctgagagcttcaacattcaatttcgagcgtctcgatgtattacgggacttaatcagacatccgagtaaaaagttattgtcgtttgaatttgctgagagcttcaacattcaatttcgagcgtgtcgatgtattacgggactcaatcagacatccgagaaaatagttattgtcggttgaatttgctctgagcttcagaattcaatttcgaacatctcgatatattaccggactcaatcagacatttgagtagaaaagttatggtcgttcgaattagctgagaggtgcaacatccaatttcgagcgtctccatgtgttccgggactcaatcagacatccgagtaaaaagttattgtcgtttgaattagcctc

SEQ ID NO: 7460 - DNA, 327 bp, Glycine max
  unsure (1)..(327): unsure at all n locations
agctntgagctaatttaaacgacaataatgttttgctcggatggctgattgaaacccggaatacattgaagacgctccaaattggatggtgaaactctcaagcaattcaaaccaccaatacctttttactccggatgtctgattgggtccccgcaatacatcgagacgctcgaaattgaatgttgaagctctcagcaaattccaacgacaataacttttttactcagatgtctgattgagtcccgcaatatatcgagataatcgaaattgaattttgaagctctaagctaattcaaacgacaataactttttgctcggatgtctgat

SEQ ID NO: 7461 - DNA, 403 bp, Glycine max
agctttgagcaaattcaaacgacgataactctttactcggatgtctgattgagtcctgtaatatatcgagacgctcgaaatggaataccgaagctctgagcaaatttaaacgacaataacctttttactcggatgtcagatcgagtcccggaatatatcaagatgctagaaattgaatgggaacactctgatcaaattcgaacaacaataacttttaactcggatggccgatcgagtctcggtatatatccagacgctcgaaatggaatatctaagctctgagcaaattcaaacactaataactttttactcggatgtccgatagagtcccgtaatatatctgaacgcttgaaattgaatgctgaaagcttgagcagattcaaaccacaataaatttttactc

SEQ ID NO: 7462 - DNA, 479 bp, Glycine max
tgcatcgtagaatgacggttgattttgtagctccaacatttgtgaatggtaaagctaaaattacgattgatgaatctgatgtatctggggaacttgaattttgggaaaattctattattctctttgcactaggtgagtctctttctatgaatgctgtgaagaagtttatggagaagacctggaatttcatttcagaaccagaattatcttacaatgatgatggttactttattgtgaaatgcaagaatagggaagacatggagctggttatggaacaaggtccctatttcatttacggtaaatcattattcctccgcaagtggacatctgattttgagatgaaggaagatctattgcgagttcttccaatctggataactctacctcaatttcctctgcatctgtggggagaaaggagtatttcgaaaattgctagtatggttggtaaacctataacaacagatgaatgttctgcgaag

SEQ ID NO: 7463 - DNA, 495 bp, Glycine max
agcttccttaagaagattcctaaagaagctagagcttatctacacacacctctctaatagctaagctcacctccttgagatgagaagctagagcttagctacacaccccctataatagctaagttcacccccatgacaaaatacatgaaaatacaaaaaattccctactacaaagactactcaaaatgccttgaaatacaaggctaaaaccctatactactagaatggcaaaaaatacaaggcccaaacaaaggaaaaacctattctaatatttacaaagataagcggtctcatacttagctcatgggctcgaaatctaccctaaggctcatgagaaccctagggtcttcccttggatctctagcccaatctacttggagtcttctatcgaatgcccttgcggggtaggattgcatcaacatgccttatgacacttaagcacacttagtggagaatcttggacttgatctttgattagtgggctgaactttatgt

SEQ ID NO: 7464 - DNA, 481 bp, Glycine max
ccaaaaaactcagcttgtcagatccatgctcttctctggtgttggtatgtcatcaattcgttatgaattagatcacataaattctgtaggacaacaccatgtgacatattgtatgaccttatgctccataagtcctctgactcttatcttatacactaattgttgaagtagccaacaatttggtacatatcctttcatctatatatattgatggctgcaagaacttaggaccgaatcgtccatgtcttgagatatttgaaattcaaacactttcatgttatatttgcttagattttttattatctgtcttggttcagcgctgcgagtcatcttaacttgtaccaaaataaaagactaaccaatttaaactaaaagatatacaatatgtttagacctcgtacttatggtgaaacttggttttagtcctccaaccttaacatataagctctgatggaaaggagaaatactccccaaaatatta

SEQ ID NO: 7465 - DNA, 537 bp, Glycine max
  unsure (1)..(537): unsure at all n locations
ttctcttttgtgcgactatctcatcctctttttcagatgtagaatgaagcttgacaggttcaagtgtaggtgctgctattattggaggcacttgaatttggttgccacacctcaaggtgatggcactcatatttttcggattatgcacagtttgtgaaggcaatttttcagaattttgggactgagcttggttcaactgagtagccatctgccccatctgatttgtcagactctgaatggaggctcttgtctcttgctgaaattgcatattttggatggtcattttcctcactaactcttctaacgaagattaaagaggagcctcagctgcttgttgtctttgttgttgttgctgctgtattggaggaagaacatatggcttgcttggaccancatcattctggaaagaaaggacaagcctgtgttgtttggaggacttgctcatctcanattttgatgattactccaaactggattgtatctgttgcttgaaaggccataatattatgctattgttggatttggtgttgaaggggc

SEQ ID NO: 7466 - DNA, 419 bp, Glycine max
tgtagttgagcccttttgaccctggttgaaccttgaaatttttgcttcattgaatcccatatatttattgtcatgtccctcttgaggattgtttcaaggacttcacgatctattgcctggaaaaggtaattctttacctttaagtccttcaacttctgctcctcgatcaatttgcattgtgcctccgtacgctctattccatctgccaccatcaatatcccattctcaatgagatcccaatattctttggagcagaaaagattctccatcaacattgcccaatgatcataatgaccattaaaccttggaattgcaggctgcacgaaactgctactcccaccttctgccattcttctcaactcgttctactcgaaagagagaaaaactgcagtttctttcttgaatacactcactgtttt

SEQ ID NO: 7467 - DNA, 445 bp, Glycine max
agcttgcaaaatggaagcaaatatatctctctatgggtggcagaataaccctcattaattatgttttaacagccttacgcatttacttgctgtcttttttcagaatccttaaaaaagtggttcacaagatagtctccattcagagaaactttctttggggaggtggcaatgaggcaacaaagatcccttgggtcaagtgggatacagtctgtctatttatgaataaaggggggttaaggattaaagacttgaacaagtttaatgaggccttggttggcaaatggggctgggagttggtgaataaccagaaccagctatgggctaaaatcttgatgtctaagtatggtggatggaatgctttattctatggcagaaacaatacagactcctcttcttggtggaaggatttaaaatctgttttccaacaacaacataataatagtct

SEQ ID NO: 7468 - DNA, 529 bp, Glycine max
agcttttaagggtatttgactatttaggttttatgtgtacccaacttatcaaggtttagtgttacttgaccaaatagggtttatggatatttgacaaaataaggttgcttgactaattgagattacgggtatttgacaaataagggtttatgggtatttcactaattagggttatgtctacttgatagttaaggtttactgttcgttgaccaattagggtttatgattattttaaaaagttggggtttacaggtatttgacaacttattgtttacggttcacgggtattggactaatgatggtttatgtgtagttgagtaattagaatttaatgttacttgaccaattagggtttaagattattcgacaaattaagggtacttgactaataatgatttaggggtattttacaaatttggttttattgctacttgacaaattaaggtcaagcggtatttgactaattaggtttatgggtactttagtaattgaggttatgggtatttgacaaattagatttatggttact

SEQ ID NO: 7469 - DNA, 516 bp, Glycine max
tcttcacaatagtttctttcagacttcacaccgatttgtttcaaacatgaaatttatttttacctaaaagagtcatcggttcatataaatgttccttttctttgcttgcttatgattttgggagtttatacacctgtttggttatatatatatattttaataacaaaaatccttctcctgtaattttttttcttttttatgatgaaatgcactagcttgttgatttgttgtgtttcattttttggggtcattttttgttcttattttggttgatgtttcctaaaacatttaaatatttctttttatttaggtttaacaaaatgtcacgtggtattataatgctcagtttagtggcatatgatatacctaatactaagttttgagctttgtttctatttcatccttttgatttatattcttattcggtgtcattattaataagaatatgaaccttcttttcagaattaggattaacatatgtggaaattaaaataaacaagtgagctaatattactt

SEQ ID NO: 7470 - DNA, 402 bp, Glycine max
ttgagcaacttcaaacgacaataactttttactcggatgtctgattgagtcccgtaatatatcgagacgctcgaacttgaataccgaagctctgagataattcaaacgacaataactttttactcggatgtctgattgagacccgtaatatatccagacgctcgaaattgaataccgaagctctgagcaaattcaaaagacaataagtttttactcgtatattcgattgagtcccgtaatatatcgaaaggctcgaaattgaatatcgaagctctgagcaaattcaaaagacaataacgttttactcggatgtctgactgagtcccgtaacatatcgagacgctcgaaattgaatatcggagctctgagcaaattcaaacgacaataacttgttactcggat

SEQ ID NO: 7471 - DNA, 361 bp, Glycine max
agcttcaacattcaattttgagcgttttgatatattacgatactcaatcggacatccgagtaaaacgttattgtcgtttgaatttgctcagagcttcggcattccatttcgagcatctcgatatattacgggacttaatcagacatccaagtaaaaagttattgtcgtttgaatttgctcaaagcttcgataatcaatttcgagcgtcttgatatattactagactcagtcagacatccgagtaaaatgttattgtcgtttgaatttgctaagagcttcgataatcaatttcgaccgtctccatatattacgggactcagtcagacaaccgagtgaaaagttatttgcggtttgaatttgc

SEQ ID NO: 7472 - DNA, 485 bp, Glycine max
ttgaatgctctattcaatggagttgacaagaatatcttcatactgatcaacacatgcacagtggccaaggatgcatgggagatcctgaaaaccactcatgaaggaacctcccaagtgaagatgtccagattgcaactattggccacaaaattcgaaaatctgaatatgaaagaggaagagtgtattcatgacttccacatgaacattcttgaaattgccaatgcttgcactgccttgggagaaagaatgacagatgaaaagctggtgagaaagatcctcagatctttgcctaagagatttgacatgaaagtcactgcaatagaggaggcccaagacatttgcaacatgagagtagatgaactcattggttcccttcaaacctttgagctaagactctctgataggactgaaaagaaaagcaagaatctggcgttcgtgtccaatgatgaatgagaagaagatgagtatgaccctgatactgataa

SEQ ID NO: 7473 - DNA, 656 bp, Glycine max
tgttgcctttccgattttctttatgcatggacgacaaggtttattacttataagtcatagcacatggctcgacttcaaagtcgtaacagtggccacgactttagtactttatgtaggatgggagtggcattctacttcaggagtcgtgggttatggcacaactttaaaatcgtgacatttggcacgactttaaagttgtgtttattattattttttaaaataatatgtcatatgttaatattattttacggttttagttaattaaaaattttatatgttataagtaaatattttgttagggctttagttagataaaaatgttatatgttataagttaatattattttaggggtttagttatttaaaaatttatatgttataagttaatattttgttagggtttaattaataaaaatattatatgttataaggtaatattattttatgattttactcattaaaaaaagtactatgttttcaggtaatatttctgtaggggtttaagtaattaataatggctatgttataagttatattattttaaggcgttacttatttaaaaaggcttttgtgataaactaatattattttaggatttcactattaatattattattttcccaaaatgttttaatattatttatttaatgaaaaac

SEQ ID NO: 7474 - DNA, 380 bp, Glycine max
agcttgcatacaagattctccttgcctggcacttcaaaaccttctggttgggtcatatagatgtcttcctctaaatccccatgcaagaatgcagttttaacatctaactactccaagtgaagattctctgcagctactatgctcataataactttgatggtagtcatctttacaactggattgaagatctctgtgaaatcaattccttgtttctgctgaaaccctttcaccacaagtctcgccttgtatcttcttctaccgttagattcttccttgagcctatatacccacctattctggaacgctttctttccttctggcaatttagttaaagaccacgtcttattcttctgaagggatgtcatctcatctttcatcgc

SEQ ID NO: 7475 - DNA, 391 bp, Glycine max
tggcatcaatcaccttgctgaccaaacaaatgatgaatttgtggcttcccataatggatacaaacacaaggcatcacattcacaaacaccattcaagtttgaaaacgttactggtgttcctaatgcagtggattggagggaaaatggagctgtcacagcagtcaaggaccaaggccaatgtggtaattaagtaacagaatttcttttatcagtaagaatcgaaggcaggacaacagggagtttacaacaactcacatgttctgctcaattaactgagctagactccctcggttaacacagaaaattaaccataaattaaagtgatactatgttctgttctatatatcactgttatgatggcataaataataatggttaatctgtaaataac

SEQ ID NO: 7476 - DNA, 445 bp, Glycine max
agcttaacatcaatcaccttgctgaccaaacaaatgaggaatttgtggctttccataatggatacaaacacaagggatcacattcacaaacaccattcaagtatgaaaacgtcactggtgttccgaatgcagtggattggagggaaaatggagctgtcacaacagtcaaggaccaaagccaatgtggtaattaaataacaaaaatttttttatcttatgaatcgaaggcacataacatggagtttaccactacttatgtgttcttcttaaccaactgagcttgactccctcggttatacagaaaataaccataaatgaaagcgatccattttctttttcatatattactgtgatgaggggcttaaataatatttgggtaatttgtaaattaaccaggatctggttgggattttcaacagttgccggaacaaaaaggattctacca

SEQ ID NO: 7477 - DNA, 507 bp, Glycine max
agcttagtaaagctaggcactaacaatctccccctttggcaaattttgtctaaaacatacttagacacttcctgagcaggtacgagcagttatgcaagtgggatcaacaactttcattatcagagtaatcaagcacagcggaaattctgcaagttgcaagtcgtttccaggatgtcaagacatctcacatgacatcagctttctgcttttgctccccctgtctccatgctcttactccagcatcttctatcagctactaatctttttcaggatgtcaagacatctcatgtgacatcagctttcccttgtctccatgctcttactgcagcattttctatcagctactagtagcttacatcagtaatcatcagcagcagcagtctccccctaaaaacatgtacatacaacttcccctcaaaatcatgaataatgcttacatcgtatcctacttctctaaatcataggtaatgctttatactactactgcgtacaccaaaccatccatat

SEQ ID NO: 7478 - DNA, 373 bp, Glycine max
tcaacgttcattttcgagcgtctcgataagttacgggactcaatcagacatccgagaaaaaagttattgtcgtttgaattagctcaaaagttcaacattcaatttcgagcgtctcgatatgttacgggactcaatcagacatccgagtaaaaagtcattgtcgtttgtattggctcagagcttcaacattcaatttcgagcgtctcgatatattacgagcctcaatcaaacatccgagtaaaaaattatggtcgtttgtattggctccgagcttcaacgttcattttcgagcggctcgataagttacgggactcaatcagacatccgagaaaaaagttattgtcgtttgaattagctcataagttcaacattc

SEQ ID NO: 7479 - DNA, 506 bp, Glycine max
agctttcagccaattcacccgacaataactttttactcggatgtctgattgagtcccgtaatataacgagacgctcgaaattgaatgttgaagctctgaactagttcaaacgacaataactttttactcggatgtctgattgagtcccgtaatatatggatacgctcgaaattgaatgttgaatctcagagccaattcaaacgacaataactttttactcggatgtctgattgagtcccgtaatatatcgagacgctcgaaattgattgttgaagctctgagccatttcaaacgacaataactatttactcggatgtctgattgagtcccgtaatatatcgagacgctcgaaattgaatgttgaagctctgagccaattcaaacgacaataactttttactcggatgtctgattgagtcccgtaaaatatcgagacgctcgaaattgaatgttgaacctctgagccaattcaacgacaataacttttactcggatggtgtgattga

SEQ ID NO: 7480 - DNA, 504 bp, Glycine max
agcttcaacattcaacttcgagcgtctcgttatattataggactcaattagacatccgagtaaaaagttattgtcgtttgaatttgctcagagcttcaacattcaatttcgagcgtctccatatattacgggactcaatcagacatccgagtaaaacgttattgttgtttgaatttgctcaaagcttcaacattcaatttcgagcgtctagatatattacaggactcaatcaaacatccgagtaaaatgttactgtcgtttaaatttgcttagctctccagctttaaatttcgagcgtctcgatatatgacgggactatatcagacatccgagtaaaaagttattgtcatttgaatttgcttagagattcaacattcatcttcgagtgtctcgttatattacgggactcaattatacattcgagtaaaaagttattgtcgtttgaattttctcagagcttcaacaatcaatttcgagcgtctcgatatattactggactcaatc

SEQ ID NO: 7481 - DNA, 447 bp, Glycine max
ttgatgcaacatttggagaggttaatgaaacaacatcattatgcgctccatgagaggttgggtcgaatggagaatttagatcataatgaagaacaatggaggataagagggaatgatggcgttcctagacaaaaccgaattgatggtattaaactcaacattccttcatttaaaggaaagaatgatccggaggcctacttggagtgggagatgaaaatagagcatgttttctcatgccacaactattatgaggaccacaatgtgaagcttgccgcccccgagttttccgactatgctcttgtgtggtggaacaagctacataaggagagagcaagaaatgaatagcccatggttgatacatggaccgagatgaaaaagatcatgaggaagcggtatgtgcccgcttgttactcaaaggacatgagatttcaacctccaaaaactaac

SEQ ID NO: 7482 - DNA, 603 bp, Glycine max
ctcaagcttgttgatctcttcaggatgatcaacacaatattgcatttgctgcttcaattttgggctgcagatttcataagcaatgcatttagtatgtttacttggtaggtttaaattttcaataaaagtaattaatttttttagaatataattttttatgcaaggtcaatgtgagttcttgttacacaaatgtaattcattttattaccatattacccaattcattaatatgatgcagtgaatttgcattaaaaaaatatacttgtaattatatataatatagaagttttagcatttagcagctcactctttaacacatttttatataagaaattttattatacgttaaaatttattaacaaatataatagaaaaaagactcacttaaattatgatcttttattaattttaaacaatcttacctaatgcattcaaaagattgatttagaaaggatctttgttaatatttttataattatgaaggaagttattaaactattatgattgaactgaatataataattaaatgacagtcatttaaaactaaaagtttatacgttactatttatacaatatatatgttagtgaagataaatgggatac

SEQ ID NO: 7483 - DNA, 423 bp, Glycine max
agcttagagctctagaaagattatttatggaaatccgacaaactactttacaaagattcagtttcactaatcctttaaagaattctatatattaagggaattattttttaaaaatctcaacctaatccaaaataatcattatttaattttaaattattgctttaacagtgccactaattatttatggtatttgatctaaatatttaactaatttatagggattttaatttcgactctattaataatgaaaaacattgttcgatcgggaactcatggagtacttacaccagttcatgagctaatgattatgataagtttagagaactatacaacaaatccactaaggtaaattttcattatcatcatttatagagagagagacaattttgacctataattttctatcccccacaattgctaata

SEQ ID NO: 7484 - DNA, 357 bp, Glycine max
taagcttgtagaactaccacaaggaaagaaagtaatgggtgtttataaactatatggatgaggcaggtaaggttgtcataaacaatacaagattggttgccaagggttactcacaacaaaaaggtgtagactatacaaaaacctttgctcttgttgcttgtctagaggcaatatacattttactcttatttgcatgtcatacaaaaatgagactatatcaaatggacgtaaaaaatgcattcctcaatggagtaatataagaagaagtctatgtagaacaacccactgggtttgaaagtaacacttttccacacatgtgtttcaactctataaaacattgtgtggacttaacaaagc

SEQ ID NO: 7485 - DNA, 434 bp, Glycine max
agcttctaaactttgtacaagaatgaagctcttataccacttgttagacaagtggcctcagatatcttaagaagggggggggttgaattaacatagtccaaactgtttcccctaattaaaaaaatctatttcactttttactcaagttatgaattcccttaatgacaatcttcttaaatattaattcaaatgaagcaacttgaatatgaatataaagcaataataaataaaggagattaagggaagagaaaatgcaaactcagttttatactggttcggccacacccttgtgcctacgtccagtccccaaacaacccgcttgagagttccactatcttgtaaattccttttacaagttctaaacacacaaggacaatccttcctttgtgtttagagatcctttaccacaagagactcacagactcttaatccct

SEQ ID NO: 7486 - DNA, 440 bp, Glycine max
ttgtccgcaaaaatcactaaaaaccgttttaaggtcctactccttgaatggtactctttgattttatcggataacatggaccgttcaaaagcataaaatcaacatgtaactttattgctttagctagaactacgtaggtctaatttcctcatcgtaattgaggatacgtaggagcaaaagtcctgcttttgttgaccaccccaagagatcgttaatggtccaacgccttaatgtttctctcctttcaaaaacaagagatcgttaatgctccaacgccttaacgtttctcttctttcaaaatcaaaagatcgtttaatggtccaacgctttaaatgacctttgttcggttaaaattgatctttgcagaaaaagatcaaaacaacttatccaacgtttagttctaaaagaactacgtaagtctgatttcctcatcgcaattg

SEQ ID NO: 7487 - DNA, 420 bp, Glycine max
ttgagaaaattcaaacgacagtaactttttactcggttgtttgactgagtcccgaaatatatcgagacgctcgaaattgaataccgaaacgctgatcaaattctaacgacaaaaactttttactcggatgtctgagtgagtcccgtaatatatcgaaaagctcgaaagtgaatgtagaagctctgagcgaattcaaacgacaagtaactttttactcggatgtctgaatgagtcccggaatatatcgagacgctcgtaatggaataccgaagcttggagcaaattcaaaccacaataactttttactgggatgtccgattgagtcctcctatatatacgaacgctcgagatggaatgttgaagctctgagcaaattcaaaccgacaatgactttttactcggatggccgaatgagtcccg

SEQ ID NO: 7488 - DNA, 322 bp, Glycine max
agcttctacattcaatttcgagcttttctatatattacgggactcaatcggacatccgagtaaaaagatattgtggtttgaatatgctcagggcttcggtattccatttcgagcgtctcgatatattacgggactcaatcggacatcagagtaaaaagttattgttgtttgaatatgctcataacttcggtattccatttcgagcatctcgatatattacgggactcaatcagacatcggagtaaaaagttattgcagtttcaatttgctcagggcttcagtatttcatttcgagcgtctcgatgtattacgggactcaatc

SEQ ID NO: 7489 - DNA, 527 bp, Glycine max
agcttgtaaaaaatgcaaaactttaatatctattaactcaaatgtccgattgagtcctgtattatatcgagacactcaaaattgaaaacagaggctctgaggaaattcaaacaacaataactttttacttggatgtcagattgaagcaattaataattcgagacgctcgaaattgaatacagaagcgctcatcaaatccaaacaacaataaattttgactcggatgtccaatttactcccataatagttcaagatctcaaaattgaaaacagaagctctcaaaaaattcaaacgataataactttttacttgaaagtccgattgagtcttacagtatatcgagacgcacgaaatttgaaaacagatgctttgtgcaaaattaaacgacaataactttttacttggatgtccgaatgatttccgtattttatcaacacgctcaaaattgaataacagaacctctgagcaaatttagacaacaataacttttgactccaatgtgccatttgagtcctttaataatttta

SEQ ID NO: 7490 - DNA, 444 bp, Glycine max
tgaaattgaataacggatgctccctagaaattcaaatggtcataacttttcactcgaatgccagatttaggaacaaaatatatagagacgctcgaaattgaacaacagatgctctctagaaatttaaatggtaaaaatttttcactcggatgttagattcaggcacataatatatcgagacgtttgaaattgaacactaaagctctggtccaattcaaacggccataacttttaacatgggtgtatgattgaggcccatgatgtatcgagatgatagaaattgaataacggatgctctcatgaaattcaaatggtcacaagttttcactcgtatgttagattcaggaacaaaatatatagagacactcgaaattgaacacggaagctctggtccaaatcatatggcctaaacttttgacatgcttgaccgattgaggcccatga

SEQ ID NO: 7491 - DNA, 352 bp, Glycine max
agcttcatgagagagtcaaagatcaaattgagaggaaaaataaaaactatgctaaacaagccaacaaagggagaaagaaggttgtcttcgaacccggagattgggtttgggtgcacatgagaaaagaaaggtttccggaacaaaggaaatcaaagcttcaaccaaggggagatggaccatttcaagtgcttgaaagaatcaatgacaatgcttacaaagttgagctgcccggtgagtataatgttagttccaccttcaatgtctctgatttacctctttttgatgcagatggagaattcgatttgaggacaaatccttctcttgagggagagaatgatgaggacttgaccaa

SEQ ID NO: 7492 - DNA, 353 bp, Glycine max
tgtaacattatttgtggagtttaatgacatacatactgtttattaacttgaaataaccactatattttatggctcttgattgcgatgaatgataatataaataagttgagtctttgtttaccaatggtttacaaagttggtgcaccccagcatcattgtagcaaacatgggccttggcaagctgccacatccaattactagtatcatcaacaggaggagtaaccactcgctttgaccgggaattatgtccaacatgaaggaggctaagttctatagccacatgcttgagagtgccacgaggtgtctataaaaagacggagcgtgtggcatatgactatctaccatctaaggca

SEQ ID NO: 7493 - DNA, 544 bp, Glycine max
tcatgcagataagattttattgcatttagccacaaattttattataaatagcaacagttctctgatgcaatatacatgattatttaacttggtctaatgataaattgtattaattatgtctctaaagtatgaaaataaagctcattcagtagccaatccacagctccacacaagttcatgacaaccctttcaaagcttcaacttgatagcagtttgaacatccttatcacctcggccactgaagttaaccacaaccttggctccattaggaagggttggacacactttctctagatatgccaatgcatgagatgattccagagctggaattatgccttcaagtcgtgaaactctcttaaaagctacacatacaaaaaatccaaaaataagatacacgggcaatatctgataccatagaaacatttacttcttaccacaaagaagaggataatataaccattttctttaaatgcaatatgatggaaaatggcaagatgtggtggatacaatggaattatgtgttagcacttttttactaccccat

SEQ ID NO: 7494 - DNA, 407 bp, Glycine max
agcttataagtgaagccttgggagaggatttgtccaaaccctccaacaccagtacttgtagtaataaagctgacactactactactaaggcaaggataagatgcagcatcgaccaaagctttctgaaaaacaaatctgtaaagggtaccacggaacttcttgaacagcatgtgtggaggccccagagagggttgccacaacgtgcaatggcaattcttaaagcctggttatttgagcatttgcttcatccgtatgtatgcctctatctatgtctcttattaataaatgtctagctccgcgactctcttttctgcattctaaaaagacatttggattgaattgtggcctttttttgctgttgatgaatatttttttagttaccctacagacactgataaacacatgct

SEQ ID NO: 7495 - DNA, 416 bp, Glycine max
ttgaaggctgatttcatttgcgaagtgaattacaccaattggttagccaatgtggtcatggtaaagaaagcaactggaaaatggaagatgtgcatggattacaccaacctcaacaaagtgtgtcccaatgatgcctaccctttgcttagcattgacagactatttgatggggcatgtgggttcagggtgctcacttttttagatgcctactcaggctatattcaaatcaagatgtatctacccaaccaagaaaagacaacatttgtcattgatagggctaattttttctataaggtaatgactttttgatgcaatcctccctatgaagggactagtcaccagagccatgagcaagaggctccaaaaggattgagctagagttgctgaagaagttcctagggttctcatcaatctca

SEQ ID NO: 7496 - DNA, 610 bp, Glycine max
tgaaggcaaactggatgcattggttaacttggtaacccatctggccttgaatcacaaatctgtaccattcgcaagggtttgtggtttgagctcctctactgaccaccatacagacctttgcccttccatgcagcaacctgaagcaattgagcagcctgaagcttatgctgtaaatatttacaatagacctcctcaacctcaacagcaaaatcaaccacagcagaacaattatgacctctccagcaacagatataaccctggatggaggaatcaccctaacctcagatggtccagccctcagcaacaacaacagcaacctgctccttcgttccaaaatgctgctggcccaagcagaccatacattcctccaccaatccaacaacagcaacaaccctagaaacaaccaacagttgaggcccctccacaaccttccctcgaataacttgtgaggcaaatgactatacagaacatgcaggttcagcaagagaccacagcctccattcagagcttaaccaattaaatgggacaattggctacccaattgaatcaacaacaagtccagaaatatgacaagctgccttctaagttgttcaaaattccaaaaatgtca

SEQ ID NO: 7497 - DNA, 517 bp, Glycine max
  unsure (1)..(517): unsure at all n locations
tgaaattgaataacggatgctccctagaaattcaaatggtcataacttttcactcgaatgccagatttaggaacaaaatatatagagacgctcgaaattgaacaacagatgctctctagaaatttaaatggtaaaaatttttcactcggatgttagattcaggcacataatatatcgagacgtttgaaattgaacactaaagctctggtccaattcaaacggccataacttttaacatgggtgtatgattgaggcccatgatgtatcgagatgatagaaattgaataacggatgctctcatgaaattcaaatggtcacaagttttcactcgtatgtcagattcaggaacaaaatatatagagacactctaaattgaacacggaagctctggtgcaaatcatatggcctaaacttttgacatgctngtacgattgaggcccatgatatatcgagatgcttcaaattgagaaatggaagttttcgagaaattcaaatgggcataacttttcactcgaat

SEQ ID NO: 7498 - DNA, 422 bp, Glycine max
agcttcatgagagagtcaaagatcaaattgagaggaaaaataaaaactatgctaaacaagccaacaaagggagaaagaaggttgtcttcgaacccggagattgggtttgggtgcacatgagaaaagaaaggtttccggaacaaaggaaatcaaagcttcaaccaaggggagatggaccatttcaagtgcttgaaagaatcaatgacaatgcttacaaagttgagctgcccggtgagtataatgttagttccaccttcaatgtctctgatttacctctttttgatgcagatggagaattcgatttgaggacaaatccttctcatgagggagagaatgatgaggacatgaccaagagcaagggcaaggatccactttgaagacttggaggacctatgacaagggctagagcaagaaaagccaag

SEQ ID NO: 7499 - DNA, 426 bp, Glycine max
  unsure (1)..(426): unsure at all n locations
agcttagctacacatacctctctaatagctaagctcacctccttgagatgagaagctagagcttagctacacaccccctataatagctaagctcacccccatgagaaaaaacatgaaaataacaaaaaaaagtccttattacaaagacaactcaaaatgccccgaaatacaaggctaaaaccctatactattagaatggccaaaatacaaggcctagacgaaggaaaaacctattctaatatttacaaagataagcgggctcatacttagcccatgggctcgaaatctaccctaaggctcatgagaaccctangggccttccttggatctctagccaaatctacttggagtcttttancaatgcccttgcggggtgggattgcatcattccctccacctgggaaaggatttgacctcaaatcccga

SEQ ID NO: 7500 - DNA, 545 bp, Glycine max
taccaagctttgtgccaaccagaataatggggacaccaggagcataatgcttcaactccggaatccactgaaaatgaaaccacacatgcaatttatcatcgactttttttataaatgaattattttcttaacatataacatgatccatacatccttcattacaggccatacagaaaccttataattatcaaaataaataagaagaaatacacccaaaacactatgaccacaataaattgccacgaagtacctttttagagacattttcataactggccttgcttatgagagagaaagccagtatgaaaacatcggcaccacggtaactcaaaggtcttaatctgttataatcctcttgtcctgttccacaagtaacacaataaatccagagataacttccaagctccaacatcacagaaacaataatcacgcagcattaccagcagtatcccacaaacccagattcacaatgctcccattgacaaccacaattgcgctgagattgtcaaaaacagtcggcacataatcctgtttttaaaatacaa

SEQ ID NO: 7501 - DNA, 418 bp, Glycine max
agcttgtcaaagagagaagcaagttaaaaactcctttcaaagcaaaaacgttgtttctacttcaaaaccccttgaactacttcacattgatttatttaatccctctagaactatgagtttaggtgtaaattactatggcttagcaatagtggatgattactcaaggttcacatggactttgtttttgaaaacaaaaaatgaagcttttgaggcttttcgcaaacttgccaagatgattcaaaatgaaaaaggtcttaacattgtttcacttggaagtgatcatggaggtgaatttcaaaatgagtccttttaaaacttttgtgaagaaaatggaattcaccacaatttttctgcccaagaacacctcaacagaatggtgttctggagaggaaaaataaatcgctagaagaaggtgcaa

SEQ ID NO: 7502 - DNA, 386 bp, Glycine max
  unsure (1)..(386): unsure at all n locations
tactcgagcttgtagcatattcaaacgaccataactnttaactcggatgtctgattgaggcccgttatatatcgagacactcgaaattgaaaacagaagctctgaggaaattcaaacgactataactttttactcggatgtctgattgtgtcccgtagtatatcgtgacgctcgaaattgaaaacataaggtctgagcaaattcaaacgacaataactttttactcagatgtccgattgagtcccgtaatatatcgagatgcttcaaattgaaaatagtagctcctagcaaattcaaaacataataactttttactcggatgtccgattgagtcccgtagtgtatcgagacactcgnaattaaaacagaagctctgacaaattaaa

SEQ ID NO: 7503 - DNA, 419 bp, Glycine max
  unsure (1)..(419): unsure at all n locations
nagcttctgttttcaattntgagaatctcgatatattacgggattcattaggacatccgggtaaaaagttattgtcgtttgaatttgctcagagcttctaatttcaattttgagcgtctcgatatattacgggacttaattggacatccgagtgaaaagttattgtggtttgcatctgctacgaactttcgttttcaatttcgagcatctcgatatattgcgggactcaatcggacatccgattaaaaagttattgtcgtttgaatttgtcaccagcttttgttttcaattttgagtgtctcgatatattacaggacttaatcggaaatccgagttaaaagttattgttgtttggatattgtacgagactttgttttcattntcgagcatctcgatatattacgggacttaatcggaca

SEQ ID NO: 7504 - DNA, 406 bp, Glycine max
  unsure (1)..(406): unsure at all n locations
tgtgcgtaatanaacttatttgacatcaaagatagtattatgataacaacttctgtgaaataacaaattcgtgtctcttaatctgtattagaacttgcagttggtgatacttagaaggctcatatggtgggaacctgatttctttgttaatttggttgtatagctagtttcttgggaagaaggagggtatctgacatcagataaaccaatgccaaggggagagattgtagttggaggatttagtgtgacagctggttactttaagaatcaagaaaaaactaacgaagtgttcaaggtaatttcccaagttacagttgtatgcatgacatntttcctttttaatttcctttaactgctcttannatctgttttgcatattactaaagccactcgtacatnntttttt

SEQ ID NO: 7505 - DNA, 364 bp, Glycine max
tgtagatgtcacttaagaacataggtgcaacggtatgctcggagaacttggctggtaatgttttgaagtgagtatactttgtcaaacaatctacaatcacctaggtaattgacttcccctgtgacactggtaagtgtgtaataaaatccatagagaagtctttccagacctaattgggaataggtaaaggctataaaaggccatgctatttgtgattgggagacttatgcttttgacaaatctcacaggtttgcacatactccttgacatcccgacacatgtgtggccatgaaaaggaagctgccaaacatataagcatgcctttaacacttgagtgtcctcctgcaagggtggcatggcaatc

SEQ ID NO: 7506 - DNA, 345 bp, Glycine max
tgagttgcttgttgacaaggatctcaagactaactatgacaggattgagcttgaggaaatagttcaagtggcactcttgtgcacacaatatcttccgggccacaggcccaaaatgtctgatgttgtacgcatgcttgaaggtgatgggcttgcagagaaatgggaagcctcacaaagtgctgacactaccaagtgcaaaccacaagaactctcttcatcagataggtattctgacctcattgatgactcttctttgttagtccaagccatggaactctcaagccctatgatgtgaaccttacggggcggatcgcttgatacaggctacgaatatttggatgacgc

SEQ ID NO: 7507 - DNA, 315 bp, Glycine max
  unsure (1)..(315): unsure at all n locations
gctaataatatgtcaaaactgccaacgacacagggctatgggtctgatgaggagtgaattctgaaaactcaatgttcttctggctcggatatatnttgttntgtttttttgataagcaaatgttttatactttgttngaacttatgtcacttttttcagcttggaattcttttgaattccttgaagagaatgctcgacagcttgcgccctaggattgaatcccagttcaagacatggngttcttgcttgccacatgttggaaacacgacacctgggtgagcgactagtgaggtgacagtgatgctgagagcaaag

SEQ ID NO: 7508 - DNA, 363 bp, Glycine max
  unsure (1)..(363): unsure at all n locations
agcttgctaaatggaagcaaaaaagtctatcaatggggggtagaataaccctcattaattcagtcttaacagctntacccatctatttgctgtccttcttcaggatccttaaacatgtggtgcaaaagattgtctctattcaaagaaactttttatggggaagtcatcacgaggccaacaagatcccttgggtgaggtgggacacagtttgcctccctaagagtaaaggggggttagggattaaagatttgactaaattcaatgaggctttgcttggcaaatgggggtgggagctggcatataatcagaatcaaccatgggccaagaatttattgtctaaatatggtggatggaaggatttga

SEQ ID NO: 7509 - DNA, 380 bp, Glycine max
  unsure (1)..(380): unsure at all n locations
agcttctggtgggacatcttgacttgctttccaatctgacattcaccacagattctgccttcttctattttcagattgggaatgcctctaacagcacctttgtcaatgattntcttcatgcctcttaagtgcagatgtccaaatctttgatgccatatattgacttcatcttctttggagactagacatgtggaggagtaactggtttcttgaggtgtccataggtaacagttgtcctttgatctgctgcccttcattaggacttcactcttctcatttgtcaccaagcattctgactntgtgaagttacattgagtccttcatcacacaactgactgatgctgatcaagttcgcagtcagtcccttcaccagcagtact

SEQ ID NO: 7510 - DNA, 269 bp, Glycine max
tacacagggatcaactgcattaaccgcataaccatatgagagcaatgactgtgacgcgaacattgataatactattggacggaaaagcttgttccaaaccataggaggaatcatttagtttgcaaaccataggactttgaaacacttaagacaaagtgtatctggaagcatcacatgaagtagcttcttcaatgtcaccatttagaaaaacaggcttaacatccatctgatgtagctctaaatcacaaggagctacaagtggcattatt

SEQ ID NO: 7511 - DNA, 317 bp, Glycine max
  unsure (1)..(317): unsure at all n locations
tctaaactntgtacaagaatgaagctctgataccacttgttttcaagtggcctcagatatcttaagaaggtggggttgaattaagatattccaaacttttctcctaattaaaaatctatcttactctttacttaagttatgaattcccttaatgacacatcttcttaaatattaattcaaatgaagcaacttgaattatgaatattaagcaataatcaataaaggagattaagggaagagaaaatgctaactcagttttatactggttcggccacacccttgtgcctacgtccagtccccaagcaacccgcttgaga

SEQ ID NO: 7512 - DNA, 242 bp, Glycine max
  unsure (1)..(242): unsure at all n locations
atatcgttgctagcaagcagtatatcatcgacatataacaccaagaatgagtatttactcccgctaaacttgtggtatacacaatcatcaactgcattttccgcanaaccatatgaggtaatgacttgatggaacttgtaatactattgacggaaagcttgtttcaaaccatagatggatttattagtttgcaaaccataatttgagtcacttaatacaaagttttctggttgcatcatatg

SEQ ID NO: 7513 - DNA, 416 bp, Glycine max
agctttctgcagggaagctaagtgtgaagtatgcaatcctgcataggattggcactgccaactgggtacccaccaatcatacttccactgttgccacaggtttgggtaaatttctgtatgctgttggaaccaagtccaaatttaattttggaaactataattttgatcaaactattaagcattcagaatcttttgctgtcaaattacccattgccttcccaactgtattgtgtggcattatgttgagtcaacatcccaatattttaaacaacattgactctgtgaagaagagagaatctcctctatccctgcattacaaactgtttgaggggacacatgtcccagacattgtctcgacatcaaggaaagctgctgcttcacgtgctgtatccaaggatgatttgattgctgaactc

SEQ ID NO: 7514 - DNA, 356 bp, Glycine max
  unsure (1)..(356): unsure at all n locations
ntgaggaaattcaaacgaacaatacctttgactcggatgtcggattgagtcacgtaatatctcgagacgcttgaaattgaataccgaagctctgagcaaattcaaacgacaataactctttactcggatgtcggattgagtcacgtaatatgtcaagacgctcgaaatagaataccgaagctctgagcaaattcaaacgacaatacctattgactcggatgtcggattgagtcacgtaatatctcgagacgctcgaaattgaataccgaagctctgagcgaattcaaacgacaataactttttactcggatgtgcgattgagtcccataatatgacgagacactcggaattgaata

SEQ ID NO: 7515 - DNA, 320 bp, Glycine max
agcttgattatactgtagcggcacctaggtctctaggcgtgatcccggttatatgtgtaccctgcgtgaaagtggcatgcgctaagtcttgcacacagactacaagccgtagacaacacttgcaaaacctgtggtgccgacagagtgaaccttctcccattagaggcgtggcgctctctgaccactatacaagacggagacctcgtttgccaactgcattaacgaatccgtcaacacgaacaccttgctgacgtaccgcccgatgctctgggatgctgctagacccattattgtcaagtggatgtcttgcacgcgcttat

SEQ ID NO: 7516 - DNA, 347 bp, Glycine max
tgtctctcaacactacaaagctattcacctttaatccttttgtaaagatatcttccagctgcatttcagtgctgcaatacctcaaatccagctgcttcttgctcaccttttccctcagaaaatgaaatctagtctcaatatgttttgatcttccatgtgctactggattcatggccaaactgatagtagatttgttgtctacatacaatctaactggcctctgaatttccaccttcaattattcaagcaagaagtccaacccacaaggcttgacatgtagcatagcaagatgctatgtactctgcctcacatgaggataaagccaccacttgttgtttcttggaaca

SEQ ID NO: 7517 - DNA, 389 bp, Glycine max
  unsure (1)..(389): unsure at all n locations
ntagcaactctttctttntgtttagtcaaaacctctaatgctcttaatctctcctcatctaaatcaaccaactcatctaacatcattttccaataatggtcgattggaatgtccatttgtttttgtaccctggctgattgcaaatgtatttcgaccggaagtacagcatcatgcccataagtcagtcgaaatggggtagtattagttgattccttangagaatttctacatgcccatagaacttgatctaacgttttattccaatttcttggcttttgggcaatgtgttttttaatcaagttaattacaatcttattggctgcttcgaacctgaccattgcttgcgcgtaatatggtgttgaggttaataatcgaaagccagttttttg

SEQ ID NO: 7518 - DNA, 415 bp, Glycine max
agcttgtcttaaagaaaatgatagaccaatatttgtatcttggaattggctaattaaaaacaagtggagtggttcaaaatttcaggtaaagttatcttattattttgaacataattttttaatagttttatgcttataatataaaatcatttatactttgatgtaagaaagaagtttgacaaacaaagctaatcgaagcaagtaagaaataaaatcaattattggcacaaaatcaatcatgccaaaggcatttgaaatggtaacatcttttaatattttatattcatttttttacaagttatataataataactctttttttattttgcgaattttttatatgatatatgaaaggttggtgaaatttatataaaggcatcatgccttacattatatatggtttatattaattaaa

SEQ ID NO: 7519 - DNA, 400 bp, Glycine max
agcttcttatctgattctctctgaaaatatattttcagatttgttttcattcttatgtgaccaaagcacagcttcaaatttggccactttagatttatcacgcaatcaaataaaggggcaactgccagattgttggaaatcagtaaagcaattactgttccttgatttaagcagcaacaaattgtcagggaagattcctatgtccatgggcgcccttgttaatatggaagccttggttttacgaaacaatggtttaatgggtgagttgccttcttctttgaagaattgcagcactttatttatgctggacctgagtgaaaatatgttgtcgggtccaataccatcatggattggagaaagtatgcagcaattgataatcttgaacatgcgaggaaatcac

SEQ ID NO: 7520 - DNA, 417 bp, Glycine max
  unsure (1)..(417): unsure at all n locations
tatagttattggagggagaataaaacaatccaaaatcaattgtacccttcaagtaacgaagaattctttttgcggctcttagatgaggagaggtaggagccttcgtaaagcgacacacaactcccaccgcatatagaatatcgagccttgtattggttagataccttaaacttcccacaagactcttagagaccatggagtctaccttctctccttcatcaaactttgataacttcaagccaccttccataggtgtgttcacgggattgcaatcaagcatattaaatttcttcaacacttcttttttgtagctgtcttgtgagacaaagataccattctccgtttgcttcacttncattcccaagtaatatgacatgagtcccatatttgtcatatcanattcacgagacatgaact

SEQ ID NO: 7521 - DNA, 358 bp, Glycine max
  unsure (1)..(358): unsure at all n locations
tactaagctgcttacgtatcttgttaatcaattctgcaacctcttcttctctgatgagactaagtgactgcacccttttggggctcagaagctcaaggacacatatttttcttttgtgtttccagctntctccataggatgcaaaaccaatgtcattacatccatacagcaaggtttttgctgctgtggttttgggtcggtttgagaaagttatgtcgtgagttttcatgatttccctgaccgcgtctggagatgaaaccaccaaggctcgagtctgccccaactgcaacaacatcagagaaccatgcttttgtgagagggttctaagagaatggtatggcaatttgcttagttgatg

SEQ ID NO: 7522 - DNA, 308 bp, Glycine max
cgcttgagccaattcaaatgacaataactgtttactcgaatgtctaattgagtcccgtaatatatcgagacgctcgaaattgcataccgaagctcttagtaaattcaaacgacaacaactttttactctgatgtccgattgagtcccgtaagatatcaaaacgctcaaaatggaatgtggaagctctgagcaaattcaaacgataataacttttaactcggatgtctgattgagtcctgtgatgtatcgagacgctcgaaattgaataccgaagctctgagccaagttcaacgacaataactttttac

SEQ ID NO: 7523 - DNA, 347 bp, Glycine max
agcttctgtattgaatttcgagcgtttgttcatataacaggagtcaatcatacatccgagttaaaagtaattgtcgttcgaatattctcagagcttccgaattcaatttcgagcctctcgatatattacaagacttcattataaatccgagtaaaaaagttattgtcggctgaatttgctcaaagctacggtattgaatttcgagcgtcttgatattattaaaggactccatgagacatccgagtaaaaaatttattgtctgtagaatttgctcaaagcttcaacattacatttcgagcgttgcgatatattaccggactcaatccgacagtcgataaaaaattact

SEQ ID NO: 7524 - DNA, 337 bp, Glycine max
gggatccttgagtcacctgcggcatgaagcttcttacatagtccgcctttgctttatcttctttatgcttaaaaacagaaacattaggcataggcaaaagatcaagaggagttagtgggttaaaaccataaacagcttcaaaaggagaacaattagtggtgctatgaacagctctattgtaagcaaattcaacatggggtaaacaagcttcccaagtttttaagttcttcctcaaaactgtcctaagcaaagttcccaaagtcctattaacaacttccgtttgtccatcgggttgtgggtgacaagtgtgtgaaaataacaatttagtgcccaactt

SEQ ID NO: 7525 - DNA, 403 bp, Glycine max
  unsure (1)..(403): unsure at all n locations
agctntgcataccccgaggatccattatgaaattacttgtgaaagagagccatgagggtgggctcatgggccactttgggatagacaagacccttgtcttactcaaagaaaagttttattggccccatatgaagaaagatgtccataagcattgcactaggtgtgtggcttatttacaagccaagtctagggtgatgcctcatgggctatacacaccattacccatctgcacccgtggtagacattagtatggactttgtccttgggcttcctataatccgaagaggtgtagactctatctttgtggtggtggataggtttagaatgataaaagtggtggataggaactaaacttcttttctctaccacttgtcatccacaaactgatgggcaaacaaaggta

SEQ ID NO: 7526 - DNA, 338 bp, Glycine max
  unsure (1)..(338): unsure at all n locations
agcttagaggtttgtctagttctcatcttggatgattcttccgagagttgagggatttcanggatggtcgtaaactattaatcttacttaataattcaatgttgctatcacctatctcctccctaggggatttttgtttcctaagctctctaaatttttgtttggctttttcgctaacctttagagtgcgtttggataaagaattttaactgaggaaagtaatttattagagaatttgaacttctgtaatttagaattcattgtttggatgctttttatgaaanattaaaattttggattttaaacagaatttaaacactanaatctggaattcaatt

SEQ ID NO: 7527 - DNA, 406 bp, Glycine max
agcttccttgagaagctagaggggtgggggacacacacccctccaatagctaagctcacccctttgccaaaatacttgaaaatacaagaaagtctctattacaaagactacttaaaatgccctaaaatataaggctaaaatcctatactactaaggtacccttaacttgtagggcagggtgcccttaatttgtagggtaccctacaaacctaaaaatgccaaaatacaaggcccaaaagaaggaaaacctattctattatttacaaagataagtggctcatacttagtccatgagcctaaaatttaccctaaggcacatgagaaccctaaggctttctcctgcatctttggctcaatcttcttgtagtcttctatccaatgcccttaaggtaggattgcatcatcc

SEQ ID NO: 7528 - DNA, 380 bp, Glycine max
  unsure (1)..(380): unsure at all n locations
tatgctacaaacattataatagacctcctcagcaacttatccaacaacaacagaataattatgacttttcaagcaatagatacaatccaggttggaggaatcatccaaatctgagatggacaagtcctccacaacaacaacagcttgtccctccttaccagaatgttgctggtccaagcaagccatatgttcctcctccacaaaaaatacaaccaacaactgaggctcctcctcaaccttccttagaagagttagtgaggcaaatgaccatccaaaatatgcaatttcagcaagagacaagagcctncattcagagtctgacaaatcagatggggcagatggctactcagatgaatcaagcttagtcccaaaattatgac

SEQ ID NO: 7529 - DNA, 396 bp, Glycine max
tgtaagggcttgggtggcaaatgatagtgagactcaacttggataccaaccttgtgctacaacaattgcaacaagacccaccatccacaatatgagaacaatttttgtttaaaaccttgtatcttgtatgaaagatgttctctctttgggtttgggttaggtcacaggattgactcccaaggagccttctcaccattagaagatcaccttcttcaatattctcatcacccttggtttcaccctcacttccacttgaggaaggagaagaagtttcctcctcttggctactatagatgtcttgacccctcatgatcatggttttctttgtggggcattgagaagcaatttggcctttcccaatacatttgaagcacttgatgttactagttctatctt

SEQ ID NO: 7530 - DNA, 386 bp, Glycine max
  unsure (1)..(386): unsure at all n locations
ntaagaaaagtcaaacgacaataacttttaactcggatttccgattgagtcccgtaatatacgagacgcttgtaattgaaaatagaagctctgaacaaattcaatcgacattaacttttgactcggatgtccgattgtgttccgtaggatatcgagacgctcgaaattaaaacggaagctctgagacaaatcaaacgacaataacttttactcggatgtctgatcgagccctgtaatatattaagacgctcaaaattgaaacggaggctctatgaaaagacaaacgacaataactttcgactcggatgtctgattaagtcccgtacgatatcgagacgctcggaattggaaacggaagctctgagacaaatcaacgacaatacttt

SEQ ID NO: 7531 - DNA, 385 bp, Glycine max
  unsure (1)..(385): unsure at all n locations
agcttgttagcttgatgacttgtcagaatcaatttgttgactagcatcaaatcagagaattaaacctggacatcttttagaaatgcttgctgaattaagacaggcagaaatctagtgtctccatttgggacaaaaacccattctttgcagcatataatccaaaaaaacccatgagactgagtcataggccttttcaaaatccaccttgaaaaccatagctggccttttgcttctacaagcttnctcaatcacctcattaagaactagtatgccatgcaggatgtgtctgttttttatgaaagctgtctgcctctcatcaataagaccaaatatcacttgtctcaatctatttgctaataacttagctatcaccttgtacatacat

SEQ ID NO: 7532 - DNA, 202 bp, Glycine max
tccattgctcaatttcgagcatctcgatatattatgcgccttaataggacctccaagtgaaaatttatgaccatttgaattgctcaagagcttccattgttcaatttcgagcgtctcgatatattatgcacctgaatcgtacctccgagttaaaggttaagaccatttgaaaatcttagagcttccattgttcaatttcgag

SEQ ID NO: 7533 - DNA, 371 bp, Glycine max
atatttcaatttttattaaattattgcaataagaaggaaatgttttgtaaaaataaatactactaaaaattctattattaatataattaatattgatgttatgaagatcaattttctcctatatttaataccattaattaataattaatttataggatgaaatatttacaatgttatctaattatttattttatttttttaaatacataactcacattaaattaaaattatgacagtaaaaaggtgttctcttattgcttttagaattttaggtttgaaattatatcgacttaataaaaatataacaaatttaatatattgctgaaactaatttcccgtattccttacacactttggtatagaaactttta

SEQ ID NO: 7534 - DNA, 365 bp, Glycine max
ttatcaaatggatttaaaaagtgcattcttaaatggctttattcaagaggaagtatatgtagatcaaccccctagatttgaaaactcgggcaagcctaatcatgtttttagattaaaaaaggcgttatgtggcttaaagaaagcccctagggcttggtatgagcgtctgagtaagtttcttttagaaaaggatttcttagaggcaaagtagaactactcttttcataaagagaaaattacatgatattttattggtcaatttatgttgatactattatttttggatctactaatgaattattggcaaggaattctctcatgacatgcaaaatgagtttgaaatgtcaatgatgtgagaacttaat

SEQ ID NO: 7535 - DNA, 241 bp, Glycine max
ggggcacgaaatttatgcctcaaatgatgtatgaactttgaagtgtaatttctcaaatgatcgaatttgaaaaattgcacacacaagacctttatttatagcctaagtgtcacacaaaattggaggaaaatttgaatttacttgaatttgaatttgatttgtggagccaaatttggaaccaaaatttcactattatgatagtgaatttcagctatggtttagcccactaatccagatcaag

SEQ ID NO: 7536 - DNA, 312 bp, Glycine max
ttatcatagattggcatgttattttctttcatttgtgagccctaaagtttggggtatgtgaattttgtgaatttggttggtcaaggccctcaggtcattgttgtaggacctactgattctggaaagagtaccttgtcgaggatgcttcttagtagggcagttaaacaagggtggaagcctacctttggtgatctggatattggccaagggtctataacaattcctaaatgcattgccgccactccaattgaaatgtcaatcgatcttgtggaaggcattccacttgaaaagcctcttgtttactattatggg

SEQ ID NO: 7537 - DNA, 322 bp, Glycine max
ttcccccatcgcccacgaagtcacgcacctcttctgggtttcctttcaaattcacgcagacgaagaatacaatgcaactgtcaacaaaaccatgctactcaaccttctaactgccctgaaatctttcacgacatcccggttggcccatgtaacggtccaaaccggaaccaaacactacatgggcccagttttcgacccggttacttcacgcaacttatctggcaccacccaccctttgacgaaaacatgccacggctcccttaacaaacttctactacgcgctcgaggacctggatgcttcttagcgccctcgctgacgtac

SEQ ID NO: 7538 - DNA, 452 bp, Glycine max
actcagcttgatgatttctatggcatatgaacaaccttcaaaacatccattggcatcttttcgtttcaaatggtgtacaaaaacgtgtgctatctaccaatggagttagaactaaaaactcattatgtgaggattgatgtgccattattttctcctatttcttaaccctttttgcaccattttaattactgatttgtcttaattggtatattaattatgcatttttatcatttgggtctactggattaattttgtgttttaattaatttcacgagaattataagcaattgggcttgaatccaaaattgggcttagacttgaagaaagcagactattttattctaccaaattttatcttatcttgattttatcttatctaaatattatttaaaattgatctcatctagatattatttcatctaaatctatcttaactaaaattatttatttat

SEQ ID NO: 7539 - DNA, 475 bp, Glycine max
agctttctatctcttctttaataaagatttggtggtagagaccccaactagtggttctgtgttaacttctaatgtgtgtttggattgtcctgtggaagtttctggtaaaataattatgattgatctgatttgtttgcctttgagccaaattgatgttattctaggaatggactggttatcttccaaccatgtcttgttaaactattttgataaaactatggtgtttgatggttttggagtgagtaaagatatgatgttcatctctaccaaccaagttgtgtgatgaggacatgaccaagagcaagggcaaggatccacttgaaggacttggaggacctatgacaagggctagagcaaggaaatccaaaaaagctcttcaacaagtgttgtccatactatttgaatacaagcccaagtttcaaagagaaaagtccaaggttgtgagttgatgagaatcctgaaactggccaaatac

SEQ ID NO: 7540 - DNA, 608 bp, Glycine max
taaatgacggcggcgcacctcccgacatccgattttttctcattgacgctatgctagatacccagacatcgtcattaacctcccacccctctcacaacacttcagcagcgcgtaaagcttatcagctaccctaatctcattagtagaagaatcttaggtctgggactgatgttgagactgcttggaaagatggaaaagggtgaaggatatctgttataattgttataggtggaaaaaaatgctaaaattaatagaatttatgtgcaatcagctttttttttcaaaggatacatattgtccagtcaggtatattatctactctactgtgctcatctttatcaaacagaacatgaaactgcaattttaagtgagaaaggccacgaatatatttcctaacacatgggcaaacattgtatatatttcataaaaattatcgcgtataaaaatgattgtcattagagtggtcgtaaataacaggaattctgatccgctgatattatgtataatatctatgaacaatacaagtgtttaaaaaaatattaatgatgctagtattaaaatttaaaaatattactgtcttttatcatttgattaatgattttcaatcc

SEQ ID NO: 7541 - DNA, 543 bp, Glycine max
agctagacttaccgctgatgatgctgctatgatttcagcctcaacaggggattgtgctacaatctcttgcttctatgtgcaccatgagaaaacccctaagcctaggctgaaacagtatcctaaagtgctcttcatgtcatcaacagatacaacccaatcactatcagagaatccatacaacttgaattcttaacacttcttaaatttgacaccataatctacaatgcatttcacttgcacagtgcacaaaacgagacaagagacttacaacaaatagagtgtctggccttgttgcagtgagatacattagacatccaatcaagctcctataatatccttcatcaattttatcagcaccatcttgcttgctgaacttctccttttgattcataggggagctaacagatttgcattactcccatttgaaaacttctttaaaatttcttttgcatatttctttgacagaaaaacactttgttctaactttgcttgatctcaaatttcagaaaataagtcatgagaaccagatcagtcttttaaaag

SEQ ID NO: 7542 - DNA, 432 bp, Glycine max
ttaaagatattcaagatggattttcattacagtctataaagtcttagaaaggatatatttaataggaagggaattcccattgaagtaacaaaaggtttggccaagaaaaataagttaaaaagtcttttacaagaaatttactctcttgtgatcgattaccaaaggatgtagtcgattaccagtggccacaacttgatttacacagctattaaaatttgaattcaaaatttgccttgtgttatcgattacacatatatggtaatcgattcccaccgtttctgaacgttttatttcaatttttaagcttgtaatcgattacacatatactggaatcgattaccaaaacagagtttcagagaatattctcaacagtcacatctttttatgtggttcttgaatggctatcaaaagcctatatatatgtgacttgag

SEQ ID NO: 7543 - DNA, 468 bp, Glycine max
agcttttattatgttttgtgaatgatctatgacattatgttatttatttattctttgaacattagttatgttttaagtatttggtacttagttaattatgactgatcttggtgtctttattttgcacttagatgcttatgttttatacttagacttggttattttgtgatatatgactaagtggtttgcatctcaatttggttttattaaaattatgctttatgtatgtttttagaatcttttatgtttgttttacaaattatgctttgtgtatgattaaattattcatgttttacgcactttggcctatttgatgttgccaaagggggagagaaaatgggtattttagaaatcaagatattatattttcaaagctttaaaattaagcataaattcaaaaagaaagggggagaaagagattagtgaactgtataacaaaacttgtatgtattctcttgatttcaggat

SEQ ID NO: 7544 - DNA, 525 bp, Glycine max
agcttttaattaaagaataattccatgctcatgggtgatgacatgaatgcaaccatagtaatcagcaacttgaatgtcatggattgagcaaatgttacaatgagtaccattgttggtatgattttttttttcaaccatttttctatactttactattgctatttaataagcaaatgcatgtttttcttttcatttgtacagcatgttctaataatattatggttggctttgtaggtggggatggggatgtttatagtccaagatatttgcttccaaaacgggtaggcccacgtagaaattgcaagtagtagctctctacttatgcatagatatatccatcataaaccgttgtggcattctgggttaacaagacattctttattccaatggaagagacaaatttattgagactcctttatcaacaataccactgattttatctttgaaacgtatttgttgtgtttcaaaattatctttggagatgtagttgttgttttaatgggactttttaagtcgccatggtaa

SEQ ID NO: 7545 - DNA, 484 bp, Glycine max
tcacgatatactacgggacacaatcggacatccgagtttttattattgtcattttaattttctcagagcttccgttttcaattacgagcggctcgatatattacggggttgaatcagacatccgaggaaaacgtttttgtcgttagaatttgctcagagcttttgttttcaatatcaagcgtctcgttatattacgggacttaatcgaacctctgagttaaaatttaatggggtttgaatttgctacgagcttctgtttccaattacgagcgcctcgatatactacgggacacaatcggacatccaagatataagttatttttttttgcgtttgctcagagcttatgttttcaattctgagcatctcgatatattacgagacacaatcgtacatccgagtaaaaagttattgttgttagagtttgaaaagagcttatgttttcaattacgagtgtctcaatatattacgggtcacaatcggaca

SEQ ID NO: 7546 - DNA, 479 bp, Glycine max
tctggtgggacatcttgacttgctgtccaatctgacattcaccacagattctgccttcttctatttccagattgtaggacctcggttgttgtcttatctccaccataatggccgccacatggtgagtagggacaatgccataatatgttcttggcctcctcctttgtcacacatcttctgagaagattgtcagctcctatcttgaacaagtatggatcatcccatatgtaagatcgagcatcatgaaagaatttattcctttgctggcaagtcaggtacttccgaatgattcccgctgctttgaagttggccaaatcaccaaaccaaggtctttcattcaccatgaacatggattcatcaaggaattcatctgtgatttatgcttcttttgaagtgacttactcaataaccaatcatgataagtggcacgctacaacatattcaaaatcctttttatctccgataaccaaatcaaattc

SEQ ID NO: 7547 - DNA, 437 bp, Glycine max
agcttatatataacaactaaaatataactaaaaatttaattaaaatatctgtcgatttttttttgattaaaatatattgatagtgtaaagttgttttttaaaattattttaaaagttgtattttttggtacatagcatgaaacttaaagttatatttagaataatttttgaagcgataaaaaatgattatttttctttatagaaaatgagtcggctcacataaatatttataaaatttgacagttgcactgtgatattgcatatagtagctttttaacccagtttaattatttagatttggatgtggtcctctgatttccaagacccactgtattgtttccctttgtactcttctcccttataacctgcctgcctttttatttttaattccaaccatttattattaaatagcgctccccctccccattttttttttc

SEQ ID NO: 7548 - DNA, 443 bp, Glycine max
aattattagtgtgggttggatgttgaattctggttgtacctggtgcggagatgatggtacagcgggtgaaccataagctgaagtttcttttggtgaggtagccctggaaaagcagagcgtttggaatgatttcgtaaatctcagagaactattgggaaatgctggtgaaaacacgaatgtcacgaaaatataaatttgaataacgaatgtacagggccgtgtgaagcaacggtcgaatatgccttggttcagtagtgaacgcgctattaatgataagtgattcgtttgggcacgttcagatatcactagctgctacaattactctagcatacaaatgcccagcttgcccctcatattttcaaactgatttgcatccacagcctttgtgaaaatatctgctatttgatcctcagtggcaacatgcttcagtgcgatcactttat

SEQ ID NO: 7549 - DNA, 555 bp, Glycine max
agcttgtcaggttcagtttcaattaagctcttggggcatcctatggactgagcgaaaaggctcgggtcatcaaatactgcacatcttttaaagcacaaaacgaggatcggaacctcaaccctacgttctttttaaaagactgcaatgagaaaattacagaggacaggaatccctaggggaaaccaagaagaacacacaaaaataaaaacatgcagcgacttcctcaattgccccagatcttaagcatattatcgcttgacaacgtcggagttcacgggtgaaggtagctcctcgtcatccatgttggcgagcaccagggcccctccggagaaagccctttttacaatgaaaggcccttcatagttcggggcccactttcctctgttgtctttcagagcttgggaaactttcttcagcaccaagtccccttcgctgaacctgcgcgagcatacctcttgtcaaaagcgttcttcactcattttttatataaacgcccgtggctcatggtggccaaacgcttgccttctatgagattaagctgatcgaaacgtgcct

SEQ ID NO: 7550 - DNA, 458 bp, Glycine max
agcttcaaaggtctctatatggcctgatttttgctaatagagcatggtttgcaagattatcatcttttctgatttcccatggatacaagcaatgtacttctgaccattcttttttcattaagcatggttgcaacacaattgttattttgctggtttatgttggtgacattgtcttgacaggcaatgatttgtctaaaattcaaagaattacaaatctacttgacaatgctttcaaaattaaggacttaggagactttaagtactttctggggtttgaggtagctagaagctctattggtataaatctatatcaaagaaagtatgcactggacattctcaataatgttgacatgcttggttctaagccacgttctacaccttgtgattacacccaccaacatcaacactcatggtcacctattttagcagaagatgtttcctcttataggagattaata

SEQ ID NO: 7551 - DNA, 370 bp, Glycine max
tgaatcttctaccccatttctgacagacaatgggtgtgttcaccttaagtggttcctaagaagacatgcctcacagtgattaagaatgagaagaatgagcttatccccacaagagtgcagaacagctggcgagtctgcattggttatatgaggctgaaccatgtgaccacaaaatatcattttcccctgccattcattgatcaaatgcttgagcgctcggcaagttagtctcattactattttcttgaagggttttgtggttgtttaccaagtcatattgctcctgaggatccagaaaagagcatattctcctggtcctttaacgcttttttctattagaggatgccctttgggccatgcgacgcccctg

SEQ ID NO: 7552 - DNA, 354 bp, Glycine max
catataaaacccaagacccttaagggctttgctgataacttcttcccggtccaagcttcaattggaggcttggcttttacaaacttaattggacatttggtgaatatggaaataacaggggaaactggttcaacccaaaatggggtaaggaatcccttttccttgagcatcgatctagccatctccataactgggcgaatctttcttttggacacttcattttggtgaagagaatatgccactggaagttggctcttaatggcttcatccttaccaaatctttcaaactcgcgagagggggactctttgccgctatcacttcttaatacttttatccattttccactttgattt

SEQ ID NO: 7553 - DNA, 458 bp, Glycine max
agcttgttggtggcaaagtcaaaatctaattgaaggtaaacttgaatcaacctgtagctagctatttttgtattcattgtaactaacggagattctaaatttccacttaatatgtgaagttgtaccttttctgagaccttattgctactaccatttagtagctctggtgccatccaaggtagagttccacgaacaccaccagacaccaaggtatttcgcttaatctttgataggccaaaatcaccaacctggtgaaaagcaagtttcttagctttatcacaatgaagacaatgtaatagaatgaataatccacagcttgaaaagataccttgcatattggccgcataggatccttcaagttcacgagcaaattgtcacattttaagtcaaaatgcacaatatttttcgagtgtgaatattccattccaaaagcagcatccatggcaattatcagtctc

SEQ ID NO: 7554 - DNA, 558 bp, Glycine max
tttaaagaattaagtgttaagggtcaacctcaatatgttgtcttaacttaatgaacttaatgagtagattgatactttaaagacaaccttagccaaatttgttggagaaacggaaaatcttaacaaattggaacgatatggaagatgtcccatagacaaatctggtcatgggtatgagggacaaatgcatgtgaagtttgtcaaaacagaaaacaagttaaaagttccttttctagcaaaaatattttttcctcctcaagacctttagaattattacatcctgatctgtttggcccaactagaacaacctcagtaagtggaaaaaggtatagactagttgcagtggataattactctagatggacctagattttgttcctagcccacaaggatgagtccttcaatgtcttctttaaattttgtaaaagagttcaaaatgaaaaaagaatgtgcattacttcaattagaaaggacaatggaaaagaatttgaaaatgaaaatttttcactattataggaggatttctatgtgtcttgaaattatgagctactcactcat

SEQ ID NO: 7555 - DNA, 621 bp, Glycine max
  unsure (1)..(621): unsure at all n locations
agttgaagatactccttttgcttctcccattttatgatcgcatgccaagtacttacccattcccattcccttctttacactcaactcatgtaaaaacaattgaggtgtttcgattaaagagaacttcagatttctgaaaattaatggattggcctaggcgttgccattcttcattgtttgctctaaagaaaaggatagagtcatgtaaaacaaaatcttcaaggatgctcttcagctttagacattcttcatcatttgctttaaagaaaaggaaacagtcatctctgaagagtagatgatagatactaagggcacttatgtagatttttaccccatgaatacaacctctaacttctagtgatttgattaatgtcaataagcccttattgcaaaggatgacgaggtagggggacaaagggttcccctatctcaacccgtgacctatgacgataggcctaaccttctcactattaactatgagtgagtagctcataaattcaagacacatcagaaatcctcctataatagttgaaaattttcattntcaaattcttttccattgtcccttctaattgaaggaatgcacattcttttttcattgtgaactctttacaaaattaa

SEQ ID NO: 7556 - DNA, 509 bp, Glycine max
  unsure (1)..(509): unsure at all n locations
agcttctctctgtgtattacctttctctttacgattggtttcttctaaatcgattctttctttctctccttggtcatggctatcattgatgattctaacccctcaattcttcattcatccaataatcctagcattgctctagtttcacacctcacaagtgaaaactacaattcttggaagaaagcaatgcgcatggcacnttacgggaagaacaaatatgagtttgtcgatggttcaattcctgaacctactttgggtcactccacccatgctttatggcatcgcaatgataacattgtctcatcctggctccttaattcgttatcaaaggagatgcaagtgagtatcttacactgttcttttgccaaagcaatttgtgatgatctcacagaacgtttcgaacaacgtaatgggcatttgattttcaacttaagcctgaattgatcactttgcaacaagggtccatgtctggttcttccttttactccaagcttcgttctctctgggag

SEQ ID NO: 7557 - DNA, 497 bp, Glycine max
gctttttaacaaaattttcagttttgttttttctacgttcactatatttatttattggattaggttttcacaacacgtgtcaaattggactgatttgccattctgagagactgcagcgctggaagtcaagaatgagcttgatttcaagaataaggcattatttacccaatgtatagacaacctcttcattcgacagtagtgtaacttaaaatcatcaaggaggtccggggctttactgatttaggtttgaaggaggcaaaggatttagtggaaaaagctccttccgttataaagaaaggcgtttcaaaggaagaagcagagcaataatagagaaaatgaaaattcttggtgcaaaagttgttatggaatgaagtgatatattttgtttcttcccgctttcaatattttagttggtagaaaaatttggattggtgacccaggatactactttgctagtgctgtgttaaatttttttttacacgaactggaatttgatt

SEQ ID NO: 7558 - DNA, 514 bp, Glycine max
agctttagctttgtccccaaggcttcatgtagacttgtccaaaatcgcgaagtgaacctcggatccctgtcagatacaatactagaaggaattccatgcaacctcactacttccttgatgtacaactccactagcttctccattctatacttcatattcaccggaataaaatgagcagatttggtgagtcgatctactatgacccacacagcatcatgtccacgactagtcttgggtaaactagatacaaaatccatagatatgctctcccatttccattccggaatttccaatggcttcaattctcctgatggtcgctggtgctcaaccttagctttttgacatgtcaaacatcttgctacatattcagctacatctttcttcatgccatgccaccaaaaacttctcttcaaatcttggtacatcttagtcattcttggatggaaactaagacgacttttatgcgcttcttccaagatcttaactttcaaatcatctaaatatggcacatata

SEQ ID NO: 7559 - DNA, 493 bp, Glycine max
tatgaatatttcaagaaagacattaaaactctattccttgtatttgttcttatgcttttatatgttgagatttgatagtgttggatcatgaaaacttgtggtgtgaaaagtctcatgatgtgtagataaactatgtgagagttcatgtgattggtgataatgatatgaatagtgaattgatgaagaattgagcaagatgtgagtgatgaattggtgataagttgaatgagatgtatgacgttgatgtcgtgttattatcatataattaactttgttttacaaactaatataaaataattatatgttatgttgagtaactctatgtacatgaagaagacccataaatgctaatttgtgaagtgatgatacatgtatataattattgtggtaagagatgctcataattatgtttattgatggatgtcttacattgtgtttattgatttctcgatgatgatatgagatgtggctgagatgattttgttttattatt

SEQ ID NO: 7560 - DNA, 315 bp, Glycine max
atatcctgatgaaggtgtccatatgttctttttactggactaatacatttgctacccaagtttcatggtcttgcaggtgaaaatcctcataagcatcttaaggagttccatattgtttgtttcaccatgaagccccctgatgtccaagaagatcatatctttctaaaggcttttcctcattctttggagggagtggcaaaagattggctatactatcttgctcctaggtccattttcagctgggatgaccttaagagggtgttcttgggcaaattcttccctgcatctatgaccactgccatcagaaaagacatt

SEQ ID NO: 7561 - DNA, 442 bp, Glycine max
tatagttattggagggagaataaagcaatccaaaatcatttgaacctttcaagtaacgaagaattctttttgcggcttttagatgaggacaggtaggagcctccataaagcgacacacaactcccaccgcatatagaatatcgggcctcgtattggttagataccttaaactccccacaagactcttgaagaccgcggagtctaccttctctccttcatcaaactttgataacttcaagccaccttccataggtgtgttcacgggattgcaatcaagcatattaaatttcttcaacacttcttttgtgtagcttccttgtgagacaaagatcccattctccgtttgcttcacttgcattcccaagtaatatgacatgagtcccatatctgtcatatcaaattcacgagacatggactccttgaagtctgtcaacaaatttgg

SEQ ID NO: 7562 - DNA, 515 bp, Glycine max
agcttgtagggttaaagtctcacgattgttacgtgctcatgcaacaattgttagccgtggctatacgagacatctttccaaacaaagtcaggttagcgataactcgcctgtgctttttcttccatgctatatttagcaaagtcattgatccagtcatgtttgttgagttggaaaatgaggccacaattatactgtgccagttggagatgtattttccccctgctttctttgacatcatgattcacttgattgtgcatctggtcagagaaatcaaatgttgtggtcctgtttatctacagtggatgtacccggttgagcgatacatgaagatcttaaaagggtatacaaagaatctatatcgtccataagcatctattgttgagaggtacattgcagaagaagccattgaattttgttcagaatacttagagaaggctaaacctgttgggcttcctgagtctcggcatgatgacagaagggggggtaagggttcaagaagactgcatgtgatcact

SEQ ID NO: 7563 - DNA, 304 bp, Glycine max
ctcagcttcacaaggagaaatatacctaccatcgagataatgcttattcttatcaatagactgctcagttgtttcatcgtcattctgggcaggtacaaaagccgtggttatgcgatcataaccttttttaatgtgcttgaataaatatttgatggacattgattgattgcaccattctatgttgaggtgagcctgatatttcaacaataagattggattgtatggtaccacgtatctattgtctaggggtattccatttttatctatattttactatcattatgccttctataataggatattc

SEQ ID NO: 7564 - DNA, 598 bp, Glycine max
tgagatgaggaagtgttgaagggtgaaacttcctgcttttattgttgaccacagagtggtacctggagatatgtctcgggggtcaagagaccttggggacgtcaggtggggtgctattgcccaaaaccaagcttgaccaatcccgacccaacccgggcatagtcggtcagtgagaacctgtgatgtacctaagcaggcgagctcctggcagtcaacagatgaaaggaaaacgagaccactaagcaaggaggcttgtggtggctggccagctgtgaattctgtgtaatatgtggattgtggcctctggtaatcgattaccaagggtgggtaatcgattacaaggcttataaatgaagacaggaggctaagatggtctctggtaatccataaccactgggcgtgaaactgaagaaagagcgcgaacttcggtcttagctgaaagaatacacacagtaggttgcttttttgattttcatgaaattacaacctctcctagaaacacacatgaaccagatgttcacctgcatgtgtctaaacatcctccccaatcagcatttgcatatgcagataatttgaaggagtttcttgctggaaaata

SEQ ID NO: 7565 - DNA, 514 bp, Glycine max
tagtaactaactctgctctaactaattgccaactaatctaactagcctctaactgaaaataactaactccatctttttcatacagctgtaatacccccctcaagttggagagtaaatgttaatgagtcccaacttacgggtaaaagaagagaaagccagaagcattaagggctttgtgaagatatctgcaacttgatgttggtatttcacatgaacaagcttaagggtgtttgactgcactaactcacaaatgaagtgataatcaatatcaatgtgtttggatcgttcatggtgagctggattagatgctagactaattgcaaatttgctatcacagaaaagcatggtagatttgatggaaatctcaaagtgcaggagtaatcgtcttatccaaattacttcacttgaaactgaggaaagagctcgatattctgtccttgctgaatatttagacacagtggtttgcttttttgatttccatgatattaaaacatctcctagaaacacacatgaa

SEQ ID NO: 7566 - DNA, 530 bp, Glycine max
tttgtcactccacccataccctggtggatataaaggcttctttgaatcagtttgtaatgtattatacataagggcatgtgcttgctgaaaagactcttgtccgaggtcaccaatcatatgctccaagtgatctcccatttctacatcaaatggttcagattgggacccattctgcatgtctatcaattcaccatgccatatccacgctgtataattcttcttaatcccatcacacaacagatgctctcggttgtcatgcaatatttatcgtatcccattcaaacaatttatacaaggacacaaaaattttccatcctaatccagatgacttctttcgaaggcaaattgcaagaactcttcgacgccttccttatatgcaaggctcatgcgacttttgttcatccaacttcgatccatctaaataataactctgtgatactcacaaaagtattcgatgcatgaaaatatcgctattttattataagtgtggccctatcccattgatgaagacatttttttatggtagcttc

SEQ ID NO: 7567 - DNA, 586 bp, Glycine max
tcatgtttatcaaatttgaaagctttttggcttttgacagaagttggaacatgcagaacaaaagggtgccagcatgttagtaaactttggaggtctttataagaatggtcaattagtttttttttttcactttctttgtcttccttattttgaattattttcaaaagatacaagaccccgataaaatttagaaaaaataaagaatcgaggtaaatagaaaaaaataagaacccaaaaggtcatttggccttttttggttaactttcataattaaaagttagcttttataagacaacaatatgtaattttaacaaaatagtaacttttgtcatttgaacataaggtaattatattctataactatctaccttgtaatatggtttacactaaacatttgatatgattaaaacttatcatattcttatgatatcaaatttttatcttcttctcatatcctattatactttatccaccaaatgagttattagagtaaatgttgtatacaaacgcctaataagattgtatcattatattatcaaataggtttgacaatataaatctttaagccaaatgcattactttttga

SEQ ID NO: 7568 - DNA, 576 bp, Glycine max
  unsure (1)..(576): unsure at all n locations
agcttcgtagaatgctttttagaaaaaataacttgctctaaaataatctactattggtagatttaatctattataagttcatagcctatttttttctattctaattcatattttaatatatattgtgataaatataaatttataaaaaaaattcttggatgccttaattgctttaatttatggcatacaaataaagaaatttcttcaattacttaaatataattataaattttggtttttcgatgaaatgtgaatattctcacaaactttggcccaaatcacttatcgggctattttatgatccatgtcatacttaaagttttttttacctcttaatatattacataggattaaattaaaattcttttatggccctaatatatgagagtactgatacttaatcctaatagacaaatacaactaccgaggtaaatganagagagagaaatgaggggccaattaagaatacaccccaaaagaaatttgcattatgaagaaacaaaactaaagaagaagcaaacaatacttaaatgaatgctagacatgcaagtttccttgtccaaacatcaagtaaac

SEQ ID NO: 7569 - DNA, 467 bp, Glycine max
tgtgctattccaagttcattaatcatacctttaagctatattgcttccttcactccttcagctagggccatgtactctgcttcagttgttgctctatcaaaaactgattgttgatttgttttccaattgattgctgtaccaaacaaagtaaacacatatcctgttaaagatttccttgtgtttacatttcctgcaaaatctgcatctacatagcctgtgattgctgcctcatgtgttgtcttcttgtaccttaatccaactttcaaagatccatttagataccttagtgtccacttcacagcttcctagtgtgcactgccaggatctcccatgaatctgcttataatacttacaacatgagccaagtcaggtttgctgcaaaccattccatacattatgcttcccacaccactggcatatggtgtttgatccattttacaccttttttcagctggttttggtgcttg

SEQ ID NO: 7570 - DNA, 389 bp, Glycine max
tgaagaaacgaatgaaaatgggaacattcatgttatattttctcaggaagaagcatctggaactcgccttctaataaatggaaggacttgcttgcttcatgtgaaatgagtacatttgtaccttacctatgttcattcttccaagaaaagatgtcttttgacttgtaagtaactgggcgtcttctactatgatctttgaattaaaaggaagtgaaggaaatttcatgaccctatattatatatataattgctgctcagaatcttatatcactatatgtttgaaactttttatgtttggaaaacagcacaatgactagtttacacaatcttgcaccttaacatgtatttgcacaatctgaacttgttgagatataatgggaattttattt

SEQ ID NO: 7571 - DNA, 406 bp, Glycine max
ttttagtttcagatgatgcagatgggtttgtagctacctcatgcactcctctaatgactatggcatcatttctggcgctaaactgttgggagttggaagccatcttctcaattaaatttctggcttcagcaggagttatgtctccaagggctccaccactggcagcatctatcatacttctctccatattactgagtccttcataaaaatattggagaagaagttgttctgaaatctgatggtgggggcaactggcacatagtttcttaaatctctcccagtactcatacaggctctctccactgagttgtctaatacctgagatatccttcctgatggctgtggtcctggaagcacggaaaaaattttctaagaatactctcttaaggtcatccccactcgtgat

SEQ ID NO: 7572 - DNA, 457 bp, Glycine max
agcttgaaggtttgtacatgaccaaatctttatttaatcgtctttacctaaagcagtctttgtattcgtttaaaatgcatgaagatagatcagtaggagaacaattggatttgtttaataaactgattctagatcttgaaaatattgatgtcactatcgatgatgaggatcaagctttattattgttgtgctctttgcctaagagttactctcatttcaaagagactttattgtttggaagagattctgtttctcttgatgaagtgcaggctgctctgaattcaaaagaattgaatgaaagaaaggaaaagaagtcatctacaagtggtgaagggctgacagcaagaggcaagaccttcaagaaagatagtaaatttgataagaagaagaaaagccagaaaatcagaagaatggtgaacgaaacatcttcaaaatcagatgttattactgtaaaaag

SEQ ID NO: 7573 - DNA, 429 bp, Glycine max
  unsure (1)..(429): unsure at all n locations
tcaacattcaatnttgagcgtctcgatatatgacgagactttttcagacatccgagtaaaaagttattgtcggtttaatttggctcagaaggttcaacaatttcaatttctagcggctcgctatattacgggactcaatcagacatccgagtaaaaagttattgtcgttttaattggctcaaaggttcaacatttaatttcgagcgtctcgctatattacgggactcaatcaaacatccgagtaaaaagttattgtcgtttgaattggctcagagcttcaacattcaattttgagcgtctcgatatattacgagactcaatcagacatccgagtaaaaagttattgtcgtttgaatttgctcacaggttcaacatttaatttcgagcgtcttgatatattacgggactcaatcagacatccgagtaaaa

SEQ ID NO: 7574 - DNA, 468 bp, Glycine max
agcttcaacatcagaccacttccagggtgttggaactacttcacatggatttgatggggcctatgcaagttgaaagccttggaggaaagaggtatgcctatgttgttgtggatgatttctccagatttacctgggtaaactttatcagagagaaatcagaaacctttgaagtattcaaagagttgagtctaagacttcaaagagagaaagactgtgtcatcaagagaatcaggagtgaccatggcagagaatttgaaaacagcaggttcactgaattctgcacatctgaaggcatcactcatgagttctctgcagccattacaccacaacagaatgggatagttgagaggaaaaacaggaccttgcaagaggctgctcgggtcatgcttcatgccaaagaacttccctataatctctgggctgaagccatgaacacagcatgttacatccacaacagagtcacactga

SEQ ID NO: 7575 - DNA, 484 bp, Glycine max
  unsure (1)..(484): unsure at all n locations
ttcactctaaagtctcatgacatgagaagagtatattaccttgtaccttttattattgactttacttttggcattaactattaaattcattcattcaacctgcatttagtaacttccttgtggatggagccattcttttccaactcattttaccatgtatgaatgaacagtatggaaaggattatgaatatgaagctccagtcaagcttttggataaactgctgcattcgatgccacaatcaccggatgaacaacttgttgtggtctctcaggtatgctttctctcgggctttctttctgttgtttctcctaaggaccttatgatgtctgattaactttttgacacattaaaggtgctggtggctgatatcaacattggatatgaagatattgntaacacccaaggtggtaatgggtatgttccatcttttttgcttttccttgctgacagctatattggcttaactgctcaagtttttactgg

SEQ ID NO: 7576 - DNA, 440 bp, Glycine max
tggaacaaatatttttaattcttggtccccttagagactttgtaaagatgtctgctaattaatcattagaactaacaaattcactaataacattcttaaaaaggactttctcccgaacaaaatgacaatcaatctcaatatgtttagttctctcatggaatactagattagaagctatatgtatggcttcctgattatcacaacatagcttcatttgttgagtatttccaaacctcaattcttgaagatgtttaatccaaatgagctcacatgtggctacaaccatagctctatattcagcctctgcactagaccttgcaacaacattttgcttcttactcttccgtgagacaagatttccttccaaagacacacaatatcctgaagtggaacgcctatcaatgggtgatcctgccccatctgcatcacaaatccaacta

SEQ ID NO: 7577 - DNA, 298 bp, Glycine max
agcttatgaccatacgaactcctttttagtttccgttggtcaatttccagcgtggagatgaggtatgatcccgaatcggacatccgtgcgaaaagttatgaccactcgattttctcgagagcttccgtagctcaatttccagcgtctcgaaatatcatgaccccgaatcggacatccgggtgaaaacatatgaccacttcgagctatcgagagctcccgttggtcaatgccgagcgtctagaagagttatgcccccgaatagaacattcgagtgaaaacctatgaccattcgaattcc

SEQ ID NO: 7578 - DNA, 510 bp, Glycine max
agctttgatggtgttgagaagaaatcacatgtttgtcatcatcaaaaagggggagaatgtgaatgtatgtatacatgattttgatgatgccaaagaagaatctaacaaggctgcttcaaatgataagcatttgcttcaaaaataattcaagattgcttcaacaaacaaagccttgtttcaagattcactaaagaccaagccttgccttaaaacaatgtgctttcaagacatgcaaggctctggtaatcgattaccaggaagtgtaatcgattaccagaagacagggttgagaaatagctgttgaaaaaggttttgaatttgaattttcaacatgtaatcgattaccatatgtctgtaatcgattaccagcaacgaaactttggaaattcaaattcaaaagtcataacccttcaaattataactgtgtaatcgattacacaaacattgtaatcgattaccagtggaaagtttcagaaaatctgccaacagtcacatcttttcattagattt

SEQ ID NO: 7579 - DNA, 567 bp, Glycine max
  unsure (1)..(567): unsure at all n locations
tcccgccaatggtatttaaaatttcatggactttattaatttgtttccttgtattatacgtagatgatattttgcttgtggctaatgataagggcatgctatatgaggtaaaataatttctctcaaagaactttgatatgagggatatgggagagacatcttatgtcataggcataaagatccatagagaaagatctcgaggcattttaggcttgcctcaagaaacctatatcaacaaagttttagagagatttaatatgaaagattgttcaccaagtgtagctcccattgtgaagggtgacaaacttgctttgaatcaatgccccaaaaatgattttgagcgggaacacatgaaaaatattctatatgcttcagcagttggaagccttatgtatgctcaggtttgcactacacctgatattgcattcgctgttggagtcttgggaagatatcaaagtaatccacgtattgaccactggaaagctacaaagaaagtgatgagatatcttctaggaacanaggattacatgctcatgtacagacaaacttgatgtctggaagtgattg

SEQ ID NO: 7580 - DNA, 397 bp, Glycine max
ttgagccaattcaaacgacaataactttttactcggatgtctgattcagtcccgtaatatatcgagacgctcgaagttgaatgttgaacctctagtcaaatgcaaacgacaataattttttcttggatgtctttttgagtcccgtaatatatcgagatgctcgaaattgaatgttgaagctctgagcaaattcaaacgacaataactttttactcggatgtctgattgagtgctgtaatatatcgagacgctcgaaattgaatgttgaacctctgagcaaatgcaaacgacaataatttttttctcggatgtctttttgagtccccgaatataacgagacgctcaaaattgaatggtgaatctctgagcccattcaaacgacaataactttttactt

SEQ ID NO: 7581 - DNA, 408 bp, Glycine max
agcttgtatcaaattcaaacgacaataatgttttactcggatgtttgattgcgtctcgtaatatatcgagacgctcgaaattgaaaacggatgctcgtagcaaatgcaaaccgcaataacttttaactcggatgtatgattgagtaccataatagatcgagacgctcgaaattgaaaaaagaagttctgagcaaattcaaacgactataactttttactcggatgtctgattgagtcccgtaatatattgaggagctcgaaattgagaacagaagctctgaccataatcaaaccacaataactttatattcggatttgcgattgagtcccgtaatatatgaagacgctccaaattgaaaaacagaagctctgaacaaattcaaacgacaataaccttttactcggatg

SEQ ID NO: 7582 - DNA, 308 bp, Glycine max
gacactatataaactcaactttataggctcgagctcggactgaggtgaatactttatatttgatcttggctcattacctgacataggatctctttattttataaggctcaggatggctcatataaaaaaccggcttataccacgaacctatttaaaagtctgcttacagacgtatttgattaatcaatatatttcaaaacctagtgaaatactgactgaaaaaacaaacttacttaattctctataagaaaacgacagatgcaaaaaacattgatgaactaaatgatattgaatacaaatcggtaaag

SEQ ID NO: 7583 - DNA, 562 bp, Glycine max
ttagctagtgtaataaagataccaattatcgatacaaaaactccatatggttgatttatttaaaaaaaaaaaagtcaaaaacaacatgtatggaatagagatatttgaaccaccaaagtaaagaactgttacaaataaggaagaaatgaataggtttaaataggaagcaacataaaataaaccaaatttgagtggtttaaccctatatgctacactcgtttgctacctactattattggttacctgtgatgacagttaattcaaaatgtaatttataatattaatatcttatttttgatttttttaatttgtggttggttgaatactttggtgcatttgtcaagtgattacgattctttgtgttaaaaggtattatcgatcaacttctttatttctaactacaaagttttacatggactgtttatagaaatattttgttatgtattacatttaaaacatattggataagagtgttctcgttagtgacaatttgtcattaattgagtgttaatacatgtcataactatcgataggagtagttgttcttttgcattgcataact

SEQ ID NO: 7584 - DNA, 382 bp, Glycine max
ttgatgcaacatatggagaggttaatgaaacaacgagatgatgcgctccatgagaggttggatcaaatggagaatagagatcataatgaagaagaaaggaggagaagagggaatgatggtgttcctagacaaaaccgaattgatggtattaaactcaacattcctccatttaaaggaaagaatgatccggaggcctacttggagtgggagatgaaaatagagcatgttttctcatgccacaactatgaggaggaccagaaggtgaagcttgccgccacggagttttccgactatgctcttgtgtggtggaacaagctacaaaaggagagagcaagaaatgaagagcccatggttgatacatggacggagatgaaaaagatca

SEQ ID NO: 7585 - DNA, 499 bp, Glycine max
  unsure (1)..(499): unsure at all n locations
tcttagtttcagatgatgcagatgggtttgtagctacctcatgcactcctctaatgactatggcatcatttctggcgctaaactgctgggagttggaagccatcttctcaattaaatttctggcttcagcaggagtcatgtctccaagggctccaccactggcagcatctatcatacttctctccatattactgagtccttcataaaaatattggagaagaagctgttctgaaatctgatggtgggggcaactggcacatagtttcttaaatctctcccagtactcatacaggctctctccactgagttgtctaatacctgagatatccttcctgatggctgtggtcctggaagcacggaaatttttttctaagaatactctnttaaggtcatcccagctcgtgatggaccttggagcaaggtaatacagncagtcctttgccactccctctaatgaatgaggaaaagccttcagaaatatgtgatcctcttggacatc

SEQ ID NO: 7586 - DNA, 600 bp, Glycine max
agcttcatattacatgatatagtcttgagtttattttctaacctataaacttgacatactaatatcatcatattcaaacatattttgacccctaagaaaattcttacctcaagaaagaattattaatctcatcctcttcataggttagacactgatagaatttaaaaaatattgtacacttgtttgatctaatttgaggtaactttgaataaatttagttttgtaaccatttcaatgtattagttgaatcaattcaccaatggaaaaggtcccttgagtcttttactgtatattaacagttattactatagtgtaacatatagtaataactggtaaacttgggtatgattccttgacactttctaaactttaaacttgggtatgaatttggaacatattacaagctaattaataagatgaatgaagaagacttctttttgtattgaagaaacattacatatatgatcattattttaccatagcccattggagattaattcccagagaatacattactagacacctcctttttaatggggatggcttgttctctcctagggaaaatatacagaaaatggtaaaaaaaaggggctattggtg

SEQ ID NO: 7587 - DNA, 522 bp, Glycine max
agcttcgcacttgataagggagaacacatgaacagcgctaggcaatgacattcatggtgctctgaacaaatgtggagtatggaggattgccttgatggtcctcacttaagcaatcatgaagttgagctccaaactcgaaagtggaggacacatgaacagccctaaacaagacattcatgtggctctggaaaaggacgagaatggaggattaccttgaggttcctctcttaggaaatcatggaatacagctccaatactcgaaaatggagaacacatgaacagccctaagcaataacattcatgtggcttcggaaaaggacgcgaatggaggattgccttgaggttcctctcttatgcaatcatggaatacagctccagactcgaaaatggaggacacgtgaatgacaacgcaattcactcacgcggcttccggaaaaagatgaataatggaggattgccttgacgggcccctcttatgcaatcatggaacacaactccaaaactcaaaatggaggacacgtg

SEQ ID NO: 7588 - DNA, 520 bp, Glycine max
agctttaagtgcgattcctttccttttcttgttattttcctcatgttgatttagcctcatgagttccatttcgtgttcctgaagctttccaaaaaaagttgcaagagacatgttagtaagatctcttgattctgtaatagtcgttacctttggttgtcattccctgcttaaacatcttagaactttgttaataagatcttcattgggaaatatctttcctaatgatgcaagatgatttacaatatgtgttaatctcttttgcatatcctgcatagttttattttgattcattctaaataattcatattcttgggttagggtatttattctaaacccttttgcatatgttgttccttcatgggttacttgtaaggtatcccacatttcttttgcattcttgcagttggatactctaaaataatcattcatgcctaatgcagatgtaattatatttttggcttttaaattatattggaccatttcctttcttcttcattccattggttcctaaggttttcta

SEQ ID NO: 7589 - DNA, 505 bp, Glycine max
ttatacaactgaaacatggtagaaaaatagtgttttctcatgcatcgacgttttctaaaaccttatcacccttatagacaattgaaaaaacttttaatggaagtcaagagcacgaaattgcactgataccgttgattggtgagcaggttttccagcgagttgaacacctgaatactatatttggaaagacccaaaagaaggataaaagtaagatttgcatatggaagaagaggtccattttctttgatcttccgtattggtctgatctagatgttagacgttgtatcgatgttatgcatgtggagaaaaatttatgtgacagtgtcattgggacgcttcttaacattcaaggcaagatgaaagatggtctgaatacctgtcaagatctagttgacatgggcatatgatcgcagttgcatccaacgtctgatgggaaaaaaatatacttgcctccagcttgtcatactttgtctaaaaaggagaagataagtttttgttagtgtct

SEQ ID NO: 7590 - DNA, 551 bp, Glycine max
  unsure (1)..(551): unsure at all n locations
agcttcaccagatttggatgctgcaaagcatatatcattccaatttcattgacaaattcacggttcccttgtttcgatttggaggagagctgcttaacagcaatcacatgaccatctgacaacacaccctgtgattaaaccatggcatcggcattatgtttttataaaagtattgtgggataagtggcataccccgatgctttgaaatcatattcggattatatctgatgattaagtttgtttaccttgtatacaggcccaaatcctccttcacctatcttatttgcagggtctaagttattagtagctgctttaatttgtcttaagctgaaataacccgttttcaattctagaagttctgcagcagggaagatttgtaaataaaatcactattctattataaaatcaacaaataagaggggtggggggaggaganaggagacacacccagagaaaatattgagaaagcaacaaatatttgcaacgaccacgaacctaaatccacatttttttttaaatttgtcatcattttggaacttcaaagtaaaatt

SEQ ID NO: 7591 - DNA, 582 bp, Glycine max
  unsure (1)..(582): unsure at all n locations
tgttcgtacatcgttcgcgtgtatgatatccacttgacaaggtttgaagtagaggagaccttcaatcctataacgcaacgtggcggacaaaaatgggcagttaacttgaatggccattattgtcaatgcggaaggtattctgcgcttcactatccatgttcacacattattgcagcttgtggttacgtgagcatgaactactaccaatatatagatgttgtttacaccaatgagcacatcttaaaagcatactccgcacagtggtggcctcttgggaatgaagcggcaattcctccttctgatgaggcatggacactaatccctgacccaactacaattcgtgcgaaaggtcggccaaaatcaacaaggataaggaatgagatggattgtgtcgaaccatctgaccaccgacaaaaatgtagtagatgtggagctgaagggcacaataggcgccgatgtccaatgcaatctgaccgtgggagtaatntatttaattgatttatgtatgttacatgcctgacttgtattgctttaggttttgttcaatgtaattacttcgttggtcttcaataaaatcgtcag

SEQ ID NO: 7592 - DNA, 555 bp, Glycine max
ttgcttctacagataggcctatgggtgttttgaatgcagtcctgtaggcccataatgcatcatccaacttacttgactagtcttttcacgaggaagccacagttttctccaagattttctttagttccctgttggaaactttagcttggccatttttttgtgggtggtaaggtgaggctactatgtgcgtgacatgatagttacctaacaccttctgcagttggctgttacaaaaatgagagccccacatcacttattaagactctaggcactccaaagcgagcaaaaatattcttcttcaaaaacttcaccataattttagcatcactcttcggagttgccactgcttcaacccacttagagacgcaatccatagctacgagaatatattcatttcccaaagatggaggaagaggacctatgaaatcaatcccccaacaatcaaagattcccacttccattatgttttgcaagggaatttcatttctcctagagattcctcccatcctttgacattgatcacaatgaatggcatgttcatgaacatctttgaaa

SEQ ID NO: 7593 - DNA, 588 bp, Glycine max
tgtaaattattgatttaaacattatttagtttattttttcttttaaacataatatacatttatgtaaagtttactttcaccatttagtttgtcaaattatatcaaattcaagttagacaacattattttcaatatttgactcattgtattaagttgaatatgacaattctattattatttgtatctaaagataattattataaaattcaataaatttacattacattccctaaaaaaattataatacataatattttataacattttataatttgatgacaataataatgataaaatgcattaggctagttaactcaactgaaaccttttcaatgaaatttatgtctttaaaatataatatcatattaaatatgaataattctactctcatgtaagtatgatataatatggacttaactcataaaattgtgacttttacattactcaagccttattaaaattttcttgtccaatttgttatattttgttgttggcattgagtcaactcaacttgaacttgataatatatttgtccctctagataattataacattattgtataacattagtgtataacatatattttt

SEQ ID NO: 7594 - DNA, 508 bp, Glycine max
tctaggatgcctattctagatacaaccaaatcaggatgcacactccaaacgaggagaaaacaacatttatcactaaatatgccaacttttgctatagggtcatgcccatcagcctccaaattgcaggcgctacatactagagattgatggatcgaattttcaaacaacagaccggagtctatgttgaccacatggtcgctaaatcttagagcattgcccaacatgtggtagacctggaagaggtgttcggagagctctacaaatatgatatgcgcctcaacccaaaaaaatgtactttcgaggtctgtgaaagaaaattcttgggctttatgatcatgcatcggggaatagaagccaaccccgacaaatgcactgctattttggagatgtgtagtcttactaacgtccaggaaatccaaaagctgaatggaagactaccatccctgtccaggtttcttccaaagcttgctgaaaagtgaagtcgttctacgaattgctcaagaaaaat

SEQ ID NO: 7595 - DNA, 439 bp, Glycine max
agcttcaacatcagaccactttcaggtgctggaactacttcacatggacttgatggggcccatgcaagttgaaagccttggaggaaagaggtatgcctatgttgttgtggatgatttctccagatttacctgggtcaactttttcagagagaaatcagacacctttgaagtattcaaagagttgagtctaagacttcaaagagaaaaagactgtgtcatcaagagaattaggagtgaccatggcagagagtttgaaaacagcaagtttactgaattctgcacatctgaaggcatcactcatgagttctttgcagccattacaccacaacaaaatggcatagttgaaaggaaaaacaggactttgcaggaagctgctagggtcatgcttcatgccaaagaacttccctattatctctgggctgaagccatgaacacaaca

SEQ ID NO: 7596 - DNA, 367 bp, Glycine max
  unsure (1)..(367): unsure at all n locations
actcctttaatgacaatagcatcatttcttgcactgaattgttgggagttggaagccatcttatcaatcagattcctagcctcaacaggagtcatatcaccaagagctccaccattggcagcatcaatcatactcctcttcatgttgctaagtccctcatagaaatattgcagaaggagttgctcagaaatctggtggtgaggacagcttgcacacaatttcttgaatctttcccagtactcatacaagctctctccactaagttatctgatgcctgaaatgtcttttctgatggtagtggtcctagatgcanggaagaatttctccaagaacaccctcttaagtcatcccanctggtaatggacct

SEQ ID NO: 7597 - DNA, 381 bp, Glycine max
  unsure (1)..(381): unsure at all n locations
gtgccaattcgncttcttctttagttttgtcttcttctggcttcaattcttcagtgggctttccttctgtgtccagcatcttgggatgttcccagcctttgatgacagctttccaggttctgctatccagtgatttgaggaaggccaccattcttgctttccaatattcatagttgcttccatcgagaattggtggtctgttcactggtccgccttctttctccatgttcatcagaatttatctccctagatctcactctgtgatttcgagtgttggctctgataccaattgaaattctgataccaggggacagatgtcgtacaggatgtcacgacatcacgcttcagaacatgcagattatatgtgtccgtatgaacaga

SEQ ID NO: 7598 - DNA, 255 bp, Glycine max
  unsure (1)..(255): unsure at all n locations
atctcaaagcttcngtattccaagtcgagcgtctcgatatattacgggactcaatcagacatccgagtgaaaaggtatattcgtttgaatttgctcagaggttcaacattcaatatcgagcgtttcgatatatgaccagactgaattagacatccgagtaaaaagttactgtagtttgaagttgctcagagcttccacattcaatatcgagcgtttcgatatattacgggactgaatcagacatctgagaaaaaa

SEQ ID NO: 7599 - DNA, 265 bp, Glycine max
  unsure (1)..(265): unsure at all n locations
ttactcggatgtctgattgagacccgtaatatatcgagacgctcgaaattgaataccgaagctctgagcaaattcaaacgacaataagtttttactcgtatgttcgattgaatcccgtaatatatcgaaacgctcgaaattgaagaccgaagatctgagcgaattcaaacgacaataactttttactcggatgtctgattgagtcccgtagtatatcgagacgctcacactngaatgccgaagctctgagcaaattcaaacgaca

SEQ ID NO: 7600 - DNA, 363 bp, Glycine max
  unsure (1)..(363): unsure at all n locations
aacataagcacttagacaatgaaggaaagctggagttgctgcacatgatgtccaacgttatgtcaaagaataaaatcgggctgcacaatgcacaaggcaagataaagtgtcaaatgaagaattgaagctgcaggattcacgatgtctgatacaatgtccaggacatcctgcccgaaaatactggagttgctgaaagcattgaagttgcaggatccacgatgtcggatacaatgtccaggacatcctgcccgaaaatactggagttgctgaaagcattgaagttgcaggatccgcgatgtcggatactatgtccacgacatctggcccgaanattctggacatataaatctgttatatctttaa

SEQ ID NO: 7601 - DNA, 325 bp, Glycine max
  unsure (1)..(325): unsure at all n locations
agctttgaatgctctattcaatggagttgttatgaatatcttcagacttatcaacacatgcacagtggccaaggatgcatgggagatcctgaaaaccactcatgaaggaacctccaaagtgaagatgtccagattgcaactattggctacaaaattcgaaaatctgaagatgaaggaggaagaatgtattcatgacttccacatgaacattcttgaaattgccaatgcttgcactgccttgggagaaaggatgacagacganaagctggtgagaaagatcctcagatccttgcctaagagaattgacatgaaagtcactgcaata

SEQ ID NO: 7602 - DNA, 296 bp, Glycine max
  unsure (1)..(296): unsure at all n locations
agctatcgagaatataaaattgtcataacttttcactcggatgtccgattcangcacatcaaatatctagacgctcgaaattgaacaacggaagctctcgagaatttaaaattgtcataacttttcactcggatgtccgattcaggaacatcacatatctagacgctcgaaattaaacaacggaacctctcgagaaattcaagtggtcataacttttcactcgtatgtccgattcacgcgcataatatattgagacgctcgaaattgaacaacggaagctctcgagaaatttaaat

SEQ ID NO: 7603 - DNA, 429 bp, Glycine max
  unsure (1)..(429): unsure at all n locations
tccttctccattcataatttcagcaatatatattatactgtttttaggctngnnagtgggtntggactaatagaaaactgaaaaatacaatacaactaacaaattaactacaacggagtttcactttgagggtgattcattggctaattgcatatcccgggttaaggaaattgccaagtgcctcaaaaaagacacagtattagcgaaacctagaaattgaaacattaaattggggtgagaaaagaaacacgaaaagattagctcaccgcattttgctctactgcggtagtattaggtttatagaattgacttatataccagtgtcaaccaataccaatatccatagtaagtatgctctgatttagatttattagaatttacttntttacctcattntattcattaaaaatgagtngattttctatggat

SEQ ID NO: 7604 - DNA, 384 bp, Glycine max
  unsure (1)..(384): unsure at all n locations
ggagctnttcgactatgctcttgtgtggttgaacaagttactaaaggagagagcaagaaatgaagagccaatggttgatacatgggcggagatgaaaaggatcatgaggaagcagtatgtgccgactagttactcaagggacttgaaattcaagctccaaaaactaacccaaggcaaaaaaggggttgaggagtacttcaaggaaatggatgtgcttatgattcaagcaaagatcgaagaagatgaggaggtaactatggctcgatttcttaatggtttgactaataatatccgtgatattgttgagttgcaggaatttgttgaaatggataatttgcttcacaaagaaatccaagtagagcaacaattaaaaaggaaaggagt

SEQ ID NO: 7605 - DNA, 306 bp, Glycine max
  unsure (1)..(306): unsure at all n locations
tcatcttatagatgaaagacaaatggcttttatgaaggggaggcacattcttcatggtgttntgattgccaatgaggttatagctgaggctaaggctaaaaataaaccttgcatggtcttcaaagcggattttgaaaaggcgtatgattcggtttcttggggttttcttgactacatgttgatgaggatgggcttttgtgaaagatggaggaaatggattaatggttgcctgtccactgcaaccatatccattttaattaatggaagtctgttttttggagatgccacttagcataatgttagaac

SEQ ID NO: 7606 - DNA, 423 bp, Glycine max
  unsure (1)..(423): unsure at all n locations
tatcctatgggattaccatgcacacaacgatcacaaatttaagtctatttagtntatcacttcctaatagattttgtttctcaagttcatgtaatcctctttcactaacatgacctaatctcaaatgccaaagttttgttttatcaatcaatgtattactagctaccgatgcatgtccaacaatagtggaaccttcaagaataaacaagccattacttttattcttgttacccttagctatgattaaagatccatttgaaatcttacgaacgccatttaaaattctagttgaatatcctagatcatcaaacatgtttatggaaataagatttcttttgagttctggaatgtaccttacatttttcagtagatactctctatcatcaaacattttcaatctcacagttccaatgccttgtacct

SEQ ID NO: 7607 - DNA, 337 bp, Glycine max
agctttatgtaaactagatgccttggttttcctggtaacccaactggccatgaataaaaaatctgcacctgtcgccagactctatggtttatgctcctctaccgaccaccacacagacctttgcccttatgtgcaacaatctgaagcaattgaacaacctgaagcttatgctgcaaacatcaacaacagacctcctcaacctcaacagcaaaatcagccacaacagaataattatgacctctccagcaacaggtacaatcccagatggaggaatcatcccaaccttagatggtcgaatccttcacaacaacaacaacaacagacttatttttcaaat

SEQ ID NO: 7608 - DNA, 424 bp, Glycine max
  unsure (1)..(424): unsure at all n locations
actacgcttctacaactaanacatggtagaaaattattgtacactatgcatcggcaatttctaaaacctcatcacccttacagacgattgaaaaaagcttttaatggaagtcaagagcatgaaactgcaccgataccattgactggtgagcaggtcttccagcgggttgaacacctgaatactgtatttggaaagacctaaaagaaggataaaagtaagacttgcataaggaataagaggtccattttctttgatcttccgtattggtctgatctagatgttagccattgtatcaatgttatgcatgtagagaaaaatgtatgtcacagtgtcattgggacgctccttaacattcaaggcaagatgaaagatggtctgaatacccatgaagatctatctgacatgggtatatgattgcagttgc

SEQ ID NO: 7609 - DNA, 387 bp, Glycine max
agctttttgtaagaatggaggagaggattataaatagaatagcacaagtttttgcccaatgaaattttcttgacaaagcaagtgttgaacaaaaactcttagaaagatgttgagaattagtgttaataagttttctgaaattcgtgccatggtcacatatttatagtcatttgatgactcttgaagaaccatgttaaaagttgtgacagttggcaaaaactagtcactttaaaagttgtgactctttggaaatttatttttcaaaaccaatcactggtaatcgattaccattatggtgtaatcgattacatagtttattttatcaaaggttgtgactcttctggtgaagttttgaagtcaacgttcagaactactggtaatcgatta

SEQ ID NO: 7610 - DNA, 319 bp, Glycine max
  unsure (1)..(319): unsure at all n locations
agcttgaagganaactgaatgcattggtttattnggtaacccagctggccttgaattagaaatttgttcctgtcgcaagggtttgtggtttgtgctcctctgctgaccaccatacagacctttgcccttccatgcagcaacctggagtaattgagcagcctggagcttatgctgcaaacatttacaatagacctcctcaacctcagcagcaaaatcaaccacaacagaacaattatgacctctccagcaacagatacaaccctggatggaggaatcaccctaatctcagttggtctagccctcaacaacaacaacagca

SEQ ID NO: 7611 - DNA, 385 bp, Glycine max
  unsure (1)..(385): unsure at all n locations
agcttatgctgcacacatctacaatagactcttctccacctcagtagcaaaatcagccacaacagaacaattatgacctctctagcaacaggtacaatcccgagtggaggaatcatcccaaccttagatggtttaatccttcaaaacagccgcagcaaatacaacagccttattttcagaatgctgctggcccaagcagaccatacattactccaccaatccaacaacagcaacagccccagaaacagaagacagttgaggctcctccgcaaccctcccttgaagaactngtgaggcanatgactatgcaaaacatgcagtttcaacaagagaccagagcctccattcagagcttaactaatcagatgagacaatnggctacaca

SEQ ID NO: 7612 - DNA, 305 bp, Glycine max
agcttatgaccattcgaatttctcaagagtttttgttgttcaatttcgagcgtgtagatgagttatgtccccgaatcggacatctgtgtgaaaagttatgaccattcgattttctcgagagcttgcgttgttcaatttcgagcgtctcgatatattatgaccccgaatcggacatctgtgtgaaaacgtatgaccattcgattttctcgagagcttccgttgttcaatttccagcgtttagatgagttatgtccccgaatcgaacattcgtgtgaaaacttatgaccattcgaatttctcgagag

SEQ ID NO: 7613 - DNA, 358 bp, Glycine max
  unsure (1)..(358): unsure at all n locations
tgaattggacctcggtgtgaaaagttatgaccatnngttantttcgagagcttccgctattcaatttcgcacgtctctatatgtgacgctactgaatcggacatctgtgtgaaaagttatgaccatttgaatttctcgagagcttctgttgcttaaattcgagcgtctcgacatattatgctcccgaatcgggcctccgcttgaaaaattaagacccattgaatttctcgagcgcttccgatgtttaatttcgagcatctcgatatattatcagcctgaatcggacctccgtgtgagaacgtatgaccatttgaatttctcgagagcttccgctgttcaatttcgagcgtgtgaacat

SEQ ID NO: 7614 - DNA, 431 bp, Glycine max
gatcaaaacaattatctaatcattccaatccactcattatatacaattgcttattcaaatcattctcaaacattcatttcatgcaaaacaatccactgcatatcattttcaatcaattcactattcaaacacgctttaggtacaagcaaacaactcaaagtgctgaaatttaaataactgaaattaaaataactgaaatatgacaacgaaatcagctggaaatataaggtgtttaaccttcaccaaaacatcttcaatgactccatatggccttgtgatggagcggtcaactaactggagggtcatgcgtgtgggcattatctctatctctccaagtcgctggcacatggaaagaggcattaaatcgatactagctcccaagtctatgagaagcttgcctacaacaacctcaccaatataacacggtatcg

SEQ ID NO: 7615 - DNA, 410 bp, Glycine max
  unsure (1)..(410): unsure at all n locations
gcttgccaacccatggaagctcctaatatctcccacacnttttggggtgggtttattttggaaggccttgattntctcagggtccacttgtaccccatttctaccaactacaaaccctaagaaaactatattatctacacaaaaagtacacttctctatatttgcatagagggtgtttttcctaaggactgaaagaacttgcctgagatgtcctaagtgatcatttaggctcctactgtacactaaaatgtcatcaaaataaaaaactacaaatctacctatgaaatcccttaagacatgatgcataagcctcataaaggtgcttggtgcattagtgagcccaaaaggcatcactagccattcatacaaaccaaacttggtcttgaaagcntgtttccactcatcaccct

SEQ ID NO: 7616 - DNA, 391 bp, Glycine max
  unsure (1)..(391): unsure at all n locations
ntgatctaacaaataggttttgagtttattgtccaatgtaaagagaagtcttactttataaaagctttaatatgaaataacctattcccacccataatgggtataggtaatccatgatctcaaaccaaccgaaattgacccaattagtttggttcaaatttttttagcttaggtcaaacccaacacaacccaatcctgcctgttcaatttacaagccaagtaagatgttttgtttttttaactcgtgacccaacccgtaacatataattaaattcattatatatataattaaattattaaacacaaaacactataacttttttctaacataatttattaaattaaatcaattatacttttttctttttcagntggtctttatatttttatc

SEQ ID NO: 7617 - DNA, 395 bp, Glycine max
  unsure (1)..(395): unsure at all n locations
tgtgactctnggcaatttctttaaaactagttacttattaagttgtgacttttgaaagaatcttcacaaacaagtcacttagagaattgtgacttttggaaatgtatttttcgaaatcagtcactggtaatcgattaccattaaggtgtaatcgattacacatcaacagatgtgactcttcattttgaattttgaatatcaaaacatttacaagctttggtaatcgattacacaatgtaatgattacaagtattgtgtaatcgattacacaagtttaaaatactttaaaactgtttaaacataagttgtaactattcgaaattgaaatcttaacattttaaaacactagtaatcgattactaccttctggtgatcgattactagagagtaaaact

SEQ ID NO: 7618 - DNA, 439 bp, Glycine max
  unsure (1)..(439): unsure at all n locations
ctcactcttcttagtttcagatgatgcagatgggtttgtagctacctcatgcactcctctattgactatggcatcatttctggcgctaaactgctgggagtcggaggccatcttctcaattaaatttctggcttcagcaggagtcatgtctccaagggctccaccactggcagcatctatcatacttctctccatattactgagtccttcataaaaatgttggagaagaagctgttctgaaatctgatggtgagggcaactggcacatattttcttaaatcgctcccagtactcatacaggctctctccactgagttgtctaatacctgagatatctttcctgatggctgtggtcctggaagcanggaaaaaattttctaagaatactctcttaaggtcatcccagctcgtgatggaccttggagcaaggtaatacaac

SEQ ID NO: 7619 - DNA, 359 bp, Glycine max
agcttatgattccatttcctgggaattcttgtattggatgtttaagtccattttctttcccagcccagatctgtacttggatcatggagtgtgtttcttccacttcctttagtgtggcagtcaatggatccatttatggtcacttcaaaggacagcggggtcttaaacaagaggatcctctctccccttatctgtttgtgctctgtttggagtacttttccagagatatgagcagcctcaaggatgatgccaattttaaatttcatcccaactatgcaggtattcagctatctcatttggctgttgcagatgatattatgcttctatctagatgagatatccattctgtgttaactatg

SEQ ID NO: 7620 - DNA, 399 bp, Glycine max
ggacactatgaaactccgcttatggacatcttgatttcgcctatctagtaagcttttctgttctaagaggaatctgtggaggggtgttaggaagttccacattgcttgtctcaatttttaaggtgcaacttatatatctatttgacaacttcactactaatgtcaattggttttaagctaaaatctagtagctttgtttgttttcagacatctgtagaggggagtgttcggaagtctcagatcacttgccttagttccccagatacaacttatatatatgttggacaatttcaattagtgttattggttttaagctaaaatctagcaattgacatgtatgagacacatggaagagaattgatgaagaggtagcctgcttaaattaaagcacataaatgc

SEQ ID NO: 7621 - DNA, 429 bp, Glycine max
  unsure (1)..(429): unsure at all n locations
ctcacgcttgttgatcatgactactttagactcttctcctttgtcattcatagacaacatttccgatgacatgcggagatgcccaacggttatccgcacttttgtcaactagaggcaagcgagcctgttgaccaagactattttagtctcacacctttgtcatctacagtcggcaagtcagatgacatgcggagatacccaagggttatccacacctttgtcaactacgggcaagcaagcctgttgaacaccgagactttnttagtctcacacacaaaaattgaagaactacgtaggtctgatttcctcatcacaaattgagaatacttaggagcaaaagccctacttttatcgaccaccccacacttttgttaccgtgactcaagagtctggtggcatacgaagacacccgatggttatccgcacaca

SEQ ID NO: 7622 - DNA, 410 bp, Glycine max
  unsure (1)..(410): unsure at all n locations
tctaaactntattcaagaatgaatctctgataccactttttagacaagtggccttagatatcttaagaaggggggttgaattaagatattacaaattatttccccaattaaaattctatcaagttataaattcccttaataatgaacttcttaaatattgattcaaatagaacaatttgaatatgaatataaaacaataataaataaaggagtttaagggaagagaaagtgcaaactcagattgatgtgccatcattttcttctattttctaaaccctttntgcaccattttaattattgattggtcttaattgtcaattaattacgcagttttattatttgggcccattcagactaattgatgtttntaatctaatttcaggaattaatgaagcattgggcttgaatct

SEQ ID NO: 7623 - DNA, 406 bp, Glycine max
  unsure (1)..(406): unsure at all n locations
tgctaacccatggaagctcctaatatctcccacactttttgtggtgggccattcttggatggccttgattttctcagggtccacttggaccccatttctaccaactacaaaacctaagaaaactatattatctacacaaaaggtacacttctctatatttgcatagagggtgtttttcctaaggactgaaagaacttgtctgagatgtcctaagtgatcatctaggctcctactatacactaaaatatcatcaaaataaacaactacaaatctacctatgaaatcccttaagacatgatgcataagcctcataaaggtgcttggtgcattagtgagcccaaaaggcatcactagccattcatacaaaccaaacttggtcttgaaagcagttntccactcatcaccc

SEQ ID NO: 7624 - DNA, 381 bp, Glycine max
  unsure (1)..(381): unsure at all n locations
acgcttncttaagaagagtccgaaggaagcttgttcttagcttttcatacctctctaatagctaagctcacctccttgagatgagaagctagagcttagctacacaccccctataatagctaagctcaccccatgacaaaaaaacatgaaaatacaaaaaaaaggccttactacaaagactactcaaaatgccccgaaatacaaggctaaaaccctatactactagaatggccaaaatacaaggcccagatgaaggaaatacctattctaatattgacagagataaccgggctcatacttagcccatgggctcgaaatctaccctaaggctcatgagaaccctaaggccttcccttggatctctagcccaatctacttgga

SEQ ID NO: 7625 - DNA, 421 bp, Glycine max
gcttctgctcattctggaacttcaagcttctttgatcagtcctaattaaaattttgtttcctagcagataatgcctccatttcttcactgctaacaccactaccatcagttccctctcatatattgacttgacttgagccctgtctgacagagccttgctccaaaaagctaaaggtttctcttcctacaataaaactgcccctagcccagttcctaatgcatcagtttccatgataaaatttttagagaaatctggtagtgccagaataagaagcctcctcattgctgccttaagctcttcaaaggcatgagtagcttctacgaggtatttataaaccaagttagagatagttacaatccaggtatttataaacctctatacagcagaactaactataactaactctaacaaaaagcttac

SEQ ID NO: 7626 - DNA, 435 bp, Glycine max
agcttcacatcagaccacttccagggtgctggaactactttcatggacttgttggggcctatgcaagttgaaagccttggaggaaagaggtatgcctatgttgttgtggatgatttctccagatttacctgggtcaactttatcagagaaaaatcagacacctttgaagtattcaaggagttgagtctaagacttcaaagagaaaaagactgtgtcatcaagagaatcaggagtgaccatggcagagagtttgaaaacagcaggtttactgaattctgcacatctgaaggcatcactcatgagttctctgcagccattacaccacaacagaatggcatagttgagaggaaaaacaggactttgcaagaggctgctagggtcatgcttcatgccaaagaacttccctataatctctgggctgaagccatgaacaca

SEQ ID NO: 7627 - DNA, 397 bp, Glycine max
  unsure (1)..(397): unsure at all n locations
nttatccatggcttcatatggtggtgagcttcttctatactcatcttctacttaaagtgacgtctccattcatctttctccttctccattcctctgcaatcagacctcaagaagcaaaggaatccatggatgaagaagatccaaggcctacaagctccaatggagctacatcatgtggtatcaagagcatcttcgtctaggtgatgttcttttgcttcctctatctttttgttctgtcaactcactataattcgttggtcttcatcttattctccatgtatatcgtccattgtcttgtggtttggttctgcttagagtagattcaattaaatcttagatctacacttgttcttgcatttctatggtacacattttatagatctactcttgaatcatg

SEQ ID NO: 7628 - DNA, 337 bp, Glycine max
agctttggagtttccaagtgccaattcgtcttcttcttttgtccagtcttcttttggcttcaattcattagtgggctttccttctgtgtccaacatcttgggatgttcccagcctttgatgacagctttccaggttctgctatccagtgatttgaggaaggccaccatccttgctttccagtattcatagttggttccatccaaaattggtggtctgttcactggtcctccttctttctccatgttcatcagaatttatctccctagatctcactcagtgatttcgagtgccggctctgataccaattgaaattctgataccaatgccagatgtcgt

SEQ ID NO: 7629 - DNA, 239 bp, Glycine max
  unsure (1)..(239): unsure at all n locations
atctggaacatgtgcatatgctatacancccaaaactntaagatgnnttgataatggtcgccttccactctanngcttctttggcatcttgtcatgaacactcttagtcgggcacctattcaaagtgtagacaatggtagcaactacttctgcccagaacttcttaggcattttcttggccttcaacatgtacctcactatatccatgagtgttctattcttcctttcagttacttcat

SEQ ID NO: 7630 - DNA, 303 bp, Glycine max
  unsure (1)..(303): unsure at all n locations
taccaccggatatggtactttcacaccttcattcacaactnttcctctnttcttctctctagctttgtcacttctactcctctcttcattctatttgttcatcttttcattntatcatttctctttcttntctacttcttttctgggcattaattctttttcttaaccattattgtattcttttcctgatgcttcacttctcacatatcttcatttatcagacctttctttcacagcctcttctggatacacactatctcatcctcactcacaacctctactcttgcatacagcttcattctc

SEQ ID NO: 7631 - DNA, 232 bp, Glycine max
  unsure (1)..(232): unsure at all n locations
tcttctacacttggagtgatcacatgcaatcctcttgaacccttaccacccactctgtcatcatgccgagactcangaagcccaacaggtntagccttctctaagtattctgaacaaaattcaatggcttcttctgcaatgtacctctcaacaatagatgcttctggacgatatagattctntgtattaccctttaagatcttcatgtatcgctcaaccgagtacatccacc

SEQ ID NO: 7632 - DNA, 235 bp, Glycine max
  unsure (1)..(235): unsure at all n locations
gatatcaagtgaatattcattgcctctattcctctnttatgcttgcggtntaccgagtntggaggtcctgttcctcatcgacctgctgaagacttggcattttcagttgcaanggttatacagaaagggggatcatntataaattattacatggtaacttcattatngattgattntgatgtngtatatttaaatattcaactcagtccctttattttgttcctttcagtatcat

SEQ ID NO: 7633 - DNA, 161 bp, Glycine max
  unsure (1)..(161): unsure at all n locations
gtacttacattngaattcctcgagagctgtccgttgtcaatgtcgagcgtctggatatattatgctcctgaatcggactttcgtgtgannaagtatgaccagttgacattctcgagagcgtntggtgttcaatntccagcgtctcgatatgtgatgtgcct

SEQ ID NO: 7634 - DNA, 218 bp, Glycine max
  unsure (1)..(218): unsure at all n locations
tgtgtcatggtcaagaaggtcaatggcaaatagcgaatgtgcaccaactacattgatctanatanggtgtgccctaaagatgcataccctntgtccaacatcgactggctagttgatggagcgtncgggttccaggtgctaagcttctcggacgcctacttcgaatacaaccagatcaaaatgcattctctagacgaggagaanatgacatntatcac

SEQ ID NO: 7635 - DNA, 431 bp, Glycine max
  unsure (1)..(431): unsure at all n locations
ctgcagctgtatgtggttaatgtctaaataaaattttatgtttatgttattgaagaaatctatcagtgaaataaatattttgatatgaatttgtagtatttttaatagatangtgatgtaagattattatgtgtaataaggatgaacgttcacttcatttaaaaattgagacatttatttgaaaatatttgagtcacattatttatataagtgagatntttagtagatacgtcttttttgtggaaaattgaaacgtgagtggaatgtaatgagatgtttgtgttatgatcatattaattaatcatcgagaatgtgaatactattcatttgagtatatgtaaaaaatatttctctattcgtatgatattatctgggaaatagatttgattgtattttttagtggccctgaatatctgagcatatttttaata

SEQ ID NO: 7636 - DNA, 174 bp, Glycine max
  unsure (1)..(174): unsure at all n locations
atgcaatttaacatctaactgctccaagtaaagattctttgcagctataatactcagaataactctaatggtagtcatctntacaactggagagaagaatctctgtgaaataattcctttgttctgctgaaaccctntcaccacaagtctcgcctgatatcttcttctatcatc

SEQ ID NO: 7637 - DNA, 430 bp, Glycine max
  unsure (1)..(430): unsure at all n locations
agcttaagctccttcaactgcacaaggctcttaatatttgaagagtatccttgtggaaccttcacccgacgaagacactgacagaaacttatcttctccttcttggacaaagtatggcaggctgggggcaagtaaattttcttcccatcagaccttggatgcaactgtgatcgtatgcccatatcagctagatcttgacgggtattcaagccatccttcgtcttgccttgaatgttaaggagcgtcccaatcacactgtcacaaacatttttctccacatgcataacatcaatacaatgtctaacgtcaagatcagaccagtttggaagatcaaagaaaatggacctctttttccacatgcaactcttacttttatccttcttttaggtcttcccaaaacaatattcaggtgtngaacccgctgatatac

SEQ ID NO: 7638 - DNA, 465 bp, Glycine max
agcttattagaagggccataggtattttattgatttgtacagaaaattaaacagttgcataaaatttcttggaaaatatttttaatagtatagttaatattctaagtaaaaataaagcttctatacagtttttgcaattatattttggccaaaaatgcaattctagttagtttgatgatacttttttggggctccatccagtctagaaaattatttaaaaatcgtattaagatagtacttgactttcctttatattttaaaataattttttatggctgaaatataatttttgttcaactatttttatcaatcctcaatttaggtattcctagtttagaaatgagacttttaatcctcttattttacaaaattagtagttttggtcctccatccatatcaatgatttgactgttaaaaatacatggactgttataatttaattttttaatgaagtgaatatattta

SEQ ID NO: 7639 - DNA, 462 bp, Glycine max
  unsure (1)..(462): unsure at all n locations
agcttagcactagatcggatggacctttttatgtctcggagaggatcaataacaattcctataggtcagacctcctagggggaggggatgatgcaatcctccctaggaagggccagtcactatagtcatgagcaagaggctccaagaggattgggctagagttgctaaagaagaccctagggttctcatgaacctcaggatagatttttgagcccatgggccaaggttgggtccacttatctttgtacatattagactaggttttcattatttttgggccttgtatttagggctccataatgtaggtaaggtactggcgcttcatgacttancctctttttcacctgaaattgcacagatttcatcattaaatccaatggaaatattctagagacaactttaacaatagaacaagatttatttacagaatcactacaaaataaccataaatttggggaacta

SEQ ID NO: 7640 - DNA, 569 bp, Glycine max
cagcttataagccattttcactatgagtttattattacatttattaatcccaaagaaccctgaaacttcatttatatacaaaggcattggatacttattaccccccccatcgaagagaatgaatacaaaaatgttgaggttccatccaatcatttaactgcttcaaggagaaccaaaactagctagggagaaaccatagaagtttttttttccaaagaatttgattccttccaaacaatcgaggagtatactttagaaagtaaaatataaagttaaaatatataatcagttaaaaaattaacagtcgaaattatgataaatacatgcacacacatatataacaaattatataattgtttaaattaggttataataagatacatgcgtatataaaacaaatcataaatataattgtgtatacatttatcttatgaatttagtggtaaaatggttaaaattttttacatactatgatagaaaaagcaacaaatttattatatatttatttgtaaatgaataataaataataaatcgcgggtgtatttatatatatatatatatatatatat

SEQ ID NO: 7641 - DNA, 534 bp, Glycine max
aaatcacaatattctataacccaaatggtcaggctagtttgcataaggttattgaagcaaacactattaccatttgttggcgcatgttctaaaaaaacaaaactaagcatataatgagtagctcactctatgattagttaaggctcgaattctcacaaaaggaaacgtatctgatcttctcttaaaagacattgtatctataagataatatttgtgaaaacaatacattaactagtattttaaccgtgaaatttatatccatttaaaggtgaactaaaaatatgtaaatccatgataaccaaattattgatacatgttaattaattaataataaaattgtataaatttaatttaaatcttgaaagtacatttttagttttattaatttcagtaataaaataatattttaataattttataagataaaatggaccctaattcttatagggattaattttaaataataagtaaaaaaatctcaattttggaaattcgaaatcttaaaccctaaatttcctaccctttgacaatggg

SEQ ID NO: 7642 - DNA, 351 bp, Glycine max
agcttaatatatcgagacgatcaaaattgttcaacggaagctctcgtgaaattaaaatggtcataagttttaactcggatgtccgattcaggagcttcacatatcgagatgcacgaaattgaacaatggaagctctagagaaattctaatggtcataaattttcacacggaggtcctattcaggcgcttaatatatccagacgctcgaaattgaacaatggaagctctcgagatattcaaatggtcataacttttcactcggatgtgcgattcaggtgtatcacatattcagacgcttggaattgataacggaagctctagagaaattaaaatggcattactttttacacg

SEQ ID NO: 7643 - DNA, 298 bp, Glycine max
agcttggcaccaagtaaacctcttttcttgaattatgtccaaagtatatttacgttggcataagaatatcccacttggattccttgcaacttctacaccaagaaaatacttcagggtccccaaatctttcatgtgaaagcacttgctgagatatactttaaatttttggattgtagtggagtcattcccacacacgatcaaatcatccacatacaccaaaactaccagttgcactccatgattaagaagagtaaagagcgagtggtcagaggatgattgttgaaacccaaaaatcgtg

SEQ ID NO: 7644 - DNA, 368 bp, Glycine max
agcttgaaggcaaactggatgcgttggtcaacttggtaacccagctggccttgaatcaaaaatctgtacctgtcgcaagggtttggggtttgtgctcctctgctgaccaccatacagacctttgcccttccatgcagcaacctggagcaattgagcagcctgaagcttatgcagcaaatatatacaatagacctcctcaacctcagcagcaaaatcaaccacagcagagcaattatgacctttccagcaacagatacaaccctggatggaggaatcaccctaacctcagatggtccagccctcagcaacaacaacagcagcctgctcctttctttcaaaatgcttttggcccaagcagaccatacatt

SEQ ID NO: 7645 - DNA, 405 bp, Glycine max
agcttccttaagaagattcctaaagaagcttgagcttagctacacatacctttctaatagctaagctcacctccttgagatgagaagctagagcttagctacacaccccctataatagctaagctcacccccatgacaaaaaacatgaaaataaaaaaaaaagtccttattacaaagacaactcaaaatgccctgaaatacaaggctaaaaccctatactactagaatggccaaaatacaaggcctatacgaaggaaaaacctattctaatatttacaaagataagcgggctcatacttagcccatgggctcgaaatctaccctaaggctcatgagaaccctagggcctttccttggatctctagcctaatctacttggagtcttctaaccaatgcccttgcggg

SEQ ID NO: 7646 - DNA, 488 bp, Glycine max
  unsure (1)..(488): unsure at all n locations
agcttttaactgaatttgcaacgttccttttgatntttaaatggtgtaatcgattacaatatattggtaatcgattactagtgtatcttaacgttgaaattcaaatttaagtgtgaagagtcacatcttttcataaaaggcattgtgtaatcgattacatgattatggtaatcgattaccagtgacaagttttgaataaaaagtcaagagatgtaactcttgacatgattttctcaaaattataactcttctaatggttttcttgaccagacatgaagagtctataaaagcaagaccttgacttgcattcaaatatcttttgagaacttttgaacttctttgacaacttttgagaaatcttaaacctttcctactcatcattcttcttcttcttctttctttggcacaaaagctttcttaagtttctgtttttcaaaccttgttcttctacagaaaacaaaaggggccaaatcttttcaatctcttct

SEQ ID NO: 7647 - DNA, 418 bp, Glycine max
gctattaagcccaatcaaaaccctgtctgttccaaacccacacacaatcgcggcccacggtttcacaacggcacagcccgatgtaatggcagcgaacccgccaagcaggccgttacacacgtcaatcacgttccagtggccagccaataaccgcttgctgaacaacgtcgtcagagccgcagtgctcccagccaatgtcgtcgtgacagctgtcctccctatagcgctccattgaccataataccctccacttccataccccttggctattgtcagaaacgaaccagggttgaagccgtaccagccgaaccataacaaaaacgaaccaagcccaactaaagacgcgctgtggccacgtaaagcaaccgaccggccgaacggtcgaaccgggcgattctcgggcctttaattaaagccc

SEQ ID NO: 7648 - DNA, 350 bp, Glycine max
ttttccacactttttggggtgggccattcttggaatgccttgaatttctcaaggtccacttggaccccatttctaccaactaccaaaccctagaaaactattttatctacacaaaaggtacacttctctatatttgcatagagggtgtttttcctaaagactgaaagaacatgtccgagatgtcctaagtgatcatctaggctcctactatacactaaaatatcatcaaaataaacaactacaaatctacctatgaaatcccttaagacatgatgcataagcctcataaaggtgcttggtgcattagtgagcccaaaaggcatcactatccattcatacaaaccaaactt

SEQ ID NO: 7649 - DNA, 327 bp, Glycine max
caacaacagaataattatgacatttcaagccatagataccatccacgctgaaggaatcatccgaatctgagatggacaagtcctccacaacaacaacagcctatccctccttttcagaatgctgctgatccaagcaagccatatgtttcttctccaatgcagctacagcaacagcagttacaacaaagacaacaagtaactgacgctcctcctcaaccttccttataagagttatgggagcaaatgaccatccagaatatgcacattcaacaagagacaagagctttcattcagagtctgacaattagatggtgcagatagctactc

SEQ ID NO: 7650 - DNA, 451 bp, Glycine max
ctcagctatgttgcaacattataatagactccctcagcagcataaccaacaacaacagaataattatgacatttcaagcaatagatacaatccaggttgaaggaatcatccgaatctgagatggacaagtcctccacaacaacaacagcctatccctccttttcagaatgctgctgatccaagcaagccatatgttcctcctccaatgcagcaacagcaacagcagtcacaacaaagacaacaagtaactgaggctcctcctcaaccttccttaaaagagttagtgaggcaaatgaccatccagaatatgcaatttcagcaagagacaagagcttccattcagagtctgacaaattagatggggcagatagctactcagatgaaccaagctccgtcccagaattctgatagattaccttctcaatctatccagaatcccaaaaatgtgagt

SEQ ID NO: 7651 - DNA, 431 bp, Glycine max
gatggtgtcgagaagaaataacatgtttgtcatcatttaaaagggggagaatgtgaatgtatgtatacatgattttgatgatgtcaaagaagaatctaacaaggctacttcaaatgataagcatttgcttcaagaataattcaagattgcttcaacaaacaaatccttgtttcaagattcactaaagaccaagccttgccttataacaaagtgctttcaagacatgcaaggctctggtaatcgattaccacgaagtgtaatcgattacccgaagacagggttgagaaatagctgttgaaaaaggttttgaatttgaattttcaacatgtaatcgattaccatatgtctgtaatcgattaccagcaacgaaactttggagattcaaattcaaaagtcataacccttcagattataactgtgtgatcgataca

SEQ ID NO: 7652 - DNA, 467 bp, Glycine max
  unsure (1)..(467): unsure at all n locations
tcacgtgctntagccacgatgcattcttgatgattntcttgatggcgggaacgagtacctgcttcagatgggaatggcttctgggcaccgcaccttccatatgggttccatgagtgcacctctctattgctcttcattctggttgcagtcgccgatgccgtttcaggtttctacaagacaaagattttgcttaagtcatgtgatctctaatcacattttttatttaacaattaataaaattaattntttttacaacattcaaaaactgtcacaaacttataattaaatacaatatttatcaaatgttggcataacttatgttaaagcctttntgtaatatttttaaattttaataacatgaactatatataacatttaataaaatatcacaaaaataaattaatcatatctatctataattngataatatctttntaatgtgatcaaagattttaacaatatgttta

SEQ ID NO: 7653 - DNA, 362 bp, Glycine max
  unsure (1)..(362): unsure at all n locations
tgtgcctcttcacgtctagaatatgaatgtagcatatattattctaagacccttaggtgctttgctgatggcttcttcctgttccaagcttcaattggagtcttgtcttttacagacttatttggacatctgttgagtatgtaaacagcagtgtagactgcttcagcccagaatgtgttaagtagtcccttttccttgagcatcgatctagccatctccataactgtgtgattctttctctcgggcactccattntgttgaggagaatatgcaattgtaagttgtctctcaatgccttcattctcacaaaatctttcatactcgcgagaggtgtactctttgccgcgatcacttcgtactac

SEQ ID NO: 7654 - DNA, 439 bp, Glycine max
  unsure (1)..(439): unsure at all n locations
cgtgacatttgtcagcatcagaagtatagtgctacctcttctggaggattgctgcaacctcttcctattccggaacaggtctgggaggatgtatcagttgattttatcacagggttgccttgttcgagaggctatgaagctattctggttgttgtggacaggctgaccaaatatagccattttgttccattgaaacacccttatactgccaagggaattgttgagattttcgtaagggaagtagtgaggctacatggagttccaaaatctctcgtgagtgatagagatcctttatttatgagtttgttttggaaggaattttttaagttacaggggacaatgctcaagatgagtacaacttaccttccgcanacggatggacagaccanagtcacaaataggtgtcttgaaacctatatgcgttgtntcattactgacc

SEQ ID NO: 7655 - DNA, 364 bp, Glycine max
  unsure (1)..(364): unsure at all n locations
agatactaagctttacctttcattntaacccttagaactttctggccaatattgtcatagataaagcaatgttgatgttcaaaggacactttaaatccctttttaatcaactgacctacacttagcaagttttggtcaatgttaggtacataaagaacatctgatattaatttggtacctgaacacgttgaaattgcaacagttccttttccttttactggaatatagccaccattcccaattctgacctttgagacattagttggcttcaaatccttgaataaagtcttatcatatgtcaggtggttcgtacaaccactatcaatcaaccaacttccacttgattcactactcaagaagcatg

SEQ ID NO: 7656 - DNA, 380 bp, Glycine max
  unsure (1)..(380): unsure at all n locations
agcttctggtgggacatcttgacttgctttccaatctgacattcaccacagattctgccttcttctattttcagattgggaatgcctctaacagcacttttgtcaaggattttcttcatgcctcttaagtgcagatgtccaaacctttgatgccatattctgacttcatcttctttggaggatagacatgtagaggagtagctggtttcttggggtgtccataggtaacaattgtcctttgatctgctgcccttcattagaacttcactcttctcatttgtcaccaagcattctgactntgtgaagtttacattgaatccttcatcacacagctgactgatgctaatcaagtttgcagtcagtcccttcaccagcagtac

SEQ ID NO: 7657 - DNA, 435 bp, Glycine max
  unsure (1)..(435): unsure at all n locations
atcttgccttcaagttcaccatatctaacaacctcagtaaccgtgtgaaggttgtgcatcccagatacaatggcttcttagaatcagtttctaatttttcataataaggtgcatgcgcttgcgtaaaatcctctttcccaagatcgcgtaacatgtcttttatacgatctctcacttgtacatgaactgcctcagtccaagggattggtgacatttgtggtaactcaccatgccatatccattttgtataagtagaactgataccgtcacatatatgatgtgctctaatgtcatttaatggctgttgtctcccattcagacatttaacacatggactaagatattttccacccatttctactgcattatgtngcacaaatagcaagaattcttcaactctattctcatactcgtcacttattcatgctgctctca

SEQ ID NO: 7658 - DNA, 409 bp, Glycine max
  unsure (1)..(409): unsure at all n locations
agcttgtaaaacttgcattctaccctcgtattctttaacatacttactgctttctctaatattgtttacagcatgaccggttactttcaacccctcttgaacaataaggtttaaaatgtgagcacaacatcgtatatgaaaaatacaccaccacttactaaacaatgcatgcaaaaaaagtctttacctcaaatagtcttgcattttatcattcgaagaaacaatatctagagttaatgaaaatattttctgctcaatcccccattcttccaaaaaaaccatatataactttagtcatctcacgccccaagtgtggaggaggaaaatgagaaaaattaagcattntactattcaactttcaatttgcatcaacataatgtgcagttattgaaatataaccctcagaagt

SEQ ID NO: 7659 - DNA, 428 bp, Glycine max
  unsure (1)..(428): unsure at all n locations
ngtctaccaggtgtgcttgtattcccaatatcagctgactttggcaaaacaaaatcaaaataagaatgtctcttgctcttcacgcatggtagcaatatcaccattcctatcattaataatggagtgtgggtccttaacagtatggacaacctcagtgatggaacccatagctttcttcttatgactagctggtaaatgaaattaaatgattatatgtgaatgcagaatctcacacactactaaaaatggctcaacatattaccatcataacaaagtaatgatttacgtaatccattcggtcgtaatgccttttcattcatgccttctgtgtacttgctcacctcaacctgcattctgtagtaataactgtattaagcattaaacaaatttaatactgtacaacctttctccatgagagcacatatcta

SEQ ID NO: 7660 - DNA, 434 bp, Glycine max
  unsure (1)..(434): unsure at all n locations
agcttcgcgcagatccctctnggaagactatgcctagactaaacaacattattataactgaaattctgataccaatgccagatgtcgtacaggatgtcacgacatcacgcttcagaacatgcagattatctgtgagtgtatgaacagattaaacaagtaaataacacaagagaattggtaacccagttcggtgcaacctcacctacatctgggggctaccaagccagggaggaaatccactaaaatagtgttagttcaaggtctaacagccactgtttacaaccttctcacctaaccactacccgtgcgacctctacctaagagccactcttagatatgagaacccctctcactccctctcaaacactctcccgtgtttacaattaaatcaaggacactccagagaatgctctctgaacaaaagagatcaactc

SEQ ID NO: 7661 - DNA, 430 bp, Glycine max
  unsure (1)..(430): unsure at all n locations
agctgccaatcttgtgcagaagcttctcttgttactgcttcttgagaattttaagatatcttattggaactactaatcatggcctacggctcgagataagggtctgagtttaatcttgaacgctattgtgatgttcattggtatggtgataaagtactaaggaacatcactagctgtgcttgattgtccttgtacaatcactaatatcttggtcatctaagaaacaaagcacaattgcaccgtcaacctcaaaagctgagtatgtctcagcagctgtttgttgctgtcaaatcatcttgatcaagcaacaaatgttagattattcactagaataggctaaaatatgcatttggtgtgacaacacgagtgccataaaaccatcgaagaatccaatccaacattcaaggtccaagcacattgacatnaaaca

SEQ ID NO: 7662 - DNA, 436 bp, Glycine max
  unsure (1)..(436): unsure at all n locations
ngatccttgaatctggattctggattctaganatcaactttcctcttgaatcttgaagtgttcttcaactttcctcttgaatcttgaagtgttcttgattctatcttgaacatcttgaactcattctttgattgaactttgagctttttgtcatcacctttgtcatcatctttgttatcatcaaaacatctttgaaccaatcttgattcatcatgaagctttgcttctacaccaagggcattggatagaagactccaagaagattgggccagagatgaaagagaaggccctaggattctcatgagccttanggtagattttgggcccatggactaagtatgaacctacttatctttgtacatatcagattaagggttcactatttctgggcttgtacttanggctccatagtgtaaggagggtaccctagtaatgt

SEQ ID NO: 7663 - DNA, 433 bp, Glycine max
  unsure (1)..(433): unsure at all n locations
agctntcaatcttgtccaaaagtttctcatgttactgcttctaaaagaattttaagatatcttattggaactactaatcatggcctacggtttgagaaaagggtctgagtttaatcttgaaggctattgtgatgttcatttttatggtgataaagtagaaaggaagagcaccagttgtgcttgttaatttcttggaaaatcactagtttcttggtcatctaagaaacaaagcacaattgccccgtcaacctcaaaagctgagtatgtctcagcagctgtttgttgctgtcaaatcatcttgatcaagcaacaaatgttagattattcactagaataggctaaaatatgcatttggtgtgacaacacgagtgccataaaaccatcgaagaatccaatccaacattcaaggtccaagcacattgacatataacac

SEQ ID NO: 7664 - DNA, 424 bp, Glycine max
  unsure (1)..(424): unsure at all n locations
agctntacatgtaacacttgtcactatgttattataagaaactgccttttccttctagcatctctcatgcatctcatgtttttgatttacttcatatggacatatggggcccgtgttcaaaaccatctatgcatggtcacaaatacttcttaacaattgtcgataatcattcacgatttacatgggtacatctcatgcataataaagctgaaacacgacccattatcatgaatttcattacgtccattgaaacccaatatgatagcaaagttaaaataataagaagtgacaatgggcctgagttcatgatgcatggcttctatgcttcaaagggaatagtgcatcaaaccatgtgtgtagaaacgcctgaacaaaacggcatagctgaacgaaaacatcaacacttacttaacgtcacacgtgc

SEQ ID NO: 7665 - DNA, 358 bp, Glycine max
gtatcagttagatctttaagtgcagattttcaggataatgatagatctcatccagcgcaagttgttgcagcccagatacgcacactgctatttaaacatgaaggctgcacgagttttctaccaagtccgagattgaagagttattttgtgagttttgggacttgagtgttttgtgagccaccttgatgttactctaacatcaagtgttggacctgagtgtgtagagttgatctcttttgttcagagagcaatctctggtgtgtatttgaattaattgtaaacacggcagtgtgtttgagagggagtgagaggggattctcatatctaagagtggctcttatgtagaggttgcacgggt

SEQ ID NO: 7666 - DNA, 380 bp, Glycine max
ttctagcatctcttatgcatctgatgtttatgatgtacataatatggacatatggggcccgagtacaaaaccatctatgcatggtcacaaatacttcttaacaactgtcgataatcattcacgatctacatgggtacatctcatgcatagtaaagctgaaacacgacccattatcatgaatttcattacgtccattgaaaccctatatgatagcacagctaaaataataagaggtgacaatgggcctgagttcatgatgcatggcttctatgcttcagagggaatagtgcatcaaaccatgtgtgtagaaacgcctgaacaaaacggtatagctgaacgagaacatcaacacttacttaacgtcacacgtgcacttttgt

SEQ ID NO: 7667 - DNA, 367 bp, Glycine max
agcttcatgcttaagtatgtatggcaaatcttcattactggggatcaacacatacaagtgagcttgtaacacatgttctagacttggagttatcacatgcagtcctcttgaacccttaccacccaccctgtcatcatgccgagactcacgaaggccaacaagtttagccttctcaatgtattctgaacaaaattcaatggcttcttctgcaatgtacctctcaacaatagatgcttctggacgatatagattctttgtatacccttttaagatcttcatgtagataaacaggaccacaacatttgatttctctgaacagatgcacaatcaagtgaatcatggtgtcaaagaaagtaggggaaaaata

SEQ ID NO: 7668 - DNA, 360 bp, Glycine max
agtctcacgattgtcacgtgctcatgcatcaattgttagccgtggctatacgagacatctttccaaacaaagtcaggttagcgataactcgcctgtgctttttcttccatgctatatttagcaaagtcattgatccagtcatgtttgttgagttggaaaatgaggccacaattatactgtgccagttggagatgtattttccccctgctttctttgacatcatgattcacttgattgtgcatctggtcagagaaatcaaatgttgtggtcctgtttatctacagtggatgtacccggttgagcgatacatgacatatctacaacggtatacaacgaatctatatcgtaccatatcatcta

SEQ ID NO: 7669 - DNA, 353 bp, Glycine max
agcttatatattaaatgtttctgagtatttataagttaaattacataaattaatatataaatcatttacataaatcattttatgttatttatacacattgcgtaaatttatactaatatataaattatctaaaataattaaatattgaaatggtattaattttctaagtattataaaataatttacatattaaaaatttttaagtaatttttattaactaccttcaataatttatataaataatttacatattaaattatgtgactatattgattaatataattagaataaaaactattttttaaatgaggttttatagtttaaggttatgttagcttcttaaaagtaatatt

SEQ ID NO: 7670 - DNA, 435 bp, Glycine max
agctttgagtgtggttgataacgagaatattttatttatttcgatagccaattttgactaaaaatgattacaatttcttcattctattgttaattctaatgaaataatgaagaaattaatatctttgtaattttttatcaacagaagttgaaagaagaagattccaaatgttttggaggaaaattgatgcaaaaactggaatgtagctctttcttattatctatttaatgcaatcttgtttctatttctctttatgtgcctaatggtttgatatggtctggtcatttatatagcatgtaggggattatgcaataaaaaatagttattttctaaagaactgaaaaatggtatctaaatgaaatcattcctagaaatacattgatattcatttaacgcatttcatgcatctatattcgtaacgcgatttattatttt

SEQ ID NO: 7671 - DNA, 485 bp, Glycine max
ctcagcttataaggccttgtatggtctgaaacatgctcccagagcttgtaacaagagaatagacacctttctcttgcaaattggattcatgagatgcactactgaatatggtgtgtatgttaaaggagaaagtctttcagataccctcatagtatgtttatatgtggatgatttactgataacaggaaaggattgcagtgctatctcgacattcaggcaagtgatgaagtctgagttcgaaatgtcagatcttggagaattatcatattttctgggcatagagttcaagaggacaaaggctggaatttttatgcaccaaagcaaatacacaattgatgtcctaaagaggtttcagatgcttgactgcaactcagtttcaactcctgttgaaactagtgctgtgctggatcaatctgagcttgataaattggtggataagactatcgtcacacaaatgggtggctgtttgatgtatatatgcaata

SEQ ID NO: 7672 - DNA, 425 bp, Glycine max
agctatgagagatatactgccccatgtatttcatcaacagtgggaataagaaagccatctttgattgtgatggcattcaaggccctgtaatctgtgcaaaatctccaagtgccatccttcttcttgacaagaatgattggagatgaaaatgggctcgtgctaggggcaataatcccttccttgagcatgtcagctatcattacttcaatctgatccttccggctgtgaggatacctatatggcttgacttttactgagccaacaccttcaaccaatgggattgaatgattgcgaattttgctagggggtaatcctgatggcacatcaaatactgttctataagtgtaaagtatcatggccagttctagttccatatcaaccgggatatctaataattgatcctgaggaccatccaaccttgagta

SEQ ID NO: 7673 - DNA, 415 bp, Glycine max
  unsure (1)..(415): unsure at all n locations
taagaatattntcctttattatatagattttatgaattttcatttatataattntaattaagttaacttcaaaagataagattgagaatctccttaattagttntgaaattagataagatttataaaagatgtaaattggtttagtagataaaattctagatttttgtaagtgccttattaataattaataattgattatctaatcgataataaatgaatttatcactgtatgtgggcaatcaattacaacaaaaagaattttaattgattattttgtgggataatcaattagtggagttggcaattgattgttcattctatattatcccaaaactagttntccataaatattatcaaagagcacttaatcaatcctaattgtacattntataaatagatntatcaatgtttaac

SEQ ID NO: 7674 - DNA, 420 bp, Glycine max
  unsure (1)..(420): unsure at all n locations
taatcagttcanaactaagatattgttgaactggtaatcttttaacaggtcctgtaattgattactagagagaaaatgaacatggccttttgaaattntgaactggtggaataacaacacanatttatttgaattatgatatgtgtaatcgatgaccagaatactataatcgattaccagcaaagacattttagaaaaactctgagaagtcatgactctttagaaatataactatgtaatcgataaccaaaatcctgtaattgattatcagtgaaaaagtttcaaaaaatgttttgaaaagacacatctcttctaactgtttttcaacaggcacaatgagcctatatatatgtgtgtctttacttcgaanaagagagagagagagagattntctaagagaacttaattgtcaaattctct

SEQ ID NO: 7675 - DNA, 399 bp, Glycine max
tgcatgctgctgcttgcaacaccacaccttattgtgtaccattttcacaccacgtgcatagctctaacgcctgatctctattcctattagttgcacgagtgatctctgtagtcttattaacccgggggtgtgggcgatgcatctttctaggactctttccaagttgttgaggcatgacatgaacgaatctccaaatatagaaaaatcatcaataaatacctctatgcatgttaataccatgtcaaaaaaagatggcattcatacacctttggaatgtggatggtgcattgaaaagtccaaggggaattctccgataggaaaaagactccgaatgggcaagtgaaggttgttttctcttgatcctctcgattaataagaatttgattataccctgagtat

SEQ ID NO: 7676 - DNA, 404 bp, Glycine max
  unsure (1)..(404): unsure at all n locations
tattacgtgttgatgattatatgtatatcaattgttaatataaattagaaattaatagttcanataagaaaattaaattgaaggaaattaatatattaagattcaacgataaatactttcaatgcacttttagtttaattatttattaactctctttaattgaaaataatatagttcgatttaatatgtacatgttttgtgccatgtaaatattaatattgtgtgatgtttatatgattcatgagatgtgataacatgtttcattgagattataacattgtgattgaaaataaatataaatgtttgattaatacttgatgtgatattacttgtgttgtgacttatgaattgtgaattatacaataattcgactggtgtttactttgagaaaaatgtttatgtgc

SEQ ID NO: 7677 - DNA, 400 bp, Glycine max
agcttctggtgggacatcttgacttgctctcaatctgacattcaccacagattctgccttcttctattatcagattgcgaatgcctctaacagcaccttggtcaatgattatcttcatgcctcttaagtgcacatgtcctaatctttgatgccatattctgactttatcttctttggaggatagacatgtggaggagatactggtttcttgacgtgctcataggtaacagctgtactttgatctgctgcccttcattacaacttgactgttctcatttgctccaagcattctgactttgcgatgttacattcgtattcttcataagacatctgactgatgctgacctagttcacataacttcacctcttcctcattcactattcactttttaattatcaa

SEQ ID NO: 7678 - DNA, 451 bp, Glycine max
  unsure (1)..(451): unsure at all n locations
tggtatctaatgagagtatgcaagtttcatcctaagctcttcttgaaaaggatcgtaatgttgagattgtgatagataagatgatatcttctcttgcaacagttgttactcgagagcaagtattggatgattctattagtgggaaaatagtttatattgaggaaggcactatccatttaattgaaaagtataatcagattctttctgaaatttatcaacttgggcaatctttctctgaggtaggcttggatactaacgagcatgaatacgggaacatactcgctgatgctcgtggtgggttactggagctcaaaaaaaaggaaacagaattggttgaaaaactggctcatttataagatgagaatcagaaaatgggtgatgagcttgacaagggataggtgatgataaggacattaaatactgaacttggaaatctganaatagaactcga

SEQ ID NO: 7679 - DNA, 419 bp, Glycine max
  unsure (1)..(419): unsure at all n locations
actttcgagcctcacgatatattacgggactctttcaaacatccgagaaaaaagttattatcgtttgaatntgctcagaggttcaacattcaatttcgagcgtctcgatatgttatgggactcaatcagatatccgagtaaaaagttattgtcgtctgaattggctcagagcttcaacattcaatttcgagcgtctcgatatatgacgggactcaatcagacatccgagtaaaaagttattgtcgtttcaattggctcagaggttcaacattcaatttcgagcgtctcgctatattacgggactcaatcagacatacgagtaaaaagatattgtcgcttgaataggctcanagcttcaacattcaattttgagggtctcgatatattacgggactcaatcagacatccgagtaaaacgt

SEQ ID NO: 7680 - DNA, 454 bp, Glycine max
  unsure (1)..(454): unsure at all n locations
aaagacaatctggacatttttctttgaaccagaaaagggaatgtggttggattggagtgcatgtangagagtaagggatgctgggtgaccatatcgttggtgccataatttgatggatgaattggaacaaatgaaggaggcagatgggttgggtgcagttgggttaaacttgtacacattgtcttcattcaatccttgcagaagaagctccctcgttcataggtcctttaccttcattcaatccttgcagaagaagctccctcgttcataggtcctttacctcaaaatgcctaaganaaaattcaatggaaactatgttagtttggcacagatgatagacggatattcatatttgggtgacatttggaacataaagaatatttganagccttaaaggagaaccattagtgggaatattggtggagccaatataagtaatangaagttgattacc

SEQ ID NO: 7681 - DNA, 230 bp, Glycine max
  unsure (1)..(230): unsure at all n locations
ccgtgtcagagacgccagtggcttcagtaatgagaaagcctccgctggaagttctctgggagtattagaggatggcatggngttgtgggacgttgtcgtaagacctctgtctggtcagcggtgccataacaactctgcaagcaaaattaatcagcaattgaaatctatggaaataggaaggaaaaaaagagatagagatacctatgggacagatagaatgtgcccatctt

SEQ ID NO: 7682 - DNA, 254 bp, Glycine max
  unsure (1)..(254): unsure at all n locations
gctctcgatatattcanatggtcttaatctttcacatgaatgtccgattcnggcgcataatatgtcgagaagctcgaaattgaacaacggaagctcttgagaanatcanatggtcataacttttcacacggatgtccgattcaggcttataatatatcgatacgctcgaaattaaacatcagaaactctcgcgaaatttacatggtcataactnttcacacggatgtccaattcaggcgcataatatgtcgaga

SEQ ID NO: 7683 - DNA, 278 bp, Glycine max
  unsure (1)..(278): unsure at all n locations
gctgtacctgagctctatttcaattttgggggcatctggaggtcttattttanggtcactgacccattctaccactacaaacctaagaaactatatatctacacanaaggacacttctctatatttgcatagagggtgtnttcctaaggactaanagaactngcctgagatgtcctaagtgatcatctangctcctaatgtacactanaatatcatcaaaatanacaactacaaatctacctatganatcccttaagaacatgatgcataagcctcat

SEQ ID NO: 7684 - DNA, 344 bp, Glycine max
  unsure (1)..(344): unsure at all n locations
aaatatttttattatggagaaatagaaatctattaactaatatgattatttattgactttattatcaaacttagtatagttctacattacaatattatttaatattacacatattttttattgttcattatacacgcatttaatcatttattctatatttggataagtctcaaacgaatanagtcattgttaaaacaaacaatagtgtaattaaactaatggacaaaaaattaatagactaattatttttgtttgagagatttttgcggagtattttattatttgagtgctttcattagtcttaatattttatatttaaaagcactatataaattttggtaata

SEQ ID NO: 7685 - DNA, 218 bp, Glycine max
  unsure (1)..(218): unsure at all n locations
gtctaaaccattaaagtatgtgttcttggagggtgacaccanacctatagtaatcagtaatgcactaacatangaagaagagaataggttggtggacatcctgaggaagcataaggaagcaatcagatggcatatatctgacttgaagggaatcagtccttcgtactgcatgcataagataatgatagaggacgaatacaagcctattcgacaacctc

SEQ ID NO: 7686 - DNA, 243 bp, Glycine max
  unsure (1)..(243): unsure at all n locations
atgataagagcaaagaaataatannattgganatctcttttgttagctcactanaaggtgatacttanaagcaaacactnttcaagtntcanaactgtatataaagaatgtatacttacagtattctntgtcaatacattaagtgaatcctcatgaaaccacaatcgactgcgcttcccaggtttctttgttgaactttcacgaattatctctcttcccatgtctcgtagtaatggatgcatt

SEQ ID NO: 7687 - DNA, 248 bp, Glycine max
  unsure (1)..(248): unsure at all n locations
actttcatattcttcaccaatccagccaatgtatgatatatgccctcaatntcaggatgtgacanacaaccaacaagatattcatgtacagctccatccacaataatccaactacttnctggttgcttcttgacccccttctctttcatttccagccgcagctccgagacatcactccattgattatcagatgcaagtgcattagccaacataacatagcctgcagaattatctgggtctacttcaac

SEQ ID NO: 7688 - DNA, 321 bp, Glycine max
  unsure (1)..(321): unsure at all n locations
tctgaattctgttctatgctcagaatcagaggttcatcgtgcttctgaggatgtgtnggtccagaaaaccaggcagccagggacaaagagacaagtcgaagttgatntagatttcacaagttttgtcgagaaaaaaatatccgatatcttttctcctcccaggaatcccanatcattacagctacctgagaatataccacctagcattacanaacttccagaggactgccactatgaaccagaggatcttgtcaatntatnntctttgccttatgtaaagggtatttattanagtatagaaatttagttcanatatctcta

SEQ ID NO: 7689 - DNA, 254 bp, Glycine max
  unsure (1)..(254): unsure at all n locations
tctgtacctgtagcaaggggtttgtggttgtgctcctctgctgaccaccatacagaccttggcccttccatgcagcaacctggagcaatngagcagcctgaagcttatgctgcanatatttacaatagacctcctcaacctcangcagcaaatcaaccacagcagaacaattatgacctttccagcaacagatacaaccctggatggaggaatcaccctaacctcagatggtccagccctcagcaacaacaata

SEQ ID NO: 7690 - DNA, 365 bp, Glycine max
agctttaacaaccatatgatgaaacactttgttatcttgtactggtttggttgtgtttggcactccttaaattatgacaaatgatgtagttccatgtagagcttgtaggccttggaccttcttcattaatggagtccttttcttctagaagatcaatggcagtggaatggagaaggaggaaaggtcattgaagatgccacttcaaggagaagatgagtcaagaacaagttcaccaccataggaaaccatggataagagcttgaaggtaggagaagatgagtagagggagagggagagagggggccacaaaatttatgcctcatatgaggtctgaaaattgaaggataatttcctcaatgatcaaa

SEQ ID NO: 7691 - DNA, 482 bp, Glycine max
  unsure (1)..(482): unsure at all n locations
gaatgcactattcaatggagttgacaagaacatcttcttacttatcaacacttgcacagtggccaaagatgcatgggagatcctgaaaatcactcatgaaggaacctccaaagtgaagatttccagattgcaactcttggctacaaaattcgaaaatctgaagatgaaggaggaagagtgtattcatgacttccacatgaacattcttgagattgccaatgcctgcactgccttgggagagaggataacagatgaaaagctggtgagaaagatcctcagatccttgcctaagagatttgacatgaaagtcactgcaatagaggaggcccaagacatttgcaacatgagagtagatgaactcattggttctcttcaaacctttgagctangactctcggttagggctgacaagaagagcaagaatatggctttcgtgtccaatgatgaatgagaagaagatgagtatgacctgtatactgatg

SEQ ID NO: 7692 - DNA, 391 bp, Glycine max
agcttaaaaattcacttacgagcctctcttatattacgggactcaatcaaacatccgagaaaaaagttattgtcgtttgaattttctcagaggttcaacattcaatttcgatcgtctcgatatattacgggactcaatcagatatctgagtaaaacgttattgtcgtttgaattggctcataggttcaacattcaatttcgagcgtctcgctatattacgggactcaatcagacatccgagtaaaaagttattgccaattgaattgactcagggcttctacatttaatttcgagggtctcgatatattacgggaatcaatcagacatccgcgtaaaaagttattgtcgtttgaggtggctcacaagttcaacattcaatttccagcgtgtt

SEQ ID NO: 7693 - DNA, 294 bp, Glycine max
tctctagaggaagtatggacacttcattattcagaaagtttgggaaaggagatctgttgattgtacaaatatatgtagaagacataatctttggcgctaccataaaaatgatgtgcaagggtttttctcagctaaataaaagtgcatatgaaatgagcttgtacggagagctaaagttctttctgggagcttataatcatgctaaaagaggatgtcatattctttcattaagagaaatatacaaagccccttcttaagaggtttcgaatggatgaagctaaacatatggctact

SEQ ID NO: 7694 - DNA, 565 bp, Glycine max
ctgcagctttacttccaggaatttctcttgttaattccttcatctgacttagcatcaaactttcctaagttttcttttccattgtttaatacaaagcatttgcaaccaaaaacatgaaggtgtgaaatgttatgttttctaccattaaacagttcatatggagttttctttaaaatgggtcttattaaagccctattcatgatataacatgtagtattaacagcttcagcccaaaaatattttggaagaggagtgtcatttaataaggttctagcaatttcttccaaagatctatttttcctttcaacaactccattttgttgaggggttctaggtgcaaaaaagttatgttcaatgtcatgcttatcacaaaatagttcaaattctttattttcaaattcaccccatgatcactcttaatagatataattttgagatttttcttgttgtgaatcattttttcaagattcctaaatgcttcaaaagcatcattcttatgagtgataaatagtgtccaagtgtatctagaatattccatcactataacaagggcgtagtaactttc

SEQ ID NO: 7695 - DNA, 446 bp, Glycine max
agctgtacctatctttttactatcttttttttatatccctaaaaaagtggtgcaaaagattgtattcattcagagaaatttcctttggggaggtcatcatgaggccaacaagattccttgggtgaagtgggacacagtttgcctttctaaaaataaagggggccttgggattaaagatttgtctaaatttaatgaggctctacttgacaaatgggggcgggagctggctaataattataaccaactttgggcaagaatcttaatctccaaatatggtggctggaaggagttgatctctggtggaaagagcaaattttcctctcataggtggcaagacctaaaggttgtctttcagcagcagcctcaagtggaggggggctgtggtcccaaaattaattttggaggataagggctgggggataattaactctccagccaaaattcta

SEQ ID NO: 7696 - DNA, 366 bp, Glycine max
agcttcttcagaaacgtggcatttgtgctcaatacacaatgtccggtacaccacaacaaaatggtgtattagaaaggcgtaatagaactttaatggatatgattaggagtatgttaatcaatttgactttacctgtatctttgtggatgtatgccttgaaaactgccatgtatttgttgaatagggttcctagtaaggcagttccaaagacacctttgaactttggacaaataggacacctagtataaggcacctgcatgtttggggttgtcaagcaaaaataaagatttataatccgcaagaaagaaaattggatgcaagaacaatcagtggatatttcattggtgtcgcaacatgcccttttgc

SEQ ID NO: 7697 - DNA, 498 bp, Glycine max
tactcacgcttctgaataggacctccgtgagaaaggttatgaccatttttttttctcgagagctttcgttgttcaatttcgtgcagctcgatatgtgatacaccagaatcggacattcgagtgaaaagttatgaccatatgaatttcttcatagcttccgttgttcaatttcgtgcatgtcgatatgtgaagcacctgaatcggacatccgagttaaaacttatgaccatattaatttcccgagagcctccgttgttcaatttctagcgtctcgatatattaagcgcctgaataggacctccgtgtgaaaagttatgaccatttgaatttctcaagagcttccgttgttcgatttcgagcatctcgatatgtgatacaccagaatcggacatccgagtgaaaacgtatgaccatctgtatatcttcatagcttccgttgtgaatttcgtgcatctcgatatgagaagcgcctgaattggacatccgagtgaaaagtta

SEQ ID NO: 7698 - DNA, 503 bp, Glycine max
  unsure (1)..(503): unsure at all n locations
agcttgtatgttagacctcgatcggtatttttcngttcgacgccgactgtcatttttttcgatcaatatcggtgaataatatttttttgccgaggtgggctaatgttttcctggccgaataaatgggaacatgccagtttcggccgaaacgaaacatcggttgagctcgcacgaaaaaacctagccgacttacattgtaagttttttatgcaacaccgaaaaaaacaaaatttcccctgccgtaagaaaaaacattatcggccagcgagcgcgggacttgaaattcaagctccaaaaactaacccaaggcaacaagggggttgaggagtatttcaaggaaatggatgtgctcatgattcaagcaaatattgaagaagatgaggaggtaactatggctcgatttcttaatgggttgactaatgatatccgtgatattgttgagctgcacgagtttgttggaatggatgatttgcttcacaaagcaatccaagttgagcaacaat

SEQ ID NO: 7699 - DNA, 446 bp, Glycine max
tcgattacacacatacagttatcgattaccagtatttctttttcaaaaaatattctcaacagtcacatctttttatgtggttcttgaatggctatcaaaggcctatatatatatgtgacttgagacacgaattttataagagtttttggagaacaaaaaggtcttatcctattaaaaagcaaatcgtgttatcctcttacaaattccttggccgaattacatgtgattcaataaggaattatttgagtgctcaaattgttcagactatctctttcaagagagatttcttcttttcttcttcttcattctgaaaagggattaagagaccgaaggtctcctgttgcgaaagaattcttcacacaaaggaagggttgtccttgtgtgtttggaacttggaaaaggaatttacatgatagtggaacttttaatcgggatgcttggggact

SEQ ID NO: 7700 - DNA, 220 bp, Glycine max
tgagtgactaaggggggtccacggatggcggagttcctacttgatccaacgatggcaaaaatgatggtggcttcagaaaattacaagcgctcatatgatattatttctatggctgctatgatctactgttggaaactcaatattttactgcccaaaagatgaacatgtacatgccgactacgcatggatgctttttcacactggaaatgttcgagaccat

SEQ ID NO: 7701 - DNA, 504 bp, Glycine max
agctttgatctgcctctatattttcaatcttttcatcctccctccagataatgagtttctggtggagagtagatggcacagccccaactccatggatccattcccttcctaatagcaagttaaaattagccttggactgtatcaccaggaatagagttggtcgaactatactgcctacaacaacatctacttgaatggctcccaaagaatagccagttttgccctcataattcgaaagcacaatgttgtgggcagatagatcagtgtcatgtttcccaatcttgtagagcatagatcgaggcattaagttaacagccgctcctccatctatgagcactttgttgattccaacattctcaacttttgccctgatgaaaagagggttgagatgacttttcattcgaaaatctggcttttcgaaaaggctaattgtcttccacacagcattggtctaacatagagcatactggctttgggtaagcatataaaatgatcaacctccct

SEQ ID NO: 7702 - DNA, 435 bp, Glycine max
agcttgctgaccattgacagattacttttattgaagcattcaagtggacatcagaggcagagacaacatttgttccattgcagaaagtcatgacttcagcccccgtgttagctcttcctaatttcgagctgcccttcattctggaaactgatgcttccgacactggtattggagcagtattacctcaaaatggccacccaatagcatttttctccaagaaacttgcacctagagtgcaaaagaaatctgcctactttagagagatgttagcaattgctgaagctatagctaagtttagacactacttgctgggacacaaatttattatcagaactgatcaaaaaagcttgagatcattgatggaaccacccctacagacacctgaacaacaagagtggttacacaggtttttgggatatgatttgtgattgatac

SEQ ID NO: 7703 - DNA, 389 bp, Glycine max
agcttcaggctattcaattgcttcagtttgctttttcttaatggcaaaggtctgtgtggtggtcggcagaagagcacaagaaaatgataatcttcccaaagaatggaaaacttcaagaaatcatcctcttgacaatatcatcggtgatatctcaaaaggggtaacaactagacactctctcaaagatttatgcaataatatggcatttgtttcattaatagaacctaaaaactttaaggaagctattatagatgaccattggatagtagctatgcaagaagaattaaatcaatttgaaagaaatgatgtatgggaattaatagaaaaacctttagattatccaatcataggaactaagtgggtttttagaaataaaattggatgaaaat

SEQ ID NO: 7704 - DNA, 552 bp, Glycine max
agcttgatgcctgtacaatcttatacttttatttctaggccttgttcagtttgatgctgtgaggacactggacaccaattttcttgtatgtttcttagggcctgtttagtttaaggaaatgattttgttttcattagtaattaattacaaaaaacaggaaataaagtgaaaataaagtgacacttgtagttatttgtgaaaacagaaaatgagataaaaacatttcctgagaccaaacaggcccttagaataagcatacatcttaaactagattatcttgtcttacatgaattaatatggtcttgcaggttttacattattccttggattcctaattgatcgtacccaccattatcttcaaaagcttattaatttaaggagtaatgcgggagcttcaaaagaagaattggaaaaccttaaaaaagaaactgtccaacttaaagaaaaggatgagaaagcatccaaggagattaaacagctaaaggaagaactttcacatctgtccaaaagtttggaaaagataaaattgggatctgaagagaaagataagaa

SEQ ID NO: 7705 - DNA, 460 bp, Glycine max
tagttggacatctgttgagtatgtgaacagcagtgtagactgcttcagcccagaatgtgttaggtagccccttctccttgagcatcgatctagccatttccataattgcgcaattctttctctctgacacttcattttgttgaggaaaatatgtgactataagttgtcgctcaatgccttcatcctcacaaaatctttcaaactcgcgagaggtgtactctttgccgagatcacttcttaatacttttatccgttatccactttgatcttccgcagggccttgaactttttgaatactccaaagacctctaatttttcttttatagaatatacccctgtcattctacagaactcatcaatgaagagtatgaagtccctgttgttctcatgcgatggcatactcattgggccataaacggacgtatgtatcagcttcaatagatctttcgctcttcatgct

SEQ ID NO: 7706 - DNA, 325 bp, Glycine max
atactcacgctctactatgcagagaatatccaaggaaaataccttcatctttcttatcatcaaattttcctaagttatcttttccattattcaatacaaaacatttacaaccaaagatatgaagatgtgagatatttggttttctgccattgaacaattcatatggagttttctttaagatgggtcttattaaagccctatttaaaatgtagcatgcagtgttaacggcttcagcccaaaaatattttggaagaggtgtatcatttaataaagttctagcaatctcttccaaagatctatttttcctttcaacaacaccattttg

SEQ ID NO: 7707 - DNA, 299 bp, Glycine max
ttttttttccattacccttctaaaaaggtggggaaccaaccccccaaggagaaataagtgcaagggaagagtaatagaccagaccaacccacacaaatgaaatgggccctccgcaacaagtcatccataatatcaaataaatcatcttcatcattggggaatttaccaagagccataggcatagggagtcttctattcaactacttcaaccatttcccaacacctcaacattttcatagttgctcaagtttcccaaaaaaggctccatactcaatgcctggataggaaaataagaaatt

SEQ ID NO: 7708 - DNA, 344 bp, Glycine max
tgccgcaaatgcaaacggcaataacgttttactcggatgttcttttgagtcacgtaatacatcgaaacgctcgaaattgaaaacagaagctctgtgcaaattcaaacgacaatacattttaactcggatgtccgattgagtcccgtaatatatcaagacactcgaaattgagaataaaagctctgaacaaattcaaacgacaataactttttactcggatgtccgattgggtcccgtaaaattatctagacactcgaatttgagaatggaagagctgatgcaaattcaaacgacaattactttttactcggaatgaccgatggagtcccgagcgcttgatatat

SEQ ID NO: 7709 - DNA, 413 bp, Glycine max
agctttaactcggatgtccgattcggtttcttttatatctagacacttgatattgaataacagaagctctcgagaaattccaatggtcataacttttcacacggatgtccgattcgggcgcataatatgtcgagacgctcgaaattgaacaacggaagctctcgagaaattccaatggtcataacttttgactcggaggaccgattcatgcgcataatatatcgagacgctcgaaattgaacaacggaggctcccgagaaattcaaatggtcataacttttaaactcagaggtccgattcaggcgcataatatatcgagacgctcgaaattgaacaacgcaagctctctaaaaattcaaatggtcataacttttcacttggaggcgccattcaagcgcatcttatatcgagac

SEQ ID NO: 7710 - DNA, 423 bp, Glycine max
tgaagaaaaaatggttaaaagccaaacttcaatgcttttattttcctatttcctttctaaattggtgttgaaccaaccccccaaggagaaataggtgcaagggaagagtaatagaccagaccaacccacaaaaatgaaatggtccctccgcaacaagtcatccataatatcaaataaatcattttcatcattggtaaatttaccaagagctatagtcatagtgattcttctattcaactacttcaaccatttcccaacacctcaacattttcatagttgctcaggtttctcatagatagcttctatactttaatgcttgtataggaaagtaagatattgaagtttttgggctttatgtggaatactctgtcatgggttatggaagctgctgctatcatggccataggcatgacacatggcaca

SEQ ID NO: 7711 - DNA, 328 bp, Glycine max
gacactatataatactcccgcttttagaaaatgtcgatgccgagtgtgtactatattttttttttgtagcagttgtacgaaacctgtgtcgcactcaaattcccgtatgctggaaagtcatttatggtacaaaatagcattgcgcgcaacttgaatgtttcatttcgatacccatcaaacatgaaaacccccttgtacaacaacttgctcgagtctttaatcaagggactgagataagcatcgatgtcatttcctgggtgtcttgggcttgatatcatgatatacaacattatgtattttcgcttcatgcacaatcaaagatgcaagt

SEQ ID NO: 7712 - DNA, 415 bp, Glycine max
  unsure (1)..(415): unsure at all n locations
gacccgcacgcatgcaagcttattgaaatctagaggaacttcttaatgnngttgtcaacaaacacttcaaaaagtgcctggattacctgggaaagagtatgctcacccaaagaaaaaggtggccttgggattaaaaatctctacctttttaatataagcctcttatctaaatggaggcggagatttctccaataccactttgtagataggtcccctcttattacattcagatatggttgttctttctctgatctatcccatctggcccacaaaattggtttgcttctaacatgattcgcaatgtcggcgatggctcccaaatgaaattctggtatgctctttgggttggtgactcatgcttctcacacttggtctctcgattgtctcagagagtgacacggctttcttgtacagt

SEQ ID NO: 7713 - DNA, 293 bp, Glycine max
cggattgatacagacccactaatggtggatctcttcctaatacaactcgaaaggggtcattaccaaaccttccttaacaaaagggacgaaccaaaaatgagcccaacgaagcattcaaacccaattttgtggatggccaaatacaacacaccttcaatacatgtgtaatggcttattaagatactcagactgcccatccgatagcggatgagaagaagacctcatggacaatattgtgccctgagatacaaataaatgatgaaaaaatgaactaatgaggactctgtatatat

SEQ ID NO: 7714 - DNA, 422 bp, Glycine max
gtatgactattgatgccgattctgtttttttttgcagtgcatcagacaacaatcccattctagcatccatgccttactttggagtgattgaacaaatctgggagcttgattatattgaatttagagtgcctatgtttaagtgtaagtgggtcaatgccaatacgggtgtacgccaagatgaattgggatttaccttagtagacctcaataaggtggcttacatggatgaacctttcattatggcccaacaagcaagacaggtgttttacatcgaagatccttgcgattcatgatattcgttggttctacaaggaagaccaagtggtttaatgacacacatgatggttccatgcttgacatttgtgagacaccacctttttcaacaagaatgccttatattaatgagttacactttgttgatg

SEQ ID NO: 7715 - DNA, 534 bp, Glycine max
  unsure (1)..(534): unsure at all n locations
ttcctctcccaggaagacaatttgtgnttgtctgacattcctacttggggcttatggtattactacccttctatgcagttgttgggacacatttttatatgaagttgacaaaattaagaatgaatgagttgaataatttcaggggcttgatctgcatatttctgaaattgagcaattgtgcgcaaaattcccatcaacaattgtattgcttgatcacttgggatttcctcatgaacttttatatcaaggaagcaaagcatgcataaaattttcattaattacatttttgctatacagctgattcttttttttaatcagacagcaaacataaaattcacagatttgtaactcttgtacatgcttattctttttttactgtaaagaagccatgcatcttattagcaatgagatctctttgcctttatcagatntagagtggatcatggggaggacagctacacaactctttcaaaaccaattgactccggtcaagagttgagagccgggatgctgtttgattgtattaaaagtttt

SEQ ID NO: 7716 - DNA, 643 bp, Glycine max
  unsure (1)..(643): unsure at all n locations
agctntgagccaaaatcctgacttacctattaccttgacccagcgtgagaatgtcaatccttaccctcggaagcaaaaaagaaaagaaggaaaatttccaatcaaagagaaagcaaaaagaaaagaaggaaaatttccaatcaaagagaaagcaaaaagaaaagaaagaaaattcccgatcaaagaatgggagaaagtaaaaaaaggaagaagaagaaggaaagaaagctcctgatcaaggatcgaaagaaaacagaagaaatgtgcagaaaggtctttggaccggacaatatctgaacaatacagaattgtcaccaaatgaacgaaaaaaaggaaaggaaaccatgacctaaagtggttttctccctttaattgccaaccaagatattgtgtgctagcgacttttttgccccgcactanaccaaaacagaaaaggaaaaaagccagaaaaagggccaaaaaaagaagaggtcaaaagccaaaaaacccaccaaaagaacccgtttccaagggaagtcctattgatccatgatcacgcatgtaatctttgatttgataggaaatgatttgcaaatccagtcatgacatatctatgggtcggaatttggaaacaacactaacctgggcgagatttgtacccttt

SEQ ID NO: 7717 - DNA, 539 bp, Glycine max
  unsure (1)..(539): unsure at all n locations
cgccgcatgcaagcttgttcccaccagtactaagatagtcattataatcattngcccaccctttgtgtccagttttcttcttaattgatccggaacatgcttgaagcacaagcatccaaacacccttaggtgcttgagacaaggcttacttccactccaagtttcttcaggtgtcacattctctagcctctttgttgaacatctgttgagcagataggctgctgttgacactgcctcaccccaaaactcctttggcaagtgaaaattccttagcatacacctggtcatgttgactatggttctattgagtatctcaaatacaccattgtggtgtggtgcatatggaggtgtgatcttatgaatattaccctcatcctcatanaatttcttgaatacatgtgatgtgtattcactaccaccatctgatctgagtctttgaatcctatttctactttgtgtgactcccatcaccttgaatcttttggaggagagaaacacttcactcttcctgcttaacaagtagatccacacccttcttg

SEQ ID NO: 7718 - DNA, 550 bp, Glycine max
agcttcttagtttcagatgatgcagattgtttttatctacctcatgcactcctctaatgactatggcatcatttctggcactaaactgctgggagttggaggccatcttctcaattaaatttttggcttcagcaggagtcatgtctccaagggctccaccactggcagcatctatcatacttctctccatattactgagtccttcataaaaatattggagaagaagctgttctgaaatctgatggtgggggcaactggcacatagtttcttaaatctctcccagtactcatacaggctctctccactgagttgtctaatacctgagatatccttcctgatggctgtggtcctggaagcagggaaaattttttctaagaatactctcttaaggtcatcccagctcgtgatggaccttggagcaaggtaatacagccagtcctttgccactccctctaatgaatgaggaaaagccttcagaaatatgtgatcctcttggacatctggggatttcatggtagagcagacaatgtgaaattctttcaaatgttt

SEQ ID NO: 7719 - DNA, 421 bp, Glycine max
atgtgttgagcccacagagtcatgtcttctttttactggtcgacttgggtaaagtccaatgacttgatgacacatatgttagggtatcaatatacaactaccaattatttcgtcaggtggatgagcctggttggaaaagtgaagaggtgatttggggaatgttagtagcaaaggcaatggagaaggggattgctcaaaattaagaggacaattagagagaccacattgttgtgagaaagagcccactattattaatcttatgccccccccttacaacatgcagtctgcaaattgctataaaggaggggtattaacatccgttacacaagacaaatcaaatgcaatgccaccttccaaatgacttatgattcaactagcaccaacaccaccaattttagcatgcctgtaaatttcacgtttg

SEQ ID NO: 7720 - DNA, 460 bp, Glycine max
cgacctttaatactacctttcattctttggaagttcatatttgattggctcttcttttgaccttcattgcttcctttcctttttcctttagaatcttgtccataaatatgcatttgttataaagattctgcaatatcatctagaatatcctttcttggaggaatagcattagactcatcaaaggaaacatgaatagattcttcaatagtcatagttctcttatatattctataagctttactatgcaaggaataaccaaggaaaattcattcatctgacttagcatcaaactttcctaagttttcttttccattgtttaatacaaagcatttgcaggcaaaaacatgaaggtgtgaaatgttaggttttctaccattaaatagttcatatggagttttctttaaaatgggtcttgtttaagccctattcatgatatagcatgcagtattaacggcttcaa

SEQ ID NO: 7721 - DNA, 540 bp, Glycine max
  unsure (1)..(540): unsure at all n locations
agcttattgttagacattatttttttttatgaaatncatttttaaacattgatttcttattttattattaaaatgggttaatcctttgactttacagatagttgaattctcatgtaattgtattcaattatcatatatatcaaataagaaagaaagatgtgtaagatttcctttatatcttcaatatggaaaagatatataaatatgggttcattatgagtacataagcatatttaagaattattaaattaataattaaaatatattaaagtgggagagtcatcaaaccatctgcataaagctgtatcaccaaaagattttcttctaacggattttgatctattttgttgtctcttttctgctaaaaatggttcctctttcatatttctaccctaaacattntatatcacaccatccctcaattttctaatgctatggagtaaaaattatcctgtggttttttagagagaaaacanaattatcanatagatgtaaattttaatagaattcaattccagggggggagctgctcgagcacta

SEQ ID NO: 7722 - DNA, 559 bp, Glycine max
atgagaaaaacttaatgcattttatattcttattttcttcttctataaatacttattaagaagtttataaaaaaatagtctttaactaatttatatttgtgatattcgaaagatgcttatactttcttgctttattactacatgtaattaattcgttaaatttggtcgatgaactaacccataatatatatttgtcgtctcatttttaattaatttcacattaattttgtttttgtatgagataaataaataaaagtgtgtgacatactcataattgtaaatcagatggatctatcaaactaaacaaagttattttgagctttaatcgaattaagttcgagctaaaaattaagtaagatgcatatcaaactcaagtcgatctttcaaccaaatcaattcttatatagttgacttggactcatttctaccatcaacattaatctagaatgtagcatttaatcattttattattcttggggaattaatttattttatatccttatttttttaaaaaatataataattcataacaaataacttttaaatatttacaaataaa

SEQ ID NO: 7723 - DNA, 437 bp, Glycine max
gcatgcctttagaaactaaattggcgagatatgtttttttgtcggggattggaaaaacggtggaaactgtcatttggaaacactaccggagcttggatcttcattggtgcctaatgacaactggtcacaattaaaaatagccaatgctatcttatctgctgcacacacaaatatttctgaaacaaacaagttcatggtgttaaatgtaacccagatgaccgctcagagaaaagatgggcattcatctatctattatctcggtcgtagtgcgggccatgtgcatcatcatcgccaagattgcagccattggtgtctacctggtgtacctgatacgtggaatgagctgctttatgcactgttgcttaaacatgaaactgctcacagaggggaactgtaacacgcatcaatatgatttgctgagaaattgttaaattctg

SEQ ID NO: 7724 - DNA, 610 bp, Glycine max
  unsure (1)..(610): unsure at all n locations
tttgcggatttagttttcacggacgaacggatcttatatttatgaaaagaggcaaatttaatcatcttgcttggacgaatgagaaaactggggcaaatgaagagggtgagaatgagggagagacccatgttgtgactgccattcctatacggccaagtttcccagtagcccaacaatgtcattactcagccaataacaacccttctccttacctaccacccagttatccacaaaggtcatccctaagtcaaccacaaaacccaccttccacacaaccaatgctaaacaccacctttagcacgaaccaaagcaccaaccaaggaaggaattttgcagcaaaaagcctgtagaattcaccctgttggaccttgtggcctcaataatcttaagagggatatgcttagaatgcagaagaagcaacaataatcaatttaataatgttctataaacatgcaaggcaaaattgattgcaataacataaatgagataagggaagagagaatgcaaacacaantttatactgggtcggccactttccgtgcctacatccagtactcaagcaacccacttgagatttcactatctttgtaaatccatacaaagtctgaac

SEQ ID NO: 7725 - DNA, 408 bp, Glycine max
  unsure (1)..(408): unsure at all n locations
tagctttcgagaatntaaaattgtcataacttttcactcggatgtcttattcaagcacatcatatatggagacgcccgaaattgaacaacggaagctcttgagaaattgaaattgtcataacttttcactcggatgtccgattcaggcacatcacatatcgagacgctcaaaattgaacaacggaagctctcgagaaattcaaatggtcataacttatcactcggatgtccgattcaggcgcatcatatatcgagacgctcgaaattgaacaacggaagctcctaagaaatttaaatggtcataaattttcactcggatgtccgattcaggcgcattatatatcgagacgctcaaaaatgaaccatggaagctctcgagaaattaaattgtcataacttttcactcgg

SEQ ID NO: 7726 - DNA, 407 bp, Glycine max
agcttcccccatcaacgttaggccctatatgtatccccattaccataaaacagagattgaaaggcaaatttcggccatgctcgaggcaaatctcatacaacccagccacagcccattttcctccccaattcttctcgtcaagaacaaagatggctcatggaggtgttgtgtggactatcgcgccttgaatgctgtcacggtcaaggaccgtttccccatgccgacaatcgatgaacttttggacgatctggggcaggcgtcgtgcttctccaagctcgatttgcgttagagatttcatcaaatccgcatggccgacgaagatattcataaaacggctttttgaactcatctgggccattatgagttccgagtcatgccgtttggactcagtaacgtgtcgtcgacat

SEQ ID NO: 7727 - DNA, 354 bp, Glycine max
  unsure (1)..(354): unsure at all n locations
agcttcagttatccatttcgagcgactttttatatacaggactcaatcagacatgcgagtaaaaatttactgtcgtttgaatttgctcagagctacaacattcaatttcaagcgttccgatatattacgggacttaatcagacatccgagtaaaaagttattgttgtttgaatttgctcagagcttcgatattccatttcgagcatctcgatatattacgggactcaatcagacatccgagtaaaaagntattgtagtttgaatttgctcaacgcttcngtattccatttcgagcgtctcgatatattacgggactcaatcagacatccgagtaaaagttattgtcgttgaatt

SEQ ID NO: 7728 - DNA, 380 bp, Glycine max
  unsure (1)..(380): unsure at all n locations
tttcatgcaagctntgacttatccaatggcatggacactttaaaagactaaactctattttcaaaattgtactaactggtttctctgtctcaaggagttatgccagggaccaaaggtacaggtggcttcggtttctttattttatccaccaaaataacttgagtagttagaatgacaccagcaacagaaactgcactttgaagagcacatcttgcaacacgactaggatccgctactccagcattcaaaagatcttcatacgtgcctgtcattgcattatatccagttctccaatcatgtgttctagtcttccggacaacaatgtctccatcaactccggcattagttgcaatngattttcaggttcaaggagtgcctgc

SEQ ID NO: 7729 - DNA, 362 bp, Glycine max
  unsure (1)..(362): unsure at all n locations
tgtgatgaaagcttttataacttcttggtaggaatatgaactctatcatgcaaaattgcgtggtcactggcagccatattttcaattaagtccatggcttcttcaggtgtcttcatggaatgaagaaattgcagcttttccttctgcagttttagactctgggaaatatttttttagaaacttctcaacaacctcatcccaggtctttaaactattgcccttgaatgaatgcaaccatctcttggcctcccctgataaagaaaatgaaaacaggctgagcctaatagcatcttcaggtacaccgacaagcttaacagtattacaaatctcaatatacgtngccaagtgtgagtatggatctt

SEQ ID NO: 7730 - DNA, 330 bp, Glycine max
tagcagaagaacttcaatataccaatcattatgtggactaccgaccccaaagaatggacatcacctgaaattggaaggtcttggatctgaacaaatgactatctttcacattttgatttaaaaaagaaaatcagaaacagaaagaaacttgtccttggatcacaagttgataattactgtttcttgcagtgtgcgatagcacctatcaaatgtgaactgtacttcatcagcaatgaggaagtgatcaaacccactagcatatggcgttgcaatgatcaatatacccctagtaacacaaagggggtgataactatggctttttcattgtag

SEQ ID NO: 7731 - DNA, 348 bp, Glycine max
accatagaactctcaagctttacgcggacaagaacagaagggaagtcttctatgaaatcaatgattgggtattggtcaaacttcgaccttatcgacagtccacggtgagaggatctccggcgagctccggtaagctgaccaaacgctactttggtccctttagagtcattgaacgaattgggatggctgcgtatcgccttgaactacccgagggagctaagatacattctgtcttccactgctccttgcttaagccttttcgaggatccccgacacagcctgactctacttctctacctccacaattcattgatggacatcctagcactactcctcttgctatcctca

SEQ ID NO: 7732 - DNA, 326 bp, Glycine max
ttgtatggataggaagctctgctgttagttaaaagagttgacatcccttccaaattggaaggggtaaattagttgagtaaggacagggatgaattattacaggaactttggaacaatctgctaaaggctcaggatcagatgaaaagatctgcaaacaagtataggagggagctagtcctgcaggaaggagattgactctttttgaaactacaaccttatagaatgaagtctccagcaagaaagccgaaggagaagctgagtccacaattttatggaccctacaaggtgatacaacgaattggagaggtcacttataaactggaact

SEQ ID NO: 7733 - DNA, 324 bp, Glycine max
ttgatgtttgtgttgaatgcattaaaggttaacagaccaaaagcaagaaattaggtgcatatagagctacaaatgtcttggaattgatacatacaaacatttgtgggccatttcatacaccttcatggaatggtcaacaatattttatatcattcatagacgattactccatatatgcatacttgtttcttatacatgaaaagtcataatctctagatgtgttcaaaacatttaaagttgaagttaaaaatcaactcaacaaaagaataaagtgtgtcagatctgaccgtggtggtgaatactatggcagatatgacgatttag

SEQ ID NO: 7734 - DNA, 322 bp, Glycine max
tctattctgaatttcgagtcgtctcgatatactataagacacaatcagacatccgagtaaaaagttattgtcgtttcattttgcttagagtttctgttctgaatgtcgagcatctcgatatactacgggacacaatcagacatccgagtaaaaagttattgtcatttgaatatgctcagaggttccgttttcaaatacgagcgtctcgatatattacgggattcattcggacatccgtgtaaaaagttattgtcgtttgattttgctcagagcttccgttatcaaattcgagcgtgacgatatattgcgggattcattcgga

SEQ ID NO: 7735 - DNA, 275 bp, Glycine max
ggtgacaagtggttgaaaataacaatttagtgcccaacttgctccacaaagtcctccaaaaatggcttaggaacttagagtccctatcactaacaatgctccttggcaaaccatggagtctcacaatctccttgaaaaacaaatcaggcacatgggaagcatcatcaacttttttacgtggaataaaatgagccattttagaaaacctatcaacaaccaaaaaaatggaatctctaccattgcttgtttttggcagccccaaaacaaaatccatg

SEQ ID NO: 7736 - DNA, 333 bp, Glycine max
tctacagaaggttcgttcctaatttctctacaattgcatcacctttcaatgagctggtgaagaagaatgtggcatttacctagggtgaaaaacaagagcaagcctttgctttgctcaaagaaaagcttactaaggcacctgttctagctcttcctgacttttctaaaacttttgagctagaatgtgatgcctctggagtgggagttggagctgtattgttacaaggtgggcaccctattgcttattttagtgaaaaacttcatagtgccaccctcaactaccccacctatgataaagagctttatgccttaataagagccctccaaacttggg

SEQ ID NO: 7737 - DNA, 319 bp, Glycine max
tgtatttgatagatattgtgttatgtgtttaaatctgtcatattccaggatgaagacataaaaaatgcaattgaagatgctgggtttgaagcagacatattacctgaatccagtacagttgcacatgaaaccctggtgggacagttcacaattggaggtatgacatgtgcagcatgtgtaaattctgttgaaggtattttaagaaatcttacaggggtcaaaagggctgttgtagctttggctacttcatcaggtgaagttgaatatgatcccagtgtaattagtaaagatgatatattcaacgcaattgaagattctg

SEQ ID NO: 7738 - DNA, 376 bp, Glycine max
  unsure (1)..(376): unsure at all n locations
agctttgaacatttcaatgaaattcgnntttaaaaataccctcctttctcgcttcatttgatgaagcacctcttccagggaccgaaaatcgagggaagaggcgtggctttcaatgagggaatagaaagacaaatcgcccaatttgtaagaacccatttgggtacctgatttgaagatttcatatgaagggtggggtttgtgggaagaggaagaataagaggggagtgtaattagggtttgggagaaatagcgatggagagttgttcgaagaacgtttgtgggaaatgatgagtgctttggcatgacatggatcattcgggaaaaaaaaaaagtggggttntgaggtaatgggcagtgtcactgactcagtgagttg

SEQ ID NO: 7739 - DNA, 322 bp, Glycine max
tagcactcttcaagtccccatgcttgactaaatcccttctatcatcacttggcaaatctatccaaaactccccgtcatttcttcccccacctggcaaatttgagccggctgcatcaatggtctctcccgtggacacgccctttcggtacaacaaggccccattattgaaaaaccaatcaacagaagaaggcaagtaagcttcctcgggatgaaagaaaacagtaggcccatagtgctctataagtgcatgtatttggtggaggcgtggcattgctggtagcacaggatttaggttcttcaagcacacaacaggtagctcttc

SEQ ID NO: 7740 - DNA, 319 bp, Glycine max
tctcgatatattacgggactcaatcggtcatccgagttaaaaataattgtcgtttgatttttgtcagagcttccattttcaattacgagcgtctcgatatcctccaggacataattggacatccgagtgaaaagttattgtcatttgaatttgctcagagcttctgttttcaattacgagtgtctcgatttattacaggactcaatcggacatccgagttaaaagttattgtcgtttgatttttctcagagcttccgttttcaattactagcgtctcgatatcctacgggacacaatcggacatccgagtcaaaattta

SEQ ID NO: 7741 - DNA, 393 bp, Glycine max
  unsure (1)..(393): unsure at all n locations
agctttaagcattttcaaacgacaataatttttaactcggatgtccgattgagccctataatatatcgagacgctcaaaattgaaaacggaagctctgagcaaatttaaaggacaataaatnttcactcggatgtccgattgtgtcctgtangatatcgagacgctcgtaattgaaaacggaagctctgagaaaaatcaaacgacaataacttttaactcggatgtccaattgagccctttaatatatcgagacgcttgaaattgaaaacggaagctctatgaaatgtcaaacgacaataacttttaattcggatgtctaattgagtcccgtaatatatcgagacgctcgtaattaaaaattgaagctctgagcaaattcaaacgacaataac

SEQ ID NO: 7742 - DNA, 321 bp, Glycine max
tctagatgagttatgtcttcgaatcggtctatcctgtgaaaagttatgaccatttgaatttctcgagtgcttccgttgtttaatttcaagcgtctcgatattttatgtcctcaaatcagacatcggagcgaaatgttatgaccattcgaatttgtcgagagcttccgtttttcaatttcgagcgtctagatgagttatgtcaccgaatcagacatctgagtgaaatgttatgaccattcgaatttgtcgagagcttccgttgttcaatttcgagcgtctagatgagttatgtcaccgaatcggacatccgggtgaaaagtt

SEQ ID NO: 7743 - DNA, 367 bp, Glycine max
agcttgcacattgctgcttgatagaagattagcaagacggtaaatcatggtactttgacatcaagcggtacgtagagtataaggagtatccacagggggcttctgacaatgacaagaggacattgtgaaggttggcaactagtttctttttaagcggaggtatcctatacaaatgaaatcatgatatggttttgctctgatgtgtagacactaaagaagccgagcgaatgctcatggaggtacatgaagggtcctttgggatgcatgctaatgtgcatgtcatggctaggatgattctaagggcagactatcactggctcaccatggaaaatgactgttgcatccatgtgaggaaatgccacaagtg

SEQ ID NO: 7744 - DNA, 388 bp, Glycine max
actagaatgcctggtttacctggtaacccaactggccatgaataaaaaattttcacctgtcgccagactctatggtttatgctcctctattgaccaccacacagacctttgcccttctgtgcaacaatctgaagcaattgaacaacctgaagcttatgctgcaaacatctacaatagacctcctcaacctcagcagcaaaatcagccacaacaaaacaattatgacctctccagcaacaggtacaatcccgggtggaggaatcatcccaaccttagatggtcgaatccttcacaacaacagcaacaacaacaatagccttattttcaaaatgctgctggcccaagcagacatacgttcctccaccaatccagcagcaacaacaacaac

SEQ ID NO: 7745 - DNA, 331 bp, Glycine max
tgtcagaaagggaagcaagttaaaaactctctttcaaagcaaaaacattgtttctacttcaaaaccccttgaactacttcacattgatttatttggtccctcaagaactatgagtttaggtggaaattactatgttttagtaatagtagaggattactcaagattcacttggactttgtttttgaaaaccaaaaatgaagcttttgatgcttttcacaaacttgccaaggtgattcaaaatgaaaaaaggtctcaacattgtttcaattggaagtgatcatggaggtgaatttcaaaatgagttttttgaaaacttttgtgaagaaaatgg

SEQ ID NO: 7746 - DNA, 329 bp, Glycine max
tcggaattccatttcgagcaactcgatatattacgagactcaatcagacatccgagtaaaaagttattgtcgtttgaatttgctcagagcttcagtattcgatttcgagaaactcgatatattacaggactaaatcagacatccgagtaaaaaattattgtcgtttgaatttgctcagagcttcggaattccatttcgagaaactcgatatattacaggactaaatcagacatccgagtaaaaaattattgtcgtttgaatttgctcagagcttcagaattccatttcaagcaactcgatatattacgggactcaatcagacatccgag

SEQ ID NO: 7747 - DNA, 402 bp, Glycine max
agctttgagcaaattcaaacgacaataacgttttactcggatgtctgattgagtcccgtaatatatcgagacgctcgaaatggaataccaaagctctgagcaaattcaaacgacaataactttttattaggatgtctgattgagtcccgtaatatatcggaacgctcgaaattgaatgttgcagctctgagaaaattcaaacgacaattactttttactcggatgtctgattgagtcccgtaatatatcgagacgctcgaaatggaatatcgaagctctgagcaaattcaaacgacaataactttttactcggatgtctgactgagtcccgtaatatatcgagacgctcgaaattgaatatcgaagctctgagcaaattcaaacgacaataactgtttactc

SEQ ID NO: 7748 - DNA, 320 bp, Glycine max
tttctttgtgggttgatgggttctgtctcgtagaatggcatgatcactggctgacatgttctcaattagctcagttgcttctttcggggtcttcaattttatctttccccctgcagaagcatctaacagttgcttggtttgtggtctcagcccatctataaacatattcaattggattggctcggaaaacccatgagtaggagttcttctcaacaagcctctgaatctctccaatgcttcactcagagattcatcaagaaactgatgaaatgaagagattgcagctttcccttctgcagtcttggactctggaaagtatt

SEQ ID NO: 7749 - DNA, 322 bp, Glycine max
ttctaatgaatttacaatgttccaattgttttcaaaatattgtaattgattacaatgatttggtaattgattaccagtgtgtttgaacgttgtaattcaaattaaattgtgaagagtcacatcatttcacaaaaaagctttgtgtaatcgattacactgatttggtaatcaattaccagtgatagtttctgaacaaaatcaaaagatgtaactcttccaatagttttcaagtttttctaaaagttataacttttccaatggttttcagattttctaatagttataacttttccaatagttttcagattttctaaaggttata

SEQ ID NO: 7750 - DNA, 304 bp, Glycine max
tcaactagatgccttggttaatttggtaaccctactggccatgaataaaaaatttgcacttgtcgccagactctgtggtttatgctcctctgccgaccaccacacagacctttgcccttctgtgcaacattctgaagcaattgaacagcctgcagctaatgctgcaaacatctacaacagaccttctcaacctcaacaacaaaatctgccacaacagaataactatgacctttccagctacaggggcaattccggatggaggaatcatcccaaccttagatggtcaaatccgtcacaacaacaa

SEQ ID NO: 7751 - DNA, 339 bp, Glycine max
  unsure (1)..(339): unsure at all n locations
agctcttacggacttgaagagattctgagtttgtccatcacatttttgatggagngctgtgtatactaacaatttaacaccatgtgaccgcattatacctgtcccaaaagagattaagatgctgtatctctgtctaaaatgatttgctctggccatacatgcaatctcacaactgtgttcatgaataattttgcaacttttgctgcactgaatggatgtcctaaagctatgaaatgggcctatttagtacatatatctaccactactaatatgacactgatacgatgagacgacggcaaacctgtgatgaaatccatagagattgactctcatgctcta

SEQ ID NO: 7752 - DNA, 324 bp, Glycine max
ctcaagcttgctaaatggaagcagcgatgtctttctatggggggcaggataaccctcttcaattctgtcccaacagccctccctatctaccttctctcttttttcagaattcctaaaaaagtgatacataaggtagtttctattcagaggaactttttgtgggggggtggttctgaaacagctaagataccatgggtgatctgggatattgtttgtcttcccaagactaaaggagggttggggatcaaagatttgtctaagtttaatgaggccttgattggtaaatggggatgggatctggctaataaccagaatcagctttgg

SEQ ID NO: 7753 - DNA, 296 bp, Glycine max
tgatgatcggagtgagaaacatgtgtttattggctatgatgcaagttcaaaaggctacaaattgttcaatccaaacaatggaaggacaattgtgagccgaaatgtcgagttctatgaaaaaggcacatggaattgggaggagaaagaagacacttatgattttttcccgtactttgaagaaatagatgaagaagccttgactccaaatgattcaactccaacactttcaccaactccttcaaccaatgaagcctcatcatctttcgaaaggagttcaagtgaaaggccaagaagaa

SEQ ID NO: 7754 - DNA, 369 bp, Glycine max
  unsure (1)..(369): unsure at all n locations
agcttgtgtgtntagcaagatataccttatgtcanngtaccatcttattcgagtgaagtctgacgatattccgaagactacttttaggacccgttatggtcactacgagtatctagtcatgccctttggtgtgactaatgctccaggtgtgtttatggactacatgaataaagtctttcacccttactttgatagttttgtggtagtattcatagatgatattttggtatattcaaagactagagaggaacatgaagagcacttgaggattatgctgcttacccttaggaatcgacaactttatgctaagttgtccaagtgtgagtttttggttagagaaagttagtttcctagggcatgtgatatctc

SEQ ID NO: 7755 - DNA, 329 bp, Glycine max
tcaagcttttagaaaatgtcgatgccgagtgtatactatttttcttccatgtttcagttgtacgtatcctgtgtccactcaaattcccgtatgctggaaagtcatttatggtacaaaatagcattgcgcgcaacttgaatgtttcatttcgatacccatcaaacatgaaaacccccttgttcaacaacttgctcaagtcttcaatcaagggactgagataagcatcgatgtcatttcctgggtgtcttgggcttgatatcatcatagacaacattatgtattttcgcttcatgcacaatcaaggatgcaagttgtaaattactaacaaa

SEQ ID NO: 7756 - DNA, 332 bp, Glycine max
tgtggcaaagttgaacaattaaactaaataaaattgtattttgattacattagtatttcatagtatataatgcatctatatgtataaaagagaaggtgcaacaatgttgctcaccaatgtccctttaacctgagttgaaacatggcctttctcactgtctgagacaagcttagacaaaccaaaatctgcaacctttgctgtcaaattttcatccagcaagatattagtggacttcacgtctctgtggattatgggagggttggcaagctcatgtaagtatgcaagtcctctggatgaaccaagagcaacacggagtctcctcttccagtcaa

SEQ ID NO: 7757 - DNA, 318 bp, Glycine max
ttcacttaaagttcgtataccacgtctttttccggtttttccgacgttttcctcaaataaacgttggtggcgactccgcgcgtattcctttcttggaacacgcactcgcgagtcacgcgtcgccctcccgccgaagggtaggttgcgacaaccgtgacccaagagtccggtggcatacggagccacacgaccgtgggatccccaaattcgtatgttccatcatttatcatttgtatgttatcttatttttatgacttgagggactaacgtttgttttgctttttcgatcgccttttgttttgtgcatacatattgttt

SEQ ID NO: 7758 - DNA, 404 bp, Glycine max
  unsure (1)..(404): unsure at all n locations
agcttgtacccaccagtactatgatagcctagcataatcatttgtttcacccttttgtccagttttcttcttaattgatttggaacatgcttgaagcacaagcatccaaacacccttaggtgcttgagacaaggcttacttccactccaagtttcttcaggtgtcacattctctagcctctttgttgaacatctgttgagcagataagctgctgttgacactgcctcaccccaaaactcctttggcaagtgaaaattccttagcatacacctggtcatgttgactatggttctattgagtatctcanatacaccattgtggtgtggtgcatatggaggtgtgatcttatgaatattaccctcatcctcatagaaattctttgattcatgtgatgtgtattcact

SEQ ID NO: 7759 - DNA, 328 bp, Glycine max
tatcgaaggagtcataaataaactattttcataagctccttagaagctattatcattaactgtgaagcattcaagcttaagcaataatacaattggagaattctcatgttccataaaacagagtttgatttcaatcaccgtacgtatctatctatcatagaatcaacaattctaatcataacatgaaagcaagtacccgcaactgctccaacagcgccaaaagcaccagattttccgtctataacactggcatcgcactccacgccaccgtcttcggtcagattggagcctctgccggcgtttgtgcagggatcgtcctccagcactt

SEQ ID NO: 7760 - DNA, 321 bp, Glycine max
tctacattcaatttcgagtcttttcgatatattacgggactcaatcggacatccgagtaaaaagttattgtagtttgaatttgctcagggcttcggtattccatttcgagcgtctcgatatattacgggactcaatctgacatccgagtaaaaagttattgttgtttgaatttgctcagagcttcggtattccatttcgagcatctcgatatattacgggactcaatcagacatccgagtaaaaagttattgtagtttgaatttgctcagggcttctgcattccatttcgagcgtctcgatgtattacgggactcaatcag

SEQ ID NO: 7761 - DNA, 341 bp, Glycine max
  unsure (1)..(341): unsure at all n locations
ncaagcttgagcaattttaaacgacaataattttntactcggatgtctgattgagtcccgtaatatatcgagacgctcgaaatggaataccgaagctctgagcaaattcaaacgacaataactttttactcggatgtcagattgagtcccgtaatatatcgagacgctcgaaatggaataccgaagctctgaacaaattcaaacgacaataaatttttactcggatgtctgattgagtcccgtaatatatcgagacgctcgaaattgaataccgaagccctgagcaaattcaaacgacaatcactttntactcggatgtctgattgaatcccgtaatatat

SEQ ID NO: 7762 - DNA, 304 bp, Glycine max
tcatggttgcccagcttcaataacaagttacagggacccgatttttgtcagtcaattctggaaggacttcatggcttatcaagggattcaagtttagttttctactgcttaccatcctcagacagatgggcagatagaggtagtgaacatgtgtattaagacatatctgagatgtatgtgctcagatgatcctaaacaatggtccaaatggcttcccttggctgagtggtggtataactctacatatcacagcactattaaggccagtccctatgaaatcatgtatggacaagcaccaccagct

SEQ ID NO: 7763 - DNA, 365 bp, Glycine max
  unsure (1)..(365): unsure at all n locations
agcttttgagatactcanatggtcattatttttcactcggaggtccgattcangcgcatcacatgtcgagacgctcgaaattgaaaaatggaagctcttgagcaattcaaatggtcataatatttcactcgtacgtccaatacaggcgcataatatatcgagaggctcgaaattgaacaacggaagctctcgagaaattcaaatggtcataacttttcactcggaggtccgattcaggtttataacatatcgagacgcttgaaattgaacaacggaagctctcgagaattcaaatggtcttacttttcacttggaggtccgattcaggcgcatcacatatagagacgctcgacattgaataacgg

SEQ ID NO: 7764 - DNA, 386 bp, Glycine max
  unsure (1)..(386): unsure at all n locations
ncaagcttggcactggtattcatgtttcatttatgccttttgagtatgtgcattttgatttatggggaccatctagagtgaaaactcatggtggaagctcaaactttctcaccatcatagatgatttctcaagaagagtatggttgtatgttttgaaaaaaaaatcataagcttttcaaaagttcagagagtggcatactcttattggaaatcaacttggtacaaaactaaaagttttaaggactgaaaatggcctggagtttgtttcagagcaattcaatgagttttgcaggaaagtaggtatcaaaaggcacaaaacagtccctcacacaccacaacagaatggattagcagaaagaatgaataggaccatttttgaaaaagtg

SEQ ID NO: 7765 - DNA, 373 bp, Glycine max
  unsure (1)..(373): unsure at all n locations
agcttatgatgtgatttaccaagaggatctcatcaaacgccttgagtccgagatctctggtgactttgaggtaccataagaacattattcacataattttgccaactatttcatcatgtagcatttttttggtacattgtgatgactataaattaatgacgggactagtgttggcctagtggaggattgagatagtgtgcatgagatcttaggttcaaatcttagtacgactattgtataaaaaaaaaattaatgatggtgtgtatgtatgcaaatcagagagctatgtaccggtggatgttgcagcctgcggatcgtgatgctgttttggtgaatgtggcaatcaagaatggcaccanagactaccatgtga

SEQ ID NO: 7766 - DNA, 381 bp, Glycine max
  unsure (1)..(381): unsure at all n locations
agcttattattggactntgcaaagngggtctctngaatgtagccttcagtttgtaccatcatatgagggaagggggaatctctccctctgaaattattcataattctcttctaagtagttgttgcaagttgggaatgtttggggaagcactgacattggtagattctatgatggagtgtagtcatttagcacatctagaatcctataagcttcttatttgtggtctgtttgaacaaatgaacaaagagaaggctgaagctgttttttgtagtttactacgatgtgggtataattatgatgaagtggcttggaaagttctgattgatggcttaactaaggctggatatgttgatcaatgctcagaatngctgaatctaatgg

SEQ ID NO: 7767 - DNA, 369 bp, Glycine max
  unsure (1)..(369): unsure at all n locations
tttcatgcaagcttacatgtattgacaagctgttattttttaactgccatggaattccttaagagtatacaaaagaagccattcttacctgcaattttcttacatattcttcttggaacctgaatgtgacaatttcctgtccaaggattgtagttggttgcggaagttctggttttcctcaagtaagcgatcatactcaagaaggaacccctcagattgttttctcagagcagctatattggcttcagcaccatctacgtcttttgtttttgactgtagttcagattcaaggcggctaagttcagctctcaatctggctctttcttcctccacagacttaatntcttctgaattngcaactttcccatc

SEQ ID NO: 7768 - DNA, 226 bp, Glycine max
tacttcacatggatcctatggtgcctatgcagggtgaaagtcttggaagaaagaggtatgcctatggttgtggggatgatttctccagatttacctgagtaaatgttatcagagagaaatcagaaacctttgaagtattcaaagtagtgagtctaatacttcatagagaagaagactgtgtcatcaagaagaatctggagtgaccatggcagagaatttgaaaaca

SEQ ID NO: 7769 - DNA, 311 bp, Glycine max
tcggacctcagtgtgaaaagttatggccataatttatctcagagctttcttgttcatcttcgagcgtctctatatgtgatgcgccttaatctaacttccgtgtgaaaagatatgaccatttgaatttctcaagagctttctctgttcaattttgagcgtctcgatatgtgatttgcctgaatcggacatccgtgtcaaatgttatgaccatttgaattctccagagctttcgctgtacaattcgagcctctcgacatattatgcgccctcatcggacatccgtgggaaaagctttggacatttgaattttt

SEQ ID NO: 7770 - DNA, 455 bp, Glycine max
  unsure (1)..(455): unsure at all n locations
tataaaactcagcttgacataatcgcggacaatatcttttactcagtatgtacgaatgaatcccgtaatatattgagacactcgtaattgagaacggaagctcgtagcaaattcaaatgacaataacttttaactcggatgttcgattgagtcttgtaatatatcgagacgcttgaaattgaaaacggaagctctgagcaaattctaacgagaataacttttactcggatgttcgattaagtcccgtaatatattgagaggctcgtaattgaaaacagaacctcgtagcaaattctaaagacaataactttttacttgaatgcgattgagtcccgtaatatatcgagacactcgaaatttaaaatggaagctcgtagcngatgcatacgacaatgactgtctactcagatgtccgattcaatcccgtaatatatgaatacgctcgtaattgaata

SEQ ID NO: 7771 - DNA, 300 bp, Glycine max
gcaagctaggttacctccttcttcactacatcaataatcaccgagttgagtcttctctggggctgtcttactggaatagccccatcctctaaatttatccgatgcatacatatggatgggctaataccaggaatgtccaccagggtccagcctatagcctatttatgcttcttgagaacatataacagcttctcctcttgctcatcagctagggaggcagatataattactgtaaatcctttgctatcatccaagtaagcatattttaaatctgatggcagagacttcaattctggtgtg

SEQ ID NO: 7772 - DNA, 435 bp, Glycine max
  unsure (1)..(435): unsure at all n locations
tgctcattgtttggtatgtttctctctacagcncacttcctattgataagctcataaagaactacaccatagctccacacatcactcttagcagttagcttaccagtctgaacatactcaggtgcagcataacctatggtgccgacaacctttgagaagagataagtcatttattttgcatgacagcaaaatatcaggaacaaaacgaagattcagacttcagattatcattgtaactttntataaattagattcattcacattgaatatggtaaaatatagttaatttactcaatataagctgccagaaggcacactattctgatgtactactatgatgcaatattgtcaatataatgagttttctcaagagtatagacaaattcttactgctggtgaaacatagccagacccttctgatggtccttgccgagc

SEQ ID NO: 7773 - DNA, 448 bp, Glycine max
  unsure (1)..(448): unsure at all n locations
tgaagttggtgcanaaatggtgtgttcccgtgggtcttgtggagcctttggtgagttttgaagaaaatgggggaagatggggtgaaatttggcttcccctctccccccccccccgttttatttttttcatcagaccatgctcgcccaggcgagttgaatttgcaaaattctattgcaaagtttttgttatatatatttcccttttaaaccttattaattatgtataagcttaggtgaattcatgagataattcaagaaaataaataagtatgaaacatgatgttagtgcttagctttactgagttttaaaagattggctaaaattttgttaaaacataagcgcttagacaatgaaggaaagctggagttgctgcacatgatgtccaacgttatgtcaaggaatcagattgggctgcacaatgcacaaggcaagataaaatgtcaaatg

SEQ ID NO: 7774 - DNA, 448 bp, Glycine max
  unsure (1)..(448): unsure at all n locations
ngaaggcaaactggatgcgttggtcaacttggtaacttagctggccttgaatcagaaatctgtacctgtcgcaagggtttgtggtctgtgctcctctactgaccaccatacagacctttgcccttccatgcagcaacctgtagcaattgagcagcctgaagcttatgctgcaaatatttacaatagacctcctcaacctcagcagcaaaatcaaccacaacagaacaattatgacctttccagcaatagatacaaccctggatagaggaatcaccctaacctcagatggtccagccctcagcaacaacaacagcagcctgctccttccttccaaaatgctgctggcccaagcagaccatacattcctccaccaatccaacaatagcaacaaccccagaaacagccaacagttgaggcccctccacaaccttccctcgaagaacttgtg

SEQ ID NO: 7775 - DNA, 440 bp, Glycine max
  unsure (1)..(440): unsure at all n locations
caatggctcaatgagcaaggcgagatgatagtcaatttacaagtaaacataccctnttctataggagactactatgatgacgttttatatgatataatccttatggatgcagggaacattttgttgggtagaccatggcaatttaacaagaaagacatccacaatggtctcaccaatgaaataaccctcacccatgtaagcaaaaagctcaaacttgttcccttgacaccttcacaagtggttggggatcaagtacaaataaaactcaaatgggatgaggaaaataataaaaaaaagaaaagaagaacaacctttaatggttaatgaggagtgtaaggaggtaggtgtctcctccaataggttagctaagaagaaaagtcattttgctataaagacaaacattaaagacacttcccttcttagacaacctccacatattc

SEQ ID NO: 7776 - DNA, 377 bp, Glycine max
  unsure (1)..(377): unsure at all n locations
ctgcagctcaagattgattccatttctttgtacaaaattcatcttcctggtgtccncttaaggtaatggagaattgataggtagcttgtaagtggacttctcttggacagtgcataaattggctcaccaaactaacaacaaaagtaatattaagccttgtgtgagacaagtcaatcaagtttccaactagacgttgatgcatctccttatccacttatgcattgtcatcttaattagccaatttaatgtttgaatccatgagagtacttagagaagctatcatacatgtctccttcagcagatttgtgacatatttntggccggaatatgaaaatacccttcttggagtgagacacttcaattcccaaaaaatattt

SEQ ID NO: 7777 - DNA, 463 bp, Glycine max
  unsure (1)..(463): unsure at all n locations
tgtgacatgaggccattaagtgcctctgccacaatgttatatagaagaggtgatagatggtctccttgccttagtcctttctgaggtaggaactcagctgagggactaccattcaccanaaatgaaacagatgctgattntagacacccctcaatccattgaattcatttgctgcaaaagcccatcctacccatcatataagtgagaaactcccaagacacaaaatcatatgccttttcataatcaaccttgaagacaatgcaaggcttttggcatcttttggcctcttcaactacctcatttgtagtcaccacgctgtgtagcatatgtcttccttctataaatgctgattgcctctcatgaataataaaaggcatgaccttcttcaatctattggccaatattttagccactatcttgtatgtgcatcctatcaatgatatanngttgaagtcattcaaca

SEQ ID NO: 7778 - DNA, 453 bp, Glycine max
  unsure (1)..(453): unsure at all n locations
atgtaaatgatcaaacttattcttgtattgagatattatntgcttcattgttattctnccacctcatcatttacactaaaaacatccttatatcacatgttttcacataaaaagtaaaaattaaatactatcaagatacatgatgaaaccaatttgaagatataactagtattcaaatatataaataaattgaatataattgatctaattatatactaacattcatatgtcaccacatttcatctacattgtctttactaatatcactccaaccattaacttgtaaaggagctttctggcaaatacatacttgtgtctcatacttgaaatattttacactattaggtagagacttcttcactagtttctcaagagagtggtgtatggatgaatgattatttgctcttttagaatcaatatcaatgaatttaccatctatcagttacaacggat

SEQ ID NO: 7779 - DNA, 269 bp, Glycine max
  unsure (1)..(269): unsure at all n locations
tgagaatggaggatntccttgatggtcctctctnatgttatcttgtaacacagctccaaactcaaaaatggaggacacatgaatgacaacgcaattcattcatggggctccgaaaaagggtaagaatggaggattttcttgagggtcttctcttatgcaatcatggaacacatctccaaactcaaaaatggaggacacatgaatgacaacgcacttcatgcattgggctccgaaaaagggtgagaatggaagatcgcctgatggtcctt

SEQ ID NO: 7780 - DNA, 432 bp, Glycine max
taaatattcaatttcgagcctctccatatattacggtttctcaatcaaacatccgagaaaaacgttattgtcgtatgaatttgctcagaggttcaacattcaatttcgagcgtctctatatattacgggactcaatcagacatccgagtaaaacgttattgtcgtttgaattggctcagaggttcaacattcaatttcgagcgtctcgatatattacgggactcaatcagacatccgagtaaaaagttattgtcgtttgaattggctctgagcttcaacattcaatttcgagcgtctcgatatatgacgggactcaatcagacatccgagtaaaaagttattgtcgtttgaattggctcagaggttcaacattcaatttcgagcgtctcgatatattacgggactcaatcacacatccgagtaaaaagttat

SEQ ID NO: 7781 - DNA, 456 bp, Glycine max
  unsure (1)..(456): unsure at all n locations
tgatgtcattcaaaacacactatgtagacctaaatgtttactaaacatgcattgccaactcaaacgacaataactttgtactcggatgtctgattgagtcccgtcatatatcgagacgcttgaaattgaatgtcgaagctctgagccaactcaaacgacaataactttttactcggatgtctgattgactcccgtaacatatcgagacgctcgaaattgaatgttgaagctctcagccaattcaaacgacaataactttttacacggatgcctgattgagtcccgtcatatatcgagacgctcgaaattgaatgtagaagctctgagccaactcanacgacaataactntntactcggatgtctgattgagtcccgtcatatatcgagacgctcgaaatngaatgtcgaagctctgagccaactcaaacgacaataactttttactcggatgtctg

SEQ ID NO: 7782 - DNA, 429 bp, Glycine max
  unsure (1)..(429): unsure at all n locations
agcttcaacattcaacttcgagcgtctcgncttattatacgactcaattagacatccgagtaaaaagttattgtcgtttgaatatgctcagagcttcaacattcaatttcgggcgtctcgatatatgacgggactcaatcggacatccgagtacaacgatattatcgtcttaattggctcagagcttctacattcaattttgagcgtctcgatatgttacgggactcaatcaggcatccgagtaaaaagttactgtcgcttgaattggctgagagcttcacattcaatttcgagcgtctcgatatggtacgggactcaatcagacatccgagtaanaagttattgccgnttgagttggctcagagcttcaacattcatttcaagcgtcttgatatttgacggactcaatcaggcatccgggcaaaaagt

SEQ ID NO: 7783 - DNA, 453 bp, Glycine max
  unsure (1)..(453): unsure at all n locations
agaggaagaagcatgatggaaatctgctggtcattgttgaaaatntcatgcacgcatccaagaaatatganaaggtcaggttattagttaaaacttactagttaattcattatacttgattataatgaatatttttaaagaaagatgtccttctgaatgcaacttaaataggtgcataacagaataaacttcttcattgatattgtaggctgtaaaatacattgagtttgatcactcattcagtgaagatgagaagtgtcgtgctaataccttacatttatcctgtaatttgaacaatgctgcctgtaaacttaaattgngggagtacattgaagcttcaagactatgcacaaaggtactctctgatcctaatttaagtanttttctctttctccctgtctctctatcacctgatgagacaagaaaacattgcataaggtagtgcatgttctt

SEQ ID NO: 7784 - DNA, 408 bp, Glycine max
  unsure (1)..(408): unsure at all n locations
cctcttcacgtctggagtatgtatgtagcatatagatccaaagacccttaggtgctntgctgatggcttcttcccgttccaagcttcaattggagtctgtcttttatagactcagttggacatctgttgagtatgtaaacagtagtgtagactgcttcagcccaaaatgagttaagtagtccctcttccttgagcatcgatctagccatctctataactgtgggattctttctcttggacactccactttggtgaggagaatatgcgactgtaagttgtcgctcaatgccttcatcctctcaaaaatcttcaaactcgcgagaggtgactctntgccgcaatcacttcttagaactttatccatcttccactttgatttcagcaatggccttgaacttgtgaatactc

SEQ ID NO: 7785 - DNA, 451 bp, Glycine max
  unsure (1)..(451): unsure at all n locations
tgtaatcgattacacttatactgtaatcgattaccattacagagtgtcagaaaatattctcaacagtcacatctttgtatgtggttcttgaatggctatcaaaggcctatatatatgtgacttgagacacgaatttactaaaagtttttcagaacaaaaaggtcttatcttcttataaagcaaaatcgttttatcctcttacaaattccttggccaaattacttgtgattcaataaggaattatttgagtgctcaaattgttcaatctatctctttcaagagagatttcttcttttcttcttcttcattttgaaaagggattaagagaccgagggtctcttgttgtgaaagaattctaaacacaaaggaaggcgtgtcctttgtgtgttagaacttgttaaaggaatntacaagatagtggaactctcaagcgggttgcttgtggactgga

SEQ ID NO: 7786 - DNA, 459 bp, Glycine max
  unsure (1)..(459): unsure at all n locations
gctatcactcttactggtgattgaaaaaagctnttaatgtttactcaagagcatgtattgtgccgataccgttaactggtgaacaggttcttgagcgggttgacgacattaatactgtatttggaaagacttcattattggtctgatctagatgtcagacattgtattgatgttatccatgtcaagaaaaatgattgtgatagtgtcatcgacacgcttcttaagatttaatgcaagtcaaaggatggtttgaataatcactaagatctagttgagatgggtatacgagaccagttacatccaaggtctgatggtaacaaaatatacttgcttctagcttgtcatactttgtctagaaaggaaaagataactttttgtcagtgtttgtgccatgtcaaagtgccacagggataatcttcaaatgttaacagccttgtgcagttgaaggatctcaagcta

SEQ ID NO: 7787 - DNA, 345 bp, Glycine max
ctgacattcaccacagattctgccttcttctattttcagatagagaatgcctctaacagcacctttgtcaatgatattcttcatgcctcttaagagcagatgtccaaatctttgatgccatattttgacttcatcttctttggaggatggacatgtggatgagtaactggtttctagaggtgtccataagtaacagttgtcctttgatctgctggccttcattagaacttcattcttctcatttgtcaccaagcattctgactttgtgaaggttacattgaatccttcatcacacaactgactgatgctgatcaagtttgcagtcagtccctttaccagcagtac

SEQ ID NO: 7788 - DNA, 458 bp, Glycine max
  unsure (1)..(458): unsure at all n locations
tctntgaganaacttccttgttatagctagagcttagctacacacacccctctcataactaagctcacctccttgagaagcttctttaagaagattcctaaagaagctagagcttagctacacatacctctctaatagctaagctcacctccttgagatgagaagctagagcttagctacacacccctataatagctaagctcacccccatgacaaaaaaaacatgaaaatacaaaaaaaagtccttactacaaagactactcaaaatgccccgaaatacaaggctaaaaccctatactattagaatggccaaaatacaaggcccaaacaaagaanaaacctattctaatatttacaaagataagcgggtcatgcttagcccatgggctcgaaatctaccctaaggctcatgagaaccttagggccttcccttggatctctagcccaatctacttgga

SEQ ID NO: 7789 - DNA, 337 bp, Glycine max
ttatgtgctcttcattgctgtttttgttgaataatccctaaaattctttcttgataaaactctattgatgtagctctcatttcattttttgggactctccgaattgcttgtctcttggcctgcttattggtgagttgccatatagggaattgtaaaggatgattgtggacatcccttgataatattgagtcaagaagttaggggaaaaccaccttaagagcttttggactaagaaacacttcaaattgagtgaatcacctatgagagaacactctccataaattcacgaccttcttttagtggttttaatagagaattacttaccttcattgtttca

SEQ ID NO: 7790 - DNA, 308 bp, Glycine max
  unsure (1)..(308): unsure at all n locations
gcttatatcatgttgtatatataggntatttatgcatgntctcttttgtattgtagatgatcaatgagaggagcctccttgtgtatgttaactctagcatgaggtagttcggaaatttctactttgtgctttgagtgtaccggtgcccaaatactataaaaaaaaaacgactcttatgcctaataataaacatgatggcgagccctgttgcagcggtaaagttgtgccttggtgacttgttggtcatgggttcgaatccagaaacaacctctttgcatatgcaagggtaaggctgctgacaacatccc

SEQ ID NO: 7791 - DNA, 430 bp, Glycine max
atgaacatatcagcaggattgtgtagagggctaattttatgaacattgagttttctttctaaccgaatgaagtgatatctaacatctatatgcttggttctatcatgatgaacttgatccttggccaagcatatagcactaacgctgtcacagtagatgttagcatattcttgattaattccgagatcatttatcagacctctaagccaaattccttcctttgcagctttagtaagagccatatatttagcctcagtagttgagagagcaaccgaaggttgaagtgttaccttccaactcaccaagcagccaccaagggtgtaagcataccctgttaatgaccttctcttgaccagatcagcagcaaaatctgcatcagaatagccagtgaggcagcaatctgggtgagatccatagatcaaacctacat

SEQ ID NO: 7792 - DNA, 455 bp, Glycine max
  unsure (1)..(455): unsure at all n locations
ggccaacaaatccgtatttctttagagacattntcatattattattccatttgtcattttaattagaatattgcttttacattccgcaattcaattaaaaactattgtaagtataactttaaaatatttattataaaatttaacaattttattatacaaatgagagtctttgattgaatgacaactatattcacattaaattcttttatttttattatttgaagcatttaattaaactttgaacattacagctcttagtatgtttaaaacttagtttatttatttaactttccaatagacaatgatttctttgatgatagaaaaaccacacaaaaaaagctatttaattgaagaaaaatcaaattaaaagaaaaataaaataaagattttctttataaaaactaattntatctctnttatatcttcttattnttaattaaaattcacaaactaat

SEQ ID NO: 7793 - DNA, 453 bp, Glycine max
  unsure (1)..(453): unsure at all n locations
acagattattntattatgtaagtgtaaatggttatattaacctctatgttgttattttttttattattaaaatcataaatttatttacttttttaaatgttaggaatgttgatatatataaaaaagtcaaacttataagtttattgaaggataaagttatgtttattttaaagtctgattgcaaaatgaatttttaaataagttatcattcaccttatattagaccttaaagataagcttataaaacataagttagactcaatttttataaaaggttcatttgtttaagttgtttttttaaaaaaatataataacaaaataattaagcatcttttcatgtgtttgtctaaattatctttttgctaagaaaacnagaaaatgatttttnttaataaacaaactttatctacttttagaaaaaacatttanaaacattgcttaaaaaaataattt

SEQ ID NO: 7794 - DNA, 343 bp, Glycine max
tgccgcatgcaagcttctaaactttatacaagaatgaagctctttaccacttgttagacaagttggcctagatatcttaagaagggggggttgaattaagatactacgaattatatccccaattaaaaattctatttatctttctattcaagggatagattcccttcataatgaatgtcttaaataatgattcaaaagaacaatgtgaatatgaatatgaaacaataataaataaaggagtttaagggaatagaaagtgcaaactcagatttatactggttcggccacacccttgtgcctacgtccagtccccaagcaacccgcttgagagttccactatctt

SEQ ID NO: 7795 - DNA, 430 bp, Glycine max
ggcacaaatgtcaggattcttactattcctcggaatagtctaatcaaccaatcccaaacaagggcatattccatcgactgttttggtcatttaaggcatgcattgatgcgtttgcattttatgaacccattgtgtgaatctatggaacatggctatatggaagatacaaagggacattgttagttgcaatttcacaatatggcgctaacaacatatttccattggcatttgccattgtcgagggtgagacagtagatgggtggcactttattttgcagaacttgagaacatgtgtgacaccacaacatggtatatgcttaatctctgacagatacgagtcaatcaaaagtgcatacagatgaccgaacagtgtgtagacagcagacaactcatcacatgtgttctgtattcggcacatatgtcaaaacta

SEQ ID NO: 7796 - DNA, 409 bp, Glycine max
cgtaatactcaccacctctatcagatctaataattttcacctttctatctaattgtctttctacttcattcaagtaaatttctaaggcatccactgcacgagggcagtaagtagacataaccgtaacgtgaatagtcatcaataaaggtgataaagtatctttccttttcaaaagaattaacatcaaaagattcacaaatatcagtatgcacaatttcaagaagctgagtgcttcttgtagctcctttctttgttttcccttaatacaatccacacaaatatttagattcgtaaaatctaaatcaggaagaatttcattctttattactctttccatcctttctctaagaatgtgacgtaaacatttatgccacaagaaagccgatcgttcatcactaaatatacgtta

SEQ ID NO: 7797 - DNA, 449 bp, Glycine max
  unsure (1)..(449): unsure at all n locations
nttgtgtgggatacctaatgtgagcacagtttctagtctccttaaggaaagattcatgaccgctccagtgctagttttgcctaacccgagagaaccatttgaggtgtattgtgatgcatcaaagatgggtttaggcggagtgttgatgcagaatggccaagtggtggcctatgcttctagacagcttaagactcatgagaggaattatcctacccatgatctagagttggctactgtagttttttcccttaagatgtggaggcattatctttttggctctaagttcgaggtgtttagtgatcataagagccttaagttattgtttagtcagaaggagctgaacatgagacaaaggagatggttattgtttcttaaggattatgattntgagcttagttaccatcctggtaaagccaatgtagtggctgatgctttgagtangaaatctc

SEQ ID NO: 7798 - DNA, 453 bp, Glycine max
tggtctaaactattcacacggattgccgattcgggcgtataatttatcgagacactcgaaattgaacaatgcaagctctcgagaaattcaaatggtcataacttttcaatcggaggaccgattcatgcgcataatatatcgagacactcgaaattgaacaacggaagctctctagaatttcaacatggtcataacttttcacatcggaggtccgattcatgcgcataatatatcgagacgctcgaaatcgaacaacggaagctctcgagaaattcaaatggacataacttttcactcggaggttcgattcaggcgcataatatatcgagacgcacgatattgaacaacggaagctctcgagaaattcaaactgtcataactcttcactcagaggtccgattcaggcgcataatatatcgagacgctcgaatatgaacaacggaagctctcgag

SEQ ID NO: 7799 - DNA, 386 bp, Glycine max
gccttgagaagattcctaaagtagctagagcttagctttacgctcctctctaatagctaagctcacctgcttgagatgagaagctagaacttagctacacaccccctataatagctgagctcacccctatgacaaaatacatgaaaatacagaaaaaaagttcctacttcaaagactactcaaaatgcctcgaaatacaagggtaaaaccctatactactagaatagccaaaatacaaggcctaaatgaaggaaaaaacctattctaatatttaaaaagataagcgggctcatacttagcccatgggctgaaaatataccctaaggctcatgagaaccctatggccttcccttagatctctggcccaatctacttggagtcttcta

SEQ ID NO: 7800 - DNA, 336 bp, Glycine max
cgctcgaaattcaacactggcagctccgcaccaattcagatgggcatacctttacactcggaggttcgattcacgcgcataatatatcgaggcgctcgaaattgagaaccgagagctctcgagaaaatcaaatggtcataactctccactcagaggtccgattcatgcgcctaatatatcgagacgctcgaaatcgaacaacggaagctctcgagaaatacaaatggtgataacttttcactcagagatccgattcagtgcataatatatcgagacgctagaaatttaacaacgaaagctctcgagatattcaaatggtcctaactttaactcgga

SEQ ID NO: 7801 - DNA, 441 bp, Glycine max
  unsure (1)..(441): unsure at all n locations
agcttcaagaataatggcctcagcaaacttcttatttctagaaggattattaatcaatagacctccaatctttaatggagagggttaccactactggaaaagccgaatgcaaatttttattgaggcaatagacttaaacatttgggaagccatagaaatagggccttatatacccaccacagtagaaagaaccacaatagatggaagcacaacaagtggaagcacaacaatagaaaaacctagagatagatggtctgaagaggatagaagacgagtacaatataatttaaaagccaaaaacatataattacatctgccctgggaatggatgaatatttcagggtttcaaattgtaagagtgctaaggaaatgtgggacactctacaagtaacacatgaaggcacaacanatgttaaaagatctaggataaacacattaact

SEQ ID NO: 7802 - DNA, 411 bp, Glycine max
  unsure (1)..(411): unsure at all n locations
agcttctacattcaattcgagctttcgttatattactgtactcaancggacatccgagtaaaaagttattgtagtttgaatttgctcagggcttcggtattccatttcgagcgtctcgatatattacgggactcaatcggacatcagagtaaaaagttattgttgtttgaatcttctcagagcttcggtattccatttcgagcatctcgatatattacgggactcaatcagacatccgagcaaaaagccattgtcgtttcaatgtgctcagggcttctgtattccattacgagcgtctcgatgtattacaggactcaatcagacatccgagtcaagagatatagtcgcttgaatttgctcagagctactacattcaatttcgagcttttcgatatattacgggactcaatc

SEQ ID NO: 7803 - DNA, 434 bp, Glycine max
acctgcggcatgcaagcttcagcctgatcgctaagcgtcatactttttcgtggctaagcttgacctattatcgccaagcgcaattccttacggccataagagtccctctcatctaagcgaatgtgatgcaatcctaccccccaagggcattggataaaaaactcgaagcagattggaccaaagatgcaagagaaggcccaagggttctcatgagccttagggtagatttcgggtccatgggctaagtatgagcccacttatctttgttgatattagattaaggtttcattaattttgggccgtgtatttagggctccataatgtaggcagggtaccctagaaatataggatttttcagcccttggtatttagggcacctagaactagttttgtattaggggtagttttgtaatttcacatgcactaagtgaata

SEQ ID NO: 7804 - DNA, 353 bp, Glycine max
tcatatctaatcattttcacatttatgtctaactgcccttttacttcattgtagtaaatatgtaaggcatccattgcctaagaaatctcaggcagtaagtagacataaccataacgtgaataatcatcaataatggtgatgaagtatcattcctttctgacagaactaacatcaaaaggtccacaaatatcagcatccacaatttcaagaagctgagtgcttcttggagctcttttctttgtatgttatggttgttttcccttaatacaacccacacaaatatttagatccataaaatctagataaggaagaatttcattctttattaatctttccatcctttctctagaaat

SEQ ID NO: 7805 - DNA, 385 bp, Glycine max
atctaagagacttctctgttaagctagatctttatcatacacacccctctattaactaaattaaccttcttataaataattacggatgaaaataacgcaacaaataatcaaacatcaaacataattactaataatatatagatatatatatcatggtgttacaggtatggagtatcaaaagattcatgcttgcccgaatgattgcatattgtacaaacatgaatttcaaaaaatgccaaaatgccctaagtgtggggtatcacagtacaaagtgaaggatgatgaggagtgtattaatgatgaaaactcataaggcccgccagcgaatgtgttatggtatcttgccatcattccaaggtgtaagcatctgtttactaatggagac

SEQ ID NO: 7806 - DNA, 402 bp, Glycine max
  unsure (1)..(402): unsure at all n locations
agctctcttgagaagattcctagagaagttttagttatctacacttacccctnnaaagctaagctcatctcttccttgagatgataagatagagcttagctacacacacaccctataatagttaagctctcccccatgccaaaatacataaaaatacaaaaaagtccctactacaaagactactcaaaatgccttgaaatataagactaaaaccatatactactagaatgaccaaaatacaaggtccaaaagaaggaaaaacctattctaatatttacaaagaagagtggacccaatcttggcccatgggtcagaaatctaccttgaggttcatgagaaccctagggccttctttaacagctctagcctaatcctctttgagtcttctatccaatacccttg

SEQ ID NO: 7807 - DNA, 388 bp, Glycine max
tgtagggttaaagtctcacgaaagcacttgctcatgcttcatttgttagccgcggctatacgagacatcttgccaaacaaagacaggttagcgataactcgcctgtgctttttcttccatgctatatgtagcaaagtcattgatccagtcatgtttgatgagttagaaaatgaggccgcaattatactgtgccagttggagatgtattctccccctgctttctttgacatcatgattcacttgattgtgcatctggtcagagaaatcaaatgttgtggtcctgtttatctacggcggatgtactcggttgagcaatacatgaagatcataaaatggtatacaaagaatctatatcgtccagaagcatctattgttgagaggtacattg

SEQ ID NO: 7808 - DNA, 271 bp, Glycine max
  unsure (1)..(271): unsure at all n locations
agctagccnngtttcttgttatatnngatttactcanggncactatgaacgacaaataccttgggataaagggagngccgccatgttttcaaagcccggactaaagcatacaactccttatcataagttgaatagctaagggtaggaccacttaacttttcactaatatacgcaattggatggcctttttgatcaacacagccccaatcccaacatgtgaagcatcacactcaatttcaaaagatttttgaaagtttggcaacgcaagtat

SEQ ID NO: 7809 - DNA, 340 bp, Glycine max
  unsure (1)..(340): unsure at all n locations
ctcttatgcaaaacttttatctcatagaanactttttcttagagacaaaaggagaagatttgtagaagcagagcaaattgttgaagaccgactntattcataaagcagaataaatcacttggttagccaatgtggttatggtgaagaaatcaactagaaaatagaggatgtatgtggattatagcgacctcaacaaagtaaggatgcttaccatttgcctaacatcgacaaattagttgatagggcatgcaggtttagattactatattttctagatgcctacacgggctataatcaaatcaagatgtgatacaatcctaccccccaagggcattggata

SEQ ID NO: 7810 - DNA, 438 bp, Glycine max
  unsure (1)..(438): unsure at all n locations
tctcgatatgttatacgcctaaatcggatttctgagtgtttagntatgaccatnngaanttctcgagaccttccgttgttcaatttcgagcctgtcgatatattatgctcctgaattggacctacgagtgaaaagttaagaccatatgaattgctcaagagctaccattgtttaatttcgagcgtctcgacatgtgatgcgcctgaatcggacctccgagttaaaagttataaccatatgaatatgtcgagagcttacgttgttcaattccgagcgtctctatatgtgatgcgcctgaatcagacctccatgtgaaaagtaacgaccatttgaatcgctccagagcttctattgttcaacttcgagcgtctcgacatgtgatgcgcttgaattcgaccttcgagttacaagttatgaccatatgaacatgtcaagagc

SEQ ID NO: 7811 - DNA, 369 bp, Glycine max
  unsure (1)..(369): unsure at all n locations
agcttgcttctttnggngcatagatagctttgctaaaaattttttaagngncatgaatctctgacataagcttcaaccaattaacattgtttgtatgacaactgttgtagttggacagcaatcacacagtttgtccaccatggtatgctttatgttcctattggttatagttttagtatgctttatgttcctattggttatagctttggtgctggaatgttcaatttggagtccacaaaaggaggaactccatatggtgttggagtttttgctggagatggtacaagacaagcaagtgaaatggagctggagctcgcagagtatcatggcaagtatatatgaaattagcccataaaagctagaatggat

SEQ ID NO: 7812 - DNA, 407 bp, Glycine max
  unsure (1)..(407): unsure at all n locations
agcttgtcaatgtattcttgtatccaacttactatacaagaggcatcacttccagtcctgctccaatgaataaatctttataagtaaaacatgtatgtttattctaactcaccccatcttggagcttgtcctctacagcagtggcaccaagaagaattaggttcttctcaatcttatctgatacttcctcaatcattatatcctgatcagcactgactacattcttggccctagagaatttactatcaaactccttgtattcttctgcatcaagttcacgataggccagtataagggttctcagacccgcatcagcatactcatgcacatgctccatggttntctcttcaaactcccttctattcttggcngcctttcaaacatggtgctgcatgaaaacatcactc

SEQ ID NO: 7813 - DNA, 374 bp, Glycine max
  unsure (1)..(374): unsure at all n locations
aaaggaaaatcctagtatttaatacttatactaataaaaaaactatacattacaaataccataaatgggaaagttgggacaattatacaagtttatacacaaagttagtcgttctcaccgactaacactggcgtagtatatagcatgaaataaaattcccttcctttgcccaagcactgcacctacgacgtaatcacttgcattacacatcagctcaaattcttgtccccaatctagtgctgtaattactggagcaaacactaatctggttttcaaatcattaaatgcatccatacactcttcattaaacacaaatgcaacatctttattcaacagattgctaagtggtttggtgactntngagaaatctttta

SEQ ID NO: 7814 - DNA, 291 bp, Glycine max
  unsure (1)..(291): unsure at all n locations
agacaagnggcctcagatatcttaagaaggggggggttgaattaagatattcgaaactttttcttctaattaaaaatctatcttactttttacttaagttatgaattcccttaatgataatcttcttaaatattaattcaaatgaagcaacttgaatatgaatataaagcaataataaataaaggagattaagggaagagaaaatgccaactcagttttatactggttcggccacacccttgtgcctacgtccagtccccaagcaacccgcttgagagagccactaacttg

SEQ ID NO: 7815 - DNA, 370 bp, Glycine max
accgagaggattggaaacataaaattcctcttcaatgtatccatttaggaaaacacttttgacatccatttggtataacttgaaatcgataacataagcataagctaataacaatcttaatgcctctcatcttgctaccggtgcataggtttcaccaaagcctataccctcttgttggttatagccctcggctactagccattctttatttctagtgatcaaaccatgttcattcaatttatttttaaacacccattttagtgccaatgatgttcatgttttttgaataaaggactaattcccatacatcatttcttttaaatcagttcaactcctcatgcatggatattatccaaaactcatctttgag

SEQ ID NO: 7816 - DNA, 402 bp, Glycine max
  unsure (1)..(402): unsure at all n locations
actaagcttctagtctacctatgaattcggctacttatgcatttcctctattgacatgacatcacttctggcacttaaatgcttagaagttggaaccctcctctcaaataaaattttggctttaaccaggggcatgtcttccaaggcttcaacccttacaacaactaatatacttctcttcattggtgtgagtccctcataaaaaatatggagaaaaaactgctctgaaatctggtggtgaaggcaactagcacaataattnttaaatctctcccaatattcatatangctctctccattgagttgtctaatacctgaaatatcctttctgatggccatggtcctggaagtanggaaaattttttctaagaatactctcttgaggtcatcccaactcgtgat

SEQ ID NO: 7817 - DNA, 440 bp, Glycine max
  unsure (1)..(440): unsure at all n locations
atgtctcttatggccatgactatcatttgntgtatcaagttgtggcaancangagactntaagcctactaatttaagatctttcaactgcacttggctcttaatatttgaagagtatccttgtgggactttgacctggcgtagacactgaaaaaaactgatcttctcctttctgggcaaagtatgacaagctggaggcaagtatattttttaccatcagaccttagatgtaactgcgatcgtatatccatctcagctagatcttgacaagtattcaaatcatctttcgtcttgccttgaatgttaagaggcgtcccaatgacactatcacatatatttttcttcacatgcataacattaatacaatgtctaacatctagatcataccagtacgcaagatcaaacaaaatcgacctttttttccatatgcaaggcttactt

SEQ ID NO: 7818 - DNA, 305 bp, Glycine max
gatgcccatactagagcacagcacgttctttacagaagggagtagttcatgtcacacgcgcgtgaactatttactcaagtagtagacggcgcgctctcttttcccagactcgacatgttgccccagcatacaccccattgacttgtccaaaatcgtcatatacaagatgagaggtgttccgggcaccggcggccgaagcactagagggattatgaggcactgattgatcctgccatacgcctctagacagtccttgatgcaacggatggattggctcttgcataacagcttgaacaacggctcac

SEQ ID NO: 7819 - DNA, 382 bp, Glycine max
  unsure (1)..(382): unsure at all n locations
agcttctcctctngaagctnctattgcncttttttcccaaataggcactgnggngngctctggaatctgtgccctttcttctgcctacaatttgtctaaaagtttgtaaaagtgtgtgtcaaagtgtgtgtaccctaattctgcacaagataggctttaaataagctctaaattcacgacgttgcgcttagcgccaccctatctgatgcaagctccattagagcttgtaggcctaggatcttcttcatcaatggattcctttgcttcttggaagatgaatggcagcggaatgaagaaaggaagagagagaggagacgccacttcaaggagaagatgagtctagaagaagctcaccaccataggaggccatggataagagctt

SEQ ID NO: 7820 - DNA, 466 bp, Glycine max
  unsure (1)..(466): unsure at all n locations
tatgctgcanacatctacaatagatctcctcaacctcatttagttaatcagccacaacagaacaattatgacctctccagcagcaggtacaatcccgggtggaggaatcatcccaaccttagatggtcgagtccttcacaacaacagcaacaacaacagccttattttcagaatgttgttggcccaagcagaccatacgttcctccaccaatccagcagcaacaacaacaacaacaacaacaacaatagccccagaaacaacaaacagttgaggccactccacaaccttcccttgaagaacttgtgaggcaaatgactatgcaaaacatgtagtttcaacaagagaccagagcctccattcagagcttaactaatcaaatgggacaattggctacacagntaaatcaacaacagtcccagaattctgatagattaccttctcaatctgtccataaatcccaaaatg

SEQ ID NO: 7821 - DNA, 435 bp, Glycine max
tcaagtgtatccttattatgccattgagattctgaatttcctgtacgaacgttccaagctaaggttttattggagatattccttattgcttaggtttgcatatcatatcccaaaaaataataaatttatgattaaataatataaacatattaaagtacaaagaaatagacatcatatttatatatcatctctatatattatcatctttccattctttacagctatctttcaatatttttaatactcattgatatattgagaaatgttttaaaaagtaaaatattattatatttgggttaaattcttattttaagcatattacattggttgtgtggaaatggatcactggacaaatcaatatgacaaaagaaatgttcatggaagtatgctaattgataagcaataacctgatggcattgatgggataggttggta

SEQ ID NO: 7822 - DNA, 384 bp, Glycine max
ttccagaaccattctccccgaagcgtttcaaggtgccaaagatgacttcaccatgcagcttgcattggtgtggaaccaaatcaaagcgccactgattgtcccgttgctgagactagcagtgtttctgtgcttgatcatgtcggtgatgatgttcattgagagagtctacatgggcattgtcatcactctggtgaagttgtttgggagaaagccagagaaacgttacaagtgggagccaatgaatgacgacattgagttgggaaactcttgttacccaatggttcttgttcaagtccccatgtacaacgaaagagaggtactattaccaataaggcaataacttagttttttttcctcatcatcacttctaacacttatactata

SEQ ID NO: 7823 - DNA, 351 bp, Glycine max
  unsure (1)..(351): unsure at all n locations
agactcaagcttcttggggttggctggctattatagaattttcatcgaaggtttttctaaattggcatngcccctaactaagttgactcgtaagaatgagaagtttgtttggaatgagaagtgtgagcaaagtttccaagagttgaagaggcggttgacgacagctccagtgttaattttgcccgaccctaagagaacatttgaagtgtattgcgatgcaagcgggcaaggcttggggtgtgtgttgacgcaagagggaagagtaatggcttatgcttcacgtcaattacgtcctcatgaagttaactacccgacccatgacttggaactagcagcggtggtctttgcctt

SEQ ID NO: 7824 - DNA, 352 bp, Glycine max
tcatgcttaagtatgtatggcaaaacttcattactgttgttttagacatacaagtgagcttgtaacaaatcttctagacttggagtgatcacatgcagtcctcttgaacccttgccacccactctatcatcatgccgagacttagaaaggccaacaggtttagccttctcaatatattcttctgcaatgtacctctcaacaatagatgcttctggatgatatagattctttgtatacccttttaagatcttcatgtaccgatcaaccgggtacatccaccgcaaataaacaggaccacaacatttgatttctctgactagatgcacaatcaagtgaaccataatgtcaaaga

SEQ ID NO: 7825 - DNA, 326 bp, Glycine max
tgaagctcaagaaaaattttgaagatgttttataagaagttgtggcttttagatgttattagcagcttcaactaccccattcatcttgggcctgtatggcgtggaattatggtgttggatcctgaaatcctcacacatttccttcatcattttgttgttcagattggtggcattatttgtgataatcttcttgggcaacccataccggcagattatctctttcttaatgaacttgaccaccacactccttgtcacactggcatatgaagcagcttcaacccatttggtgaagtagtcgatcgcaaccaaaatgaagcgacgtctat

SEQ ID NO: 7826 - DNA, 356 bp, Glycine max
ctacatattactcacagctttatcctcttaaaagattaagagtttttctttactaaaatgttttatcctttcaaaaagattccttggtcaaccacttgcatattcaataaggaattttgattggtcttcattttacaatctacctcttttaagagagacctcttcttctcttcttcttatttctgaaaagggattaagagaccgtgggtctcttgttgtaggggattcttgaacacaagggaagggttatctctgtgtgtattgttaatccaaagagagagtgaaagtttaattggggaatagtctttgtttctaaattcaaccccccctttttctgaggccatttgtccaacatc

SEQ ID NO: 7827 - DNA, 409 bp, Glycine max
  unsure (1)..(409): unsure at all n locations
agctttgggttcgatggcccctatgacatctatcccccacatggaaaaaggccaaggggcggacatgacattcaaaggatgtggcggaacattgacattgtctgcgtacgcttgacatttatggcatttccttacatgggtgcagcaatcgctttccatagtgagccagtaataacctgctctaaggatcttcctggccatagcatgcccattggcatgtgtcccaaatgaacccccatggacttcctcaatcatgtaattcgcctctttggcatctacgcagcgtaagagggtcatggttttgtttgtacaggacggtaccactcacaaagaaaccagtagccaatctccttaacgttatnttgtcattgtcggaaatccctggtggatattctttgttctcgacata

SEQ ID NO: 7828 - DNA, 327 bp, Glycine max
tctggtgtgtacatcttgacttgctttcctatctgacattcaccacagattctgccttcttctattttcagattgggaatgcctctaacagcacctttgtcaatgattttcttcatgcctcttaagtgcagatgtccaaatctttgatgccatattctgacttcatcttctttggagaatagacatgtggaggagcaactggtttcttgaggtgtccataggtgacaggtgtcctttgatctgctgcccttcattagaactttactcttctcatttgtcaccaagcattcggactttgtgaagattccatggaatactatcatcaca

SEQ ID NO: 7829 - DNA, 403 bp, Glycine max
ttcttgaccaggaattatttgtgtgggttggatgttgaattctggttgttcctggtgcggagatgatggtacagagggtgaaccaggagctgaagtttcttttggtgaggtagccatggaaaagcagagcgtttggaatgatttcgtaaatttctgagagctgttggggaatgcagacaatgagattaacacgaaaatataagtttgaatgaggaatgtagagggacgtgtgaatcaacgcgcgaatttgctttggttcagtagtgaacgtgctattaatgttaagtgattcgtttgggcacgttcagatatcagtagttgctacaattcctctagcagacaaatgcccagcttgcccctcagtatttcaaactgttttgcaatcaatgcctttgtgaaaata

SEQ ID NO: 7830 - DNA, 415 bp, Glycine max
  unsure (1)..(415): unsure at all n locations
agctttacgcagtttccttggattggtgggattctatagaatatttattcgaggttacatgaagattgcagctcccctttcatagttgctgggcaatggtcccttccggtggacggagatggcgactgaggcgttcaacacactgaaaaaagcagtatccacagcaccagttcttgcattacccaattttgatgtcccattcgtggtggagaccgatgcgtcgggtaccggcgtcggggcagttctttcttaggtgggccaccctatagcattcttcagtaaggagttctgccccaaactccgagcttcgtctacatatatccgtgagcttgcagctatcacgatggccgttaagaaatggcgccactacttgctgggtcantcctttgtgatcctcactgatcatcaaaagttg

SEQ ID NO: 7831 - DNA, 355 bp, Glycine max
  unsure (1)..(355): unsure at all n locations
ctcacgcttaacatccccagactggccttcaacgggttttctctctnngttgtctgcgctatngacaagttacagtctaacaatactaactctgaggaatattcctctttcattccgaatcttccgcatcctatcacgttaaacgcaacaccaccgaagatattgaccgagttcatgaagccactgctggaaacagagctcaaaagctacggcttaatcgtcaacgactttgcggaactcggaggagaagagtacatcgagcactatgagcaaaccacgggtcacaaggcgtggcatattgggccagcgtctcttatgtgcaaaagaagccttgaagagaaagcggagaggggac

SEQ ID NO: 7832 - DNA, 359 bp, Glycine max
aactcaagcttatacaatatataataaaagaacaatgacttttgaagagtcttttcatgtttccttcgatgagtctaatgccattcttccaaggaaggattttttagatgatatttcagattccttagaagatacacatattcatggaaatcattctaaagaaaaagacgaaggaagaaatgaggattctcaagataatggggctagaggaaataatgaacttccaagagaatggaaagcctcaagagatcatcccctcgacaacattattggtgatatatcaaaaggggtaacaactagacactctcttaaagatttatgcaataatatggcttttgtatctataattgaacctaaaa

SEQ ID NO: 7833 - DNA, 371 bp, Glycine max
agcttgaccaggaattatttgtatgggttgaatgttgaattctggttgttcctggtgcggagatgatggtacagcgggtgaaccagaagctgcagtttcttttggtgaggtagccatggaaaaacagagcgtttggaacgatttcgtaaatctcggaaaactattgggaaatgctggtaaaaacacgaatgccaagcagatataaatttgaatgaagaatgtagagaggcgtgtgaagcaacggtcgaatttgctttgtggtgaacgtgctattaatgttaagtgattcgtttgggcacgttcagattgcagtagctgctataattcctctagcagacaaatgcccagcttgcccctcagtttttcaaact

SEQ ID NO: 7834 - DNA, 355 bp, Glycine max
tggatatctggcagcagaaaaacaagtagttgagaactaagtaaaaggaaatggcttcctcaatgatctcctccccagctgttaccaccgtcaaccgtgccggtgccggcatggttgctccattcaccggcctcaaatccatggctggcttccccacgaggaagaccaacaatgacattacctccattgctagcaacggtggaagagtacaatgcatgcaggtaagacaactccacacatatatacacacaagaggcaccaaaaagtttaaaattcatcttacacatttatatatgctccaaaatgttacttaatttaacatgttagtcataggttacttaaattaacatgttaa

SEQ ID NO: 7835 - DNA, 418 bp, Glycine max
  unsure (1)..(418): unsure at all n locations
agcttgtaggccttggatcttcttcatcaatggagtcctatgcttcttgaattttaatcacaggggaatggagaagaagaagagttgagaggagacaccacttcaaggagaagatgagtcaagaagaagctcaccaccatagaaagccatggataagagcttgaaggtagaagaagatgaatggagggagagggagagaaggagcacgaaattttatgcctcaaaagaggtctgaactttgaagtttaattctcaaatgatcaaagttgaaaaaattcacacacatggcctctatttatagcctaagtgtcacacaaaattggagggaaatttgaatttctattcanatttcacttgaattttgaaatgaatttgtgaagccaaattttggagcccaaatttcactaattatgattag

SEQ ID NO: 7836 - DNA, 337 bp, Glycine max
  unsure (1)..(337): unsure at all n locations
tccgttttcaatttcgagtcgtctnngatatttacagggctcgatcagatatccgagttaaaagttattgtcgtttgacttttcttagagcttccgttttcaatttcgagcgtcttaatatattacagggctcgatcagacatccgagttacaagttattgtcgtttgacttttcttagagcttccgttttcaatttcgagcgtctcgatatattacagggctcaatcagacatccgagataaaagttatagtcgtttgacttttcttagagcttccgttttcaatttcgagcgtctcgatatattacagggctcgatcagacatccgagttaaaag

SEQ ID NO: 7837 - DNA, 350 bp, Glycine max
atgcttgagaaaattctaacgtcaataacttttaactcggatgtctgatcgagcccagtaatatatcaagacgctcgaaattgaaaatggaagctctaagaaaagtcaaacgacaataacttttgactcggatgtccgattgtgtcccctacgatataaagacgctcgtaattgaaaacggaagctctgagaaaaatcaaacgacaataacttttaactcggatgtccgattgagccctgtaatatatcgagacgctcgaaattgaaaacggaagctctaagataagtcaaacgacaataacttttgactcggatgtccgattgagccctgtaagatatcgagacgctcg

SEQ ID NO: 7838 - DNA, 404 bp, Glycine max
agcttgtttttctagtagtgttagatgtcttgcatatatatcaaaaactatttattttatttcgttcataacttaatcaaataaattttaaaatatgaaaatcatttctcaatttttatttgaatcttaatagttgaaaattttaaaagataatgaattgagagaaaattgattatattttgtaaaactaatttaaaagctacctgaaagctggaaaactaattgaaaaatgaaaaattagcagcttgtaaccaaaagttgaaaacttttaaattaacttattaaatcacaagtgtttgataaaactatatgttgaagtagttgaaaaatgtaaaatgacaagaatagaaacatttatatgatattttatataaattttaattttattttatgggataaatatt

SEQ ID NO: 7839 - DNA, 343 bp, Glycine max
gaacactcaagctttagatgaatatacttaatgtacataatttatatttttataacatgaatacactacaaaagtttaaaaaaatcgcatcatatattcttataccctagccatgaaattttattttatattaattcattttctattgcatcaacatctttttttacacaaataagaatatgaatataataatattaattttcagaagttactgatttgtttggttaaggacttgggcaaagaaaagataattaaataaaaaaatttactcaatgtgataccgtgcaagtgaaaacaacaccaggacacctaggagtacgtaacaggacatgccacataatgg

SEQ ID NO: 7840 - DNA, 406 bp, Glycine max
  unsure (1)..(406): unsure at all n locations
agcttacaaaggggctcatcaactccttgagtgaaagtagcaatcactggcttctttngattgatcttggattaagggaaaaatctattcaagaaattgtcacaaagcccatcccaagtcaaaggaaagctaggaggaatagcttggtaccaatgctcagccttgtcagcaagtgaaaatgagaaaagactaatacaaatgaaatcatcatccacttgatgaatcttcactgtattgcaaatatgcacaaaggtagtcaagtgggcataatgatcttcataatcaaagccatgtaacttgttttgttggaccaatccaatgagagatgcccttatttccacattgtgagccaccacttcatgttggaaaacaagtgaattgggctctagtctagctagcctctcta

SEQ ID NO: 7841 - DNA, 407 bp, Glycine max
agcttcttccccatgagcagcctcatcacctatctccatatcctcttcagacattctcaacggaacaaaaattctaatgaagaggcaaatcaaacttgtgctgataacattgacaaagataacaaagataatcccaaggatttggacccccatttgcctgaacccggtactgaccttcttcgaacctaaaccataaaagaaaccaacgtattgaccatcagttccatagaacaatttgttaagtcttggatcagcaaagagtccagtgaggagtcctcctagggttcctgcaatggcatgagtgtggaacactgccattgtatcatcaaccttctgcagtagctttgatctcttatggaccaccatcatggtgaaccatggaattgagccagataacactcccatta

SEQ ID NO: 7842 - DNA, 382 bp, Glycine max
  unsure (1)..(382): unsure at all n locations
agctttccctcttcatagaacaataggggcctaaagaaccattgccctgatgagattatgactatgtcaaagttttcaaccaggcttgtccatgcttcatctgcctcatccacatacagcttcatgatgctgttgtaggtgtggcctctggggtctgcatcactggatctcacaaaatatggagaccacaggtttccaagtgtgaaattgtaatcatgatagaaataacgtttgaagtataccacatctgaagagtatttgtgagaaacatcctcaggctcagacacctaaaaaaagtaaaaccacataagcatgttttaggattgttatcttcatgagtaggactnttttaacatgaccaaggtttaaaaaacagttcacg

SEQ ID NO: 7843 - DNA, 353 bp, Glycine max
  unsure (1)..(353): unsure at all n locations
atagaacctcaagctnatacagaaatacatattttccagcaacattttgatggcactacaacaatacaacatacatcacatggaaatattagattacagccagacacaatgcatagatgctactgtgttgggtgctttgctacattgccacatgattttctggtacaggaactgtttggaggggatcaaattcaataaagaatgtccgaatctccatcggagcaagttcaaccaccaacttcgtaggatcaacaggtcctcctctcaccaccttcggttcttcagtggagccttctaccttccaatctagcttcctcttttccatttgagctctttcttgattagcagacaaa

SEQ ID NO: 7844 - DNA, 370 bp, Glycine max
agcttgagcttattttagatgaccaattttaaaaaacaaacttgagtttaaagaaaatgttgtcattggccaaaatagattatttagtgaggattaacctatctagtaccaacttctagaataatatctgaatatgcccaaatatttttatgttcgaaaagttaatgagatatttttctttatgattcaacttaaagatagaacaatttaagtaaaatatttggaatcaataaaatgttgttggctgaaattaattatacgattaatttgttttagataaattgtatgattgattctttaccattattatttactagtcggtaacccgtacatacgcacgggtggttccgccaattgatttttgatgaat

SEQ ID NO: 7845 - DNA, 354 bp, Glycine max
tacgagcgactcgatatataatgcacatggatcggacctgtgtttgaaaaggtttgaccatttgaatttctcgagagcgtcccttgttcaatttcgagcgtctcgatatattatgcgcctgagtcggacctccgagtgaaaaggtatgaccattggaatttctctagagcttccgttgttcaatttcgagcgtctcgatatattatgcgcatgagtcggacctctgagtgaaaagttatgaccattggaatttctcgagagcttccgttgatcaatttcgagcgtctctatatattatgcgcctgaatcggacctccgagtgaaaaggtatgaccatgcgaatatctcaagagc

SEQ ID NO: 7846 - DNA, 360 bp, Glycine max
  unsure (1)..(360): unsure at all n locations
agctntggagaaccaagccaatcagaatgctagacgaaatattatgggaatagaggtaacaatggcggtaatgacggaccgaggcagaaccgggttgagggagtaaagctcaatgttcctcccttcaaaggtagaagtgatccagatgcctacctggactgggaaatgaagactgagcacgtatttgcctgcaatgactacactgatgcgcagaaagtcaagctagcagcagctgaattctccgactatgcccttgtttggtggcataaataccaaagagaaatgttgagagaggaacggcgagaggtagatacatggactgagatgaatagggtgatgagaaaaaggtatgtgcccact

SEQ ID NO: 7847 - DNA, 345 bp, Glycine max
tgcctgaaacttcctgggatccctttgtcgttgtcttccggttagggtgaagcttaaggagaacccaatctcctatctggtagttcacttcgcgatgtttcccatcaacttggcttttcatagcagcttaagccttgagaagcttatttcgaatagcttggaaagtgttatccctatcagtcaacatctcttcaatggcctcaatgttcgaagaccctgtaatatattctggaaagttaaagggtttttggcaaaaggcgacttcataaggagtggctccagttcccgtgttccatgaagtattgtgggaccattcgacccacgggaggagcttcccccacaagc

SEQ ID NO: 7848 - DNA, 365 bp, Glycine max
  unsure (1)..(365): unsure at all n locations
aaactcaagcttnggaaaatgatttctatacaaaagttagttttataaagngttttacagtggtcgacaaaagcggggcttttgctcctacgtatccttaatttgtgataaggaactcagacctacgtagttcttgcaagcggtgtgagactaaaatagtctcggtgttctttcactaaaatgcgaacatgctttagtaaagaaacaaaacctctaactaattagagcaacatattaattttggagaaaaacaatgtgtctattggagaaggagagtatgttgataaaaattttcttgtaaccacaaatgagattttggatgttagcgttttgtttctaaacaaccatttagaggaaacactggg

SEQ ID NO: 7849 - DNA, 368 bp, Glycine max
ctctaagtcacctgcggctgcactctacttatcaaatgaactctgatacccttgtgacatgcctctgattctaagaagaggggggggttgaattaagatatcacaacttatttccccaattaaaattctatttcactttctattcaagttataaattcccttaataatgaatttcttaaatattgattcaaatacaacaatttgaatatgaatataaaacaataataaataaaggagtttaagggaagagaaaatgcaaactcacatttatactggttcggccacacccttgtgcctacgtccagtccccaagcaactcgcatgagagttccactatcttataaattccttttacaagttctaaacac

SEQ ID NO: 7850 - DNA, 353 bp, Glycine max
gcttgagaatggaggatttccttgagggtcctttcttaggcaattttggaactttactccaaactcaaaaatggaggacacatgaatgacaacgccattcattcatggggctccgaaaaagggtaagaatggaggatttgcttgagggtcctctcttaggcaatcatggaacacaactccatactctaaagtggaggacccacgaacaggcctaagcaatagcattcatgtggctccgaaaaaggatgagaatggaggattgccttgagggtcctcttttaggcaatcatggaacacagcttcaaactcgaaaatggaagacacatgaatgacaacgcaattcattcatgggg

SEQ ID NO: 7851 - DNA, 385 bp, Glycine max
tgcaagcttgaatcggacctcagtgtgaaaagttatgaccatttgtatttctcgagagcttgcgttgtttagtttcgagcctctcgacatattatgcgcccgaatcggacatccgtgtgaaaagttatgaccattagaatttctctagagcttccgatgtttaatttcgagcgtatcaatataatataagcctgaatcggacctcagtgtgaaaagttatgaccattttaatttcacaagagcttctgttgttcattttcgagcgtctctatatgtgatgcgccttaatccgacatccgtgtgaaaacttatgaccatttgaatttcttcagagctctcgttggttaattacgagccttctcacatattatgcgcccgaatcgga

SEQ ID NO: 7852 - DNA, 342 bp, Glycine max
tgtaagatttgcaagatcatcttccttgattactccttgaaaattattgccatcaatccaaagagatgacaatttagagagtgatccaagactttcaaatggatttccactgaatttattaatagagagatcgagaaatgttaaatctatctcccttgagttgcggagatttcccaaaaaagtcggaattgttccttcaagttgattatatgacaaataaagtgcaacaagagaagtcaaatttcccaaagaagttggaatggttccttcaagttgattagctgataaatcaagttcaacaagagaagtcaaatttcccagggcatcagaaatagtcccatg

SEQ ID NO: 7853 - DNA, 373 bp, Glycine max
atcttcttccggaagttagttttttaaaaaaaatatattttattttgtaataatttacttttaattggataaaataatttataaaataattaatactattatacataaataattaaataattagtgaacgtaattatgactaatatttataatttgttttctacgcgcatgtcaaatattaattgtgtgacaatttagtataatttaaatcattaaaattaattaatgcgtacattttattaaaaaatataaatatttattatgataacattaattttttattacaaaagttatattttcttaacaaaatgatatttttttgttaccaaatggagaataaaagaattttcatttttattattaggtaaaataa

SEQ ID NO: 7854 - DNA, 350 bp, Glycine max
  unsure (1)..(350): unsure at all n locations
atctttacagcagatgccactctactccaaattcttgaaggatatgttaacaaggaaacataagtacattcaccaggaaaacattatagtggaaggaaattgtagcgctatgattcaaaagatcgttccacataggcataaagaccctgngagtgtaactattccttgttcaattggagaagtcactgtgggaaatgctcttatcgacttaggagccagtataaatttaatgccactctccatgtgtagaaggttgggggagttggagatcatgcccactaaaatgactntacaactgactgaccgctctattaccataccatatggagtaattgaagatatgctggtca

SEQ ID NO: 7855 - DNA, 343 bp, Glycine max
tcaagaattatggcctcatcaaactacttgtttcccgagggtaattctattaatagacctcccatctttaatggagtgggttaccactattggaaaacccgcatgcaaatctttatagaggcaatagatttaaatatttgggaagccatagaacaaggaccttatgttccctctatagtggccggaagtgcaacaatagaaaaacctagagcagattggactgaggaagaaagaagattagtacaatataacttaaaggccaaaaatattattacatctgccctaggaatagatgaatactttagggtttcaaattgtaaaagtgctaaggatatgtgggata

SEQ ID NO: 7856 - DNA, 350 bp, Glycine max
tgtagcaaatgcaaacggcaataacgtttttctcggatgttttattgagtcacgtaatacatcgaaacgctcgaaattgaaaacagaagctctgtgcaaattcaaacgacaatacattttaactcggatgtccgattgagtcccgtaatatatcaagacactcgaaattgagaataaaagctctgaacaaattcaaacgacaataactttttactcggatgtccgattgagtccagtaatatatctagacactcgaaattgagaatagaagagctgagcaaattcaaacgacaataactttttactcggatgtccgatggagtcccgagcgtctcgatatattatgcgcc

SEQ ID NO: 7857 - DNA, 236 bp, Glycine max
agcttaactcggatgtccgagccgcgctcataaataatcgagacactcgatattgaataacagacgctctcgagaaattcaaatggtcataacttttcacacggatgttcgattcgggcgcataatatgtcgagacgctcgaaattgaacaacggaagctctcgagaaattccaatggtcataacttttcactcggaggaccgattcaggcgcataatatatcgagacgctcgaaa

SEQ ID NO: 7858 - DNA, 340 bp, Glycine max
tatgaatgcatatgctactagcattcctgaggcttctaatctagcaactggagcatatgtctcctcataatctattccctcttcttgattatatcctttggtgactaatctagccttattccttataactatgccattttcatctaatttatttctaaatacccattttgttccaatgattgggtagttttagggtttctcgactaactcccaaacattatttctttcaaattggtttagttcttcctgcatagctattatccaattttcatttattatggcttcatttaaatttttaggttcaatcatagatacaaaatcatgttattgcataaatctt

SEQ ID NO: 7859 - DNA, 347 bp, Glycine max
  unsure (1)..(347): unsure at all n locations
agcttatgctgcattcatttataatagaccccctcagtagcaaaaccaacaacagcagaataattatgatctttcaagaaacagatacaatccaggttgcaggaatcatccaaatctgagatgggcaagtcctccacaacaacaacagtctatccctcctttctagaatgctgctggtccaagcaagccatatgttcctcctccaatgaagcaacagcagcaacaacaacaaagacaacaagcaattgaggcccctcctcaaacttccttagaagagttagtgaggcaaatgaccatccagaatatgcaatntcagcaagagacatgagcctncattcagagtctga

SEQ ID NO: 7860 - DNA, 334 bp, Glycine max
  unsure (1)..(334): unsure at all n locations
taataatattcctgaaactttagttttttttagaaccgngatggatgacgtcttgtgatctatgtatccgatctcacctattgggataaaagcttagttgttgtttcaattatcatattcagtttttatttgacgatttctcatttttatgcctttggtattcaattttattccatgtgcctaaccaaagtatcttggtatgtatttaaattttgttttcaaggcaaggttcctctattatctgtggaggcactgcatcaccttcatacatttatttttgtcctaacttgggcccatgtcacattttgtgttctcactgttggttttggagggc

SEQ ID NO: 7861 - DNA, 334 bp, Glycine max
  unsure (1)..(334): unsure at all n locations
agctttgatttcctttgttccggaaacctttgttttctcatgtgcacccaaacccaatctccgggttcgaagacaaccttctttctccctttgttggcttgtttagcatagcttttacttttcctctcaatttgatctttgactctctcatgatgcttcttcacatagtccgcctttgcttgaccttctttatgcttaaaaacagaaacattaggcataggcaaaagatcaagaggagttagtgggttaaaaccataaacaacttcaaaaggaaaacaattagtggtgctatgaacagctctattgtnagcaaattcaacatggggtaaacaag

SEQ ID NO: 7862 - DNA, 336 bp, Glycine max
tgctaacttatggaagctcctaatatctttcacactttttggggtgggccattcttggatggccttgattttctcagggtccacttggaccccatttctaccaactacaaaacctaagaaaactatattatctacacaaaaggtacacttctctatatttgcatagagggtgtttttcctaaggactgaaagaacttgtctgagatgtcctaagtgatcatctagcctcctactatacactaaaatatcatcaaaataaacaactacaaatctacctatgaaatcccttaagacatgatgcataagcctcataaaggtgcttggtgcattagtgag

SEQ ID NO: 7863 - DNA, 307 bp, Glycine max
agcttgttcatgatataaaaagaggtgattagagtgatgctagctaggaaacctatgtatttactaatgcctcatgattattgtttatcttttattgctagttctttgcctataggtgcgaaagaattattgaaggagtttggggatgtctttcccaaagacacccctcatgggttacctcctttgagagggatagagcaccaaattgatctcatgccgagagtttccataccaaatagaccaacatatagaagtaatccaaaagaaacaaaagagagccaaagacaagtggaaagcttgatggaaa

SEQ ID NO: 7864 - DNA, 300 bp, Glycine max
cttaagctagaacggccatggtgattgggaagaagataatttcatttgttgtatgtaaactatgtttctaatgttctttccaaaaatgatctttgcttcaataacatgatttgtaagtcttgtgactattaatctagttccattgcagaggcctttagattgatctagattcctcaacaacattattggagttccatttttaatttgattctatgattacgaacccccaatatctctaattctttcacaaacttcacaacaactacctctacccaggtgttatcaattgcatcatacatg

SEQ ID NO: 7865 - DNA, 267 bp, Glycine max
tttttatatcaaaataagcttgatcgatacataagcttatttatgtaacttatttttcataaactacttcaattagtttattttggtaattcacttaaagtaatttatggaaattaataagttagttgttactatttttttcttaaccttactcatattagtttattaaattcaattttaccattttatttaattaaagacactcattttacccttttattcgatttagaaacactcattctttttgctttgtaactaaaaaaaccc

SEQ ID NO: 7866 - DNA, 348 bp, Glycine max
  unsure (1)..(348): unsure at all n locations
agcttatagtcattatttgntgtgaaccataagccanagctgattattcccttgagataagcagtggttggagtctccatgtatcgactgatgagtctagtagcatatagaatgtttggtcttatgcacatcaaatatcataaactagtcaccaaactcttgaaatttgtagcatccaccttttttgcttcgtcgaaatttgataacttcattttgcacaccatccgtgttccaattggcttccaactatccatcttgaatttcttgagcatctctttatcatagttttgntgngaaatgaaaattccatcttccttctgctttacctcaatgccaagatagtatgac

SEQ ID NO: 7867 - DNA, 296 bp, Glycine max
  unsure (1)..(296): unsure at all n locations
agcttgaaattgaacaacggaagttctctagaaacanaaatggncataacttatcacacggacgtgcgattcacgcgcataaaatatcgagacgctcggaatcgaacatcgggagctctcgacaaaagacaacggacaataactatcacacggaaccccgattctagcgcatcacgtatcgagatactctgaagtgaaaaccggaagctctcaagaaactcaaacggccataacctgtcacacggaagacccaatcaggcgcataatatatcaagacgctcgaaattgaacaacga

SEQ ID NO: 7868 - DNA, 292 bp, Glycine max
gttctcaatgctctgttcaagctctcccatttcctagaggtttatctaggatctctatcagatactatgctagatggcacaccatgtaacctgacaacctcacttatatacaaggtagtcaacttttccaaggaaaatctgatactaatgggaatgaagtgagcagacttagtcaatctatcgacaataacccatatagaatctaaacctctacgggtcctacgtagtcctaccacaaaatccatggaaatactgtcccacttccactggggtatctctaagggttgtaact

SEQ ID NO: 7869 - DNA, 345 bp, Glycine max
  unsure (1)..(345): unsure at all n locations
agcttgcattttaaagcataatttccccactctatangctgataatctaaccaacattccctcactaccttctgaaattgcttgttcattagccatccatcataaaccttaaaaggtttagggccccaatcactgcatttagaatgcatgataatacgacagtgatcagaataattcctctcaaggttaaattgggagctatcaggccatttggacaaccatccatcagagacacacactctgtccagtttgcttttgcaggaaccattacgcctaacccaagtaaagggtttacccacacaaggaatatcatcaacctccattgcagcaagccaatcattgaaa

SEQ ID NO: 7870 - DNA, 290 bp, Glycine max
  unsure (1)..(290): unsure at all n locations
ctcctgttctagctntacccgattttactcaaccttttgaagctgaatgcgacgctagtggagttggcattggggctgttttgatacaaaacaaaaggcctatagcttatttctcggagaaattgggaggagccagattgaactatcgcacctatgacaaagagttctatgccattgtgagagctcttgatcattggaatcattatttgcgttctaatcactttatatcgcattcatatcatgagtcattgaaatatatcaatgggcctcacaagttgagtccaaggcct

SEQ ID NO: 7871 - DNA, 321 bp, Glycine max
agctttgaacaaattcaaatgattataactttttattcgcaggtccgattgagtcccgtaatatatcgagacgctcggaatggaataccgaagctctgagcaaattcaaacgacaataactttggactcggatgtctgattgagtcccgtaatatatcgagacgctcgaaatggaataccgaagctctcagcagattcaaacgacaataactttttactgggatgtttgatcgagcgtcgtaatatatcgagacgctccaaattgaataccgaagcttttagcaaattcaaacgacaacaactttttattcggatgtctga

SEQ ID NO: 7872 - DNA, 320 bp, Glycine max
  unsure (1)..(320): unsure at all n locations
tgggatgattctcattctcatcttagtagtaggcgtttgcatngnatggactcatcgttggcattatactntcttcacgtgctggccaatccagagctgattagtataaaatttcctgtttgctgcgcacagaaccatgaattggatggtgaatgtcgccggggactaagtcatgtcaagagtgtaactttgtgatgctctgcatccgtcttatgataaaattgaggttatctctgaaataaagtgcctcaaacgacttattttccattcattggatctaatttgagtcccaactacattagagatctctgtaataaaac

SEQ ID NO: 7873 - DNA, 268 bp, Glycine max
caaaacgcactagagcgtgttcttggatatctaaatcaaatcccatcatacggacatcgagaagttctgatcttataattcgctctcagtacatgtgatcctggtgatctcatggaaaccatccagaaatgcaaaaagagtaaaataaggtgctcagtcattggtcttgcagctgaaatgtttgtgtgcaaacatctctgcgaggaaactggagggacttattctgttgcactacatgaggttagcttgttgattttgatgatcccct

SEQ ID NO: 7874 - DNA, 363 bp, Glycine max
  unsure (1)..(363): unsure at all n locations
tgaaggacatgcacaaagtgtgactatatgatgtggcaatggggtgtagcaagcaaatgctcaccttccccttaggctggaccaaactttaattgggttgggcttctcccaattcaattaaatttatctcccaacacacatcaaatagggcacttaatgcatgtgaaattacaaaactacccctaatccanaaactantctaggggccctataatacaagagctaaaaaatcctacattactagggtaccctccctacactatggagccctaaatacaagtcccaaaaataatgaaatcctaatctaatatgtaccaagataagtggtctcatacttagcccatggacccaatcttcttggag

SEQ ID NO: 7875 - DNA, 319 bp, Glycine max
  unsure (1)..(319): unsure at all n locations
accactcccagggtgctggaatttcttcacattgtctcgatgggtgcctatgcatgttgaaagccttggaggaaagaggtatgcctatgttgttgtggatgatttctccagatttacctgcgtcaactttatcagagagaaatcacacacctttgaagtattcaaagagttgagtctaatacttcaaacacaaaaacactgtntcatcnnnanaattnnnantcaccattgccnanactttnaaaatagccagtttactgaattctgcgcgtctgaaggcatcacctatgagttctctgcagcccttacaccacaacaa

SEQ ID NO: 7876 - DNA, 353 bp, Glycine max
agcttgcttctcttgaatatcttattcattttgggaaaaaatggacaaattaggtttaattagtagggcactaactgaaattaaattgaatttgaatttgggaatgtaagcaacattatgcaagactaagatgttggtaaagcaaactgaaccaatggcaataatgggtataatgtcactattaggcagagttacatttttatcaaaaacaagctggtaggatctaaaatgatgaagagagcaagtaatatgaatgcttgcaccaaaatctaaaagccaacaatcatgaagaaaattggaagtagaaataagcatactacttgaggaatgacaacattggtagcatgactttc

SEQ ID NO: 7877 - DNA, 337 bp, Glycine max
agcttgttattcgagtattctttcccgagaacgggggcgttgacgacgccagttgaaatgttgacactgttacctaatgcattcacgtttagtggaagccttgcagggtcttttccagccactgtctgcacagggttgcttaaagaatcaaagtttgagctcgacacaaactcgggcaataagtggaactgcacaagttcgattttctggccttcgtttaaggagttgaggaagccagctttgaggttggaaaaggcaaaatcatctggtgcaaggatggttatgccaccactcttggctgttatgagctgtgagatgatgttgctcatgatttctg

SEQ ID NO: 7878 - DNA, 285 bp, Glycine max
aagatttttgttctaagatccttacaactaacgaattcagtaataacttccttagaaaggactttctctcggaccaaatgacaatcaatttcaacatgcccagctccctcatggaatatcggatcagaacctatatataggactgcctgattatcacaacatagcttcattcggtgagtatttccaaaacttcaactcttgaagttgtcaatccaaatgagaccacctgtgactacaaccataactctatattcacccctctgcactaaaccttgcaacaacatt

SEQ ID NO: 7879 - DNA, 374 bp, Glycine max
tagctctgaagactcaagaaatattaaaactccatttgaatctatgcaagaacccactggtgctcaagtcataaagtcaagtctgagacttagtggaaactgtactgaactattgaaagatggatatattattgctctgtatgcaagagactgttctgcacttcatgtctcaaggcaaagggttaaaggtggaggttggatcatggattccatgtcaaatgtgtcaaaaagagaccctgctgcacagttcctcatcatcttcagaagcaaggttcgtctcaaaggaactttgcattatccaaggcacttaatattattatatgccagcatgtgcttcaaaatagtagtttagaatggtgtaacatgtattttta

SEQ ID NO: 7880 - DNA, 254 bp, Glycine max
agcttttccaccaacacttgtctgaaattcccatcatcaggaatccaagttctccacatggaatcattaaagggggtaactttaacacccccaacagtgaccctgtgaacaacttcaagagcctgttggttcaaaccctcaaatttctctaatttcgacgaactcaaatactgtgctgtgtcagggacaaggtccttgggcgcggaaataacctcaatggcgttgacgaacgccaatttggagcctttgttggg

SEQ ID NO: 7881 - DNA, 376 bp, Glycine max
  unsure (1)..(376): unsure at all n locations
gctttagatgcctttaaagttttttatgccgaagtttataaacaatgaggagagcaaattaagatcgtgagattcgatagaggtggagagtactatggtagatacacagagaatggacaaacacccagtttatttatgaagtttcttcgaaaacatggaattgttgcccagtacattatgtctggttctcttgatcagaatggtgtggcanaaagaagaaatcaaactttaatggacatggtaaggagtatgaagagtaatagaaaacttcctcaattcttgtggattgaagtactaaagacaattgtgtatatattaaatngagttccaacaaaggttgtctcaaaaacaccttttgagttattcaaaggttgaa

SEQ ID NO: 7882 - DNA, 347 bp, Glycine max
agcttggaacaaatattttgaattctttgtccccttagagattttgtaaagatgtttgctagttgatcattagaactaacgaattcagtaataacttccttagaaaggactttctctcggacaaaatgacaatcaatttcaatatgtttagttctctcatggaatattggattagaagctatatataggactgtctgattatcacaacatagtttcatttgttgagtatttccaaacttcaactcttgaagttgtttaatccaaatgagatcacatgtgactacaaccataactctatattcagcctctgcactagaccttgcaacaacattgtgcttcttactctt

SEQ ID NO: 7883 - DNA, 327 bp, Glycine max
  unsure (1)..(327): unsure at all n locations
agcttgaaatgatttcggaatctgtttattatncaaagggcataacttaataacacggaaagatcggattcaggcgcataatatattgagacgctcgtgattgcacaacggaagctctcgagaaattcaaatggtcataacttttcaaacggcagtccgattaacgtgcataatatatcgagaagattgaaattgaacaacggaagctgttgagaaatttaaatggtcataacttatcacacagaagtccgattcacgcgcataatatattgagactctcgaaattgaacaacggaagctctcgagaaattctaaaggtcataactt

SEQ ID NO: 7884 - DNA, 269 bp, Glycine max
  unsure (1)..(269): unsure at all n locations
agcttgaaggactcttgctgacttctgatatggnctttataactcaggttagacttcatttattcccattgttgagtgatntaatttggaaatggtggtcgtcttatgtcttgttgctgatttttgtatttttttctctttatgtttcggagtactggacatcttttgcgagctctttttgagattgtcttgaaatatggatgggcacaattggctaataaggctttgaacttatgcaaaatggtgaccaagaggatgtaaagtgtcta

SEQ ID NO: 7885 - DNA, 387 bp, Glycine max
  unsure (1)..(387): unsure at all n locations
tgccttatgacttcctgcgatccctttgtcgttttcttccggcgagggtgaagcttaaggagaacccaatctcctatctggtagttcacttcgcgatgtttcccatcaacttggcttttcatagcagcttaagccttgagaagcttatttcgaatagcttggaaagggggatccctatcagtcaacatctcttcaatggcctcaatgttcgaagaccctnnnncatattctggaaagttaaagggtttttggcaaaaggcgacttcataaggagtggctccagttcccgtgttccatgaannattgtgggaccattcgacccacgggaggagcttcccccacaagcctggcctgcgatggacgaaagcttgcatatattgctcaatt

SEQ ID NO: 7886 - DNA, 379 bp, Glycine max
aaatagatgcattggttaacttgtgttatcccagcttttcttgaatcataaatctgtacctgtcgcaagagtctgtggtttatgctcctctgttgaccaccatacagacctttgcccttccatgcagcaacctggagcaattgagcaagctggagcaattgagcaacctgaagcttatgctgcaaacatttacaatagacctcctcaacctcagcaacaaaatcaaccacaacagaacaattatgacctctccagcaacagatacaaccctggatggaggaatcaccctaacctcagatggtctagccctcaacaacaacaacaaaaacaacctgctccttccttccaaaatgctgctggcccaagcagaccatatatt

SEQ ID NO: 7887 - DNA, 356 bp, Glycine max
  unsure (1)..(356): unsure at all n locations
agcttgaaggaaaannggatgctttggntatttnnggaacccagctggccttgaaccagaaatctgtacctgtcgcaagggtttgtggtttgtgctcctctgctgaccaccatacagacctttgcccttccatgcagcaacctggagcaattgagcaacccgaagcttatgctgcaaacatttacaatagacctcctcaacctcagcagcaaaatcaaccacaacaaaacaattatgacctctccagcaacagatacaaccctggatggaggaatcaccttaatctcagatggtctagccctcagcaacaacaacatcagcctgctccttccttccaaaatgctgctggcccaagc

SEQ ID NO: 7888 - DNA, 324 bp, Glycine max
atgaatgaacggagaggaagagaagagcacgaaattttatgctctaaaagagctctgaaatctgaagtttaatattcaaatgatcaaagttcaaaaaatgcacacacatgacctctatttatagcctaagtgtcacagaaaattggaaggaaatttaatttcacttgaatttgaaattgaatttgtggagccaaaatttcactaattatgatcaatgaattttagttatggttcagcccactaatccaagatcaattctaagatttccactaagtgtgcttaggtgtcatgaggcatgtaaagcatgaaggacatgcacaaagt

SEQ ID NO: 7889 - DNA, 222 bp, Glycine max
  unsure (1)..(222): unsure at all n locations
agcttgggagggctttcctccctatttgagacaaaccnagcgagcattggccactggaaaccggataggatcccaagatcaataatatgaacgggttctgcctttgccgctgctttgataatcattgtatttgcaaagaaaagtataaacttcttgaaagggctggaggaagagaaaacctgctatgccttgagataattagcaacagtgacgctcctagag

SEQ ID NO: 7890 - DNA, 240 bp, Glycine max
  unsure (1)..(240): unsure at all n locations
agcttccggagtctttttcgatcttcttgacacgngacgcgcctgaatatgacctcgttgtgaaaagttctgaccatttgaatttctcagagctcctgttgttcacataccagcgcgtctatatgtgaagcacctgaatagcacatccgagtgaaaagttatgaccatttcaatttctcgagaattttcgtcgttcaatatcgagcatctctatatataaagagcctgacctggacctcc

SEQ ID NO: 7891 - DNA, 347 bp, Glycine max
ttatcaaagatttgataatctttaagatgatttttactcagacttggattttgctggttgtgttgactctcgcaggttgacatctggatacatcttcataatgactaatggagcaatatcttggagaagtgcaaaacaatcattagttgctacttctatcatggaggctaagtttatttcattatttgaaacaacatcacaaggtatttggttaaaaagtttcataagtggtctaccagtgattgattccattcctagactgttaaagatatattttgataattcagttgctctttttttggctaaaaacaataaaagtggaagttgaatcaagcacattgacatta

SEQ ID NO: 7892 - DNA, 343 bp, Glycine max
agcttctcgatatattatgcacttgaatcggacctccgagtgacaagttatggccatttgaatttttcgagagcttccgctgctcaatttcgagcgtctcgatatattatactcctgaatcggacctccgagtgaaaagttaagaccatttgaatttctcgagagcttccgttgttcaattttgagcgtctcgatatattatgcgcctgagtcggacctccgagtggcaagttatgaacatttgaatttctcgagagcttccgttgctcaatttcgaccgtttcgatatattatactcctgaatcggacctccgagtgaaaagttatgaccatttgaatttct

SEQ ID NO: 7893 - DNA, 355 bp, Glycine max
  unsure (1)..(355): unsure at all n locations
agcttctaaactttatacaagattgaagcctgataccactngntagacaagtggcctcagatatattaagaagggggggttgaattaagatatcccaaactatttccccaattaaaaaattatttcactttcttttcaagttatagattcccttaacaatgaacttcttaaatattaattcaaatcaaacaatttgaatatgaatgtaaagcgataataaacaaaggagattaagggaagagaaagtgcaaactcagatttatactggttcggccacacccttgtgcctacgtccagtccccaagcaacccgcttgagagttccactatcttgtaaattccttttacaagttcta

SEQ ID NO: 7894 - DNA, 364 bp, Glycine max
aaggataacctattgctcatagatgagagaaattttgtggtcatcaactactggcttggcttgaatgagtttgctgatttgagccaccgagagttcaataacaagtatctggggctgaaagtggactactctacaaggagagagtcccctgaagaattcacttacaaagcatgtgagttgcctaagtcagtggattggacaaagaaatgcgctgcaaccccattcaacaaccaacgttcatgtggtaagcatatttttatttattacctaataatactgaattaatccaacatgatctcattcttattataacatgtattagctagtattatttcaatattgaacgaaccacacatactacaaa

SEQ ID NO: 7895 - DNA, 369 bp, Glycine max
  unsure (1)..(369): unsure at all n locations
tgtaattcaaaagtgctagacttggaaattgttttgatngttagatccgtgcatgactgatgaatgaaattgtgtggctttagcagcaacatcacgttcatacagatgaggacggttctgaaggtggttgataactcgggggagaaaaaagtaacctgcattcaagcattgaaagggaagaaagtgacacaatcatcccctcacttaaggaggcacatgcaaaaggggagggtgtgatggaaatgaggtcaagtttgatgacaagcaaggccaacccattgggactagagtgtttgggccagtgcctcatgaactcangccnaacaaccatgtcaagattcttacttttgccggccatattgcttaatt

SEQ ID NO: 7896 - DNA, 390 bp, Glycine max
aatactcaagcttctaaactttatacaagaatgaagctctgatttttcttgttagacaagtggcctcagatatcttaaaaagggggggttgaattaagatattccaaactacttccccaatttaaaaatttatttcactttcttttcaagttatagattcccttaacaatgaacttcttaaatattaatttaaataaaacacattgaatatgaatgtaaagcaataataaacaaaggagattaagggaagagaaagtgcaaactcagatttatactggttcggccacacccttgtgcctacgtccaagtcccaagcaacccgcttgagagttccactatcttgtaaattcttttacaagttctaaacacacaaagacaatccttcctttt

SEQ ID NO: 7897 - DNA, 343 bp, Glycine max
agctttggtttcgatggtccctatgacatctatcccccacatggaaaaaggccaaggggcggacatgacattcagaggatgtggcggaacattgacattgtctgcgtacgcttgacatttatggcatttccttacatgggtgcagcaatcgctttccatagtgagccagtaataacctgctctaaggatcttcctggccatagcatgcccattggcatgtgtcccaaatgaacccccatggacttcctcaatcatgtaattcgcctctttggcatctacgcagcgtaggagggtcatggttttgtttgtacaggacggtaccactcacaaagaaaccagtagc

SEQ ID NO: 7898 - DNA, 336 bp, Glycine max
  unsure (1)..(336): unsure at all n locations
tgtggactgccaacatgccatatatgaaatttaagggtagttgggggactctgtccattgtcagttcctcatcgcccttgggaggatccgtcactggatttcatcaccggcttacctctattccgaagtaacaccacaattctggtggtcgtcgatcgcttctccaaaggcatccatttgggcattttgccaacgnctnactcctccctcactgctgcaacactattcattgaaatccttggaaagatacaccaaatgcctcaaagcttggtgtccgacagggatccacttttcctgaagatgagcttcccttatcaccctcacagtgatggccca

SEQ ID NO: 7899 - DNA, 402 bp, Glycine max
tttaagaaggcaatttccaatcatgctatcttatgcaatgacaattaacaagtctcaaggccaatcactttctatggttggactttatttgccaaaaccagtctttcgccatggacaattatacgttgcattatcaagggtcaattcaaggcaaggattaaaagttcttattcatgataaagaccaaaaaaatatgacttatactaccaatgtagtcttcaaagaggttttcaaaaatcttacaaggtaactctaaattttgaaacaacaaattgtactatttattggcaacaattcctaactgttatcttactcatatacattctaacatacagcccaagatgatatcatatattacaatcttaaaatttacattgtcatgtatgtaatcttaattaccac

SEQ ID NO: 7900 - DNA, 349 bp, Glycine max
agctatgctgcaaacatttataatataccccctcagcagcaaaaccaacaacaacagaataattatgatctttcaagcaacagatacaatccaggttggaggaatcatccaaatctgagatggacaagtcctctacaacaacaacagcctatccctaccttccagaatgttgctggtccaagcaagccatatgttcctccaatgcagcaacaacaacaacaacaacaaagacaacaagcaactgaggcacctcctcaaccttccttagaagagttagtgaggcaaatgacaatccaaaatatgcaatttcagcaagagacaagagccttcattcagagtctgacaaatc

SEQ ID NO: 7901 - DNA, 391 bp, Glycine max
taccaccataggaggccatggataagagcctggatgaagaatgagatgaatgaacggagaggaagagaagagcacgaaattttatgctctaaaagagctctgaaatctgaagtttaatattcaaatgatcaaagttcaaaaaatgcacacacatgacctctatttatagcctaagtgtcacagaaaattggaaggaaatttaatttcacttgaatttgaaattgaatttgtggagccaaaatttcactaattatgatcaatgaattttagttatggttcagcccactaatccaagatcaattctaagatttccactaagtgtgcttaggtgtcatgaggcatgtaaagcatgaaggacatgcacaaagtgtgactatatgatgtggcaatg

SEQ ID NO: 7902 - DNA, 256 bp, Glycine max
gtgcctgtatattgatgcgcctgaatcagacatacgagtgaaaagctatgaccattagaattatttgagagcttcctatgattaatttcgagcgtgccgatataatatacacctgaatcaaacctcagtggaagaacgtatgaccatttgaatttcttgcgagcttccgacgttcattgtttagcgagcttatttgtgaggcacacgaatcagacctccgcgtgaaaagaaaggaccatttgaatttctcgagagc

SEQ ID NO: 7903 - DNA, 363 bp, Glycine max
gcttctaaactttatacattaatgatgctctgataccacttgttggacaagtggcctcagatatcttaagaagggggggttgaattaagatattaaaacttatttccccaattaaaattctatttcactttctattcaagttataaattcccttaataatgaatttcttaaatattgattcaaataaaacaatttgaatatgaatataaaacaataataaataaatgagtttaagagaagagaaaatgcaaactcagatttatactggttcggccacacccttgtgcctatgtccagtcctcaagcaacccgcttgagagttccactatcttgtaaattccttttacaagttctaaacacaca

SEQ ID NO: 7904 - DNA, 379 bp, Glycine max
  unsure (1)..(379): unsure at all n locations
gcttcaagaaaaagatggtctcatctaactccttatttccagaagggaattctatcaatagacctccaatctttaatggagagggttaccactactggaaaacccgaatgcaaatttttatcgaggcaatagatctaaatatctgggaagccatagaaatagggccttatatacccaccacagtagaaagagtttcaatagatggtagttcatcaagtgaaagcataaccatagaaaaacctagagatagatggtctgaagaagatagaaaacgagtacaatacaacctaaaagccaaaaacataataacatctgccctangaatggatgaatatgtcaaagttcaaattgcaagaatgcttaggaaatgtgggacact

SEQ ID NO: 7905 - DNA, 373 bp, Glycine max
agcttgaacaaatcttctacagttgtgagtgataacatgcagtcttcttgaacccttaccgcccactttgtcgtcatgccgagactcgagaagcccatcaggtttagccttttcaatgtactctgaacaaaatccaatggcttcttctgcaatgtacctttcaacaatagatgcttcgggacgatgtagattcttcgtatacccttttaagatcttcatgtatcgctcgaccgggtacatccatcgcaaataaacaggaccacaacatttgatttctctgaccagatgaacaattaagtgaaccatgatgtcaaaggaagcaggaggaaaatacatctccaactaacacagtataattgcaggctcgttttct

SEQ ID NO: 7906 - DNA, 384 bp, Glycine max
  unsure (1)..(384): unsure at all n locations
agcttncacttgataatggagacacttgaacttcgctaggcaacgacattcatggcgctccgaacaaaggtggagtatggaggattgccttgagggtccgcacttangcaatcatgaaactaagctccaaactcgaaagtggaggacacatgaacaaccctaagcaataatattcatgtggctccgaaaaaggatgagaatggaggattgccttgagggtcctctcttangcaatcatggaacacagctccaaactcgaaaacggaggacacatgaatgaaaccgcaattcattcacgtggctccggaacaagatgagaatggaggattgccttgagggtcctctcttangcaatcatggaacacagctccaatcatggaacac

SEQ ID NO: 7907 - DNA, 342 bp, Glycine max
  unsure (1)..(342): unsure at all n locations
tctcgaganattcgaatggttataacttttcccacatatgtccgattcggggacataactcatctagacgctcgaaattgaacaacgcaagctctcgagaaattcgaatggtcataacatttcgcacaaatgtccaattctgggacataatatatcaagacgctcgaaattgaatagcggaagctctcgggaaattcaaatggtcataacttttcacatggatgtccgatttgggaaaataatatatcgagatgctccaaattgaacaacgaaagctatcgagaaattcgaatggtccgaacttttcgcacggatgtccgattccgggacataactcatcta

SEQ ID NO: 7908 - DNA, 410 bp, Glycine max
taataaatctatatatggtttaaaacaagcctcccgttagtggaaccttaagtttcatgagataattttttcatttggttttaatgaaaatcccatgaatcaatggatataccacaaggtcaataggagtaaaatatgttttcttgttttatatgtagatgatattttacttgtagccaatgatcagggtttgctatatgaggtgaaacaatttctctctacaaaatttgacatgaaggatatggatgatgcatcttatgtcattggcattaagattcataaaatgatagacctcgaggtattttaggtctatcacaagaaacctatattaacaaaattttagagagatttcggatgaaatattattcaccaagtgttgctcccattgtgaagggtgataggtttaattt

SEQ ID NO: 7909 - DNA, 364 bp, Glycine max
gcttggtccccaacgctttgttcatgctctcccaaaatctagaggtaaacctaggatctctatcagacactatgctagaaggcataccatgtaatctaacaatctcactgatatacagggaggtcaacttttccaaggaaaatttgatattaatgggaataaagtgagcagacttggtcaacctgtcaacaataacccagatagaatcaaaacctttgggggttctaggtagtcctatgacaaaatccatggaaatactgtcccatttccactagggtatctccaagggttgtaacttcccgaaagatctttggtgttctatcttagccttctgacagactaaacatgcatacacaaactcact

SEQ ID NO: 7910 - DNA, 361 bp, Glycine max
tgtaatcgattacacatatactgtaatcgattacttgagcagattttcagaaaatattctcaacagtcacatctttttatgtggttcttaaatggctatcaaaggcctatatatatgtgactggagacacgaatttgctaagagtttttcagaacaaaaaagtcttatcctcttataaagcaaaattgttttatcctcttacaaattccttgtccaaattacttgtgattcaataaggaatttttgagtgctcaaattgttcaatctatctctttcaagagagatttcttcttttcttcttcttcattctgaaaagggattaagagaccgagggtctcttgttgtgaaagaattctaaaca

SEQ ID NO: 7911 - DNA, 377 bp, Glycine max
cgcatgaagctttatatggacgaaagtgtcaaaactcctatttgttggtatgatgatggagaagcagtacttcttggacctgaaatgctacaacagattaactaacaagtgaagttgattcgagggaagataaaagcatctcatgataggcagaagagctattatgattgaaggaggaagccactatattttcaggaaggagaacatgtgtttttgaaggtttctcccgtaaccggagttggaagagctctcaaggctaggaagttgacacccaagtatctaggtccgtatcagattttgaagaagattgggcctatagcttatcatatcgccttacctcccgatttatcgaatttgcatcccgtgtttcatgtctt

SEQ ID NO: 7912 - DNA, 366 bp, Glycine max
tgacatgctattgaacaagcagttatatactctgcttcacaagtagagagtgcaacaacatcctgtttcttagagcaccaggagatgggagcacctccaaacaataaaacatgccccattatgctttttctgtcaagaacatctccaccacagtctgagtctgaataagccacaagttgtggctcaaccttctctttctaatgtggaaatagaacaccaaagtctagtgtgctctcaagtatctcagtatccttttagctaccatcatatgtgaatgtcttggatcactcataaacctactgataactcccacattgaaagtgatttctggtctggaatgacaaatgaatctgagactcccaacaa

SEQ ID NO: 7913 - DNA, 403 bp, Glycine max
ttgagagagaatcgggtatttgaccaaccaacttgttttgatgcagcataagttcagttagttcttttaattcagagagcttatcaggtattggaccttctaatacatttgcatatagagagagcccctgaaggtgagaaagtttggacagttctggaggaatttgacctgaaaacctattttctgaaagggataaagtgacgagttgattcaagtttccaatctctggtggaattggtcctatgaaagaatttgcattcagctgcaggcgtatgagtttagacaggttctggatacctgattttatcaatccactgaagttgttcattgccaaacttagagtgctaagatttgagcagttatagaggtcatctgggatttccccagtcattttgttggatgt

SEQ ID NO: 7914 - DNA, 376 bp, Glycine max
tgtgcatccaataccatgatgaggatgtcccttatgttcttaaaactggactgatccatttgcttccaaagtttcatggctttgcaggtgaagacccacacaagcatctgaaagaattccatattgtctactccaccatgaaaccacaagatgtccaggaggatcacatatttctgaaggtctttcctcattctttagagggagtggcaaaggactggctatattaccttgctccaaggtccatcacgagctgggatgaccttaagagagtattcttagaaaatattttccctgcttccaggaccacgaccatcagaaaggatatttcaggtattagacaactcagtggagagagcctatatgaatactgggagag

SEQ ID NO: 7915 - DNA, 383 bp, Glycine max
ttgtgaagctcctgttttagctttacccgatgtttctcatccatttgaagttgaatgtgatgctagtggagttggcattggggctgttttgatacaaaacaaaaggcctatagcttatttctcggagaaattgggaggagccagattgaactattgcacctatgacaaagagttctatgccattgtgagagctcttgatcattggaatcattatttgcgttctaatcactttatattgcattcagatcatgagtcattgaagtatatcaatgggcagcagaagttgagtccaaggcatgctaaatgggttgaatttcttcaatcttttaatttctcttcataatacaaggatggtaagagtaatgtggtggctgatgcacttt

SEQ ID NO: 7916 - DNA, 364 bp, Glycine max
agcttgaacaaattcaaatgacaattactttttactcgcatgtccgattgagtcccgtaatatatcgagacgctcggaatggaataccgaagctctgagcaaattcaaacgacaataactttttactcggatgtctgattgagtcccgtaatatatcgagacgctcgaaatggaataccgaagctctaagcaaattcaaacgacaataactttttactgggatgtctgattgagtgccgtaatatatcgagacgctcgaaattgaataccgaagctcttaacaaattcaaacgacaataactttttactcggatgtctgattgagtcccgtaatgtatcggaaccctcgaaatgaatgttgagc

SEQ ID NO: 7917 - DNA, 401 bp, Glycine max
tctccactaatctagtgcttgcaacattggtataacttccaccatcaatgattagagaacaaacctttccattcaccaaacatctagaatgaaaaatgttttcattttgtgtatcatctctatctttgcacaagcttcccatgagtctccttaccatcaaaagatatccctcttccggtggaagaaaaccatcatcctccgcttcactagaggaactatgagaactcttagatcactatccacctctccattcttcaacacaatcatgttccttttgttagaatattgggatgaaatatgattatttcccaaacacttaaagcatttaatggaactagttttattggaagggggttgagtagcagaagtaggattacctcttgaagacttccttttaagat

SEQ ID NO: 7918 - DNA, 384 bp, Glycine max
agcttatgtgcaaatatttacaatatacctcctcaacctcagcagcaaaatcaaccacagcagagcaattatgacctctccagcaacagatacaatcctggatggaggaatcaccctaacctcagatggtccagccctcagcaacaacaacagcagcctgctccttccttccaaaatgctgttggcccaagcagaccatacattcctccaccaatccaacaacagcaacaaccccagaaacaaccaacagttgaggcccctccacaaccttccctcgaagaacttgtgaggcaaatgactatgcagaacatgtagtttcaacaagagaccagagcctccattcagagcttaaccaatcagatgggacaattggctacccaattg

SEQ ID NO: 7919 - DNA, 387 bp, Glycine max
  unsure (1)..(387): unsure at all n locations
ttagttgttggtgctgatgttagtatgattggaccgtttggtgtggggttctactctacatatcttattgtcgaaaaggtcattgttaccaccaagcacaatgatgatgagcaatacatttgggagtcccaagctagaggttcattgatttttacctgcttccatgtgctactcgtgccaaccatattctctatctccctctacttttccttacctctcacatgattcattataatgttatgaatcttgttatctcaattggattccttgattttcattttaatagtcgagaactaactctgttgtatttgtatagatggatattntgagtatttgtgctttataataactattctttcttcattacacaactctagcatatcctgg

SEQ ID NO: 7920 - DNA, 363 bp, Glycine max
  unsure (1)..(363): unsure at all n locations
tcaaacttacaacaaaggagttgagcaggtaaaatagattcgtcttcaaactcttagaggtgactttgagtgtttgtttatggaggagtccgagtcaatttatgattatttttctcgagtattggccgtagtcaatcaacttaaaagaaatggtgaagatgttgatgaggtgaaggttatggaaaaaatacttcgaactttaaatccaagttttgacttcattgttaccaacattgaagaaaacaaggatttaaagaccatgactattgagcaactcatgggttccttacaagcacacgaagaanaacaaaagagaaaaattaaacaaaaggaggctacggagcaactactacaactcaacgt

SEQ ID NO: 7921 - DNA, 309 bp, Glycine max
agcttctgttatgaatttcgagtgtctcgatatactacgggacacaatcggacatccgagtaaaaagttattgacatttgaatttgctcatagcattcgttgtcaattacgagcgtctagatatattaaaggattcattcggacatccgagtaaaaagttattatctttttattttgctcagagcttctgttttcaatttcgagcatctcgatatattacaggactcaatcggatatccgagtcaaaagttattgtcgtttggatatgctacgagctttccgtttcaattacgagcgtctaatatgcta

SEQ ID NO: 7922 - DNA, 377 bp, Glycine max
agctgctaacccatggaagctcctatatatctcccacactttttggggtgggccattcttggatggccttgattttctcagggtccacttggaccccatttctaccaactacaaaacctaagaaaactatattatctacacaaaaggtacacttctctatatttgcatagagggtgtttttcctaaggactgaaagaacttgtctgagatgtcctaagtgatcatctaggctcctactatacactaaaatatcatcaaaataaacaactacaaatctacctatgaaatcccttaagacatgatgcataagcctcataaaggtgcttggtgcattagtgagcccaaaaggcatcactagccattcatacaaaccaaac

SEQ ID NO: 7923 - DNA, 370 bp, Glycine max
agctctggtgggacatcttgacttgctttccaatctgacattcaccacagattctgccttcttctattttcagattgggaatgcctctaacagcacctttgtcaatgattttcttcatgcctcttaagtgcagatgtccaaatctttgatgccatatattgacttcatcttctttggagactagacatgtggaggagtaactggtttcttgaggtgtccataggtaacagttgtcctttgatctgctgcccttcattaagacttcactcttctcatttgtcaccaagcattctgactttgtgaagtttacattgagtccttcatcacacaactgactgatgctgatcaagttcgcagtcagtccctttac

SEQ ID NO: 7924 - DNA, 391 bp, Glycine max
tcatgagagagtcaaagatcaaattgagaggaaaagtaattgcttgctaaacaagccaacaaagggagaaagaaggttgtcttcgaacccggagattgggtttgggtgcacatgagaaaacaaaggtttccggaacaaaggaaatcaaagctttatccaaggggagacggaccatttcaagtgcttgaaagaatcaatgacaatgcttacaaagttgagctgcccggtgagtataatgttagttccaccttcaatgtctctgatttatctctttttgatgcagatggagaatccgatttgaggacaaatccttctcaagagggagagaatgatgaggacatgaccaagagcaagggcaaggatccacttgaaggacttggaggacctatga

SEQ ID NO: 7925 - DNA, 373 bp, Glycine max
  unsure (1)..(373): unsure at all n locations
agcttaaaagattggctaagattttgttaaaacataagcacttagacaatgaaggaaagctggagttgctgcacatgatgtccaatgttatgtcaaagaataagatcgggctgcacaatgcacaaggcaagataaagtgtcaaatgaagaattgaagctgcaggattcacgatgtcggatataatgtccaggacatcctgcctgaaaatactggaattgctaaaagcattgaagctgcaggatccacgatgtctgatacaatgtccaggacatcctgcccgaaaatactggagctgctaaaagcattgaagttgcaggatccacgatgtcggatacgatgtccacgacatcttgcccganaatactggacata

SEQ ID NO: 7926 - DNA, 401 bp, Glycine max
tatgcgaaatacttggaaaattaaactcttatctttacaataatttattttcacctcaaccaataatgtttttgttatattgatgagaccacttataataagtataaatatataattaattatggaaatgagtactatggttattaacgaaatatgaagtaataggattacatattaaaatttaattatgtttttgttatattgattatgcattaattatactatttattaaacataataaatatttaagttttaaagatttatgaaagtttacctctttattattgcatatcatgaatatgagatatgtacgcattaaatgtatgacagagatacatgttaaaaaatctaatatttgatagagttatattatatttattaatggaataaatatcacattc

SEQ ID NO: 7927 - DNA, 404 bp, Glycine max
  unsure (1)..(404): unsure at all n locations
ntagccaaactgtaaaacttggcaataacactagaatggctgttgtgggaaaaggtatcattcatatgcaagtgaatggatttacttaggaaattgcaggtgtctattatgttcttgaacttaagaataatctattgagcatagggcaacttcaagaaaaaggcttgactattttgattcaacatgggaagtgtagggtatatcaccctgagaaaggattaattatgcagacatatatgagtggaaatagaatgttttctttgttggctaccatgataccaaaatctttttcatgtttccaaattgtatcagaaaatgaatctcatctttggcattgtcggtttggtcacttaggctacaatggattgaggacactttttgataagaagatggtaaatgggctg

SEQ ID NO: 7928 - DNA, 331 bp, Glycine max
tgcaagcttgtaatctattacacatatactgttatcgattaccagagcagattttcagaaaatattctcaacagtcacatctttttatgtgggtcttgaatggctatcaaaggcctatatatatgtgacttgagacacgaatttgctaagagtttttcagaacaaaaaggtcttattctcttataaagaaaaatcgttttatcctcttacaaattccttggccaaattacttgtgattcaataaagaattatttgagtgctcaaattgttcaatctatctctttcaagagagaaatcttcttctcttcttcttcattctgaaaagggatta

SEQ ID NO: 7929 - DNA, 382 bp, Glycine max
tctattttcaatttcaagcgtctcgatatattactttacttaatcggacatccgtgttaaaagttattgtggtttacaattgctatgagcttctgttttcaatttcaagcatctcgatatattacgggttttatttagacatccgagttaaaagttattgtcgttggaatttgctcagagcttttagattcaattttcagcgtctcgatatattacgggacttaatcggacatccgaggtaatagttattgtggtttgcaattgctatgagcttctgttttcaatttcgagaatctcgatatattacgggattcattcagccatctgagtaaaaagtaattggtcgttgaatttcctcagagcttctattttaaattcgagc

SEQ ID NO: 7930 - DNA, 365 bp, Glycine max
  unsure (1)..(365): unsure at all n locations
gcttcaacatcagaccacttccagtttgctggaactactccacatggatttgatggggcctatgcaggttgaaagccttggaggaaagaggtatgcctatgttgttgtggatgatttctccagatttacctgngtcaactttatcagagagaaatcagaaacctttgaagtattcaaagagttgagtctaagacttcaaagagaaaaagactgtgtcatcaagagaatcaggagtgaccatggcagagaatttgaaaacagcaggttcactgaattctgcacatctgaaggcatcactcatgagttctctgcagccattacaccacaacagaatgggatagttgagaggaaaaacangactttgc

SEQ ID NO: 7931 - DNA, 392 bp, Glycine max
taagaggtatggcagtgctaagggatgtttcccttgataggataaggtagaaagattgtttaagaaggagtgctattttaatatcaccttttcttgcaaaatgattttccttcttaacaatcttcttggaggaatccttttcctccttttccttccccttggactttgaagacaaggccttactatccttctttttcttttgtttttctagtttttcttcctcatccctcttatctttcatagttagttgatctttggccacctgtgaaggtgtttgaggatgcaacacaaatttagtgccaagatgggtgagggtaatctcattagttaggccattgtaaatgatcttcctatcaaattgccaccgtcttcctaaaagaatatgtcctacc

SEQ ID NO: 7932 - DNA, 351 bp, Glycine max
agcttgtatcttttcccattattaataagacgagttcttttcctttttctcttgttcatactgatgtatggggtcctgctaatgtccttaatatctcatgtgctaaatggtttttaaccttcatagatgattgtactcgagcaacttatgtcttcttattaaaataaaaatctgaagtcagctttgtttttattcactttgtgtcaatgattaaaaaccaatttggagtcaatattaagagaattaggtttgacaatgccagggactactttaattttgtgctaaaatctttttgtcaaaaggaaagaataatccatgagtctttaagtgttaacacacaccaaacaaaat

SEQ ID NO: 7933 - DNA, 345 bp, Glycine max
ttggctcagagcttcaacatttcaatttcgaccgtctcgatatgttaagggactcaatcagacatccgagtaaaaagttatggtcctttgtattggctcagagcttcaacattcaatttcgagcgtctcgatatgttacgggactcaatcagacatccgagaaaaaagttatcgtcgtttgagttggctcagagcttcaacattcaatttcgagcgtctcgatatgttacgggactcaatcagacatccgagtaaaaagttatggtcctttgtattggctcagagcttcaacattcaatttcgagcgtctcgatatgttacgggactcaatcagacatccgagaa

SEQ ID NO: 7934 - DNA, 394 bp, Glycine max
agcttcagtggcttagtgaagatgaagatgttaaagtgactcaacaggttgaggtgtgtctcaccattgggagatataatgacaaggtgctgtgtgatgtggtcccaatggaagcgacccatgtgctgttaggaagatcgtggcagtatgataccaaggcagtgcatgatggcttcaccaacaacatctctttcaagcaagctgacaagaagattgttctcaaaccgttatctcctcaagaggtttgtgaggatcagataaaaatgagagaaaagaaaaagagtgagacacttgagaggaaaaagagtgagacacttgagaaggaaaagtgaggaaagaaaaagagtgaaacactcgagagggaaaagagagaaaacaaaaagagtgaaacact

SEQ ID NO: 7935 - DNA, 435 bp, Glycine max
  unsure (1)..(435): unsure at all n locations
cgacaatacttttctcgaggttcttatattccttaatatatcgagacactcccaattgaaattggaagctcggatcaaattcaaacgacattaacttttgacttggatgtccgattgagtcccgtaatatatcgcgacgctccaaattgaaaacagaagctctaagacaattcaaacgacaataactttttattcggatgtccgattgagtcccgtaatatatcgagacgctccaaattgaaaacggaagctcgtatcaaattcaaacgacaataacttttttctcggatgtccgatagagtcccgtaatatatcgcgacgctccaaattgaaattggaacctcgtatcaaattcaaacgacaataacttttaactcggatgtccgattgagtcccgtaatatatcgagacgctccaanatgaaaacggaagctc

SEQ ID NO: 7936 - DNA, 357 bp, Glycine max
  unsure (1)..(357): unsure at all n locations
ctatngggcatccgagtaaaaagttattgtcgtttgaatttgatacgagcttccaatttcaatttggagcgtcgcgatatattacgggactctattggagatccgagaaaaaagttattgtcgtttgaatttgatacgagcttncgttttcaatttggagcatctcgatatattacgggactaaatcagacattcgagttaaaagttattacggcttgaatttgctacgagcattcgttgtcaattttgagcgtctcgatatattatgggactcaatcggacatccgagataaaagttaatgtcgctttaatttgatacgaacttccattttacaattggagcgctctcgaatatta

SEQ ID NO: 7937 - DNA, 433 bp, Glycine max
  unsure (1)..(433): unsure at all n locations
caattcttggtggtgaagctccttcnttcntgtttattccctagaggatggtgcctcccctctccccttctcctttgccttccgctgcatctccatggtgaaaaatcaccattgaaggacctcattgaagctcanagatccagcctccatagaagctccactagcaagcttccatcaattatcatcacaacatattcagaaaaccaaaaccccacaatctgatgtaagctccattggagcttgtacgcctaggatcttcttcatcaatggattcctttgctccttggaagatgaatggcagcggaatggagaacgaagagagagaggagacgccacttcaacgagaagatgagtttagaacaagcttaccaccataggaggccatggataaaagcttggaggaagaacgagatgaatgaacggagacggagag

SEQ ID NO: 7938 - DNA, 413 bp, Glycine max
  unsure (1)..(413): unsure at all n locations
ctttcctctgnatgctctgatagggtttccatgtattatatagaatgagaanggattgaagcctccattccactatctacgtgcgatgagtatttctcccgccacagacattattttgcaaatcccaacagtgaagatgtgcgaaatgaattgcaaaccacatatcaaaatttcatgacaatctaacggttaacgaatctgggatcatagttttacggagacagttttggatttttacgggaaaaaaagctacgatacaaaagatatttctctcaactccaacatgttttcataattcccaatggtgagaatattcagaaatgagttctgaacctggtgctcaaatttcacgatgatctaacggtgaatgagtctgagagggttttggtggtatgcgggaaaagagatcgtca

SEQ ID NO: 7939 - DNA, 392 bp, Glycine max
  unsure (1)..(392): unsure at all n locations
attccatttcgagcgacncgagatattactagtttcaatcggacatccgagtaaaaatttattgtcgtttgaatttgatcagagcttcaacattcaatttcgagcatctcgatatattacgggactcaatcagacatccgagtaaaaagttattgtcgttcgaatttgctcagagcttctacattcaatttcgagcgttccgatatattacgggactcaatcggacatccgagtaaaaagttattgtcgtttgaatatgctcagagcttcggtattccagttcgagcgtctcgatatattacgggactcaatcagacatccgagtaacaagttattgtcgcttgaatttgctcacagcttccgtattccatctcgagcgtctcgatatatta

SEQ ID NO: 7940 - DNA, 373 bp, Glycine max
  unsure (1)..(373): unsure at all n locations
agctntgagcaaatncaaacgtatttnattttttttgtcggangncngancgacccccgcaatatatcaagatgctcgaaatggaataccgaaaccctgagcaaatccaaactacaataactttttactccgatgtctgatagagtcccgtaatatatcgagatgctcgaaatggaataccgaagctctgagcaaattcaaacaacaataactttttactcggatgtccgattgagtcccgtaatatatcgaaacgcttgaaattgaatgctgtagctctgagcaaattcaaacgacattaactatttactcggatggccgactgagtccggcaatatatcgagacgctcgaaatggaataccgaatctctga

SEQ ID NO: 7941 - DNA, 404 bp, Glycine max
  unsure (1)..(404): unsure at all n locations
agctttnggaggctgtgttcattttttcttgctctgatagcgcnngggaaagaacagtacaggtggttccttaaaaaggcggaatgacagtggtacgaaatgagatgaatgacttgataccaacactaactgccactggttggtggatgtgtatcgactatcgcacgttgaatgaagccacacataatgaccatttccccttaccttttatggatcacatgctggaaaggcttgcagggcacgcatactactgcttntggatggatattcatgatacaaccatatcgcggtataccccacagatcaggagaagacggcctttacatgcccctntcgcgtctttgcttacataaagatcgcattcgggttatgtatcccactaccttcttcagaggtgcatgcta

SEQ ID NO: 7942 - DNA, 450 bp, Glycine max
tccataaaagccaaactaagcaataaagtactctcgtatttttccctctgcctccggttgtcgggcaatcccttctacagcttgccctgcagcagtgccttgaccaaccccaggtccaatagaagcaagccctacggccaacccagcagcaataacagaagcagcagaaataattggattcatgataatttcctcgtaacctaaatataaaataaagaaatagttaatgatataatcaaccaataaattatgacttaatttttcaattatcaagatttattcggtttaaagtaattaataagaattccgaattgaaaataataatagttattgaactctacgaattacttcgagatttattttttcgtctctacctacatacatagcttttttttgtgaatatgtagaacctctggtcttatcctaccttcaatttggaatcattctttg

SEQ ID NO: 7943 - DNA, 387 bp, Glycine max
  unsure (1)..(387): unsure at all n locations
tgcatgcacaaagtgccagtggaggacgacagtatctnnggttcatattgtccagagaagcggccagcaagactaacccacataccttattggctgacaaattctcaagttggaggttatggaaaacctgcccctgaagatcttactgctgattatggacactggaaacgtatagtgtccaagtcttcatttaatgggataagaattaattggtccaatatgccgaatgtcatggatatgagatcactctatggagggtgagtgaaatctgttcgttcccatgttactctgaattatattaaccggccattttgacatacttcactagctctttcggctacaggttngctgctgtcttgatagattagaatatttgggtcatgaatg

SEQ ID NO: 7944 - DNA, 327 bp, Glycine max
agcttcgaagcgcggggctgtcttcgttattggactcatcagcatcatgttcgtttctgcgcgcatcaacaaagccttgttcggtgtctaaccatctccggcgaatttcacggcgacgcccttgccgaggatcccgcggtcgaagttgcggtacacgtggacgccggtgtcgttcaccataaaactattatccagagcgcctacggttagggtttggaccccgccattcgcgggctcttcgaattcctccattaaatcgtttctccgccgcgacggcgacggcgaaggagacggttctccggagactgcgttctcccacacagaatc

SEQ ID NO: 7945 - DNA, 428 bp, Glycine max
  unsure (1)..(428): unsure at all n locations
ctacttcacatggatttgatgttgcctatgcaagttgaaagccttggaggaaagaggtatgcctatgttgttgtggatgatttctccagatttacctgngtaaactttatcagagagaaatcagaaacctttgaagtattcaaagagttgagtctaagacttcaaagagagaaagactgtgtcatcaagagaatcaggagtgaccatggcagagaatttgaaaacagcaggttcactgaattctgcacatctgaaggcatcactcatgagttctctgcagccattacaccacaacagaatgggatagttgagaggaaaaacaggaccttgcaagaggctgctcgggtcatgcttcatgccaaagaacttccctataatctctgggctgaagccatgaacacagcatgctacatccacaacagagtcac

SEQ ID NO: 7946 - DNA, 232 bp, Glycine max
  unsure (1)..(232): unsure at all n locations
gcctgaatcggacctccgaagaaaaatatgaccatttgactttttaagcttcgttgtgaatttcgagctcctcgatatctgacgtgcctgaatccgacattcgagtgaacagtcgggacaacttccatttctccagagcttccgctgttcaattctgagcgtctcgatatgtgatgctcctgaatcggaccctcctgtgataacttatgaccattngaattgctctagatct

SEQ ID NO: 7947 - DNA, 419 bp, Glycine max
  unsure (1)..(419): unsure at all n locations
agcttagtgaattatttatacaatctaattgtcttatctggaccaatcccagcttccataggctacttggtccatttggactccttgttccttgatagaaatgaactctctgggtccattcctttcatcattggaaatttgtcaaagcttagtgaattatttatatactctaatgaactcactggatcaattccttccactattggaaatttatcaaatggcagggcattactattttttggaaatcaacttggtggcaagattccaatagaaatgaacatgcttactgctctggaaaatttgcagctagctgacaataattntataggccatttacctcaaaacatctgcattggtggaacgttgaaatatntttccgctgaaaataacaacttcataggcccaattccagtgagttg

SEQ ID NO: 7948 - DNA, 408 bp, Glycine max
  unsure (1)..(408): unsure at all n locations
tgtagagatcctcattgtgctaatccgtaagtttgacttccccangcagnttaaagacttcagacctatcaatttatgtactatgcatcataaactgatttccaaggttcttgtccaccattttcgcccttctttagaagagatcataagccttcttcaacgaagtttcatgccttggaagggaacctttgataatgccattgtagctcaagaggttgttcattacatgcatcattagaaagctaagaaggggatcatggcttttcaaattggcctagaaaaggcctatgacatggttagataggatttcttggagatgtctctcatcatattcaacttctcgtgaatcattattgacctgatcatatggggtattcgatatacttctttgtcccgtatgtggaatgg

SEQ ID NO: 7949 - DNA, 443 bp, Glycine max
  unsure (1)..(443): unsure at all n locations
agaaactcacgctngcgctgagctcttttgaccctagaagaactcttgaaattttttcttcancgaancccatatatttcttgtcttgtccctcttgaggatcgcntcaaggacttcacgatctattgtttggaaaaggtaattatttacctttaagtccttcaacttctgctcctcgatcaatatgcattgcgtctccgtaggctctattccatctgccaccatcaatatcccattctcaatgagatcctaatattctttggagcggagaaaattctccatcaacattgcccaatgatcataatgaccattaaaccttggaattgcacgctgcacgaaactgctactcccaccttctgccattcttctcaactcgttctactcgaaagaaagaaaaactgcagtttctttcttgactcacactcactgtttttctcacatgc

SEQ ID NO: 7950 - DNA, 423 bp, Glycine max
  unsure (1)..(423): unsure at all n locations
tgtagagatcctcattgggctaattcgtaagcttgattctccaggcagnttaaagacttcagacctatcaatttatgtactatgcatcataaactgatttccaaggttcttgtccaccattttcgcccttctttagaagagatcataagccttcttcaacgaagtttcatgccttggaagggaacctttgataatgccattgtagctcaagaggttgttcattacatgcatcattagaaagctaagaaggggatcatggcttttcaaattggcctagaaaaggcctatgacatggttagataggatttcttggagatgtctctcatcatattcaacttctcgtgaatcattattgacctgatcatatggngtattcgatatacttctttgtccgttatgtggaaatggtcgcgtttgagtagc

SEQ ID NO: 7951 - DNA, 424 bp, Glycine max
agcttttcatagtagaacgtgggtaactgattctacctattattgtgatcatctccctctccgtcatgggcggtacaacttgggctgcaagatctctccatctctgggcatattccttaatggactcatgctctcgtttagtcataccctgaagctggttccgatcgggagccatgtccgtattgtactggtactgcctaatgaaggcagttgccaactccttccatgatcggatctgggaagcttccagattggtataacacgctacagctgccccggccaagctatcttgaaagaaatggaccaacaacttttcgtctgcagaatacgcccccatctttcggcaatacatccggagatgcccctttggacatgtcatccctttgtacttatcaaagtctggtactttgaacttgggagggat

SEQ ID NO: 7952 - DNA, 422 bp, Glycine max
  unsure (1)..(422): unsure at all n locations
tgaccctcaatctttcaatgattatagatccatcttccttatatggtgtgtctataaaatcgtggctaaagttctggccaagaggctggcccttgtgttacctcatcttatagatgaaagacaaacggattttatgaaggggaggcacattcttcatggtgttttgattgccaatgaggttatagctgaggctaaggctagaaataaaccttgcatggtcttcaaagaggattttgaaaaggcgtatgattcggtttcttgtggttttcttgactacatgttgatgaggatgggcttttgtgaaagatggaggaaatggattaatggtttcctgtccactgcaaccatatccattttaattaatggaagtctgtttttggagatgccactcaacataatgttagaaccttanaatgtatttg

SEQ ID NO: 7953 - DNA, 411 bp, Glycine max
  unsure (1)..(411): unsure at all n locations
agcttagccctagaggggatttttttttatgttttggagaggatcaataacaatgcctataggttggacctcccagaagagtatggagtcagcaccacttttaacatttctgatttaactccttttgcaggtggagctgatattgaggaggaggaactaacagatttgaggtcaaatcctcttcaaggggaaggggatgatgcaatcctccctaggaagggaccaatcacaagaaccatgagcaagaggctccaagaagattgtgctagagctgctgaagaaggccctagggttctcatgaaccttanggtagatttctgagcccatgggccaaggttgggtccaattatctttgtacatattagactaggatgtcattatatttggtccttgtatatagggctccatatt

SEQ ID NO: 7954 - DNA, 403 bp, Glycine max
agcttcacaagtagaatcagaaacttgtcttccatgtgtctttatcagaaaaggttcacgaccctttagaaatgtggcggtacataatctaaaaatctccagaaggattgtctgtgatctatgaaattagaatatcaattcagttttgcttgataaggctagaacacatattgctattaacctattaaatattaaataatttttttcctaattttattgttataattttaatggttacaattaatatgtaacttgattacgtaattagtaacttggaattcatttagttggttaagtcattatataaacaataagaactattggtccaaaataatttattagatgaattgtgtataatttagatgtagttcaaataacgctcatttttggctcttgacttggg

SEQ ID NO: 7955 - DNA, 453 bp, Glycine max
  unsure (1)..(453): unsure at all n locations
ttgcagtacctgatcgtcctcgagagattcggatggaattagcttattttttacagcagctttgtcagtcaaggtctggaatgtatcttatttgttattgttatttttacctggattctgtattttgaaaataaagcatagaattgattgttattacttgatgcagttctttgacattacaaatgtttatagcttgccgcggaatacctgttttagtgggatttcttgaagctgattatgccaagtacaggttagttgttgtttgtgaattgtgcttaatacagaagtactaacattttcactagatagtttgcaatgcaatgccaatatttgaacttctctggccctgttctacctaaaaatttcagaacattataaacatgtgctttcaccctgcttgaggcctganggcctttgtgtgagggtctttcttacatgtaaaatccattccct

SEQ ID NO: 7956 - DNA, 331 bp, Glycine max
tggaaaagatcaactcctcccatgtgccatgggacgctcgactaaattaattgctgacatgttatcaatcaacaaccggataggactacaatcccgtaagtccagttcttccattaaagctctcacacatagagcgtgacaagctgccatagcagcaacagtatattatgctctacatgttgacgaaacaactacactctgcttctttgagcaccaacagattaatgttgctccaaatttgaaaacatatccagcagtgcttatactatcatccttatcactacaccaatctgaatcattataaccaaacacttcttctgtatattcttac

SEQ ID NO: 7957 - DNA, 407 bp, Glycine max
  unsure (1)..(407): unsure at all n locations
gtgcatccaataccctgatgaggagggccttttgtncttattactggacnganacattcgcttncaaagtttcatggccttgcacgcgaacacccgcacaaacatttgaaagaatttcacattgtctgctccaccatgaaacccccacatgtccaagaggatcacatatttatgaaggcttcttctcattcattacacggagcggcatacgactggttgtattaccttgctccaaggtccatcacgagctgggatgaccttaagagagtattcttagaaaaaattttccctgtttccaggaccacagccatcaggacggatatcttaggtattagacaactcagtggagagagcctgtatgagtactgggagagatttaacagactatgtgccagcttgccccacca

SEQ ID NO: 7958 - DNA, 359 bp, Glycine max
agcttatgactcggatcttggtttcttattctatatgacgatgaggatgggattttgtgaaagatggagaaaatggatctatggatgtctatctagcgcaactatatcaatcctaatcaatggcagccctactagagagtttgtgcctgagaggggactaatgcagggagacccccttgcacctttcctattagacataatagctgagggccttactggtttgatgaggacaactgtctctaaaaacatcttcagccgttatcaagtggggaggcaaaaggaagagattaatatactgcaatatgcagatgataccattgtgctttggaactgcgactacaactaatggtagagtcatg

SEQ ID NO: 7959 - DNA, 423 bp, Glycine max
  unsure (1)..(423): unsure at all n locations
agcttgtgacatgaggccattaagtgcctctgccactatgttatatagaagaggngatagagggtctccttgccttagtcctttctgaggtaggaactcagctgagggactaccattcaccaaaaatgaaacagatgctgattttagacacccctcaatccattgaattcatttgctgcaaaagcccatcctacccatcatataagtgagaaactcccaagacacaaaatcatatgccttttcataatcaaccttgaagacaatgcaaggcttttggcatcttttggcctcttcaactacctcatttgtagtcaccacgctgtgtagcatatgtcttccttctataaatgctgattgcctctcatgaataataaaaggcatgaccttcttcaatctattggccaatattttagccactatctt

SEQ ID NO: 7960 - DNA, 426 bp, Glycine max
  unsure (1)..(426): unsure at all n locations
actcaagctganggnaaagtctcacgacgcacgtgttcatgtttttttgccagcngcggctatacgagacatcttgccaaacaaagtcaggttcacgataactcgtctgtgctttttcttccatgctatatgtagcaaagtgattgatccacgaatgttngatgagttggaaaatgacgccgcaattatactgcgccacttggagatgaattttccccctgctttctttgacatcatgattcacttgattgtgcatctggtcagagaaatcaaatgctgtggtcctgtttatctaccatggatgtacccggctgagcgatacatgaagatcttaaaagggtatacaaagaatctatatcgttcggaagcactattgttgactgtacattgcgtaaaagccattgaattttgttcatactacttaca

SEQ ID NO: 7961 - DNA, 241 bp, Glycine max
  unsure (1)..(241): unsure at all n locations
agcttatgctcaataggggatctttanctagctatactaggcccttgccgctagtgttaggccatagatggccttttttagaagataaactttatcttcttcactttgcttcatgaatccttctggttgctctacatatatttcttcttgtagctctctgtttaaaaaagctgatttaacatttgtggaagccatgccttcccagattattttgatgatggccaagaatcaagagtctagc

SEQ ID NO: 7962 - DNA, 435 bp, Glycine max
  unsure (1)..(435): unsure at all n locations
tattcctgaaactntagttcttanaataactgtgttggatgacgtcgcgngatctatgtagccgatctcacctagtgggataaaagcttagttggtgtttcaattatcatattcagttcttatttgacgacttctcatttttatgcctttggtattcaattntattccatgtgcctaaccaaagtatcttggtatgtatttaaattttgttttcagggcaagggtcctctattatctgtggaggcactgcatcaccttcatacatttatttttgtcctagctgtggcccatgtcacatcttgtgttctcactgttgttcttggagggctaaaagtgagtgcataatatgctntattataagatgtgcttgatgaaacgctcttttttgagtcctaataattaactctgattaacagatacctgagtggaaacact

SEQ ID NO: 7963 - DNA, 449 bp, Glycine max
ggtaggccttggatcttcttcatattggagtcttttgtcttttgaagatcaatgacaacataatggagaaggaagaaagatgattggagaagccacttcaaggagaagatgagtcaagaagaagctcaccaccataggaaaccatggataagagcttgaaggtagaagaagatgagtggagggagagaaagagcacgaatttttgtacttaaatgaggtatgaaatttgaagtgtaattctcaaatgatcaaagttgaaaaaaatgcacacacatgacctctatttatagcctaagtgtcacacaaaattggagggaaatttgaatttctattcgtatttcacttgaatttgaaattgaatttgtggagtcaaactatggagccaaaatttcactaattatgattagtgaatcttagaatatggttagcccactaatccaagatcaatt

SEQ ID NO: 7964 - DNA, 381 bp, Glycine max
agcttctacaagctggtttcatttatcctttcttcgacagccaaagggtgagtcccgtccaggtagtttcgaagaaaaccagcctcaccgtgatcaagaatgaaaaggatgagcttatccccacaagagtgcagaacaactggcaagtctgcattgattataggaggatgaactaggtaatcataaaagatcattttcccatgccattcattgatcaaatgcttgatcgcttggcaggtaaatatcattattgttttcttgatggatttttttggttatttataaattcatattgctcctgaggatcaagaaaaaaccaaattcacctgttcctttggcacttttgcctataggagaatgccctttggtctatgcaacgcc

SEQ ID NO: 7965 - DNA, 360 bp, Glycine max
  unsure (1)..(360): unsure at all n locations
tagactaagttcagcctaccaccctcagactgttgaccaaactgaacggaccattcagtcactggaggaccttttgagggcatgtgtcttagagcaaaaggggagttgggagagttttctgtcgttgatagagttcacttataacaatagtttccactataccattggcaaggctccctatgaagctttgtatggtagaaggtgtataacacccttatgatggttagagcccggagaaaacctcaccttaggatctaaagtggtacaacaaaccaccgagaaggtaaagttgatctaagaaaggatgaggactgcacagagtangcaataaagttatcagtataagaggagaaaagacct

SEQ ID NO: 7966 - DNA, 371 bp, Glycine max
taccccagtatctagctggaacttcgacgatttatgccgtggaagaatgcttaaccaatcgcgatcaagttttcgctagtttagcaagaaaattgaacaaggcttaacaacgaatgaaggaactcgcagatcagaagcgtcgcgaagtgagttttgaagttggagacatactgctggtcaagttacgtcctcgacggcagataacagctaccaacagttgctactcgaagttggcaaagcgaatttatggtccctttcaagtgacccaatgtatatgcgaagttgcttataagctagacttaccagcaacctcgaagattcacccagtattccattgctccttattaaagccatttcgtttagacacgaca

SEQ ID NO: 7967 - DNA, 370 bp, Glycine max
tgtacggttaacgtctcacgattgtcacgcgtttatgcaacaattgttagccgtggctatactagacatcttgccaaacaaagtcaggttaaccataactgacccgtgttattattccatgccatatctagcaaagtcattgatcttatcaagtttgatgagctgaaaaatgaggccgcaattatactgtgccagttggagatgtatatcccccctgctatgtttgacatcatgattcacttgattgtgcatctggtcagagaaatcaaatgttgtggtcctgtttatttgcaatggatgtacccggatgggcgatacatgaagatcttaaaagagtatacaaagaatctatatcatccataagcatcta

SEQ ID NO: 7968 - DNA, 330 bp, Glycine max
agcttggtgacttggtgacttggtgaatatttgattatttgcatcaggtcaggtacctagattcttatctcagatggagtgatctgattcgtcctgagcagaacatccaggatgggaaaggtcaagagactgaagcttctgctttcagaaatgcagatatttgtgacaataaacttgtataggggaaaagttgttatggaatagcttttgggagccaaaaacatcttccttctcgggtgatgaaaaatgttgttcaagtggagcaagatccagaaggaaaggaaaagtattggttttttgaaacacgtattccattatatttgataaaag

SEQ ID NO: 7969 - DNA, 349 bp, Glycine max
tataatatatcgatacgctcgaaatttaacatcggaaactctcacgaaattcaaatagtcataacttttcacacggatgtccgattcgggcgcataatatgtcgagaaggtcgaaattgaacaacggaagatcttgagaaattcaaatggtcataacttttctcacggatgtccgactcacgcttataatatatcgagacgctcgaaattaaacatcggaaactctcgagaaattcaaatggtcagaacttttcacacggatgtccgatacgggcgcataatatgtcgagaggctcgaaattgaacaacggaagctcttgagatattcaaatggtcataacttttcaca

SEQ ID NO: 7970 - DNA, 291 bp, Glycine max
tgctttcaagaaattcaaatggtcataacttttcagatgaaagtccgattcagccgcataatatatctagacgcttgaaattgaacgcccgatgatgatgacaaatttaaatggtcataacttatcacgcggatgtctgattcacgccaattatatatcgagatgctcgaaattgaacaatggagctctcgagaacattcaatggtcataacttttcaattggatgttcgattcaggcgcatcacatatcgaggctctcgaaatcgaacaacgaaagctcttgagaaattc

SEQ ID NO: 7971 - DNA, 343 bp, Glycine max
agctttgcttctacacttaggtgttataaggcatgcaaagcatgtaagacatacacaaagtatgactatatgatgtgacaatggggtgtcacaagcaaatgctcacctgcccctctaaaatttaatgggattgggcttatcccaattcaatcaaatttatttcccaacacacatcaaatattcacttaatgcatgtgaaattacaaaattacccctaatacaaaaagtagtctatgtgccctaaaatacaagggctgaaaaatcctacatttctagaataccctacctacattatggagccctaaatacaaagcccaaaaagtgtagaaatcttaatctaatg

SEQ ID NO: 7972 - DNA, 366 bp, Glycine max
tattataaaagacccaacaacatcggtttttatataaaaccgatgttgttcacgcaatccacaatatcggtttttaaaaactgatgctaattatgaactaataacatcgcttttttttttggaaaatcaatattaactattaattaacaacatcaatttttgaaaaatcgatgttaacattatgctagcaatattgattttcgaaaaccgatgttaaagatattcttttatttagggaaatgtcactgcaaatagtttaacatccattttttcttgtaaccaatgttaaactaactatgttgaatgtactagtgataccaagtgcattgataaattgtccccattctttaccaagaaatcaaagtg

SEQ ID NO: 7973 - DNA, 340 bp, Glycine max
  unsure (1)..(340): unsure at all n locations
agcttgtaggcctatgatctttttcatcaatggattcatttacttcttggatgatgaatgacagcgaaatggagaaaggaaaagagagaggagacgccacttcaaggagaagatgagtctaaaagaagctcaccaccataggaggccatggataagagcttggangaagaaagagatgaatgaatggagtgggagagaagagcacgaaattttgtgctctaaatgagctttgaaatctgaagtttaatactcaaatgatcaaagtttgaaaaaatgcacacacatgacctctatttatagcctaagtgtcacaaaaatgggagggaaatttgaaatttca

SEQ ID NO: 7974 - DNA, 363 bp, Glycine max
tctacttttcttctccttagtctcctcttcagtcttcccagtcatgtgttagacaagtggcctcagatatcttaagaaggggggggttgaattaagatattcgatactttttcttctaattaaaaatctatcttactttttacttaagttatgaattcccttaatgacaatcttcttaaatattaattcaaatgaagcaacttgaatatgaatataaagcaataataaataaaggagattaagggaagagaaaatgcaaactcagttttatactggttcggccacacccttgtgcctacgtccagtccccaagcaacccgcttgagagttccactaacttgtaaattccttttacaagttcta

SEQ ID NO: 7975 - DNA, 285 bp, Glycine max
agcttcaaggatggatgaacctcgatatcacgcatgaatattctatcttcaatatctagattgctcacatccacaacaatttttgaaggaatgtgctcagatggacagaaaaattttagactaggtctgatcttattcaaaattcctcctgcaatggcataaaagtttcaaccatattagcattagaacagaacattagaaccacaaaaaaattccccatgatattatattaaattgaatttgcaacatttggcacccgccccccctccaaaaataatgatattc

SEQ ID NO: 7976 - DNA, 340 bp, Glycine max
agcttctaaactttgtacaagaatgaagctctgataccacttgttagacaagtggcctcagatatcttaagaagggggggttgaattaagatattccaaactgtttcccctaattaaaaatctatttcactttttactcaagttatgaattcccttaatgacaatcttcttaaatattaattcaaatgaagcaacttgaatatgaatataaagcaattataaataaaggagattaaggaaagagaaaatgaaaactcagttttatactggttcggccacacccttgtgcctacgtccagtccccaagcaacccgcttgagaagtccactatcttgtaaat

SEQ ID NO: 7977 - DNA, 374 bp, Glycine max
tgtccaaaagggaagcaagttaaaaactctttttatagtaaaagcgctgtttctacttcaaaaccctttgaactacttcacatagacttatttggtgcctctagaactatgagtttgggtggtaattactatggcttagttatagtagatgattactcaagattcacatggactttgtttttgaaaaccaaagatgaagcttttgatggtttttgcaaacttgccaaggtcattcaaaatgaaaaaaggtcttaacattgtttcacttataagttatcatggaggtgaatttcaaaatgagtctcttgaaatgttttgtgaagaagatggaattcaccacaacttttttaccctaagaacacctcaacagaatg

SEQ ID NO: 7978 - DNA, 360 bp, Glycine max
tagactaagttcagcctaccaccctcagactgattaccttactgaacggaccattcagtcactggaggaccttttgagggcatgtgtcttagagcaaaaggggagttgggagagttttctgtcattgatagagttcacttataacaatagtttccactataccattggcaaggctccctatgaagctttgtatggtagaaggtgtagaacacccttatgatggttagagcccggggaagacctcaccttatgatctaaagtggtacaacaaaccaccgagaaggtaaagttgatctaggaaaggatgaggactgcacagagtatgcaaaaaagttatcagtgtaagacgagaaaagacct

SEQ ID NO: 7979 - DNA, 339 bp, Glycine max
agcttttaactcggatgtccgattgagtcccttaatatgtcgagatgctccaaattgaaaacggaagctcgtagcaaatgcaaactgcaataacttttaactcggatgtccgattgagtcgcatgatatatcgagacgctccaaattgaaaacggaagtaacaaattcaaacgacaataactttgtacttggatatccgattgagtcccgtaatatatcgagacgctcgaaattgataacagaagctctgagcaaattcaaacgataattactttattctcggatgtccgattgagtcccgtaatatatcgtgacgctccaaatctaaaatagaatttt

SEQ ID NO: 7980 - DNA, 358 bp, Glycine max
tgtccctgtgcctcctcctgagatattgggggtggtctattttaatgataacatcctcaccagatactcgtgtgccctatttcataataataatgtctggttaaaactcttggggacagacaacgaaaaagcataaattcaaatatgcttactggaggggcaagaccatcatcatccagcttatcataagaaccatgtctcattccctgaaaaatgaaacttggtaagagaccaccaacaccaaaccaatattcttttccaaataaaaattgcaatgcatgaatagttgcttgctaccaaagccaaaattctcaccatggtgttagctctatctggacggccaaaatcttctttcact

SEQ ID NO: 7981 - DNA, 367 bp, Glycine max
tgtacctcacttggggcaattcagtttggtactcaggtgcattgccttgttgtcaaatgtgggtttggctgtgaactgtttgtgggtagtaatttgactgatatgtattcaaagtgcggggagttgtctgatgcatgtaaagcttttgaggaaatgccttgtaaggatgcagtgttgtggacgtcaatgattgatggctttgtgaaaaatggagattttaagaaagctttaacggcttatatgaaaatggtcactgatgatgtttttattgatcagcatgtgctttgtagtactttgagtgcttgcagtgcacttaaagcttctagttttgggaagtcccttcatgcaaccattttgaagcttggat

SEQ ID NO: 7982 - DNA, 359 bp, Glycine max
agcttgcatcctgaagacaaacttctatgatatatagacttgttgcttatgagtacatggctaatggttcattggataaatggatattcaacaagaacaaagaggaatttcagttggattgggatacaaggtataacatagcacttggaatagcaaaaggacttgcttatctacatgaagattgtgactcaaacattattcattgtgacattaaaccagaaaacgtgctcctagatgataatttcagggttaaggtttctaattttggtttggctaagctcatgaaacgtgaacaaagacatgttttcacaacacttagaggcactagagggtatcttgcacctgagtggatcacaaac

SEQ ID NO: 7983 - DNA, 364 bp, Glycine max
tgcataaaagccagactaaacaataaaggaccttttattttccctctgcctgccgaagtcgggcaatcccttctacagcttgccctgcaacagtgccttgaccaaccccaagtccaatagaagcaagccctacagtcaacccatcatcaataacagaaccagaagaaataaatggattcatgataatttactcgtaacctaaatataaaataaagaaatagttaatgatataatcacccaataaaatatgacctaagttttcaattatcaagatttattcgggctaaagtaattaataagaatttcgaattgaatataatcatagttattgaactctaccaattacttcgagatttattttctc

SEQ ID NO: 7984 - DNA, 369 bp, Glycine max
ttctaaagttttctggttttctaaaccttgaattcttgtgttattcatcttttcattctcttatccctttgccaaaaagaattctccaaggactaaccgtctgaattctttttgtgtctctcttctcccttttccaaaagaacaaaggactaattgttagacaagtggcctcagatatcttaaaaggggggggttgaattaagatattcgaaactgtttcccctaattaaaaatctatttcactttttactcaagttatgaattcccttaatgacaatcttcttaaatattaattcaaatgaagcaacttgaatatgaatataaagcaatactaaataaaggagattaagggaagagaaaatgcaaact

SEQ ID NO: 7985 - DNA, 332 bp, Glycine max
agcttcctccattataaataaatttgacagcagaagttttctctttgaagttttgtataatattcctttcatacaaaatttcatactttggaaaaacataattaatgctaaaaacatactattgaaacatgtaattgaaaatacatgtaatagaaattaaaattcctaaatttcataattagggtttatacataattgagagaaattaaatcattcctaaatttcataattacgattcataggagaaatcaaatcattcttggagaatcataaatttcataacacatgttctgataccacatgtaaaacattaaggggttccctaaactatc

SEQ ID NO: 7986 - DNA, 354 bp, Glycine max
tatcccatgcctccttagcttgaaagatgatgtataaagctttcttgcttctctatcttgaatcctttaaagtcttcttttgtgcttacgaaagtgaagtctcatcttgtcactccgtatagcctttttcaaccatttcctaaacatcatgtgtgatgcaatccgaccccccaagggcattggatagaagactccaagaagattacgctagagatgtaagagaaggtcctagggttctcatgagccttatggtagatttcaggcccacgggttaagtatgagtccacttatctttgtacatattagattaaggtttcattatttttgggccttgtatttagggctccataatgt

SEQ ID NO: 7987 - DNA, 348 bp, Glycine max
  unsure (1)..(348): unsure at all n locations
agcttgtgtcacactttcaattgtcgaagctgaatacatagctgcaagaagttgttgtgctcaaagtctttggatgaagcaacaatgatgtaagctccattggagcttgtaggcctaggatcttcttcatcaatggattcctttgcttcttggaagatgaatggcagcggaatggagaaaggaagagagagaggagacgccacttcaaggagaagatgagtctaaaagaaactcaccaccataggaggccatggataagagcttggaggaagaaggagatgaatgaagggagagggagagaagagcacgaaattttgtgctctanatgagctttgagatctgaagttt

SEQ ID NO: 7988 - DNA, 347 bp, Glycine max
agcttggaacgaaaaaactgatttagtggttgagacaggcttttggtgaagatgtcggcgagttgaagataggaaggaacaaattgagtaatgagctttttggagagaactatctcgcgaacaaagtggtaatcaatatcaatatgcttcgcacgcttgtgagcaaccggattatgggaaagaaatatagcacttttgttatcacaaggaagagtagggggagtagagtaaacatgcatatcgcgccgcaaatgagtgaaccacattagctcagctgctgcatttgccatagcccgatattcagattcacagctggaacgagcaacaatgggctactttttagcact

SEQ ID NO: 7989 - DNA, 366 bp, Glycine max
ttcattttttaaatggtaactcaattatttatttcttaaaactaacgaaatttattttattttggaaaataagtagttatattgattaattaaaaattaattaccaatttgatagatggataaatacatagataatcaaagtataagatttcaaatcttaagctctattttactattttttaatcccttttcccctagtttctttcctatacaattcattattaatgtcgtgatatatgtgtaatactttttatacttttcggaactaaattttgcatttcatatgtcaagggacacatttcccagtagagtgagaagaagaaatgtaaaataaatattatgccaaatatttggctgttgctaggt

SEQ ID NO: 7990 - DNA, 345 bp, Glycine max
tgttgatcttggacaaggcggcatcactaacatgttcttcttggacggacatgtgtcatcagtgggagacattgtgaccaatggaaaaagaaaagggcacgccttttgcgagcatgcagaaaaggatgcaagagacactgctgattattctgccgcaaagcattgtcgtatggaggcgctcatgctgcataggtataagcgtggatcctcaagtcttcttcatccggattcactcacatacattataactctccttttaaatcctgagagataatactgctcaatcggctttcgaacatacaaagagaacacacgaggctctaattgagatggggaccaaacata

SEQ ID NO: 7991 - DNA, 379 bp, Glycine max
tccattttcaatttcgagcgtctcgatgtatttcggggcttaatcggacatccgagtaaagtattactgtcatttgaatttgctacgagtattcatttttaatttcgagcatttttatatattataggactcagagggaaatcggagtaaaatattattggggcttgaattttctcaaaggttctgttttcagtttcaagcgtctcaaaatattaaggaactcaatcaaacatctgaatgaaaagttatcgtcgtttgaatttgctcaaagctattgttttcaatttcgagtgtctcgatatattatgggtctcaatcgggcatccaagtaaaaagttataatcgtttgaatttgctcagagtttcttctttcaatttc

SEQ ID NO: 7992 - DNA, 354 bp, Glycine max
tcttagtctcagatgatgcagctgagtttgtttctacctcatgcactcctctaatgactatggcatcatttatggcgctaaactgctgagagttggaagccatcttctcaattaaatttctggcttcagcaggagtcatgtctccaagggctccaccactggcagcatctatcatacttctctccatattactgagtccttcataaaaatattggagaagaagttgttctgaaatctgatggtgggggcaactggcacatagtttcttaaatctctcccagtactcatacaggctctctccactgagttgtctaatacctgagatatccttcctgatggcttgggtcctggaag

SEQ ID NO: 7993 - DNA, 357 bp, Glycine max
agcttgaaattgataaacggaagatgtcgataaattcaaatggtcataacttatcacaccgaagtccgattcaggcacataatatatcgagacgctcgaaattgaacaacggaagctctcgagaaattcaaatggtcataacttttcaaatggaagtccgattcaggtgcataatatatcgagaagcttgaaattgaacaaaggaagctctcgagaaattcaaatggtcataacttatcacacggaagtccgattcaagagcatactatgtgaagatgctcgaaattgaacaacgaaagctctcgagaaattcaaatggtcataacttgccacacggaagtccgattcagacgcata

SEQ ID NO: 7994 - DNA, 366 bp, Glycine max
  unsure (1)..(366): unsure at all n locations
ttgtgggacttagctcctaaacctttctctcacttgtcaataggaaccaagtgggtgtttcaaaataaacttgacgaatctggcatcatagtaagaaataaagcaagattgattgccaaaggttacaaccaagaagaaggaatcgactatgatgaaacctacgctccagttgcatggttagaagccataagactgcaacttgaatttgcatgtatcatggatttcagactttttcaaatggatatgaagagtgtcttcctcaatagtctcattgaagaagaagtgtatgtatatcaaccatcaggttntgtggactacaaacatcctaaccatgtctatagagtgaaaaagactttgtatggtttg

SEQ ID NO: 7995 - DNA, 274 bp, Glycine max
atcttgtgctgaagtaagtaagacatgtgcctgagatgcatttaaaccttatctcaacaggaaagctaggtgaagctagaatgataaaccatttcggggtcggtagatgaaagcttgatacaagaagcatggttgttgctcgaagtaagaaagaaggctccttgtacatcatgcagggaaagatatgaaaaagggagatgaatgttgcttaagatgcaactcaagaattgtggcacgagagattgtgacacatgaatgagaaaggtttggagtt

SEQ ID NO: 7996 - DNA, 363 bp, Glycine max
tcttttggactcgatccccctttatctccatgctcaaaatatttttagcagctcccatgtccttcatataaaactactaagtagtgacttcagcttctgaattggcaacaaattttcagatgctatgagtatgtcatccacatagtgtagtatatagatgtaggaaccatcctccaccttactattataaacacattagtcatagggacttctaatgtacacatgagagacaatgaactcatcaaatctcttgtaccactgccttagtgattgcttcaacccataaagagacctcttcaatatatagagaaaattttcttttacttccacctcaaaacctctagattgatgcatcagaatatc

SEQ ID NO: 7997 - DNA, 331 bp, Glycine max
  unsure (1)..(331): unsure at all n locations
agcttgctaacccatggaagctcctaatatctcccacactttttagggggagccattcttggatggccctgattttctcaggtccacttggaccttatttctaccaactacaaaacctaaaaaaactatattatctacacaaaaggtacacttctctatattttcatagagggtgtttttcctaaagactgaaagaacttgcctgagatgtcctaagtgatcatctaggctcctactgtacactanaatatcatcaaaataaacaactacaaatctacctatgaaatcccttaagacatgatgcataagcctcataaaggtgcttggtgca

SEQ ID NO: 7998 - DNA, 369 bp, Glycine max
tctatagaaggttcgttcctaatttctctacatttgcatcacctctcaatgagatggtgaagaagaatgtggcatttacctggggtgaaaaacaagagcaagcctttgctttgctcaaagaaaagcttactaaggcacttgttctagctcttcctgacttttctaaaacttttgagctagaatgtgatgcctctgaagtgggagttagagctgtattgttacaaggtgggcaccctatttcttattttatggaaaaacttcatagggccacccttaactaccccacctatgataaagagctttatgccttaataagagccctctaaacttgggaacattacctatgttacaaagaatttgtcattcata

SEQ ID NO: 7999 - DNA, 297 bp, Glycine max
ataacaagctcctaccttgcaaagccagcgcggactatcaacagcaaactgcataccaagtgcaacaagaatacctgggatgctagcaatatacaacattgtcctccacctgaaatatgtatctggtggtgccaaataagcattatttggaaaacaattttctgtttttaaagactataaacacataattggtggaagaatcgctgtgaatttataagtgaaggcttgatttcagtgagccatagagaagtatgctccttttacattaagttcaaaacatatcacaatgagtctatc

SEQ ID NO: 8000 - DNA, 316 bp, Glycine max
agcttggttgcatttgcaaacttctatgtagtgcttaatgatctagatgtgtcaaagtgtgcaatcaccaatgttggtatcacagttctctcaagggtcagtctacctagcttgcaagtgttttccttgtctggttgttctaatgtatcaaacaaaagtgcacctttcttgatgaaattgggccataccttactgggattgaatcttcaaagctgcaattcaattggcaccaacacaatagagttgttagtggaaaagttgtggagatgtcatattctggcttaatcatgttagaaactagaagtaaataaaattg

SEQ ID NO: 8001 - DNA, 358 bp, Glycine max
ctgggatgagggctatgaatgaagcattggtttctttgttgaaggagccattgatgtaaaattcatccatgaacctgatgaaatctggtttcaaaatctcccaaaaatggttaatgaaattgaaatttaatccatccggggcaggacttttgtccccccccccccccaccacaatcccaaactgttgatttgatctccaattcagaaaatctagacacaaggctgtctttatctcttaagtcaagagaagaaaattggacaccatccaaggttggtctactacaacattcctcggaaaatctgtccttgaaatagaagatagctgcatttttaacactgcaaggttcatgcacccaca

SEQ ID NO: 8002 - DNA, 352 bp, Glycine max
agcttctaaactttatacaagattgaagctctgataccacttgttggacaagtggcctcagatatcttaagaagggggggttgaattaagatattccaaactacttgccctaattaaaaatctatttcactttttattcaagttatgaattcccttaatgacaatcttcttaaatattaattcaaataacacaatttgaatatgaatataaagcaataataaataaaggagattaagggaagagaaaatgcaaactcagttttatactggttcggccacacccttgtgcctacgtccagtccccaagcaacccgcttgagagttccactatcttgtaaattccttttacaag

SEQ ID NO: 8003 - DNA, 291 bp, Glycine max
  unsure (1)..(291): unsure at all n locations
agcttctaaactntatacaagaatgaagctctgataccacttgttagacaagtggcctcaaatataataagaaaggggggttgaattaagatattccaaactacttccccaattaaaaatttatttcactttcttttcaagttatagattcccttaacaatgaacttcttaaatattaattcaaataaaacaatttgaatatgaatgtaaaccaataataaacaaaggagattaagggaagagaaagtgtaaactcagaattatactggttcggccacacccttgtgccta

SEQ ID NO: 8004 - DNA, 348 bp, Glycine max
agcttgtgcatcctataccctgatgaggatgtcccatatgttcttaagactggactgattcatttgcttccaaagtttcatggccttgcaggtgaagacccacacaaacatttgaaagaatttcacattgtctgctccaccatgaaacccccagatgtccaagaggatcacatatttctgaaggcttttcctcattcattaaagggagtggcaaaggactggctgtattaccttgctccaaggtccatcacgagctgggatgaccttaagagagtattcttagaaaaaattttccctgcttccaggaccacagccatcaggaaagatatctcaggtattagacaactc

SEQ ID NO: 8005 - DNA, 334 bp, Glycine max
agcttcaacatcataccacttctcaggtgctggaactacttcacatggatttgatggggcctatgcacgttgaaagccttggaggaaagaggtatgcctatgttgttgcggatgatttctccagatttacctgcgtcaactctatcagagagaaatcagaaacctttgaagtattcaaagagttgagtctaagacttcaaagagagaaagactgtgtcatcaatagaatcatgagtgaccatggcaaatagtttgaaaacagcaggttcactgaattctgcacatctgaaggcatcgctcatgagttctctgcagccattacaccacaacagaa

SEQ ID NO: 8006 - DNA, 384 bp, Glycine max
  unsure (1)..(384): unsure at all n locations
tgaaggcaaactggatgcgctggtcaacttggttacccatctggccttgaatcagaaatttgtacctgtcgcaagggtttgtggtttgtgctcctctgctgactaccatacagacctttgcccttccatgcagcaacctggagcaattgagcagcctgaagcttatgctgcaaatatttacaatagacctcctcaacctcagcagcaaaatcaaccacagcagagcaattatgacctttccagcaacagatacaaccctggatggaggaatcaccctaacctcagatggtccaacccttagcaacaacaacagcagcctgctccttactttcaaaatgttgctggcccaagcagaccatacattcctncaccaatccaacaaca

SEQ ID NO: 8007 - DNA, 267 bp, Glycine max
tgaaattaaacaacggaagctctcgatatatttttattgtcataactattaactcggaggtccgattcaggcgcgtaatatatcgagacgctcgaaattgaacaatggaagcttttgagcatatcaaagtggtcatactttttcacttggaggtccgtttcaggcacaatatatatcgtgactctcgatattgaacaccggaagctctcgagaaattcaaatggccatatcttttaactcggaggtacagaccaggcccataattta

SEQ ID NO: 8008 - DNA, 389 bp, Glycine max
  unsure (1)..(389): unsure at all n locations
agcttaacatctgtttntttaaattttgatgttaatatttacatataacatcatgttctactaacaaccaatgttgtttattggaattttttaatgtgctgtctattttttttaataacccaaaattaatctacaatattaaaaaacataaccacgacaaataattttcattctatcttcaaacaatttttagtagaaatctcataaaaattgaatatttactatgaattaaaagaatatttaatgtgcatataacatgaattgtaaatattgtaaattaactaaactacaattccaaaattacttaaacactaattatttcatttntaactttcaaatagtagtttgtccactggatgcaaagcaccttcaatctctttagtttcaat

SEQ ID NO: 8009 - DNA, 416 bp, Glycine max
catgtgacctatgaaactaagctatgctgcaacatttacaacagacctcctcaactctcatcagcaaaatcaaccacagcagaacaattatgacctctccagcaacagatacaatcccggatggaggaatcaccctaatctcagatggtctagccctcaacaacaacaacagcagcctgctccttcctttcaaaatgatgctggcctaagcaagccatacattcctccaccaatccaacaacagcaacagccccagaaacaacaaacagttgaggctcctccgcaaccttccctcgaagaacttgtgaggcaaatgactatgcagaacatgtagtttcaacaagagaacagagcctccattcagagcttaactcgccagatgggacaattggctacacaattaaatcaacatcagt

SEQ ID NO: 8010 - DNA, 384 bp, Glycine max
  unsure (1)..(384): unsure at all n locations
tcttagtctcagatgatgcagctgagtttgtagctaccttatgcactcctctaatgactatggcatcatttatggcgctaaactgctgagagttggaagccatcttctcaattaaatttctggcttcagcaggagtcatgtctccaagggctccaccactggcagcatctatcatacttctctccatattactgagtccttcataaaaatattggagaagaagttgttctgaaatctgatggtgggggcaactggcacatagtttcttaaatctctcccagtactcatacaggctctctccactgagttgtctaatacctgagatatcctacctgatggctgtggtcctggaagcagggaaacttntttctaagaatactctct

SEQ ID NO: 8011 - DNA, 384 bp, Glycine max
tgcagacagacgacacctttatttttgactagagaccaccagcacgacacgtggcctcagatatcttaagaagggggggttgtaataccatattacaaattattttcccagttaaaaattctatttaacattctatccaagttataaatttccttaataatgaatttcttaaatgttgattcaaatagaacaatttgaatatgaatataaaacaataattaataaaggagtttaagggaagagaaagtgcaaactcatatttatactggttcggccacacccttgtgcctacgtccagtccccaagcaacccgcttgagagttccactatctttgtaattcctttacaagttctaaacacacaaggacaatcccttctttgtgt

SEQ ID NO: 8012 - DNA, 394 bp, Glycine max
  unsure (1)..(394): unsure at all n locations
tcacaaattcaattgattattgtcaatctatttttcagaatagttacaaattaaaatttaaatacaaagcaaatttgagcaaaattgagttacattaattttacctcactttcaaaatggttttacatcaatttttttaaaaaggcaatttcaagacgtcttcgattgtgtttttgtttttttaatctattttttacaataatttttaaaatagagatgttttgatttttttagttttttagtcaccatagcattgcattagtataaaatattaatcaattttactaatgactaattttttataaagacatatatttattaatactaaataagttatttatactaatacaactcagttttaattattaatattatcttatntatatatactaat

SEQ ID NO: 8013 - DNA, 391 bp, Glycine max
  unsure (1)..(391): unsure at all n locations
agcttctagcnattcaaccatatttctntgtactcggatgtccgattgagttccgtantatatcgagacgctcgaaattgaaaacagaagctctgagcatattcaaacgaacattacttttttctcggatgtaccattgtgtcccttaatatatctagacgctcgcaattgaaaacggaagcctcgtagcaaattcaaacgaacaataactttaactcagatgtctgactgagtcccgtagtatatcgagacgctcgaaattgaaacataaggtctgagcaaattcaaacgacaataactttttactcggatgtccgattgagtcccgtaatatatcgagacgctccaaattaaaatagtagctcctacaaattcaaaccatataactttt

SEQ ID NO: 8014 - DNA, 281 bp, Glycine max
agcttctcgatatattatgtccccgtatcagacatctgtgggaagagttatgaccatttgtatttctcgagagctaccttatgttcaatttcgagtatctcgatatactattttcccaaatcggatatccttgtaataacttatgaccaatcgaatttctcgagagcttctgttgttaaatatcaagcgtgtcggtatattatggcctataatccgaccatccagtgaaatagtatgactagtcgactttctcgagagcttcctttgttcaatttcgagcg

SEQ ID NO: 8015 - DNA, 350 bp, Glycine max
agcttcattcctttatcactcatatttccaagtcttttatgccacaaggctgaattattgacagcctcagtaactgctaccatatcctcatatgtaatcatgtaaagagatcctcgcttctttccacgagccacaatgagattgccttttgttaccttccaagctccatctccaaaagtggtgtgatgtcccttatcatccaactgccctatagatattaaatttctctttaaggcaggaatatgtctgacattgtgcaatgtccatagggatccactggaggtcttgatgtgatatcacctcttccgacaatgtcaagagattttccatctgcaaaggaaacttttcca

SEQ ID NO: 8016 - DNA, 390 bp, Glycine max
ttgaacatgaattgtttgaccgtttctcaaacatttattggggacccaatttcagggttagggttttagttgtaacaacagcaactttagtaactaattaacagtaacttttacaagtaatttatcaaacaatattaattcaaccaactagcttataattattcagtttttcaacttctaatttattaggttataattaattcaattaagtttttcatcataactttaaacactcaattaattgtttttattgtttttctctatctctttttgttatatcacattatatattatgtttatcactatttctcttgaaagttgttagtcgaagctgagtaaaggtgttaaataaatttattgaatttaatgtattatagcaaatttgatata

SEQ ID NO: 8017 - DNA, 296 bp, Glycine max
agcttaatgaatatgtttggtattatttccatacaggggttttgttcaagaggaagaactgctaacattagatgtgcaacctggatggtcgattggagcatggattacatttgtaggaacaggatttgatagacctttagcgtacagagatgatatagtatttatcatctccagaagatggctccaattatttagaagagaaggggatgatatggaattgagtgtataaattcccttagtaaaggcacttactgagtgtacaatattattcccactattgagtcgagagcacatga

SEQ ID NO: 8018 - DNA, 365 bp, Glycine max
tcaagtggactaacttcaatcttgaagagcaagtctctggtgataattgctccacggagcaacaatgagatggatgcatccaaactgaataacgagatccctgagcttctttccatcaaggaatcactgatcaagtatgtctttgagccaaacaagaaaactgcttaaaagtattgagcggtttcatgttttagaaatcaaagattatgcatttctgttgcgggctacatagaacactttttatttcattgttatttcgctgggttttgataataaccttactataaaagctagccatgtggttctcgttctcatagctacaagtgatttcaggtttattattatgttcatcatgttactgtgtt

SEQ ID NO: 8019 - DNA, 363 bp, Glycine max
  unsure (1)..(363): unsure at all n locations
agcttcaatcatgtggttgaaaaatgtgttcctagttgatttggttcatgacaaagaaagaggtagaattttgaaattggatagcattatttctggggaccagtggaaagaagtggatgttttgattntcaacacctaccattggtggactcacactggacagtctcaagggtaatgaagctttttgaatttttaaccactttttttggcgtttatgagaggtgctagccatgtggctaatgacatcattttaatgttttattgtaggtgggattactttcaagtgggcaatgaattaagaaaggaaatggatcacatggaagctttcaagattgggctgagtacttgggctaaatgggttga

SEQ ID NO: 8020 - DNA, 393 bp, Glycine max
tgaaacaacagaaatgttgcactgcatcaagcatttattatgagctgactaatttcaagaacagtagcacataccacaaacgtattggctctaacaacatcaagcatagtgactcccaaaagtctcttgggatcgtaagtaccagctcttttgaaaacttcggctgcaattctggactgtggagttaactggattgcttatcacattgacaatggctttaggacagcactttgcaattgcttcacacaatgttttaacaattccagcatttatattgaagagatcatctcttgtcatttccaggtttctaggaacaccagcagggatgatcaccaagtccatgcctataagtgcatccctaagctgttgctgtcccaaaaattctcgaaccta

SEQ ID NO: 8021 - DNA, 400 bp, Glycine max
  unsure (1)..(400): unsure at all n locations
agcttgcagaatgcgctcggnctgtttaatatttaagatttatgacatggatgaatttaagcaatttttttttcaagttgagaaaaaaataatgaaaataagctgcaaataatttttaaattaggttaatactgtgtactttctatagaattgaaaaacgataaagacaaaagaataattaatatatagtatgaaaaaagtattgtgatattgaagatgctatacggacacaattttttatgatattaaataatcaatgtactgaattactataataatatatataaagttaaatgttattatatgagaaatattatcaatatatttttaacattntttattattgaccacaatttattaaaaataacatattgttggttttacttcttatttaatgatt

SEQ ID NO: 8022 - DNA, 392 bp, Glycine max
  unsure (1)..(392): unsure at all n locations
tgcttaggacatagggatcatgccccccacccacaaatattttttaatataatgagaatatcgtttttatatgaaagtaataagaaaaataagtattaatcattaaatcttatcatgaatgctcatttgaattttttaatagtcccattaatttcttatgccactctcatataaaaataattcttccactagatttgtctcctataacattatgaaatattctntaaaattatttatttctcaattattaatgattttaagtcattgacagagcttatagaattttaatttgcaaacttttagttgctgaaagagcataaacaatgtaatattcattcatcttctttattatggttatattttatagacaatttatgttaatattgcattta

SEQ ID NO: 8023 - DNA, 405 bp, Glycine max
agcttgtcttcctccacaagagatgttccaactgaataaccctgagccttgtaaaaggtaaagatcattcctccaccaagcaagagaacattaactttctccaacaaggattcaataactccaatcttggaagacaccttcgatccaccgacaatagcagcaaatggtctcttggggtttgacacagccccaactagataatcaagctcctgaaacaattaaaaatacatcagatcaatcaactgtataaattacataattacccaatatatatataatgaagctaacaattacttcctacaaaccttctgcattaggaatcctgcaacagagggcttcaagtatttggcaactccttctgtagaagcatgagctctgtgggcagtgccaaatgcatcattcaca

SEQ ID NO: 8024 - DNA, 394 bp, Glycine max
tgtgcattcaatatcctgatgagggtgttccatatgttctcaagactggactaatacatttgctgcccaagtttcatggtcttgcaggtgaagatccttataagcatcttaaggagttccatattgtttgttccaccatgaaaccccctaatgtccaagaaggtcatatctttctaaaggcttttcctcattctttggagggagtggcaaaagattggctacactaccttgctcccaagtccattttcagcagggatgaccttaagagggtgttcttggagaaattctttcttgcatctaggaccactaccatcataaaagacatttcacgcatttggcaacttattggagaaagcttatatgaatactgtgtgagaattcagaaactatgtgc

SEQ ID NO: 8025 - DNA, 390 bp, Glycine max
agcttcctttcgtaagatttagaatttaatatgataactctactccttttttaattgagaaacaaatatagttggcaatatgataatttcaccgatacaaaataaaaataaaatacaattggatcgcaaccaaaataacaaaataagaattacaagttatatataatataaatataatatttgaagactaattaaattttgatactgttacattatattccccattaaaaaatgtcatattgttatatttacaaataaaaataactatgaaggagtttgctaatttatctatcagtatatttacatgatatttcctaaatttaaatgaatattaatgtttcatattccaaaagatgaaatatttaaaattaatgatacaaataagattat

SEQ ID NO: 8026 - DNA, 318 bp, Glycine max
tatgctgcaaatatttgcaatagacctcctcaactctcagcagcgaaatcaaccacagcagagcaattatgacctttccagcaacagatacaaccctggatggaggaatcaccctaacctcagatggtccagccctcagcaacaacaacagcagcctgcttcttcctttcaaaatgctgctggcccaagcagaccatacattcctccaccaattcaacaacagcaacaacccctgatacagccaacagttgaggcccctccacaaccttccctcgaagaacttgtgaggcaaatgactatgcataacatgcagttttt

SEQ ID NO: 8027 - DNA, 388 bp, Glycine max
agcttcatgcttaactatgtatggtaaaacttcattactggtgttcaagacatacaagtgagcttgttacaaatcttctacactcggagagatcacatgcagtcctcttgaacccttaccacccactctgtcatgatgccgagactcaggaagcccaacaggtttagctctctcttagtcttctgaacaaaatacaatggcttcttgtgcaatgtacctctcaacaatagatgctcttggacgatataaattctccgtatacccttttaagatacttatgtatcgctcaaccgggttcatccaccgtagataaacaagaccacaacatttgatttctctgaccagatgcacaatcaagtgaatcatgatgttaaagaaagcgggggga

SEQ ID NO: 8028 - DNA, 379 bp, Glycine max
tcttattttcagcagatgaagatgaatttgtggccacatcatggactcctctaaggacaatagcatcatttcttgcaatgaattgttgggagttggaagccatcttctcaatcagattcctagcctcaacaggagtcatatcaccaagagctcaaccactggcagcatcaatcatactcctctccatgttactaagtccctcatagaaatattgcaaaaggagttgctcagaaatctggtggtgaggacaacttgcacacaatttcttgaatctttcccagtactcatacaagctctcttcactaagttgcctgatgtcggaaatgtcttttctgatggcagtggtcctagatgcaaggaagaatgtcttcaagaacac

SEQ ID NO: 8029 - DNA, 403 bp, Glycine max
  unsure (1)..(403): unsure at all n locations
agcttgtccttacaaaatatcattatacaaanttgattgtcttaagactttaatgttatcatatgcaaccacaacaaaagaaaatgcatgccaaattcacaagtcctgtgttgcaactgcttcgagcataattattggtttgcaatgatcacctacaataaattgacctttccaaggtgcatgataattttttcattcctagtgcatacaatcaactgaatccaacatacccggaatgccacatgtctcctccatttgtagtaggtggcggaaacattagaacaaatagaggattttgagaatttttggtagaagaaggtacacaattttgtatataattgtatgtggagttgtttggtggtggtggaaacataaggaaaaatggatggaaacatttgtcaag

SEQ ID NO: 8030 - DNA, 391 bp, Glycine max
  unsure (1)..(391): unsure at all n locations
ntgagcaaattcgaacgacaattacttttaacttggatgtctgattgagtcccgtaatatatcgagacgctcgaaattgaatgttgatggtcgttgcaaattgaaacgacaataactttttactctgatgtctgattgagtcccgtaatatatcgagacgctcgaaattgaatcttgatgctctgagcaaattcaaacgacaataactttttactcggatgtctgattgagtcctgtaatatatcgagacgctcgaaatttaatacgaaagctatgagcaaattcaaacgacaataattttttactcggatgtctgattgagtctcgtaatatatcgacacgctcgaaattgaatgttgatgctctggtcgatttcaaacgacaataattt

SEQ ID NO: 8031 - DNA, 399 bp, Glycine max
agcttcagaattcaatttcgcgcgtctcaatattttacgggactcaatcagacatccaagcaaaacattattgtcgtttgaattagctcagagcttcagaattcaatttcgatggtctcgatatattacgggtctcaatcagacatctgagtaaaaaagttattatcgtttgaatttgctgagagcttcaacattcaatttcgagcgtctcgatgtattacgggacttaatcagacatccgagtaaaaagttatcgtcgtttgaatttggtcagagcttcaacattcagtttagagcgtctcgatatattacgggactcaatcagacatccgagtaaaaagttattgtcgtttgaaaatcctcagagcttcggtattcaatttcgagcgtcttgatata

SEQ ID NO: 8032 - DNA, 377 bp, Glycine max
tgcttaaagacatatttggttaattaattattttaaaacctagtgaaatattaactaaaaaaagaaacttataaaattttatataagtaatgtagaaatccaaaaataattgataaacaaaatcatattgaattcaagtcgttaaagcacaaagtatatcaaacgaatataaaaagagcataatattaaaaaatgtatggattatagatggtttacactaataaagccaaacaaaaattattattagttaaattaacaatttttaatccaatttttgaatatataattatattaaatattcttatagagaatatatctacaataatttcattttagtctactcaagtcatatcttatatactattgatcgaggtcgt

SEQ ID NO: 8033 - DNA, 381 bp, Glycine max
ttgaatgcactattcaatggagttgacaagaacttcttttgactgatcaacacttgcacagtggccaaagatgcatgggagatcctgaaaatcactcatgaaggaacctccaaagtgaagatgtccagattgcaactcttggctacaaaattcgaaaatctgaagatgaaggaggaagagtgtattcatgacttccacatgaacattcttgaaattgccaatgcttgcactgccttgggagagaggataacagatgaaaagctggtgagaaagatcctcacatccttgcctaagaaatttgacatgaaagtcactgcaatagaggaggcccaagacatttgaacatgagaggtgatgaactcatcggttctcttcaaacct

SEQ ID NO: 8034 - DNA, 366 bp, Glycine max
tcagtccctgataaactggttcccagaagacaatagggagtgaatattgctgaaaaccctagccttgcaacaagtcctagggaagtagacacggagatggacaagaaaatccgcagtatagtgagtagcattttgaaagaagcttctgtgcctgatgttgagaaagatgttccaacatctttcggcccaaatgctgaagccctcccttcacccagtgaagaggaatcaacagaagaagaggatcaagcctcaaaggagactcctgcaccacgggcaccagaacctgctccaggtgacctcattgacctggaagaagttgattctgatgaataacccattgccaacaggttggcacctggcattgct

SEQ ID NO: 8035 - DNA, 383 bp, Glycine max
acgccaccggcatgcatgcaagcttttctatgagggttgatgggttctgtcgtttagaatggcatgagcactggctgacatattgtcaattatctcaattgcttctttcgaggtcttcagctttattttcccccctgtagaaacatctaccagttgcttggtttgcggtctcagcccatctataaacatattcaattgaattggctcgtaaaacccatgggtgggagttcttcttaataaacctctgaacctctccaatgcttcactcagagattcatcagggaactgatgaaatgaagagattacagctttcccttctgcagactaggactctgggaaatatttctttagaaacttttcaacgacttcttccatggttttca

SEQ ID NO: 8036 - DNA, 385 bp, Glycine max
ttattcaagacaattcaagacaaagcaattaattatatccaagatggatgatcaagacagtctatagagtcttagaaagggtatattaaataggaagggaattccaattgaagtagcaaaaggtttggccaagaaaattaagttaaaaagtcttttacaagaaatttactctctggtaatcgattaccagaggatgtaatcgattaccagtggccaaaactgatttacaacagctattaaaatttgaattcaaaatttgccctgtgtaatcgattacacatatatggtaatcgattaccagcagtttctgaacgttttaattcaaaattttaaagcttgtaatcgattacacatatactgtaatcgattaccagagcagattttc

SEQ ID NO: 8037 - DNA, 368 bp, Glycine max
agcgtggactagagattttctctgtatccatttggggctacagctatcatgctgagaactaaagccagtgaaatttagtgaactcttgggagatctttggcccagcttattggcagcaatgtggcgctgcacccattccactcaggttcacactctttacgttgctccggaatctcaacttgttaatgatcattgattgtatggatggggtagacataataagcttcagtttgacacaaggatggcaaaatctctatggatcacttcgtgttgaaaaggaagtctttgacaattctgaatagatacgaattaccttctgcttgcgcgcgccttatggaatcctgcggggggagcttaatgaacaatgc

SEQ ID NO: 8038 - DNA, 384 bp, Glycine max
tgaggatagagacttcccaagctatttatcttctctctcaaagaggctctctaactttctagctttctcactctaagaagtggattcactcttgtcttggatggttaagaatgaaggctcctacccttatttatactactccacctccacaatgaatggtggagattaattctctagaatgctccacacattctaggagtctctacactcttctactcccttccatatcctttcatactcttccagaaggttcaagaaggtttcacatatctctagaatattctagaggtttccacagtctttcacaagcttctagagagttctaccctactctagagttctacaggacgttctagaaaattctacacttttctagagagctct

SEQ ID NO: 8039 - DNA, 371 bp, Glycine max
agctttcactcggatgtccgattcatgcgcatcatatatcgagacgctcgatattgaacaacggaagctctcgagaaattgaaatgatcataacttttcactcagatttccgagtcacacgcataatatatcgagacgctcgaaattgaactacggaagctctccagaaatctatatgattataaatatctcactcggatgtccaattgaggaacatcagatatcgagacgctcgaaattaaacaacggtacctctcaggaaattcaaatggtcataacttttctaacggagatccgattcaagcacatcacatatggagacgtccgaaattgaaccacggaagatctcgagaaaatcaaatggctctaac

SEQ ID NO: 8040 - DNA, 400 bp, Glycine max
agcttgaagacaagactatacgaggtatcttccttgggtatagcaatatctctaagggctaccgtgtctacaacttgcaaactaagaaactcgtcattagtcgagatgttgaagttgatgaatatgcttcatggaattgggatgaagaaaaagtggagaagaacgttcttatacccgctcaactacctcaagaagaagatgaggaagaaaacccaggtgaaccaccttcacctccatcacaacaacaagatcaagaactatcatcaccagagtctactccaagacgagtaagatctttggtggacatatatgaaacctgtaacttggccatacttgaacctggaagctttgaagaagcgtcaaagcacgaaatatgggtcaaggcaatggaagaagagat

SEQ ID NO: 8041 - DNA, 396 bp, Glycine max
  unsure (1)..(396): unsure at all n locations
ntgagccaattcaaacgacaataactttttactttgatgtctgattgactctcgtcacatatcgagacactcgaaattgaatgttgaagctctgagccaattcaaacgacaatatacttttactcggatgtctgattgaggcccgtaatatatcgaaacgctcgaaattgaatgttgaatctcttagcaaattcaaacgccaatatctctttactcggatgtctgattgaggcccgttatatatcgagacgctcgaaattgaatgttgaacctctgtgcgaattcaaacgacaataactatttactcagatgtctgatatagtctcgtaatattatcgagacgctccaaattgaatgttgaagctctgagctaatttaaacgacaacaacttttta

SEQ ID NO: 8042 - DNA, 393 bp, Glycine max
tcttattttctgcagatgaagatgaatttgtggccacatcatggactcctctaaggacaatagcattatttcttgcaatgaattgtagggagttggaagccatcttctcaatcagattcctagcctcaacaggagtcatattacctagagctcaaccactggcagcatcaatcatactcctctccatgttactaagtccctcatagaaatattgcaaaaggagttgctcaaaaatctggtggtgaggacaacttgcacacaatttcttgaatctttcccagtacttatacaagctctctccactaagttgcctgatgtccgaaatgtcttttctgaaggcagtggtcctatatgcatggaagaatgtctccaataacactcttttatgtcatc

SEQ ID NO: 8043 - DNA, 357 bp, Glycine max
gtgaactatgaaactcagcttatagggctcacgatattttgttaaatataagttcaacatcggtttttttaaaaacaccgatgttaacaacatgatgttaaggctaacattggttttctggaaaaaaccgatgttaacttatcaaacgttaacatcggttttctcaaaacccgatgttaataaacttatgttgacatcggttatttggaaaccgatgttaactaatcaatgttaacatcattttttccaataaccgatgttaatgcacttcgctaacatcggttttgtgaaaaaccgatgttaacagatacatagtatttacaattatgccaccacgcttaccttgacatctatttt

SEQ ID NO: 8044 - DNA, 350 bp, Glycine max
agcttgaaatttaacaacataagcttttgagaaactcaaatggtcataacttgtcacacggaagtccgattcatgcgcataatatattgacatgctcgaaattgaacaacgaatgctctcgtgaaattcaaatgggcatgacttgtcacacagaagtccgattcaagtgcataatatatcgagacactcgtaattgaacatccaaagctctcgagaaatacaaatggtcataacttatcatacggaagtctgatccatccacattaatatatcgagaagcttgacattgaacaacggaagcttctcgaaaacaaaaatggtcgttccttatcacacggacgtccgattca

SEQ ID NO: 8045 - DNA, 392 bp, Glycine max
  unsure (1)..(392): unsure at all n locations
tctaaactntatacaagaatgaagctcttatactacttgttagacaagtggcctcaaatatcttaagaagggggggggttgaattaagatattccaaactacttccccaattaaaatctatttcactttcttttcaagttataaattcccttaacaatgaacttcttaaatattaattcaaataaaacaatctgaatatgaatataaagcatttataaacaaataatattaatggaagagaaactgcaaactcagatttatactgtttcggccacacccttgtgcctacatccagtcccccagtaacccgcttgagagtttcactatcttgtaaatttcttttacaatttctaaacacacaaggacaatcctatctttgtgtttagaattcc

SEQ ID NO: 8046 - DNA, 403 bp, Glycine max
aagctccttcaactgcacatggctcttaatatttgaatggtatccctgtggaaccttcacccgatgaagacaccgacgaagacttatattctcatttctggacaaagtatggcaagctgggggcaagtaaattttcttcccatcataccttggatgcaactgtgatcgtatccccatatcagctagatcttgacgggtattcaagtcatacttcgtcttgccttgaatgttgagaagcgtcccaatcacactatcacaaacatttttctccacatgcataacatcgatacaatgtctaatgtctagatcagaccaatactgaagatcaaagaaaatggacctcttctttcatatgaaactcttacttttatccatcttttgggtatgtctaaatacattattc

SEQ ID NO: 8047 - DNA, 360 bp, Glycine max
tttacgtaaaaaccaaactgatcgctggaatgaggattgtcaagaggcctatggaaggatcaagaagtgtcttatgaatccccctgtgcttatgccaccagtacctggaaggcctctcatcttgtacatgacaatcttagacgagtcaatggggtgtatgctggggcaacatgacgaatccggaaagaaagagcgcgctgtttactacctaagtaagaagttcacgacctgtgaaatgaattactccttgctcgaaagaacgtgttgtgctttagtatgggcatcccatcgcctaaggcagtacatgctgagccatactacctggttgatatacaagatggacccggttaagtacatctt

SEQ ID NO: 8048 - DNA, 300 bp, Glycine max
aacactactactcctctaacaagtcatgacacccttgagtttcctgaatggatgagtgacggtgatcaagagttgctcagagccaagccacactgtgtgcgtgcggatgcggttgtggctttggatgggagaggtcattatcgctctatcactgatgctgttaatgcggctcccagttatagtcaaaggaagtatgttatttacgtgaaaaaggggctttacaaggagaatgtggacatgaagaggaagatgaccaacatcatgcttgtgggtgatggtattggccaaacaattatcact

SEQ ID NO: 8049 - DNA, 394 bp, Glycine max
  unsure (1)..(394): unsure at all n locations
tgagcattccaacgacgacgttaacgtgggcttcccttttatcaactcttttggcgatttagggcacgccattgttggccctcttggcaagctattcgttgatgtcatgatcgtgttttctcattgcggtttctgcgtcagctaccttattttcatttccaccacgttggcctatctcgccggtgatgatgacacctcatcagcatcatggtcctccttgttttggggtttcgccacgccaaaggtgttgtttctgtggggatgttttccctttcaattagggctgaatgctatcccaacattgacccatttggctcctttgagcatttttgctgattntgttgacattgtanccaaaagtgtggtgatggtggatgatgtctttgtgttcatg

SEQ ID NO: 8050 - DNA, 418 bp, Glycine max
  unsure (1)..(418): unsure at all n locations
agcttgtcgggtactgnttcaattaagttcttggggcatcccatggactaagcgaaaaggctctagttattaaatactgcacatcttttaaggcataaagcgaggatcggaacctcaatcctacgttctttttaaaggactgtgatgagagaatttacaaaggacaggaatccctgggggaaaccaagaagaacacaaaaaataaaaacatgcagcgactccctcaattgccccagatcctaagcgtaatatcgcttgacaacgtcgaagttcacgggtgagggtagctcctcgtcatccatgttggcgagcaccagggcccctccagagaaagccctttttacaacaaaaggcccttcgtagttcggggcccactctcctctgttatcttgtagagctngggagactttcttcagca

SEQ ID NO: 8051 - DNA, 436 bp, Glycine max
  unsure (1)..(436): unsure at all n locations
agggaataattctacctatattattggaatcactcatgctataganatannggagntatatgaagagttacggttacattaataacttaagtggttaagattgattagattttattttaaagtcaaactttcattatagacttaaaaaactgataatcctaaatgatttgataaatgtgtaatgcacatgttaacttttactattatttttaatttaggcacatcatatgataaaaatttgtattcatgttgtgaataaggtggttagtcctctaataaacaaggttatccttntatcattagtgattaacttttatccctctaatattattactcaaaagtcacatgtgaacatgaatatatatgtcttatgcatcaaaaattgaacttatataagaaagtatgtgtcatgctatctcagaatttatcatacatg

SEQ ID NO: 8052 - DNA, 378 bp, Glycine max
  unsure (1)..(378): unsure at all n locations
ctgccatggaagcacttgatctgagtgacttcgtttcaaccaaggattgtcagaaggacctatatgagtgccttactgctaagcgcattatcttggcatcaatgagttcagaactccagaggcaacaccaagacatggacccatatgagatcatcgaacatcttaagaagatgtacggtggtcaaagcaagacggctagatttcaggtatctaaggccctgagtagatcctcacttgttgcaaatgaaaaagttagacctcatgttcttaagatgattgatctcatagaacaacttgagaaggtggggtgcactctcgggaaagagctttctcaagacttgagtttgcaatcactttctgagtcantttcataattta

SEQ ID NO: 8053 - DNA, 408 bp, Glycine max
agcttcattggttgtatgagtaggagatagtgctggagttgaatcatttggagtcaaggcttcttcatctatttcttcaaagtacgagaaaaatcataagtgtcttctttctcctcccaattccatgtgccttcttcatagaactcggcatctcggctcacaattgtctttccattgtttggattatacaatttgtagccttttgaacttgcatcatagccaatgaacgcatgtttctcactccgatcatcaagcttgaatcttccttggtcgggtacatgagcatatgcaatgctcccaaatactctcaagtgatcaactcttggcttcactccactccatgcttcttggggaggttgatctttgacattctttgttggggagcgattggacaaataaacggcacac

SEQ ID NO: 8054 - DNA, 316 bp, Glycine max
tttcacttctccctatataaccctccgctcccaaactcaaaccctaaccttaaccttcaatcaaaactcaaaacttctcttttctttcattctctctcttttattcttatcatcacaatgccttcaattcccgaagagcccctcctggctccgaacccggatcgcttctgcatgttcccaatccaatacccgcaaatctgggaaatgtacaagaaagccgaagcctcgttctggacggcggaggaggtggacctctcccaagacctccgccactgtgactccctcaccgacggcgagcgccactttgtcacccacg

SEQ ID NO: 8055 - DNA, 384 bp, Glycine max
agcttgtgcattcaatattctgatgagtatgttccatatgttctcaagattggactaatacatttgttgcccacgtttcatgctcttgcaggtgaagatccttataagcatcttaaggagttccatattgtctgttccaccatgaaacccgctgatgtcctggaagatcatatctttctaaaagtttttcctcattctcgggagggagttgccaaagattggttgtactaccatgctcccaggtccatcaccagctaggatgaccataagagggtgttcttggagaaatacctcccagcatctaagaccactaccatcagaaaagacatttcaggcatcaggcaacttattggagagagcttgtatgagtactgtgaaagattc

SEQ ID NO: 8056 - DNA, 395 bp, Glycine max
agcttctaccaagtaccttcaacaagtttgattttattatgacataactaacagcatgcaagatcttgtatgtataaaacctcgattatgatgtgattttcaactttgttctttcatgagagaaaataacatggcaaacttgttacttctgtgaagtggtatgaaacattctattcttgtctcatagaagcaaagtggagcaaaacgggacaaacaccatcattagataactacctcaaatatggcatgatctccattgctgttcatacattggtgcttccagcctcatggtttcttaaacatagcttatcaaatcagaaactgagaccagcccaatagaaagccattaccaatctacgtatgggtatttgtagtaacatattaatgaacttgac

SEQ ID NO: 8057 - DNA, 388 bp, Glycine max
tcttagtttcagatgatgcttatggagccatcttctctatttaatttttggcttcagcaggagtcatgtctccaagggctccaccactagcagcatctatcatacttctctccatattactgagtccttcataaaaatattggagaagaagttgttctgaaatctgatggtgggggcaactggcacatagtttcttaaatctctcccgagactcatacaggctctctccactgagttgtctaatacctgagatatccttcctgatggctgtggtcctggaagcagggaaaaatttctctaagaatactctcttaaggtcatcccagctcgtgatggaccttggagcaaggtaatacaaccagtcctttgccactccctctaatgaatg

SEQ ID NO: 8058 - DNA, 340 bp, Glycine max
  unsure (1)..(340): unsure at all n locations
gattcttaagtcacctgcggcatcaagtcttgatggactttcttattatgtctccattgactacttcaccaaatgggtcaaagcggcttcgtatgccagtgtgactaggagtgtggtggttaggttcatcaacaaagagataatttgtctgtataggttgcccangaagattatcaccgataatgcaaccaatctgaacaataagatgatgaaggaaatgtgtgaggatttcaagatccaacaccataattctacgccttacaagcccaagatgaatggggcagttgagactgctaataagaatatcaagaagatagttcacaagatgatcgtgtcatac

SEQ ID NO: 8059 - DNA, 378 bp, Glycine max
  unsure (1)..(378): unsure at all n locations
cacaaacagctcaggagacctctggagattttgaagaggcaagtgagaaagatgctacaaagactgcagtaacagatggaactgtccatcctctaacaagctatgtaattaactatgtgaagtttttatttggtaagttcagctatgttgtcatctgatcccaattttgtagccgcatcaattatttctagcattttttgctgtgttcactgatgacaaaaatgttagacattattgctattgttatattgttttttaaaatttattttacagttctgcgggtttctgctcatggactttttaatgcatttcttattaaatatgcagagagattggcatgctatgccacatanatcaatctctagtttctacgtgttc

SEQ ID NO: 8060 - DNA, 403 bp, Glycine max
  unsure (1)..(403): unsure at all n locations
gattcctaagtcacctgcggcagcaagcttgtaattttgttatcaagcatcctctaaaggaggaggggagagagttacttgtcgagccaaaacaaggtacatttcattcttttagctntgaatatatatccccaaactatgaagataaaataaatgaaataaagattatacatgagaattatgctcacgtgctttaccctgtcaaatangtttatacaaacttagaaggcaaccgtgcaaacttagttcagacttcatgggctttgttgtcccttattgatgcaggacaggttaataataaagctctatgttttgaatttttaccatatcataaatttaaacctcctaactccttaagccctatggaaaaaccctgcanagtgcaatggtcctctaattagta

SEQ ID NO: 8061 - DNA, 400 bp, Glycine max
  unsure (1)..(400): unsure at all n locations
gcaagcttgccaatccactggggtcgatgctttctgaatatccttttgcaccatgcatctaggagacacattnttcctaccataccctctcaccagctcctgagcaagtaatatgttatcctggatattcctaccaggaataaaagctgattgagtgtcttccaccacactatttatcacatcactcagtctgctagtcaaaatcttcgatatcaccttataaattgtgctacaacatgatattggtctcatgtctttgatggtttttgcctccggggacttagggataagtgagacaatagagcagttgacaactttgtacaacttactagaattaaaaaattccaggatagtattctgcacatcatttttacaataggccaggcggctntgaaaaatg

SEQ ID NO: 8062 - DNA, 430 bp, Glycine max
acatttctgacaacaaggtgatcttgacggaaggtattgatggtgttgttcctccgaagtattttgaaaggatagaatcatggccgagcagacagcccatttctttttaaagttattttacaattttgcttttaggatcacaatacgttgaggattatttaaataaaataatatgaaaaagatataatatattttaaataataaaacatttcaaaaatatataacatattaaataaaaacataaaaaatatacaacatattaaataaaattgataataagtaaaattaaaattatttatttaataattaattaaataaatatttttagcaatttaaaaaaaattgaaaacaaaacaaaacaaaataaaaaatgtctaaaaaattcttaatattataaaataatatataatatcataaaataaaataaaaa

SEQ ID NO: 8063 - DNA, 385 bp, Glycine max
  unsure (1)..(385): unsure at all n locations
caagttttcaatatcaaatngaaatggatagctgatcgtgaaaaagatggttgtgtatacaatatcccaaatgttcctgaagttgttgcacttattgttggtgattttgacccaagctcaaaaagagatattattgttgaaactcaaaatggacaactacaaagaatccatgaattacactctagctatctggctctatagtaccctctactctttccttatggtaaagatggatatagaactaacatacttcaccactctaaatcatcatgcaaaaaaaggaagagaaatcgtctgacaacgagacagtggttcgcttatatgcttcagtccaggccaaatgaagcacaaactttattgctttctatgaaactatttcaacaac

SEQ ID NO: 8064 - DNA, 348 bp, Glycine max
  unsure (1)..(348): unsure at all n locations
gcaggcatgcaagctntgagcaaattcaaacgacaatatttttgtacatgtatgagcggangagacccgtattatattgagacgctcgaaattgaatgttgaagctttgagcaaatacatacgacaataaccttttactcggatgtctgattgagttccgtaatatatcgagacgctcaaaattgaatgttgaacctctgatccaatacaaaggacaataagcttttactcggatgtctgattgagtcccgtaatatatcgagacgctcgaaattgaatgttgaacctatgagccaattcaaacgacaataactttttactctgaagaatgattgagtccctaatttt

SEQ ID NO: 8065 - DNA, 364 bp, Glycine max
actagtgagcttccaattatatgacatgtaccacttgtaattttcctatctaatttgcatcttccaaaatcagagtctgaaaaaccttttaagtttaaggaagttcctttggaataccacaaacctacattggttgtgcccttaagatacttaatgatcctcttaacagtagttaagtgagattcctttggattggactgatatattgcacataatcaaacacttagcatgatatccggtctacttgcagttaggtagagaagtgatccaatcatacctatgtatcttgattcatccactgatttacctttctcatctaagtcaaggtaggttaatgttgtaacgcctttaaattcaataactg

SEQ ID NO: 8066 - DNA, 428 bp, Glycine max
  unsure (1)..(428): unsure at all n locations
atgcagcttaagataaagccctcactaagtggttttncgttttcgactcgcgaccatcatcgtgaacaggaagaacggttgcctggtcgtctgctagtttgagtcactcatgcacaaattcattttgattttaattctttttttctttttcggcctccccaatatttttggtggagtagtccaaaaaaatgtcaatttttttctttattttttttgtgataaaaaattaatgttgaaagagagagagaaaaaagaaagcactctgcccatgtggatgtgaagtgtgggctttctagtcagccttattatttgtataattgatcttccatatatcagtcattaattcccctaccttcaaaatctgctaagtatcacattaatgaaaacgtttatntatactgttacttatttatttctcctatcatatg

SEQ ID NO: 8067 - DNA, 448 bp, Glycine max
  unsure (1)..(448): unsure at all n locations
tggcagtcaatagcatgatagttcgcagatactattaactggtctatagtttcttgatcgggttgacgacatcaatattgtatttggaaagacccaaaagaaagaaaaaaagtaaaactttcatatgtaagaagaggtcgatattgtttgatcttacatactggtctaatctagatgtcagacattgtattgatgttatgcatgtcgtgaaaaatgtatgtgatagcatcatcgacacgcttcttaacattcaaggaaagacaaaggatggtttgaatactcgccaagatctagttgagatgggtatatgagagcagttacatccaaggtctgatggtaagaaaatataatngcctctagcttgtcatactttgtccagaaatgaaatggtaagtttatgttagtgtctgcaccgtctcatagtgccacagggatactattcaaatat

SEQ ID NO: 8068 - DNA, 440 bp, Glycine max
  unsure (1)..(440): unsure at all n locations
cctgcggcatgcaagctttaggtcactgaagctctaattataggccattttttaggaattctttggaatgcagttatacaaactctccctatgatacgagaaatcattaggtagttcaggactaccacttgttcatgttcctcaccaatatctatgtgacacatttaagtttttcaatgtatgagacaaagttaataacactcaactaggtgtcctataaaaattaataggaatcatatagtcttggaccattagtaatttctcatacgatacacaccacccacctagtactgtgcttggaattcaaaatggaaaactgattatctaaaataatgcatatggcataatatcataagaagcttgatgatgccttacgaccattttgccattcatgtcaccatagaaaattatgcaattatatnattagttgccttaaatga

SEQ ID NO: 8069 - DNA, 407 bp, Glycine max
  unsure (1)..(407): unsure at all n locations
taagtcacctgcagcatgcaagctnggcatntttatcctgatgatttgttccatatgttctcaagactggactaatacanttgctgcccaagtttcatggtcttgcaagtgaagatcctcataagcatcttaaggagttccatattgtctgttccaccatgaagccccctgatgtccaagaagatcatgtctttctaaaggcttttcttcattctctagagggagtggcaaaagattggctatactaccttgctcctaggtccatttttagctgggatgaccttaagaaggtgttcttggagaaattcttccctgcaactaggaccactgccatcagaaaagacatttcaggcatcaggcaacttagtggagaaagcttgtatgagtactgtgaaagattcaagaaa

SEQ ID NO: 8070 - DNA, 330 bp, Glycine max
  unsure (1)..(330): unsure at all n locations
agtttagcaccagacctcttcacggttttgggtctgcttccaggggctggtgggggccgttgcaacttaagagcctggaaggaaagacgtatgcctatgtatgttgggatgatttctccacactgacatggggcaactttatcagagagaaatttgacacctttgaagatcctaagagtcgagtctaagacttctacgacagaaagactgcgctatccagagaatcangagtgaccatggcagagagtgtgaaaacagcacgttttccgcattctgcccgtttgaaggcacctctcatgagttctctgcagccattacaccacaacaaaa

SEQ ID NO: 8071 - DNA, 396 bp, Glycine max
atgcattggttaacttggtaacctatctggcctcttatcagaaatctgtacctgtcgcaagggtttgtggtttgtgctcctctactgaccaccatacagacctttgcccttccatgcagcaacctggagcaattgagcagcctgaagcttatgctgcaaatatttacaatagacctcctcaacctcagcagcaaaatcaaccacagcagaacaattatgacctctccagcaacagatataaccctggatggaggaatcaccctaacctcagatggtccagccctcagcaacaacagcagcctgctccttccttccaaaatgctgctggcccaagcagaccatacattcctccaccaatccaacaacaacaacaaccccagaaacagccaacagttg

SEQ ID NO: 8072 - DNA, 433 bp, Glycine max
  unsure (1)..(433): unsure at all n locations
accttaggcatgcaccttagaaacctacacagcgatnattttatatnnnaatttttattattnatnagcgaccgaatgcatttctttataaatgtattttaataatagtttaattactaatttagtccttatagtttcatcatttgtacatttttgtccttataattttaaagtgttttttttagtccctatagtttacattttaattcccttttagtccatctagtttaaaactggtttttttagtatttataatttgagttttaattcccttttagtccctacagtttgaaagtggtttcttttatttcttatactttatacgttaatttctttatagtccttaccatcaaaagatcagtaataatatcaattacaattaactacagatatataagcaaataattcgtaactaattgttcccaaataattt

SEQ ID NO: 8073 - DNA, 322 bp, Glycine max
  unsure (1)..(322): unsure at all n locations
agtcacctgcggcatgcaagctggttnttttataataggactgcttgatgccctttccactgtatccacttaaatttccatatgctagaaaatcattaatagtacaaaacaccattgtgcgtaacctgaatgtctactgcacatttgcatcccacacatctaccccttcttcccacaattgtttcaagtcttcgattaatggcgtaagatacacatcaatatcattccctggctgccttggacccgcgatcatcatacacaggataatgtatttacgcaaaatgcacaaccatgggggaaggttgtaaatcatcagtaaaac

SEQ ID NO: 8074 - DNA, 300 bp, Glycine max
agctttgtaatgatgtatccgaggtgttcacgaagcagagatcggggtcgacgcccacggtgatgaagaatgttccgaggacagatgaggcgagtttggcgacgccgtttggaggctgggggcgaggaagtattggaattacatggagccggcttctgggggcgcgtggcatgcgcatattcacaataggcgcacggtgaaaactatgttgatgaatgtggagagggattcgggtgtgtgcgagatcatgatccatgcgatgggccttggattcagtttctggagctgggaacgggggca

SEQ ID NO: 8075 - DNA, 442 bp, Glycine max
  unsure (1)..(442): unsure at all n locations
ctatcttaaggtcgatgcatgaaaacatnnnnnnncattataagtnttctccaaatatcagctgatgtcccaaacatgattatttttcagacaattttctttctttctctcaaaaacaaatttcagctgtcccaaacaccccaagggctgcagtaataacataccactatcctgaagaatatatctcttggatatatctttcatggtatcataagcagtgagatcaatggcagcataaggaatcatgccaagcagagatggaacaagccctctgtagaaagctcgaggtccctcttgaacccatatattcattgtaagtgttcccagcttatgaacctttccaccttcagagggacaagtctgtaacctaagtttaatgagatccattggatagatagcagcctgtgcaattgcaccagccgtaccaactgcaacaagccta

SEQ ID NO: 8076 - DNA, 316 bp, Glycine max
gagcgttctcgtatattatcggcctgaatcagacatccgaatcaaaagttatggctgtttgaatatgccatgtgcttcgatgtttaattctgagcatctcgatatattatgcacctgaatcgggcatctgagtgaaaagttatgccatatgagttagccgagagcttcgttgttcgatttctagcgtctcgacatattattggcctgaatcggacatccgagtcaaaagttatggcgggttaaactttgcatgtgcttccgtgtttaattatgagcatctcgatatattatgcacctgaatcggacatctgagtga

SEQ ID NO: 8077 - DNA, 413 bp, Glycine max
  unsure (1)..(413): unsure at all n locations
gactcatggtctctatgaatgacttattcctttggataaaggnagtgttgccatattttctttattccatactaaggcatacaactccttatcatangttgaatagttaagggtaggaccactataaatttcactaaaataagcaattggatgaccttcttgcatcaacacagccccaatcccaacatttgaagcatcacactcaatttcacaagatttttgaaagtttggcaacgcaagtatgggggcattagttagcttttgcttaagaacattgaaagcttcttcttgtttctctccccatttgaaaccaacatatttcttgagcacttcattgagaggtgctgccaatgtgctaaaatccttcacaaatcatctataaaaacttgctaagccatgaaaactcctcacct

SEQ ID NO: 8078 - DNA, 313 bp, Glycine max
  unsure (1)..(313): unsure at all n locations
agctttgatatggatattatttngaaatcataagatggcacgtataagacatcatttaatgtaatgaatgcagaaagttgtattgtgcctgagtgggtagcatagacaagatgaccatttggtagtttaactgtgatgggattaatttgatgatatgagtgaaaatttgttagagaggaggaaacatgatcagtggctcctgaatctaagatccaggaggtagaattggctttttcgcaagatagaattatacctgttgcatcgttattggaacaagatgaaataaaggcgacctatggcttgatgggtgctg

SEQ ID NO: 8079 - DNA, 416 bp, Glycine max
  unsure (1)..(416): unsure at all n locations
agctagtgtttttctcaaatataagacatgcatgatgccctttcccactgtatccacttaaatttccatatgctagaaaatcattaatagtacaaaacaccattgtgcgtaacctgaatgtctactgcacatttgcatcccacacatctaccccttcttcccacaattgtttcaagtcttcgattaatggcgtaagatacacatcaatatcattccctggctgccttggacccgcgatcatcatacacaggataatgtatttacgcaaaatgcacaaccatgggggaaggttgtaaatcatcagtaaaacaggccaggaactgtggttgctgcttaagctaccataaggattcattccatcagaagcaagagcaagccttaggttccttggctcatccncaaactcttgatacaaa

SEQ ID NO: 8080 - DNA, 364 bp, Glycine max
  unsure (1)..(364): unsure at all n locations
aagctccttcaactgcacaaggctcttaatatttgatatgtatccttgggaaccttcacccgacgaagacactgacaaaaacttatcttctccttcttggacaaagtatggcaggctgggggcaagtaaattttcttcccatcagaccttgaatgcaactgtgatcgtatacccatatcagctagatcttgacgggtattcaagtcatccttcgtcttgccttgaatgttaaggagcgtcccaatcacactgtcacaaacatttttctccacatgcataacatcaatacaatgtctaacatcaagatcacaccagtacggaagatcaagaanatgacctcttcttcatatcaactctgacttta

SEQ ID NO: 8081 - DNA, 288 bp, Glycine max
agctttccgaactagacttttcctcattattcgaaccttcaagcaccacagagtaaaaaaaattaagcaagatgaaactggtcaggaattttacaagtgtatcctaaatgagagattcagatgtaaagtgtaagaatatgcgtgctgccctatctacttactatgcggctctcttgaagaatttcacgtgacacattgagtggaagtcatttgagtaacaacacctttgacaagcttagtatcggggaactggttagcagtaaaacatagtgaggataaatatcagac

SEQ ID NO: 8082 - DNA, 357 bp, Glycine max
  unsure (1)..(357): unsure at all n locations
agcaaggataatgtntntttttgttttttcctcggctnttttgccccttcaatacaacataaaaaaaaaactacagtacgaaatttagcatgaaaaaatctatattgcttttgtcaatattttcatgcttaaaatttggtaacttaattttaattaaaaatttaattacatccatcaattattaaaatattcaataagatcttcaaataatttaaaaaatactataatcatatcatttgttaactctattagaatgataaaaattatataaataaacgtttttatatcaattgcataagtaatgtaaaaatatttattcacatcaataacatattttaagaagtaactaatttttta

SEQ ID NO: 8083 - DNA, 350 bp, Glycine max
tgaatcatttatcctatatccgacagttaatttgtgagtcccgtccaggtagtcccgaagaaaaccggcctcatcatgataaaaaatgagaaggaggagctgattcctattcgggtgcagaacagttagagagtctgcattgactataggaggttgaaccaggtcaccaaaaaggaccattttcccctgccattcattgaccagatgcttgaatgcctggcaggtaaatctcactactgtttccttgatggtttttctggttatatgcaaatcactattactcctgaggatcaggaaaacaccacattcaccagccccttcggaacttttgcctatagaaggatgccttt

SEQ ID NO: 8084 - DNA, 362 bp, Glycine max
tgtaaaaaaaggaagcaagttaaaaactctttttatagttttaaacattatttctagttcaaaaccccttgaactacttcacattgatttatttggtccctctagaactatgagtgtaggtggaaattactatggcttggtaatagtggatgattactcaaggtttacttggaccttgtacttgaaaaccaaaaatgaagcttttgatgctttttgcaaacttgccaaggtgattcaaaatgaaaaaggtctgaacattgtttcaattagaagtaatcatataggtgaatctcaaaataagtatcttgaaatcatttgtgaagaaaatggaattcaccacaatttttcaacccaagaatacc

SEQ ID NO: 8085 - DNA, 327 bp, Glycine max
tgcttggaaactatgtcttctgtgttatactctatctcatttgaagcagcgccccaatatctatcctatggattttcatggataaagtgcttgttcttttggggcaagaacatgctatttcactagtaactggaaactactgcatttggctcattcctgcactctttggttatgtggtacttcaagctttggttcgttattttcagactcagagcttgatctttccaatgcttgtaacctcagctgctgtcttaatttcgcatatacctatttgttgggtactaatgcttgaactgggacttggacaaaatgcatcggccttattca

SEQ ID NO: 8086 - DNA, 362 bp, Glycine max
tgaaggcaaactggatgcgttggtcaacttgttaacccagctggccttgaatcagaaatctgtacctgtcgcaagggtttgtggtttgtgctcctctgctgaccaccatacagacctttgcccttccatgcagcaacctggagcaattgagcaacctgaagcttatgctgcaaatatttacaatagacctcctcaacctcagcagcaaaatcaaccacagcagagcaattatgacctttccagcaacagatacaaccctggatgaaggaatcaccctaacctcagatggtccagccctcagcaacaacaacagcagcctgctccttccttccaaaatgctgctggcccaagcagaccataca

SEQ ID NO: 8087 - DNA, 333 bp, Glycine max
agcttgaatcggacattcgtgtgtttagctatgaccattagaatttctcaagagcttccgtagtataatttctagcctctcgacatattatgcgcccgaatcggacattcgtgtgaaaagtcatgatcatttgaatttgtcgagagtttacgatgtttaatttcgagcgtgtcgatatattataaccctgaatcgtacctcagtagtgacagctatgaccatttgaatttgacgagagcttccgttgttcaatttctaatactcactatatgtgatgcgcctaaattggacatttgtgtgaaaacgtatgaccatttgaatttctcatgagct

SEQ ID NO: 8088 - DNA, 360 bp, Glycine max
taatacaccaattattaatttttttttaatagattgtatgtattttatatgaaagataatcttatttaaactggataaataagataattataagtgataaaactctgtctccaaatatttaacgtaattatatatgtaagactaattaatctaaaataactttgcatgattaacatactcagtgctataacactaatagtttggtaataactaattcattgataaatattataaaatcatcaatatttgagagtattagaataaattttacttcgtattagaataaaattaattagatgcaaacctattaacgaaatgctttaacttcaccaaatatgtgattatgaaagcaaagggtag

SEQ ID NO: 8089 - DNA, 362 bp, Glycine max
agcttaagggaagagaggattgcttacttgatttatactggttcggccacttcccgtgcctacgtccagtcctcaagcagcccacttgagattttccactctctttgtaaaactccttttacaaagtctgaaccacacaaggacaacccttcccttgtgttcaagaatcctctacaacaagagacccacggtctcttaatcccttttcaaaaataagaagaagagaagaagaaatctctcttaaaagagataaattgtacaatgaagatcaatcaaaattccttattgaatatgcaagggtttgaccaagacatttcagttcagaaaaactcttaatctttcgagaggataaaactttttgg

SEQ ID NO: 8090 - DNA, 351 bp, Glycine max
agcttcaagagtcatctatgttgttgtcctctgcagccacaccatcttcaaattctgtagctttgtcgtctaactctagggttgtttttaattctggtgatgcaaataaattttcaaaggtttctttgacccctagttctcacactctgtggcatactaggctgggtcatcctaatgctcatgttcttaaactttctcttaatcattgtaatattgctccatccaataaaaatgtctctgagctttgctcttcttgttgtgtaggaaagtcacaccaactcccttcatctagttctcaaactatatactctactccattggaattaattattactgatttgtggggaccct

SEQ ID NO: 8091 - DNA, 341 bp, Glycine max
  unsure (1)..(341): unsure at all n locations
agcttggnctatntaatttaatatactntnaaaaaagctggagtctatgcttttaattaaataagccagttcaagccagactntatgtatgtcaggccgtatgcccctgtaggctggtctggcctattctcatccctacttgttatcattaccattgttgtcacatctatcattactaacacctttatcatcgccataacattgttatcatcacttgttaaagttgttatcactattatcattatactcattattgttattgtcgntactataaccctcactaacaccctgtgtgtaatagntgtgatgaccataattataataatgataataatgaaaaa

SEQ ID NO: 8092 - DNA, 344 bp, Glycine max
agcttgaaggaaaactggatgctttggttaacttggtaacccaactggccttgaatcagaaatctatacctgttgcaaggtttgtggtttgtgctcctctgctgaccaccatacagacctttgcccttccatgcagcaacctggagcgattgagcagcctgaagcttatgctgcaaatatttacaatagacctcctcaacctcagcagcaaaatcaaccacagcagaaaaattatgacctctccagcaacagatacaaccctggatggaggaatcaccctaacctcagatggtccagccctcagcaacaacaacagcagcctgctccttccttccaaaatgctg

SEQ ID NO: 8093 - DNA, 361 bp, Glycine max
  unsure (1)..(361): unsure at all n locations
agctttactatgcaaggaataacctatgaaaattccttcatctgacttagcatcaaattttcccaagttatcctttccattgtttaatacaaagcatttgcaaccaaaaacatgtagatgtgagatatttggtttcctaccattaaacaatttgtatggagttttctttaagataggtcttattaaagccctattcatgatataacatgcagtattaacggcttcagcccaaaaatattttggaagaggagtatcattcaatacggttctagcaatttcttccaaaaacctatttttcctttcaacaactccattttgttgaggggttctaggtgcagaanaattatgttcaataccatgc

SEQ ID NO: 8094 - DNA, 351 bp, Glycine max
  unsure (1)..(351): unsure at all n locations
ttggagtttccaagtgccaattcgtcttcttctttagtccagncttcttctggcttcaattcatcagtgggctttccttctgtgtccagcatcttgggatgttcccagcctttgatgacagctttccaggttctgctatccagtgatttgaggaaggccaccatccttgctttccagtattcatagttggttccatccagaattggtggtctgttcactggtcctccttctttctccatgttcatcagaatttatctccctagatctcactcagtgatttcgagtgcctgctctgataccaattgaaattctgatcctggggacagatgtcgtacaggatgtcacgacatc

SEQ ID NO: 8095 - DNA, 353 bp, Glycine max
tcaaaaggctttaataaaattgaaattaaagccttccgaacccgggctcttagtacttccacactcctaaactgcctccttaacttccccttcctcaaatttagccaagagaaaaacattgtcttcaagagagataaatttgaaatggacaccatctagctttggtctacaacccccttgttctttgaatctagtttcaaaaaactacttcacttcctcctttacacaatgtggctcttccaccccccccccctccaccctcaagcctctcaacatatttttcttccttctccaatgaccacatgaattaaaatattttgaatttctatcaccttccacgacccaccttgctc

SEQ ID NO: 8096 - DNA, 298 bp, Glycine max
agcttaccaccgtaagaggccattgataagagcttggaagaagaaggagatgaatgtagggagaggatgagaatagcacgaaattttgtactctaaaagagttctgaaatctgaagtttaattttcaaattatcaaagttgaaaaaaatgcacacacaaggcctctatttatagcctaagtgccacacaaaaatggaggaacatttaaatttctattcaaatttcacttgaatttgaaattgaatttgtggagccaaactttggagccaaaatttcactttttatgattagtgaattt

SEQ ID NO: 8097 - DNA, 352 bp, Glycine max
agcttgtaactcttggcaatttttttaaaactagccacttaaaaagttatgacttttgaaagaatcttcagaaacaagtcacttgaagaattgtgacttttggaaatgtatttttcaaaatcagtcactggtaatcgattaccattaaggtgtaatcgattacacatcaacagatgtgacttcattttgaattttgaaaatcttaacattttaaaacactggtaatcgattacatgattatggtaactgattacagctttgtaaatcagtttgaaaaaaatgctggctactggtaatcgattactaccttctggtaatccattacccgagagttaaacactttggtaaaaaa

SEQ ID NO: 8098 - DNA, 333 bp, Glycine max
agctttttcggagccccgtgaattatgttttcgttcatgtgtccatcatcttcgagtttgttgccatgcgtagtgattgcttaaggcaattctccattctcaaccctttttcggaaccccatgaattgcgtactcgttcatgtgcctttcaacttcgagtatggagccttgcgcagagatttgcttatgcaattctccattctcaaccctttttttggatcaccaagaatggtcgtttttgttcatgtgtgctccatcttctattttggagacatgcgtcgtgattgcttagtgcatatcctcattcttaatctctttttgggagccccaaga

SEQ ID NO: 8099 - DNA, 348 bp, Glycine max
tgctagcccaaggaagcggaggccatttcctttacttttacaagagggccattcttggatggccttgatctcagggtccacttggacaccatttctaccaactacaaatcctaagaaaactatattatctacacaaaaggtacacttctctatattgacatatagagtgtttttcctaagaactgaaagaacttgccttaaatgtcctaagtgatcatctaggctccaactgttcactaaaatatcatcaaaataaacaactacaaatctatctatgaaatcccttaacatatgatgcataagcctcataaacgtgcttggtgcattatcgatcccaaaggcatcact

SEQ ID NO: 8100 - DNA, 347 bp, Glycine max
ttcttagtatcctccacaaggtgttggtcttgacttgtcgagctccaaagctgccaagttttgtcttgaaacaccttaatgttcctagatttccagataagccaagatgtaattgcaaagaacatgatgcaatcctaccctccaagggcattggatagaagactccaagaagattggaccagagatgcagaaaaaggccctaggattctcataagccttatggtagattttgggcttatgggcatagtatgagcccacttatcattgcacatattagattaaggtttcattttttttgggccttgtatttagggctccatactgtaaggaggttaccctaataatgt

SEQ ID NO: 8101 - DNA, 341 bp, Glycine max
agcttggaggaagaatgagattattgagggagaggaagagaagagcctgaaattttgtgctctaaaagagctctaaaatctgaagtttaattttcaaatgatcaaagttgaaaaaatgcacacacatgacctctatttatagccttagtgtcacacaaaattggagggaaatttgaatttcacttgaaattgaaattgaatttgtggacccaaactttggagccaaaatttcactaataatgattagtgaattttagttatgggtcaggccactaatccaagatcaattccaagattctccactaaatgtgcttaagtgtcatgaggcattgtaagcatga

SEQ ID NO: 8102 - DNA, 361 bp, Glycine max
ttagcctaaggctgtacaccatgttgctcatgttgctctccctatatttaacaatttccacctcaagacccctagttttattaaatcttgatatatttggtctaaccaaaaccctcttatttagtggttcacgggtaaaaggtatggtctatttgtggtggacgactactctagatgaacatggattatttttcttacccacaaaaatgagtattttagagtcgtctttaaattttacaaaagaattcaaagtgaaaaaggagtatacattacttcaattacaaatgatcatggtggacaattctaaaatgaaattttttttcattatttgaactaaaatggtattctttgcattttctca

SEQ ID NO: 8103 - DNA, 348 bp, Glycine max
agcttgcacacaagttggttgttgttgttattggtttgattacatgaaaacctctcatttgtgtttagcttgtattattggtttagatgaaatcccttcgctacaagtcaaacaattatacttggtgatagtgccattagggtttttcttcaccctaaacacctatttacaaccaattggatccctatatggaggcagttcagtaagagtccatgtaccattttttatcaaagcatcatgctcaatcctccttgttgcaaaccaagtaggattggaaagagcaatttatgttaacttgtgctcacaattagctagaagaagagtacgatgaagtcttggattgacaac

SEQ ID NO: 8104 - DNA, 358 bp, Glycine max
ttccttgaatattcttctgtggtataacaaattggaattcctgcctgtcctgataggcaagcgttaaattgggcaacttaaaatcctctcgataattgtttgcaagattgcggatggctgtgaaagcaacaccaaatgctttgagaacacaaatatgatatgctgcattccaagaaagattacactgttgacagaaaagtaaacttcaagctaacggattataaaaccttcactggtttcacaaaatgctcttcgtgaaatatccaagaggccatcaattccatccttaacagcaaagcattgtttgagtgcaagcaacaaaaagaacgcgtgcatgaaatacatcttcatcaataac

SEQ ID NO: 8105 - DNA, 352 bp, Glycine max
ttagaattgtcctatttgttttgtgttccttttgaaatattttgaaaaaaaaaataatttttttttcaaaatatttcaattttttatagttgaggcgttatttgatttcaaaatccgattattatattcctaacctgaagtgttccttggtgtattgataaaaagtaataatttttctttgaatcttaacaattgatatccttttgaaacaatttttttttcttcatttgaattgatagtgaattctttcaatttcttattcgatttatgtattcttttttctaaactaaacaaggcaaggactaactcctgaactgcaagtaaaaaaagttatagaatagaatatagattt

SEQ ID NO: 8106 - DNA, 355 bp, Glycine max
agcttgtaccaattggtccattgttgacaagtcatgatgatacaattgcaactacaaaatcaattggacaatattgggaagaagatctctcttgcatgagttggctcgatcaacaacctcgtgattctgtgttgtatgttgcctttggtagtttcactcattttgatcaaaaccaattcaacgaactagctcttggattggacctcaccaatagaccttttctttgggttgtgcgtcaagacaataagagggtataccctaatgaattcttgggaagtaaaggtaagattgttggttgggctcctcaacaaaagggtgtaagccaccctgctgtaacatgttttgtcacccattg

SEQ ID NO: 8107 - DNA, 351 bp, Glycine max
tgccatgaatagtttcatgtgtactagtaaataggctggcataatcctgtcataaaacacaaccataaactaaaataagcatatgtgatcagtgtcaaaataaaatgcaaccatttacaaaaccaatcaagaaaataagaatagattattacagctaaccaatcaacaagcctttcaggtagccatgcttgagattgcttgtccacataaaatatttcaattaactcccacgcagctttcaaagatgtaggctcttcacctctctatattatgtgtaatgtgttaaaaagcaagtgattaacttctcggtatcataattcccacaaagcagatctcagctcagctaaacac

SEQ ID NO: 8108 - DNA, 349 bp, Glycine max
tgtaatcgattacacatctactgtaatcgattaccagagcagattttcagaaaatattctcaacagtcacatctttttatgtggttcttgaatggctatcaaaggcctatatatatgtgacttgagacacgaatttgctaagagtttttcagaacaaaaaggtcttatcctcttataaagcaaaatcgttttatcctcttacaaattccttggccaaattacttgtgattcaataaagaattatttgagtgctcaaattgttcaatctatctctttcaagaaagatttcttcttttcttcttcttcattctgaaaagggattaagagaccgagggtctcttgttgtgaa

SEQ ID NO: 8109 - DNA, 351 bp, Glycine max
agcttctcagcaaacttgtttcctcactagcagttgctagtgctatcatctcaaattccatagtggactgagctaagatagtctatttcttttacttccaagaaatagccccaccagctatgctaaatatatagctgttggttgctttggaatcatctgaaagagtgttccaatctgcatcgctgtatccttcaagtacaacgggaaaccttttataatgtaatccaaggcttatggttcttttaaggtacctcattaccctttcaatagcgtgctagtgctccatactaggtctactgataaacctgcataataatcccacaactaggctatgttggatctagtacaatc

SEQ ID NO: 8110 - DNA, 359 bp, Glycine max
tgtcttgccccttgatatatttgatgttactcttggtcactatgaatgacaaattccttgggataaaggtagtgttgccatgttttcaaagcctgtactaaggcatacaactccttatcataagttgaatagttaagggtaggaccacttaacttttcactaaaataagcaattggatggccttcttgcatcaacacagccccaatcccaacatttgaagcatcacactcaatttcaaaagatttttgaaagtttggcaacacaagtatgggggcattagttagcttttgcttaagaacattgaaagcttcttcttgtttctctccccatttgaaaccaacatttttcttgagcacttc

SEQ ID NO: 8111 - DNA, 304 bp, Glycine max
agcttcaacattcaatttctagcgtctcgatgtatcacgggactcaatcagacatccgagtaaaaagttatcgtcggatgaatttgctcagagcttcagaattcaatttcgatcgtctcgatatattacgggactcaatcagacatctgagtaaaaaagttattgtcgtttgaatttgctgagagcttcaacattcaatttcgagcgtctcgatgtatgacgggactcaatcagacatccgaataaaaagctattgtcgttcgaattagctccgagcttcagaattcaatggcgagcgtctcaa

SEQ ID NO: 8112 - DNA, 346 bp, Glycine max
tttcactcggatgtccgattcaggcgcataatatatcgagacgttcgaaattgaacaatggaagctcttgagcaattcaaatgatcataacttttcactaggatgtccgattcaggcgcataagatatcgagatgttcgaaattgaacaacggaatcttttgagcaattcatatggtcaaagcttttcactcggatgtccgattcaggcgcataatatatcgagaagttcgaaattgaacaatggaagctcttgagcaattcaaatgatcataacttttaactcggatgtccgattcaggcgcataatatatcgagacattcgaaattgaacaatggaagctcttg

SEQ ID NO: 8113 - DNA, 318 bp, Glycine max
agcttccattgttcaatttcgttcgtctcgatatcttatgcgcctgaatctgacctccgtgtgaaaagttatgaccatctgaatttctcgagagcttccgttgttcaattttgagcgtcttgatatattatacgcctgaatcggacctccgagtgaaacattatgaccatttaaatttctcgagagcttccgctgttcaatttcgagcgtctctatatgtgatgcgcctaaatctgacctccgtgtgaaaagttatgaccatttgaatttctcgagagccttcgctgttcatttcgagcggcttcatatattatgcgc

SEQ ID NO: 8114 - DNA, 351 bp, Glycine max
tgtaccaattaaccgtgcatatgccatgcattatcgcatctcataacacaatgatatttttaaacaaatatgagaggattaatggagaaaaatagtactaactagttcttacattttgatattgctgttgctgatcttgcatcgaatccgataataagggtaagcatgggcacaaagatgccacccccaccaacacctcccacagtcccatatgctgatcctatgaatccaatcatgctgcccactattattttccacccaaatttcatctcctacaaccaaaaacagaagcattaattacaaggtaattaatcccaattcaatgtccttaattaatatacaaacactaat

SEQ ID NO: 8115 - DNA, 357 bp, Glycine max
ttggagtttccaagtgccaactcgttttcttctttattccagtcttcttctggcttcaattcttcagtgggctttccttctgtgtccagcatcttgggatgttcccagcctttgatgacagctttccaggttctgctatccagtgatttgaggaaggccaccattcttgctttccaatattcatagttgcttccatcgagaattggtggtctgttcactggtccgccttctttctccatgttcatcagaatttatctccctagatctcactctgtgatttcgagtgttggctctgataccaattgaaattctgataccaggggacagatgtcgtaccggatgtcacgacatcacgct

SEQ ID NO: 8116 - DNA, 356 bp, Glycine max
agcttgtggagaccgtcctagattttaaagcacccccattgagtatgctgcattctgctgatgaatttgcagtaataacaaacatcacttcattgtgcattaagatttactttgaactttccttcttgacctattatgtgtgcaactatatataatgatttatgatctgtaatatttacgttgatttggagcataatcaatatcgcactttccaaggcttgacttgcctgatgcaaatctcaacaaggactgaagattttattgttgacactttgaaacttcacagttctattgggccctatatgagggaagtcttcaaggacctttccaatagaaaagttagtggcacatgattg

SEQ ID NO: 8117 - DNA, 357 bp, Glycine max
tccatcaataactcatctagacgctctatatgtgaacaacggaagctctcgagaaatttgaatggtcataaaatttcactcaaatgtacgattcggggacataatatatcgagacgctcgaaattgaacaacggaagctatctagaaattcgaatagtcctaacttttcacacagaagacagattcggggacataatatatcgagacactcgaaattgaacaacggaacctctcgagaaattcgaatggtcatatctcttcacacagatgtccgattcagggacataatatatcgagaagttcgaaattgaacaacggaagctctcgacaaattcgaatggtcataacatttcactc

SEQ ID NO: 8118 - DNA, 295 bp, Glycine max
tgcttctagagttgttttgttctttaatcggccatctgggtgaaaagttatgaccagtcgaatttgttgagagcttctcttgtttaattgggagcatctcgataaactattttgcccaatcggacatccgcgtgaaaatttatgaccattcgaatttttctagaggcttcgttgtttaatttcgagcatctcgatttattatgtactcgaatagaacatcttagtgaaatggtatggccattctaatttcttgatagttttcggtcatcaatttcgagcgtttagaagagttatg

SEQ ID NO: 8119 - DNA, 345 bp, Glycine max
tctgttctgaatttcgagcatctccatatactacgggaaacaatcggacatccgagtaaaaaggttttgttgtttgaattttctaagaggttatgatttcaattttgagcgtctcgatatattacgagactcaatcaggcatccgagtaaaaagttattgtcgttagatttttcttagagcttctatttccgattatgagcgtctcgatatattacgagattcattcggacatccgagtaaaaagttattgtcgtttgattttgctcaaagcttctgttatgaatttcgagtgtctcgatatactacgggacacaatcggacatccgagtaaaaagttattgaca

SEQ ID NO: 8120 - DNA, 414 bp, Glycine max
  unsure (1)..(414): unsure at all n locations
gcaactatncgnccctggcacaattgtcagaattattctaaacctgcanggttctttaagctaaccaattccaaacaaggtcatattccatcgacttttttggttattcaaggcatgcattgatgcattcgcattttgtaaacccattgtgcaaatcgatggaacatggctttatggacaatacaaagggacactgttaattgcagttgcacaagatggggctaacaacatatttccattagcatttgccattgtcgagggtgagacagcagatggttgacactttttgttgcaaaacttgaaaacccacgtcacaccataacatggtatatgcttaatctctggtagacatgagtcaatccaaaatgcatacagacgacttgacagtgggtggacaacaaacaactcattaca

SEQ ID NO: 8121 - DNA, 310 bp, Glycine max
  unsure (1)..(310): unsure at all n locations
tctcactcccttgacatttattggaggaggaagnntcttatttacatcaatctttgccttggccacctctattccccttactaaaatcttatgccccagcattattccttcctgaaccatgaaatggcatttctcccaattgagaactagattggactcttcacatctctgtaatactctntcaaggtttgatatgcacccctcaaaagatggcccaaaaatagagaaatcatccatgaaaacttcaatgcattnttccacctaatcagaaaaaattgcaatcatacactgctgaaatgtaactggggca

SEQ ID NO: 8122 - DNA, 406 bp, Glycine max
tcttagttttagctgatgaagacgaagtgtggctacttcatgcactcctctaatgactatagcatcatttatggcactaaactgttgggagttggaagccatcttctcaattaaatttctggcttcagcaggggtcatgtctccaagggctccaccactggcagcatctatcatacttctctccatgttactgagtccttcataaaaatattggagaagaagctgctcagaaatctggtggtgagggcaactggcacatagttttttaaatctctcccattattcatataggctctctccactgagttgcataatgcctgaaatatcctttctgatggtcgtggtcctggaagcagggaaatttttttctaagaatactctcttgaggtcatcccagctaatgatg

SEQ ID NO: 8123 - DNA, 307 bp, Glycine max
cctctaccactagtcttaatctttggcatgctaggttatgacatcctaatgatcatgtaatgaaaattgttctcaaacagtgtaatatttctcaactgaataaaaacatcaccgagttttgttcttcttgttggatgggtaaagctcataggttaccctctcacagctcaacaggcttcccactccctctctcaagtttgttgttccttttgttcctttgattaataaagagtctgattatcattttcttaaaactgttacgtgtgcctgttttcctttactaaagccatatcatacacacaagctc

SEQ ID NO: 8124 - DNA, 353 bp, Glycine max
  unsure (1)..(353): unsure at all n locations
tacgaactagcctctgggcaaagcattaactngaattagtctaaaannnnctattgtataaatgtgccatcaaatgtacaaaatactattactaatattatgggtgcagaatgtctatgcatggggaagtatcttggaattccatcgttagttggtccaagtaaaagggcggtgtttgggcacgtaaaggacaaggtttggaagcgtattcaatcatgggagggccattggctctctagtgcaggaaatgaggttatgatcaaggctgtccttcaggctattccaacatattatatatccatctatttgcttcctgatagcctcgcagatgagatacatatattgctaaattg

SEQ ID NO: 8125 - DNA, 372 bp, Glycine max
cctaacgccttgttcaaactctcctataacctttatgtgaatctaggatctctatcagacactatggttgacgacacatcatgtcatctgacaatctcactaatgtataacgaggtcaacttctctaaggaaaacctaatattgatggggataaagtgtgcagatttattgaatctgtcaacaataacccaaatagaatcaaaacctttacgggtcctaagtagtcctacaacgaaatccatggagatattgttccacttctacacgggtatctctaacggttgtaacttacctaaaggtctctgatgttctatcttagccttctagtagactaaacacgcatacataaacttattaacctctgtcttcatg

SEQ ID NO: 8126 - DNA, 383 bp, Glycine max
agcttctgtccctgagaaactggttcccttattacaattgggagtgaagattgctgaaaaccctagccttgcaacaagtcctagggaagtagacacggagatggacaagaaaatccgcagtatggtgagtagcattttgaaagaagcctctgtgcctgaagctgatgaagatgttccaacatcttccaccccgaatgtttctatgcctgatgttgagaaagatgttccaacatcttccggcccaaatgatgaagtactctcttcccccagcaaagagagatcaacagaggaagatgatcaagccgcagaggagacccctgcaccaagggcaccaaaacctgctccaggtgacctcattgacttagaagaagtcgaatctgatg

SEQ ID NO: 8127 - DNA, 398 bp, Glycine max
  unsure (1)..(398): unsure at all n locations
agctagaaggtgngtagcttaccatctattcttattatagaaccggtagtgtgtctactatcattgtcgtcatttttttttcgtcattgaggtgccacttgagctgccacgtctctccacctttgggcgtattcttttgaaagatttgtgccccctttttgcacatgttctgtagttgcatcctatccgaagacattatactgacactgcctaatgaaggcaatcactaggtccttccaagaatcgactcgggaaggttccaagttagtgtaccaggtaacaactaccccagttagactttcttggaaggaatgtatcaacaattcctcatcttttgtgatgcccccatcttccgacaatacatctttagatggctcttggggcaagtaatccccttg

SEQ ID NO: 8128 - DNA, 332 bp, Glycine max
acctgttagacaaatggcctcagttatcttaagatggggggttgaattaagatacaaagactattcctcaattaaaatttcgctctctctttttagattaacattgcacccttaacatgaattactcaaaagacaattcagaataaacttctttaaagcaaaagataaatggcaataattaaaagaagtttaagggaagagagaaatgcaaactgatttatactggttcggccacttcccgtgcctacgtccagtcctcaagcaacccacttgagatatttcactctctttgtaaaactccttttacaaagtttgaaccacacagggacaac

SEQ ID NO: 8129 - DNA, 355 bp, Glycine max
  unsure (1)..(355): unsure at all n locations
agcttcaacatcagaccacttccagggtgttggaacttttttcatggactngatggggcctatgcaagttgaaagccttggaggaaagaggtatgcctatgttgttgtggatgatttctccagatttacctgngtcaactttatcagagagaaatcagacacctttgaagtattcaaagagttgagtctcatacttcaaagagaaaaagactgtgtcatcaagagaattaggagtgaccatggcagagagtttgaaaacagcaagtttactgaattctgcacatctgaaggcatcactcatgagttctctgcagccatcacaccacaacaaaatggcataattgaaaggaaaaac

SEQ ID NO: 8130 - DNA, 331 bp, Glycine max
  unsure (1)..(331): unsure at all n locations
ctcaagcatggaaagaagacagnatataccttacaccgaagattncttttagctnttttatcttatcgacaatggaaaaaagcttttaatggaagtcaggagaatgaaggccccccggaagcattaactggaaaccaagttcatgatcgcgtaaaggacattgtaaccgtgtttggcaagtcccagaagaagacatcatctcccaaaaacatgtggaagaaacgctcaatattctttgatctttcatactggtctgatctatatgtgcgtcactgtctagatgttatgcatgtggagaaaaaagtgtgtgatagtttaattggtactcttc

SEQ ID NO: 8131 - DNA, 275 bp, Glycine max
  unsure (1)..(275): unsure at all n locations
agcttgataagaattntgtttgtaatacttgtcattattctaaacataaaagacttccatttcccaccagtaactcacatgcatcgaatagtttttaacttttacatatagatatatggggaccttgttcaaaggtttcaatgctaggacattgatactttctaaccatagtagatgattattcacgttttacttggatatttctaatgcatgtcaaagctgaaacacgagaacatatcaaagcctttatagctcttgttgaaactcaatttgac

SEQ ID NO: 8132 - DNA, 397 bp, Glycine max
  unsure (1)..(397): unsure at all n locations
tctccttccatggcgtattctctagtggatggcgccttttcttagctctagtcctttatcttttgctgcaactccatggttgaaaatcaccattaaaggaccttattgaagctcaaagatccaacctccatagaagcttctcaagcaagcttccatcaagattctactattcgcattgcatggttatcgaactttggtgcgtacttctactggggcaaccctattctctntggtgtatgagatggaagttgtgctcccttttaaggtagagattccttctttgagaattctagcagaatcagggttgggagaagcagaatgggccagacatgttttgactagttgaatcttatcgagggaaaaagaatggctgccatgagtcatgggtggctatatc

SEQ ID NO: 8133 - DNA, 359 bp, Glycine max
tctaaactttgtacaagaatgaagctctttttccacttgttatacaagaggcctcagatatcgtcagaagggggggttgaattaatatatcccaaactgtttcccctaattaaaaatctatttcactttttactcaagttattaattcccttaatgacaatcttcttaaatattaattcaaatgaagcaacttgaatatgaatataaagcactaatcaataaaggagattaacggaagagaaaatgcaaactcagttttatactggttcggccacacccttgtgcctacgttcagtccccaagcaacccgcttgagagttccactatcttgtaaattccttttacaagttctaaacaca

SEQ ID NO: 8134 - DNA, 392 bp, Glycine max
agcttccttaagattattcctaattaagctagagcttagctacacatacctctctaatagctaagctcacctccttgagatgagaagctagagcttagctacacaccccctataatagctaagctcacccccatgacaaaaaacatgaaaataataaaaaaaaagtccttattacaaagacaactcaaaatgccccgaaatacaaggctaaaaccctatactactagaatggccaaaatacaaggcctagacgaaggaaaaacctattctaatatttacaaagataagcgggctcatacttagcccatgggctcgaaatctaccctaaggctcatgagaaccctagggcctttccttggatctctagcccaatctacttggagtcttctagc

SEQ ID NO: 8135 - DNA, 253 bp, Glycine max
aacttctgcggggacatcttgacttgcttttcaatctgtcatttaccacaaaatctgccttcttttattttcagattgggaatgcctattacagcacctttgtcaatgattttcttcatgcctcttacgagcagatgtccaaatcgttgatgccatattctgacttcattttctttggacgacatacatgtggaggagtaactggtttctttaggtgtccatacgtaacactggatctttgatctgctgccct

SEQ ID NO: 8136 - DNA, 227 bp, Glycine max
  unsure (1)..(227): unsure at all n locations
agctgtggagtttccaagcgccaatacgttttcatctttattccagncaacagatggcttgaatccatcagcgggctttccttctgagtccagcatcttgggatgtacccagcctttgaagacaggtttccaagttctgctatccagtgatttgaggagggccaccatccttgctttgcagtatgtctagtaggttccatccagaattggaggcctgttcactggtc

SEQ ID NO: 8137 - DNA, 421 bp, Glycine max
tataaaactcaagcttttgtgaaaggaagaagatgatgaaagatgagtatgataataattgtaaaggcttaaaggtttctcaaaagttgttcaagaagttgttaaaaatgcaagtcaaggtcttgcttttatagactcttcatgtctggtcaagaaaaccattggaagagttataaccttgagaaaatcatgtcaagagttacatctcttgaccttttattcaaaacttgtcactggtaattgattaccataatcatgtaatcgattacacaatgcattttaagaaaagatgtgactcttcacaattgaatctgaatttcaacattcagatacactggtaatcgattaccaatatattgtaatcgattacaccatttaaaaatcatttgaatgttgcaaattcaattaaaagctttttgaa

SEQ ID NO: 8138 - DNA, 382 bp, Glycine max
  unsure (1)..(382): unsure at all n locations
cttggagtttccaagtgccaattcgtcttcttctttagttcagtcttcttctggcttcaattcatcagtgggctttccttctgtgtccagcatcttgggatgttcccagcctttgatgacagctttccaggttctgctatccagtgatttgaggaaggccaccatccttgctttccagtattcatagttggttccatctangattggtggtctgttcactggtcctccttctttctccatgttcatcagaatttatctccctagatctcactctgtgatttcgagtgttggctctgataccaattganattctgataccaggggacagatgtcgtaccggatgtcacgacatcacgcctcagaacatgcagattatatgtgt

SEQ ID NO: 8139 - DNA, 368 bp, Glycine max
ccttgcaagctccaaacaccccatttgaaaatctttctggattaaacttttgatcatcaggcccccagagttgagggtcttgttgcagcactgagattggaatctgaatattcattccttttggaattaggatgccttttaaattaacaccttggagagctgttctaacaacaaaggctgctggcgaataaagcctcaaagtctcttgaatcaccatggtcaactgcaagtgtaacatttttatatatggccttcacagatcagtaagaatgctcatgaaactgggaaatgatcaactataattacaataaaatttgaggcacacaaaaatcagaaaaagcttgttgttaaatgtaccttacatgctg

SEQ ID NO: 8140 - DNA, 408 bp, Glycine max
  unsure (1)..(408): unsure at all n locations
agctccttcactccttgactcaaaacgcattgaatgaataatttcacactccacaggctcagaatactaatgcccactcagacttcactattcacaacaacaccatcctgcagcaaggcaaaatttggctgtccttgggtcatgaatncatacccacattatgggaagaatctcataaaacttctgtagggggccatacatgagttgctaagacacttcaccacttgcaagataatctacaatggtcttatatgcgccacgatgtacgccagtatgtggcacactatgacatctatccacatacaaaggaagagactcatagaccaactggcttactgcaacctttccctattccaataacaatgtgggaaaatctctctttatactgcattactggcgtaccacctt

SEQ ID NO: 8141 - DNA, 315 bp, Glycine max
agctggtacctccttcttactacattttaatactggtttgagtcttctctgtggctatcttacaggtttagccccatcctctaaatttatccgatgcatacatgttgatgggctaataccaggaatgtcggccagggtccagcctatagccttcttatgcttcttgagaactgataacaacttctcctcttgctcatcagcaagggaggcagatataattactggaaaacttttactatcatccaagtaagcatattttaaatttgatggcagaggcttcaaatctggtgtgggcggctggataatggtagaaag

SEQ ID NO: 8142 - DNA, 342 bp, Glycine max
  unsure (1)..(342): unsure at all n locations
taagcacctgccgcatgcagcggcaacaaagttttcctnacttgagagaagcccgcggctgantcatataaacctcctcctctagatcaccattaagaaaagttgccttcacatccatttgttgcaactcaaggattgaatgaccaactaatgccaaaataataaaaagagaatctttcttagatactggagaaaaagtcggtatgtagtccaatccttttttttgagtaaataccttatccacaagtcttgccttgtatctcacaatgatgcctaatgaatcccttttggtcttaaagacccatctatagtcaatggcctttgccccattaagcaacttta

SEQ ID NO: 8143 - DNA, 408 bp, Glycine max
  unsure (1)..(408): unsure at all n locations
tatagttattggagggagtataaaacaatccacaatcttttgtacccttcaagtaacgaagaattctttttgcggcttttagatgacgagaggtaggagcctccgtaaagcgacacacaacttccaccgcatatagaatatcgggccttgtattggttagataccttaaactccccacaagactcttgaagaccatggagtctaccttctctccttcatcaaactttgataacttcaagccaccttccatacgtgtgttcacgggattgcaatctagcatactaaatttcttcaacacttcttttgtgtaacttccttgtgagacaaagataccattctccattngcttcacttccattcccagtaatatgacatgagtcccatatctatcatatcaaattcacgaga

SEQ ID NO: 8144 - DNA, 207 bp, Glycine max
agctgtacaaatgaacaattctcggagattcatgcctctaccgccgcacaaaacagctatcggatgtcgctggatatataagatcaaatatcgagccgatgggtccatataaagatacaaggcacgcctgtgtgccaagggttacactcaaacggaggggttggactaccttgacaccttttcttcggtagcaaaactcacctccgt

SEQ ID NO: 8145 - DNA, 386 bp, Glycine max
  unsure (1)..(386): unsure at all n locations
agctntagatactgaactgtaacccacatagatatcgggttcaactttcttggctagcttgtctctcttaatttgaggcacataagtaaagcgcaaacatccaaatactttaaaaaatttcaagaagggtttataaccataccaagcctcaaaaggagtcttctcatctactgctttggtgggaagtctatttatcaaaaatactgcagtgtttgtagctttcgcccaatatgccttaggtaactctttctcatgaaacatacatctgaccatttccaagattgtttgattctttctttcactaaccccatnttgtttaaaggtgtaagaagctgttaattgatgttcaatgtctgcttcctcacaaaacatgatgagttatgctg

SEQ ID NO: 8146 - DNA, 331 bp, Glycine max
cgcctgaatcagacatacgagtgaaaagttatgaccatgtgaattgtttgagagctttctacggataaatttgagcgactcgatgtattatacgcctgaatggaagctcatcgtaaaaagttatgaccatttgaatgtcttgagagcatccgttgttcattttttagcacctctatatgtgatgaaccttaatcggacctacgtgtgaaaagctatgaccatttgaagttctcgagagcttccatcgttgaacttagagcgtctctatatattatacgcccgaatcggacatccgcgggaaacgctatgactatctgaatctctcgagagc

SEQ ID NO: 8147 - DNA, 397 bp, Glycine max
agtgcctgtatattgatgcgcctgaatccgacatccgagtgaaaagttatgaccatttgaatttctcgagagcttcctatgtttaattttgagcgtctcgatatattatacgcctgaatcggacctcagtgtgaaaagttatgaccatttgaatttcttgagagcatccgatgatcattttcgagcgtctctatatgtgatgaaccttaatcggacctccgtgtgaaaagttatgaccatttgaatttctcgagagcttccgttgttcaatttcgagcgtctcgacatattatgcgcccgaatcggacatccatgggaaaagctatgaccatttgaatttctcgagagcttccagtgttcaatttcgagcgtctcgacatatgatgcgcccgaatcg

SEQ ID NO: 8148 - DNA, 383 bp, Glycine max
tgacaggcaggtgcacatgtctgcaatgtatttggcttttcaagtggacagtgctactactttttgcttcttggaactctaggatatgggagaccctaacaacaggtgaacttatcccacgatgctccttttgtctactagatcaccacacctgtcagaatcatagtaggctacaaggtgtaggctatcatctcccttagtatgatgaggaaacaaaatgccatattcgagtgtccctctcagatacctcatgattcttttagctacaatcaagtgtgggtgtcttggatcactcataaatctgctgaccaagccaacactgaaagccacttctggcctactgtgacagataaactcaggctaccaacaatctacctaaacat

SEQ ID NO: 8149 - DNA, 410 bp, Glycine max
  unsure (1)..(410): unsure at all n locations
agcttgttcttaagcccttttaccactccttctctccttaactcattcttcatgtgcttgaagagaattcaacaactcccccaccttcattgaatcaaagatccttggattctttgattgccacaataatgtgattaaaagaggagtcaatgttctcaacaccttgccaacaatttgttggtctaacaacacttcattgcaggctttcattgaattgattaatgtttggatttagttgaaataattaacaatggactcttgatcactcattgacaataattcatattgtcttcaaagatcttgaagcttcacctttntggttttggttgcacctccataagctttgttcaagatgtcccaagcttcttttattatcatagcctttgaagtttttccaaaatttgcaacat

SEQ ID NO: 8150 - DNA, 325 bp, Glycine max
  unsure (1)..(325): unsure at all n locations
agcttgtagggttaaagtcttacgatngtacgtgctcatgcaacaattgttagccggggctatacaagacatcttgccaaacaaagtcaggttcaccataactcgcctatgctttttcttccatgctatatgtagcaaagtgattgatccattaatgtttgatgagttggaaaatgaggccgcaattatactgtgccaggtggagatgtattttccccctgctttctttgacatcatgattcacttgattgtgcatctggtcagagaaatcaaatgctgtggtcctggttatctacggtggatgtacccgggtgagcgatacatg

SEQ ID NO: 8151 - DNA, 401 bp, Glycine max
  unsure (1)..(401): unsure at all n locations
ncaagcttgagcaaatttaaacgactttaatttttgactcggatgtccgattgtgtcctgtaatatatcgagacactcgtaatcggaaacagaagctctgagcaaattcaaacgacaataacttcttactcggatgtccgattgaatcccgtaatatatcgagacgctcttaattgaaaatagcagctctgagcaaattcaaacggcaataacttttaactcgggtgtccgattgtgtcccgtaatatatggatacgctcggaattgaaaacagaagctctgagcaaattcaaacgacaataacttcttactcgaatgtccgattgagtcccacaacatatcgagacgctcgtaattgaaagcaaagctttatcaaaatcaaacgacataacttttgactc

SEQ ID NO: 8152 - DNA, 404 bp, Glycine max
ttagcttcagatgatgcagatgggtttgtagctacctcatgcactcctctaatgtttatggcatcatttctggcgctaaactgctgggagttggaagccatcttctcaattaaatttctggcttgagcaggagtcatgtctccaagggctccaccactggcagcatctatcatacttctctccatattactgagtccttcataaaaatattggagaagaagttgctctgaaatctgatggtgggggcaactggcacatagtttcttaaatctctctcagtactcatataggctctctccactgagttttctaatacctgagatatccttcctgatggctgtggtcctagaagcagggaaatttttttctaagaatactctcttaaagtcatcccagctcgtgat

SEQ ID NO: 8153 - DNA, 333 bp, Glycine max
  unsure (1)..(333): unsure at all n locations
agcttggaacaattgattactgtgtgtattttntcctcgncagataacttgagcttataagcaacaggaccaattctttcaataacttggaatgggccatagaatcgtttggcaagtttggcggaagctgatgaagttcccttggtagaagactgtcgatagggtcgtaaccggagaagaacccaatcgcccacctgataattcacctcctgacgcttgtgatcagcttgcttcttcatctggtcttgtgcctttagtaatttcttgcgaatggtttgaaaagtagcgtctctatcagttaacaagtcctcaacagcttcaatgtttgacgtg

SEQ ID NO: 8154 - DNA, 367 bp, Glycine max
  unsure (1)..(367): unsure at all n locations
ntccctctttgaacaaatacccctcagccaaatagaattcatcttgggcctttttcccaaaactctcgtaaatgggagagaaatgttcatctaaagcatacaagtccctaatgttaccaaatcctaaagtttgagctcctagggagcaaaacaatgtgtgtctcctagagagggcatcaactaccatattttcttttccctttttgtatttgataacatatggaaattgctctatgtactctacccattttgcatgccttttgtttaacttgctttgccctctaatgtacataagtgagtgatgatcactatgaatgacaaattccttggaaacaaggtaatgttcccaagttcggagggctcttat

SEQ ID NO: 8155 - DNA, 400 bp, Glycine max
aagctccttcaactgcacaaggctcttaatatttgattatttccttgtggaaccttcacccgtcgaagacactgacaaaaacttatcttctcctttttggaaaaagtatgacaagctgggggcaagtaaattttcttcccatcagaccttggatgcaactgtgatcgtatccccatctcagctagatcttgacgggtattcaagccattcttcaccttgccttgaatgttaaagagcattccaatcacactgtcacatacatttttctccacatgcataacatcaatacaatgtctaatgtctatatcagaccagtacaaaagatcaaagaaaatggacctcttcttccatatgcaagtcttacttttatcctttgtttggggttttccaaatacagtat

SEQ ID NO: 8156 - DNA, 379 bp, Glycine max
agctataaacagacattgcttcatcttagtcgccattgactacttcaccaaatgggtcgaagcagcttcatacgctagtgtgactgggagcatggagattagattcatcagaaatgagataattttccgatatgggttgcccaggaaaattatcaccgataatgccaccaatctgaacaataagatgatgaagaagatgtgtgaggattacaaaatccaacaccataattctatgccttataggcctaagatgaatgggttagttaaggctgctaataaaaatatcaagaagatagttcagaagatgactgtgtcatacaaggattagcacgagatgctccccttttcattgcatggttatcgaacttcggtgcacatg

SEQ ID NO: 8157 - DNA, 301 bp, Glycine max
  unsure (1)..(301): unsure at all n locations
tggatatgcgagacatcttgccgaacaaagtcgggttagtcataactcgcctgtgctttttcttccatgctatatgtagcaaagtcattgatcctatcaagtttgatgagctggaaaataatgtcacaattatactatgccagttcgagatgtattttcccnctgctttctttgacatcatgattcacttgattgtgcatgtggtaagagaaatcaaatgttgtggtactgtctatctaccgtggatgtacctggttgagccatacatgaagatcttaaaacggtgtacaaagaatctata

SEQ ID NO: 8158 - DNA, 410 bp, Glycine max
agctttttattttcagtagatgaagatgtatctgtggccacctcatggactcctctaagaacaataacatcatttcttgcactgaattgttgggagttggaagccatcttctcaatcaaattcctagcttcagcaggggtcatatcaccaagagctccaccactggcagcatcaatcatactcctctccatgttgctaagtccctcatagaaatattgaagaaggagttgctcagaaatctggttgtgaggacagcttgcacacaatttcttgaatctttcccagtactcatacaagctctctccactaagttgcctgatgcttgaaatgtcttttctgatggcagtggtcctagatgcaaggaagaatttctccaagaacaccctcttaaggtcatcccaactggtaat

SEQ ID NO: 8159 - DNA, 357 bp, Glycine max
  unsure (1)..(357): unsure at all n locations
tctaaactntgtacaagaatgaagctctgataccacttgttagacaagtggcctcagatatcttaagaagggggggttgaattaagatatcccaaactgtttcccctaattaaaaatctatttcactttttactcaagttatgaattcccttaatgacaatcttcttaaatattaattcaaatgaagcaacttgaatatgaatataaagcaataataaataaaggagattaaaggaagagaaaatgcaaactcagttttatactggttcggccacacccttgtgcctacgtncagtccccaagcaacccgcttgagagttccactatcttgtaaatccttttacagttctaacacac

SEQ ID NO: 8160 - DNA, 330 bp, Glycine max
agctttaggcgaccaactttgatatcagttttgtaaattaagtcacatacgttaactaaaagatcccacaaatcactattttctttaaagtagaaaatcctttctcaatttacgttttaagcttcattgtatgttaggctgacattgaattggtgctcatagaatattaattagaatattttaaaaaaattattatataaatcacgagacattataaaaaaaattatgattaacatagattttcatctttcaataaaaatatttagactctaatttttttaatcgatatccttaaaataataatggtgagttgtattttaataaaaagat

SEQ ID NO: 8161 - DNA, 415 bp, Glycine max
  unsure (1)..(415): unsure at all n locations
tagccctagaaggggatggaccttttatgttttggagatgatcaataacaatgcctataggttggacctcccagaagagtatggagtcagcaccacttttaacatttctgatttaattccttttgcaggtggagctgatattgaggaggaggaactaacagatttgaggtcaaatcctcttcaaggggaaggggatgatgcaatcctccctaggaagggaccagtcactagagccatgagtaagaggctccaagaggcttgggctagagctgctgaagaaggccctanggttctcatgaacctcangatagatttctgagcccatgggccaaggttgggtccaattatctttgtacatattagactagaatgtcattatatttggtccttgtatttanggctccataatgtatct

SEQ ID NO: 8162 - DNA, 406 bp, Glycine max
  unsure (1)..(406): unsure at all n locations
ntacaacaaatagttgagaaaaaccttaaaaccccattttttccaactatgcaactaanacattcaaagctttacaaagtccatactaatgtctacctaaggtgtagatgggatgggtaagggtgtgtatagcccatgaggcatcaccctaaacttggcttgtaaacaagccacacacatagtgcaatgcttatggacactnttcttcatatggggccaataaaacttttctttgagtaagacaagggtcttgtctatcccaaagtggcccatgagcccacccttatggctctctntcacaagtaatttcctaatggatccttgnggtatgcaaagctttccctctctgaacaaatacccctcagccaaatagaatccatctcgggcctttttcccacaactctcg

SEQ ID NO: 8163 - DNA, 392 bp, Glycine max
  unsure (1)..(392): unsure at all n locations
ttgcatgctanagcgccacttgacgcggtgcgccaaattcaaacgctgttgcctgttgtggccggctatatgaatatgctatgccgtcacgactcaaaaccaccgccaatttatgtacttgcttatccttcaatcactctataaccatgataacaaaaattaaaggttattgagctgtttaaagatattgattaagaaatttaaattacaaatatttaatttaaatatgttgcttatactttgaaaatatattatttttaaattattattttaaatttattcttgattatcttaaattttggttatatcttaacttagcagtttattgtcaacgtaataatctaattattaacattctgcactattctttaatatttaaattatttaaaaat

SEQ ID NO: 8164 - DNA, 394 bp, Glycine max
  unsure (1)..(394): unsure at all n locations
agcttgttacagtctgatgatatatctattctgacctctntgaatgcagggaattggaagtttttagatactacaaatggttctaccggatttccagacatcagaaaaataaatggaaattctgtaattgaattagttagtatgcccacaaagataactggtgtacattatgtgcaggtgagttgttgaactatatgactagtttcagaagaaagtcagctttcacatttgatacagtttcttatttgttctcttatattttaaaataacaccagcttctaatgaagtagcttctaagttctctaccttttggtatttaaatactatctacttacaaagggccctttaagttagtgaacttccagctctgtcctcttgatatgccgaagaatta

SEQ ID NO: 8165 - DNA, 427 bp, Glycine max
  unsure (1)..(427): unsure at all n locations
agctngtagggttaaagtctcacgattgttacgtgcttatgcaacaattgttagccgtggctatacgagacatcttgccaaacaaagtcaggttcacgataacttgcctgtgctttttcttccatgctatgtgtagcaaagtgattgatccagtaatgtttgatgagttggaaaacgagaccgcaattatactatgccagttggagatgtattttccccctgctttctttgacatcatgattcacttgattgtgcatctggtcagagaaatcaaatgtcgtggtcctgtttatctacggtggatgtacccggttgagcgatacatgaagatcttaaaagagtatacaaagaatctatatcatccgaaagcatctattgttgagaggtacattgcagaagaagccattgaattttgttcagaatactt

SEQ ID NO: 8166 - DNA, 431 bp, Glycine max
agcttcttcctcgaaccaactcgccgacatcttcaccttttgcttgtctccagtagtttttcaaggtctctgcaacaagctgggaatgatgaatatacattcccagcttgcggggggctcttagcagcatcacaagagttagttagaatagttagttagttagctagtatggctaggtttctgttgtaaccaactatcaagcatattccatcttgtataaattctctgctatcattcaataaagcttcgagatgttattctgatcatatgatacattcacgttgctcatttctgctatatggctgaatttacttctaatatataattaaaattaatactcccattaattgattaaaataatcatcaattacagattgtcgagtttaggtaaagattattaaaaatatggcagttgttaccaaattatcaat

SEQ ID NO: 8167 - DNA, 428 bp, Glycine max
ccttggggaagcattaggcctgcatcatctccatgtgttatgatgatgccaccaacaaaacgtgtactaattgcccatgatgtctgccaaacatattcccttaacccattatcgtctgtgaactgcacaagcacacattttgagcaactgcatcctcatcaaaaggattatattaatatttaaaaatatatatatataaaaaaaacagtacatcagacctgtgttccaaaggcacgggcaaagttttgcccaaggttatgactggttcctgcttgtaatgctttcttgtcacccatcatagcctcaattgtataggtcttacaagcaccagcaaatgtttccactttagatattcgacctgtaacaacaggtattgcagcttgctcataagcaaatctggtatagatgtcaatcatctgtatagcctg

SEQ ID NO: 8168 - DNA, 383 bp, Glycine max
  unsure (1)..(383): unsure at all n locations
tgtntaccccatgttgagattgcttacaatagagctgtttatagcaccactaattgttctccttttgaagttgtttatggttntaacccactaactcctcttgatcttttgcctatgcctaatgtttctgtttttaagcataaagaatgtcaagcaaaggcggactatgtgaagaagcttcatgagagagtcaaagatcaaattgagaggaaaaataaaagctatgctaaacaagccaacaaagggagaaagaaggttgtcttctaacccggagattgtgtttgggtgcacatgaganaagaaagggtttcggaacaaaggaaatcanagctcaacccaggggagatggaccatttaagtgcttgaaagaataatgacaatgc

SEQ ID NO: 8169 - DNA, 372 bp, Glycine max
agcttctagatgagttatgtctgcgaatctgacatcctgtgaaaagttatgaccatgtgaatttctcgagcgcttccgttgtttaatttcaagcgtctcgatattttatgtcctcaaatcagacatcggagcgaaatgatatgaccattcgaatttgtcgagagcttccgtttttcaatttcgagcgtctagatgagttatgtcaccgaatcagacatctgagtgaaatgttatgaccattcgaatttgtcgagagcttccgatgctcaatttcgagcgtttagatgagtaaggtcaccgaatcggacatcctgtgaaaaagatatgaccattctgttttgtcgagagcttccgttgtcaatttcgagcgtc

SEQ ID NO: 8170 - DNA, 432 bp, Glycine max
taactaatcaaatgggacaatgggctacgtatttaaattaacaacagtcccagaattgtgaccgattaccttctcaatctgtccaaaatcccaaaaatgtgagtgtgattgcattgaggtcgggaaagcagtgtcaaagacctcaaccagtagcatcttgctcatccgcaaatgaacctgcccaacttcactctactccagaaaaagatgatgacaaaaatttaacgagtaagttacctaacaatttatatgcaggtgaatctttcactggtaattctgatttacagaagcagcatatccctctttcattccctccaagagcaattttcaacaaaaaaatggaagaggcagagaaggagatcttggaaacatttagaaaagtagagggtaacatacctctgctggatgcaataaagcatattccagatatgc

SEQ ID NO: 8171 - DNA, 358 bp, Glycine max
  unsure (1)..(358): unsure at all n locations
tgtacgactgtgtctcgtgtatatctagacgctggaaatagattacagagggtttgatcaaattcacaagacaatcgctattgactcggaggtccgattgagacccgtcatatatctagacgctcgttatagataacagaggctctgatcagactcaaacgacaataactnttgactcgggtgtccgattgagtcccgtaatatatcgagacgctcgtaattgaaaacagaggcactgagccaattctaacgacaataactttttactcggaggtccgattgagagctgtaatatatagagacgctcgtcattgaatacagaagctctcagtcaattctaacgacaataactttttac

SEQ ID NO: 8172 - DNA, 280 bp, Glycine max
agctttgagcaaattcaattgacaataatttttgactcggatgtccgattgagtcctgtaatatatcgagacactcgtaattggaaacagaagctctgagcaaattccaacgacaataacttcttactcggatgtccgattgaatcccgtaatatatcgagacgctattaatggaagatagcagctctgagcaaattcaaacggcgataacttttaactcgggtgtccgattgagtcccgtaatatatggatacgctcgtaattgaagacagaagctctg

SEQ ID NO: 8173 - DNA, 444 bp, Glycine max
  unsure (1)..(444): unsure at all n locations
tatcatcacttattagccttattagagatatttgattgttggaccatatgaaacaatgttttttgtgtatttaattttccaacaaattttctaactgagtcaagatggtattttatattccaaatttcaagtaaaataaaaatatttgagcttccaaggatatatgatggctcatggctgccacaaatatttcatgcttaacatctttatacatgaaaatattggtagcacataatggcttgagatctgttaggaacaaccaccgtgagctcatagcagttgtttatctttaagtaaacattgtacttcatgctcttaccttngctacacagtcaaggagtggactgagcttgaacaccctaacctttttcttcttgttgcttttattatggcacaactggtagttgtaatgaagtaaagttctctttctaatattggtactct

SEQ ID NO: 8174 - DNA, 364 bp, Glycine max
  unsure (1)..(364): unsure at all n locations
agctnggacccgaaaatttaaagaatttatactcattaagaagactcagctcagccacaacgttgcaagattcagatttgcccttcctactccttcttcagtattaggccttcctgttggaaaaaacatacttgctaggtttaatttggaaaagattttcctgatgttgctctaatactatatttaacttatcccgttgaataaaacaccataaactttaaatacaagaattataataataaagaaaaagagatgtaaaactattttatattaactgttaagcagggggaaagatagccaaggagaggaagttatgagatcatatactccaatcacgttggattcagatattggctacttcgag

SEQ ID NO: 8175 - DNA, 381 bp, Glycine max
agcttatcctctagggatccctacatatgttcattttaatctccaagcgtgagtaactcatcccttacctctaagtgacctcgcgtgtgcagtttggcagtgatagcaacgtctctagctaagattcctcaagtttttcctctggttgttctgcttggttttccaagcattagagtgaacgagaatgaattacaacttcaatttcactgtctccttgcgaggggaatttctctttctactaatattatttcgaaaattccaattgagtgaatatgcgaaaatgagttccgaaggtggtatccaaatttcaggataatccaacggttaaggagtctaggatcgtagttttactacaatgggtttggatgtatatgtgaaaag

SEQ ID NO: 8176 - DNA, 418 bp, Glycine max
agcttgcatgatttacatctccctctttctcaagcaaattcttcttgatatcatcaaaatcttcatgatttacattctccccttttttgatgatgacaaccacctataggttaggagcaacaacaaagaaaatatctatttgcatatagtttactcccccttggttttacattgattgcttatatgagacaattgaagatttcatatttttcatatataaaaagttatctcataaaacaatagatattttgcaataaactctcttcaagagaagaatattacaataaagatcatgtaggaatccttatagattttgcaagtgtttggccaaggatttcttttgagagagcatttgacaatgaagttcttttggaatctctctcattgtcttttgagaggataagacacttttgtcaag

SEQ ID NO: 8177 - DNA, 323 bp, Glycine max
tcagttgcccattggcgtaaatgaggatgttaccgtcttttatgactctgtggagaggcaggcagaggatgtaggaaagctcgttgagcgcgtctttgagaaccacagagatgtcaggctccataaaaccgttggggtgggagtgacaaacgatggatatatgtgatctcttggccatgaatcacatgcctccccacaggcaacgatacagtgtgaaggaacaatgtgctctgaggatgttggggtaggaaccgagggatggggatatgacctctctacggacatagtctaattcaggcccagagccgttcactttgatggat

SEQ ID NO: 8178 - DNA, 343 bp, Glycine max
  unsure (1)..(343): unsure at all n locations
ntgacaagacagtacacactgctgactgcttcaacatgtatcaatatggaaatctactctaaagatacatctgataagacccataattataacactccccctcaagctggagcatatnaattatatgcaccaagcttggaacatataaactgaattctaggcccccttaaggacttangcaaaatatatgctggctgagcatcggaattcatgaattcagagacagtctctttatacagtaacttcttccgaataaagtgacagccaatctctatgtgcttggttctctcatggaagaccggatntgaagcaatatgcagagcagccagattatcacaataca

SEQ ID NO: 8179 - DNA, 298 bp, Glycine max
agcttctcagatctggtcatggaaagacttgtcaactgccttcattaggaagtaccaatacaacacggatatggctcctgatcggaaccaacttcagagcatgaccaaacgggaacatgagtccattaaagaatatgctcaaaggtggagagacctagctgtccaagtcatcccacctatgacggacagggaaatgatcacaattatgataaatacgttgcctacgttctactacgagaagctgataggatatatgccggctaactttgcaaacctcgtctttgccggagaaagaatc

SEQ ID NO: 8180 - DNA, 443 bp, Glycine max
  unsure (1)..(443): unsure at all n locations
tgagcacctttttcctcacttcttccttcattgatgggttgagccttctctacggttgtatgattggtctatagtctccttccatcattttcttgtgcatgtagttggcagggctgattcctttaagatctaatatgtgccacccaattgcttccatgtgtcccttgaggacctttaccaacctattctcttcctctgctgttagctcactgtgatcaccacaggcttggtctcgctctcctccaagaacacatacttcaggtggttgggtaggatcttcaactccaccttggtcttctcggatggactcccactttntaattcttcaaagctggtcccccttgcacgaatgttttcttcatgatctaagtctttcaagaaagtgctcagatcctttttctcttcaatatgtagatgatccacaacatngatcaaaactttct

SEQ ID NO: 8181 - DNA, 449 bp, Glycine max
  unsure (1)..(449): unsure at all n locations
tatctgagtaatgatgatgagacattagcttttatattgttgcattgaatgttgcttctcttacgatcctccttttttcttctttggccataactatagcctgctctttgtcaccgctctgcactctccacttcacacactctgtttccttacaaacactttgcatcctatcaattatatcgcttttaaaatatattgaataaaaaatatgcttaattttgttctaaaatataataacagatacatcccttttcatgatataagaagatttatatgaaattntatttaaaagtttaatctctgtaaaaaacattatatcattaatcaatcatgaatcttaattgtcagcataacttataaaataattattataaaacttaataatttgttttcagtgtatttattataaaaaataataaatgtatcatatatgataaatttatgattaa

SEQ ID NO: 8182 - DNA, 314 bp, Glycine max
tagtcctttcatgaaaaactgggtttgaggcaatatgaagagcagtctgattatcacaatacaactttattggcgactcttcacaaaaccttcaattcctacaaaaactgttaattcacatgagctcacaagtaaccatacacatagatcgatattcagcttctgcattggaccgagcgaccatagtctgtttcttgcgttttccaagaaaaagatttccttcaatgaagacaccatatcctgatgtagaccttctatccatgggacaaccaccccaatcagcatcacaatattccgatagttgtgtattaccc

SEQ ID NO: 8183 - DNA, 391 bp, Glycine max
  unsure (1)..(391): unsure at all n locations
nggtgacctttcacactatatccactcaaattcccattatctggaaagtcattaatggtgcaaaatatcatcgcatgcaacctaaaagtctcaccctgatttgcatcatacacatcaaccccgtctacctaaaacttacgcatgtcttcaatcaaaggagtaaggtacatatcaatatcgtttactggctgtcttggacgtgatatcatcatagacaacataatgtatttgcgcttcatgcataacgaaggaggaaggttgtaaatcattagcaacacacgccatgaaatgtgattagtggacaagttaccaaatggattcatgccatccgaagaaagaccaagtcgaaggtttcttggttcggctccaaattcaagatacaagtgatcaa

SEQ ID NO: 8184 - DNA, 463 bp, Glycine max
  unsure (1)..(463): unsure at all n locations
ggtcgcanatntaattacagaagcaggtgcaaatcgtgtacttgcttgtgacctccattctgggcagtccatgggctattttgatattccagttgatcatgtgtatggacaggtaacagatgattatgccatattgtcattacaatataatagcatggaagaaaaaaaacatttaatctattaaactcaaacaaacaaacatgccttggatatgttgtatatttgtaattgatagttactccaataatttgttaattcattgtattgatgcatctctagtttgaattgaaatgaagtgacaaccttctagtgacatgccaattttactgttagtaggtatataattatttaaatttccaatttctgttgtaaagaaacttcaaatctagtattgtttagatgtgctaaaatcttctattgttnttttttcctggttcagtcactcgtggactctaatgttttg

SEQ ID NO: 8185 - DNA, 345 bp, Glycine max
atgtgctattccaagttcattaatcataccttttagccagattgattccttcactccttcaactagggccatgtattctgctttagttggggacaagaccacaacctaattgttgatttgctttcaaactgattgttgtaccaaacaaagtaaacacatatcctgttaaggacttccttgtgtctacatttactacaaaatctgcatctacataacctgtgactgctgccttgtgtgctgtcttcttgtaccttaaaccagctttcaaagatccatttagataccttaatggccacttcacagccttctaatgtgcgctgtccggatcttccatgaatctactta

SEQ ID NO: 8186 - DNA, 359 bp, Glycine max
  unsure (1)..(359): unsure at all n locations
agcttatcctctagggatccctttatatgttcattttaatctccaagcgtgagtaactcatcccttacctctaagtgacctcgcgtgtgcagtttggcagtgatagcaacgtctctagctaagattcctcaagtttttcctctggttgttctgcttggttttccaagcattagagtgaaggagaatgaattanaacttcaatttcactgtctccttgcgaggggaatttctctttctactaatattatttcgaaaattccaattgagtgaatatgcgaaaatgagttccgaaggtggtatccaaatttcaggataatccaacggttaaggagtctatgatcgtagttttactacaatgg

SEQ ID NO: 8187 - DNA, 346 bp, Glycine max
gctgaaatgaacacgaagctctcaaaaaatctagtgggcctaaattttcacacaaatgtcccatatcgggaaataatatatcgagacccccgaaattgaacaaccggaacctctcgagaaatttgaatgggcataacatttcactcggatgttcgatccggggacataaattatcgagaccctccaaattgaacaaccgaaactctcgacaaattagaatggtcctaacttttcacgcgaatgtcgattcggggacataactcatctagagctcaaattgaacaaccgaagctttcgagaaatttgatggtcataagtttcacacggatgtccgattcgggaacat

SEQ ID NO: 8188 - DNA, 353 bp, Glycine max
agctgggatgtctactagttttgtcaggaatatatatatatatatatatatatatagcatgttgagagacaaatgtggggaaaagttatgctggttcttgaagaatccatgccatatggatgctacagagtgaaagggacttgttttagtgtagagagatgaagaaagttctacgttaatttggaatatgatttggtgtttggaaggagaaccgtaaaagagggtgcaagagttttccaacgtgttccagaggcttcatgtgttactttgtcaacatattggtcatattcatcggactacagcttttctctttaagtaatgttttgggcaatttcacactaagttgggattaa

SEQ ID NO: 8189 - DNA, 318 bp, Glycine max
tcagagatggttttgaagtttcttctgccatcttttgccacggtgacattaggtgtgggtttctcatttggaccgattaactcagcaaggccggcccaaacaggaactggaccaacccatgcaagaatggagcctgcagcccaaaaaagaactgggccaggaacaacaccaggagcaagagcagcacctgcagtattaggagaaacaccaggagcagaagcaacacctgtagtagtaggagcaacaccaggagcagaagcagaaccaaaagaagaagaaccagaaccaaatatagacccaaaaccagcaccaacagca

SEQ ID NO: 8190 - DNA, 332 bp, Glycine max
tctcgatatatgattcgcctgaatcgaactttcgtttcaaaatttatgaccatatgaatttctcgagactattcgttatacaaattcgagcgtctcgatttattatgtgcctcaatcggacctccgtgtaataagttatgaccatttgagtttctcgagaagcttcgctgttcaatttcaatcttctcgatatactatgcgcctgaatcggactcttgtgggaacagttatgaccatatgaatttctcgagagcattcggtggtcaattaaaagcgtctcgatattttatgcgccctaatcagaccttcgtgtcacaagttatgaccatttg

SEQ ID NO: 8191 - DNA, 350 bp, Glycine max
agcttctcgttatattatgtgtttgaatcggacttccgtttgaaaaattattaccatttgaatttctcgagagctttggctgttcagtttcgagtgtctcgatatattatgcgcctgaatcggacttttgtgtgacaagttatgaacatttgaatttctcgagacctttcggttttcaattaagatcgtctcgatatgtgatgcgccagaatcggacttccgtgtgacaagttttgaccattggaatttattcgagaccttccgatcttcaatttcgagggtctcgatatattatgtgcctgaatcggactttcgtgtgacaagttatgaacattggattttctcgagac

SEQ ID NO: 8192 - DNA, 384 bp, Glycine max
tcttagtttcagatgatgcagatgggtttgtatctacctcatgcactcctctaatgactatggcatcatttctggcgctaaactgctgggaattggaagccatcttctcaattaaatttctggcttcagcaagagtcatgtctccaaaggctccaccactggcagcatctatcatacttctctccatattactgagtccttcataaaaatgttggagaagaagctgttctgaaatctgatggtgagggcaactggcacatagtttcttaaatcgctcccagtactcatacaagctctctccactgagttgtctaatacctgagatatctttcctgatggctgtggtcctggaagcagggaaaaaattttctaagaatactctct

SEQ ID NO: 8193 - DNA, 342 bp, Glycine max
agcttaacattgtaccactttttggtgctggaactacttcacatggacttgatggggcctatgcaagttgaaagccttggaggaaaaaggtatgcctatgttgttgtggatgatttctccagatttacctgggtcaactttatcagagagaaatcagacacctttgaagtattcaaggagttgagtctaagacttcaaagagaaaaagactgtgtcatcaaaagaattaggaatgaccatggctgagagtttgaaaacagcagtttactgaattctgcacatttgaaagcattactcatgagttttttgcatccatttaaccacaataaaatgtgttttttg

SEQ ID NO: 8194 - DNA, 348 bp, Glycine max
agctttctggtgtacctgaagatgctattaggctcagcctgttttcattttctttatttggggaggccaagagatggttgcattcattcaagggcaacggtttaaagacttgggatgaagttgttgagaagtttctaaaaaaatatttcctatagtctaaaactgcatagcgaaaagctataatttcttcattccatcagtttcccgatgaatctttgagtgaggcattagaaagattttgtagcttgctgcggaaaactcccactcatggtttttcagagcctataaagctgaacatcttcattgatgggttatggccgcagtcaaagtatttactcgatgcttctg

SEQ ID NO: 8195 - DNA, 389 bp, Glycine max
ttggagtttccaagtgccaattcgtcttcttctttagtcctttcctcttctggcttcaattcatcagtgggctttccttctgtgtccagcatcttgggatgttcccagcctttgatgacagctttccaggttctgctatccagtgatttgaggaaggccaccatccttgctttccagtattcatagttggttccatccagaattggtggtctgttcactggtcctccttctttctccatgttcatcaaaatttatctccctaggtctcactcagtgatttcgagtgcccgctctgataccaattgaaattctgataccaatgccagatgtcgtacaggatgtcacgacatcacgcttcagaacatgcagaatatctctgagtgtatgaa

SEQ ID NO: 8196 - DNA, 366 bp, Glycine max
tctacagaaggtttgttcctaatttctctactcttgcctcacctcatcctactaagaggaaatgcaagcttagtcccagaggtgatggacctttttaggtcttggagatgatcaataacaatacatataggttggacctctcagaagagcttggagtcaacaccacttttaacatttctgatataatttccttttgtatgtggagctgatactaacgaggaggaaccaacagatttgaagtcaaatcctcttcaagggggaggcgatgatgcaattctacctacgaaaggaccaatcactaaagcaatgatctaaacgatctaaaatgattgggctaaactgctgaagagggccctaggtctcatg

SEQ ID NO: 8197 - DNA, 379 bp, Glycine max
  unsure (1)..(379): unsure at all n locations
ttacaaaaatagtttgagaaaaaccttaaaattccattttttccaacatgcaactaaaacattcaaagctttacaaagtccatactaatgtctacctaaggtgtaaatgggatgggtaaaggtgtgtatagcccatgaggcatcaccctaaacttggcttgtaaacaagccacacacatagtgcaatgcttatggacacttttcttcatatggggccaataaaacttttctttgagtaagacaagggtcttgtctatcccaaagtggcccatgagcccacccttatggctctctntcacaagtaatttcctaatggatcctttgggtatgcaaaactttccctctttgaacaaatacccctcagccaaataaaatcatc

SEQ ID NO: 8198 - DNA, 270 bp, Glycine max
tgcaatatatttgcaaccttttcgatgccatttaacgttatcaatggaccggaaacaacatcgcgtgttactaaattcctcatgtaaggccctgcatgatcccacaaatatcgcgcttcttatatccctctcctcttaaaaaatgaacctgctgacaaaaaaaatatttaagtatttttacccctttaatactatccttcccattggatagtaccagaaatctttattgaactcacgcaatttgacacaaaaagacactgtcattctcat

SEQ ID NO: 8199 - DNA, 343 bp, Glycine max
tgcatgatttacatctccccctttctcaagcttattcttcttgatatcatcaaaatcttcatgatcccgactcgttggtggaggatgcatgaatgacaatcaattcatggggctccgaataaaagtggataatggaggatatgcgaagagcgctaggcaatcaattcgcggttctcccgactcgttggtggaggatgaatgaatgacaatcaactcctggggctccgaataaaagtggaaaatggaggatacgagaatagcgctaggcaatcaattcgcggggctgcagactcgatggtggaggatgcaagaatgacaatcaacttatagggctacgaataaa

SEQ ID NO: 8200 - DNA, 360 bp, Glycine max
tgtcatttcatctccgctctttgtttagtggtatctgagcaaatcagccaacttggacctgttctgactatcctcgtggatacccaacttcaaattcttcgaaaaagcatcataaaacttgttgtaatcttccttgttctccgcaatttcattgaacatctcaatgcacttcttcacgagattcttcctgatcaccttcaggatcttgttttggtgcagcatctcacgaaagatgttgagcggcaagtcatcggagtcaacaacacctttcacaaatccaaggtactcaggaatgagctcctcacaattgtccattataaacacccttctgacataaagcttgatgttgatcatcttctt

SEQ ID NO: 8201 - DNA, 349 bp, Glycine max
cctgctagcatgcaagctctggagttttcaagtgccatattcgtcctcttctttagaccagtcttcttctggcttcaattcatcagtgggctttccttctgtgtccagcatcttgggatgttcccagcctttgatgacagctttccaggttctgctatccagtgatttgaggaaggccaccattcttgctttccagtattcatagttgcttccatcaaaaattggtggtctgttcactgagcctccttctttctccatgttcatcagaatttatctccccagatcttactctgtgatttcgagtgttggctctgataccaattgaaattctgataccaggggacagatg

SEQ ID NO: 8202 - DNA, 173 bp, Glycine max
  unsure (1)..(173): unsure at all n locations
ttcacacggaggtctgattcangcacatcatatatcgagactctcaaaattgaacaatggaagctctcgatatattaaaaattgtcataaactttcactcgaatggccccattcagggcccatcagatatcgagacgctcgaatttgaacaacggaacccctcgagaaattca

SEQ ID NO: 8203 - DNA, 297 bp, Glycine max
tcagctgatcattccctctttctctgtttcaatgataagtcatttactgcacttttggtgtatgttgatgatataattctaacagggaatgatataatggctatcaatcgtattaccatatttatggaccaaaccttcaagattaaagatcttggcactttaaaatttttccttggcatggaggttgctcgttcccagcaggcatccatctatgtcaaagaaatatggtctagatattctctctgattctggaatgcttgcttgccgtccagcttaacacctatggattggactact

SEQ ID NO: 8204 - DNA, 361 bp, Glycine max
tatacccatgagtattatttttatgatcctcataactgggagattgagaaacatagacttcctcttcaatgtattcttttaaaaaagcactcttcacatccatttggtacagtttaaaatccataatacaatcaaatgcaagcaataatctcacaacttctaatctagctattggagcataagtttcaccaaaatctatgtgctcttgttggttataaccttttgctactagccttgatttattcctagttatcaagccatgttcatctagcatatttttgaaaacccattttataccctataatatttggcttactaggcataaagtagtagttcccaaacttcatttcttttaaattga

SEQ ID NO: 8205 - DNA, 274 bp, Glycine max
  unsure (1)..(274): unsure at all n locations
ntgaactttcgtatccttctggactttagctttcattccaatcagtttattttggaaaatattcatttatttttaattaatttctaacatttttagatattacttattntaattaaaacttcctagttaagttcttggaaatgtatattacaagtgtatgtaaatcaataaattgatgacattatttcacctaatcattcatttcacattccaatttatatatgtaactgcatttgaatattaaaaactaataatttaatgatttataataatt

SEQ ID NO: 8206 - DNA, 355 bp, Glycine max
agctttgaatctccatacatggtttgcacatgtcgtgtgatgcaatcctaccacgcaagggcattggatagaagactccaagtagattgggctagagatgcaagagaaggccctaaggttctcatgagccttagggcagatttcgggcctatgggctaagtatgagcccacttatcttagtacatattagattaaggtttcattattttttgggccttgtatttagggctccataatgtaggtaaggtaccctagaaatgtaggatttttcaaccattgtattttagggcacctagactagtttttgtattaggggtagttttataatttcatatgcattaagtgaatatttgat

SEQ ID NO: 8207 - DNA, 286 bp, Glycine max
tcaacatcagaccactttcagtgtgctggaactacatcacatggatttgatggggcctatgcaggttgaaagccttggaggaaagaggtatgcctatgttggtgtggatgatttctccagatatacctgggtcaactttatcagagagaaatcagacacctctgctactgtcaagcacttccacatctttggaagtccatgttacattttggcagatagagagcaaaggagaaagaaggatcccaagagtgatgcacgaatattcatgggatactcttcaaacagc

SEQ ID NO: 8208 - DNA, 351 bp, Glycine max
agctttgagcttattcaaccgactataaccttttactcggatgtctgattgagtcccgtaatatatagagaagctcgaaattgaatgttgaacctctgatccaattcaaaggacaataactttttactcggatgtctgattgagttccgtcatatatcgagacgctcgaacttgaatgttgaagctctgagcaaattcaaacgacaataaatttttactcggatgtccgattcagtgacgtaatatatcgagacgctcaaaattgaatgttgaacctatgagccaattcaaacgacaataactttttactcggatgtctgattgagttccgtcatatatcgagacgctcga

SEQ ID NO: 8209 - DNA, 364 bp, Glycine max
  unsure (1)..(364): unsure at all n locations
ctaagctggttggttaaccaaactttagcaatataaaaagtttatgttacacgggactgaagtgtcccaaattgcaaactgataaaagacaagaaattttgtttgcaggtacttactccttcgtactccctccaaggaagcttccccatgaacatttctataattgtacaacccaaactccaaatatcaacaacaaaagcaaggtcaaagctgttatctttttgcacaaccgcttgaaaaagctacatgtatgtggaataagtgtttatagagaatgcatgagacatcatgaagtaaaatagagttataaacttagggtgctcanggttttggtgaagccaatttttggtgtctgtgccaacta

SEQ ID NO: 8210 - DNA, 350 bp, Glycine max
agcttgtgtggctctatccatatttgaagcagagtatatcgctgctggtggttgttgtgctcatatcttttggatgaaacaacaactagaagattttggtatcttccttgatcacattcctttgatatgtgacaacacaagtgcaataaacttgaccaaaaatcttgtcatgcattctagaactaagcctataaaaataagacatcatttcattagatatcatgtgcttaaaggagattgtgttatagtatttgtagatacaaccaaccaactagttgacatctttacaaaacccttgtctagggatagatttataaaataggacatcatttcattatatatcatgtgct

SEQ ID NO: 8211 - DNA, 344 bp, Glycine max
  unsure (1)..(344): unsure at all n locations
ttggagtttccaagtgccaattcgtcttcttctttagtccagtcttcttctggcttcaattcatcagtgggctttccttctgtgtccagcatcttgggatgttcccagcctttgatgacagctntccaggttctgctatccagtgatttgaggaaggccaccatccttgctttccagtattcatagttggttccatctaagattggtggtctgttcactggtcctccttctttctccatgttcatcagaatttatctccctagatctcactctgtgatttcgaatgttggctctgataccaaatgaaattctgataccaggggacagatgtcgtacccgatgtc

SEQ ID NO: 8212 - DNA, 286 bp, Glycine max
tgagcacctcttttcttacctcttccttcattgttgggtttatccgcctctgaggttgtcggactggcctgtaatcgtcttccatcattatcctgtgcatgcagtaagcagggctgattcccttgagattcgatatgttccatccaattacttccttgtgtttcttcagaatgtctaccaacttgttctcttcttctctcgcaagtgcatggctgattactacagttttagtgtcatcttcctctaggaacacatacttcagatgattgggcaatatcttcaactc

SEQ ID NO: 8213 - DNA, 355 bp, Glycine max
agcttcttgttgttactatgatttttcaatatttcttccctccctctttcatctggtaatccaacagtgacctattggaacaattacaaattgtcatgtcttataattttgttgaatttttagtaactactaactagcttaaaagtcatacctaccaactgattgatcgatcgtgcaaaaagttttatactactagcatattataataaaattcattgtcttatacgttaaaatttgtttatttttatagtaattactttaaaagctatatttataataaattctgatgggttaatgatttacaatagcaatgcatggaaattaaactgataaataataattatataggcattaa

SEQ ID NO: 8214 - DNA, 356 bp, Glycine max
agcttgtccaatgctttcccatattaacctttctgatgtcgcacataagacggagtcaccccgtaaaaaaccggccaaaccaagcgacccttcttcattatgcactcaaggatcatgacaagctcttcaagacagtaagttgaggaagcatagttttcagagaaaacaacaatggcaattcttgactgctgaattgccttgaaaagagcatgtctaatctcttcccctcttctgagcccctcatcatccatgaaggtgtggattccctggtcacaaagagacttgtaaaggcttccagtgaaaccacttcgagtatcatcgcctctgaaactgaggaacacatcataagtccactc

SEQ ID NO: 8215 - DNA, 350 bp, Glycine max
agcttgtgtttttctcacagatttgacatgcatgatgccctttcacactgtatccacttaaatttccatatgctggaaaatcattaatagtacaaaacaccattgtgcgtaacctgaacgtctgctgcacatttgcatcccacacatctaccccttcttcccacaattgtttcaagtcttcgattaatggcgtaagatacacatcaatatcattccctggctgccttggacccgcgatcatcatacacaagataatgtatttacgcaaaatgcacaaccatgggggaaggttgtaaatcatcagtaaaacaggccacgaactgtggttgctgcttaagctaccataagga

SEQ ID NO: 8216 - DNA, 321 bp, Glycine max
tcttagtttcagatgatgcagatgggtttgtttctacctcatgcactcctctaatgactatggcatcatttctggcgctaaactgctgggagttggaagccatcttctcaattaaatttctggcttcagcaagagtcatgtctccaagggctccaccactggcagcatctatcatacttctctccatattacagagtccttcataaaaatattggagaagaagctattctgaaatctgatggtgggggcaactggcacatagtctcttaaatctctcccagtactcatacaagctctcttcactaagttgtctaatacctg

SEQ ID NO: 8217 - DNA, 361 bp, Glycine max
agcttgcatagatgttttcatttgtttggcaccttccatcttgaacttctttagaagttctttagtatattttggttgttgattatatacacctatgttgtcttacttgatctaaaaccccataaagaacttaagttctcctatcatgctcatttcaaactcacttttcattagttaagagaaatccttgctcatagattcattagtagctccaaagataatatcatctacacaaatttgaactatgatgaaattctttccaacttctctcttaaaaagagttatattcatgaggtgcctattcagaccatacataacctttttcagtttaaaaacatggtctagaagggtgtgtcttcaa

SEQ ID NO: 8218 - DNA, 355 bp, Glycine max
  unsure (1)..(355): unsure at all n locations
tgccttgccccttgatatatttgagggactcatggtcactatgaatgacaaattccttgggataaaggtagtgttgccatgttttcaaagcccgtactaaggcatacaactccttatcataagttgaatagttaagggtaagaccacttaacttttcactaaaataagcaattggatggccttcttgcatcaacacagccccaatcccaacatttgaagcatcacactcaatttcaaaagatttttgaaagtttggcaacgcaagtatgggggcattagttagcttttgcttaagaacattganagcttcttcttgtttctctccccatttgaaaccaacatttttcttgagcac

SEQ ID NO: 8219 - DNA, 270 bp, Glycine max
agctttatgcaagtcaattttatgtggcatctcagagaggatctttttcgggcatatttgcgcaaaatctcttgaactaggaagatgctgtccatcatctttctgttcttaatgaaagcagtttgagtttccccaataatagtctcaagcaactggggctatgcggttggccagaattttagacacaatcttgtataacaaattacaacaagatatgggtctaaaatggttaacctaggaggtctgatcatgcttaagaataagcgccat

SEQ ID NO: 8220 - DNA, 263 bp, Glycine max
agtatggagatacttgcactatatagggctccaatatgaatttctgactgcaagatgaaaatgggatgttataatttgcaccttttcatttaatcattttactttttgcagattatcgcagagagcttatctgaagaagaaatagctggcttaaaagaaatgttcaagatgatagatgcagacaacagtggtcaaatcactttagaagaactttaaactgtgttgaaaagagtggctgcttatcttaaggagtctgaaatttt

SEQ ID NO: 8221 - DNA, 224 bp, Glycine max
  unsure (1)..(224): unsure at all n locations
cctgcatgcatgcaagcttatgtccgcagagggatacttcntatagaagcagctgaatcattttcttcctacaactcgtcaaaacttgatgtttttaagcaacatttcctgttactggaaaagatttcaaggataggtatcttcgaaaaccttatgtattcgtggaagagagacagaaagtccactgtctaaatactcttttttctaacggttgccttttcttt

SEQ ID NO: 8222 - DNA, 366 bp, Glycine max
  unsure (1)..(366): unsure at all n locations
agcttctctatatgngangcttattttcggncatccgaganaaaanggaggaccatttgattttctcaagcggtttcttttctcaatttcgagcgtctcgatatattatgcacctgaatctgacctccgagagaaaagttatgaccattcgaattgctcaagagcttccattgttcaatttcgagcgtggcgatatattatgcgcctgaatcggacctccgagttaaaagttatgaccttcgaatttctcgatagcttccggttttaaatttcgatcgtctcgacatattatgcgcccgaatcggccatccgtgagaaaaggtatgaccatttgaatttctcgaggcctctcggtattcaatttcg

SEQ ID NO: 8223 - DNA, 369 bp, Glycine max
  unsure (1)..(369): unsure at all n locations
agcttgtaacaaatctttacacttggtttgatacatgcagnccttctggacccttacccgccacttcggcgtcatggggagactcaagaagcccaacaggtttaaccttttgaatgtagtctgaacaaaattcaatggcttattctgcaatgtacctttcaacaatagatgcttccggacgatgtaaattctttgtatacccttttaagatcttcatgtatcgctcaaccgggtacatccaccacaaataaacaggaccacaacatttgatttctctgaccagatgaacaattaagtgaatcatgatgtcaaagaaagcaggaggaaaatacatctccaaatggcatagtataattgcggcctcatttt

SEQ ID NO: 8224 - DNA, 218 bp, Glycine max
  unsure (1)..(218): unsure at all n locations
tccggcgcaaaaggnatgaccatatgaatttctccaccggattccgggggacaaggtatgaccatttgaatttctcggtagcaaccgttgttcaaaatccagcggctcgacaaaatatgcgcccgaagcggaccaccgggggacaaggtatgaccatttgaagttgtcgagagcatccggccgtagatttcgagccgctcgatatattatgcgccccg

SEQ ID NO: 8225 - DNA, 266 bp, Glycine max
agcttcccgccaatggtattttaagtttatatgataccattgtttcctttggatttaaggaaaatactgttgatcagtgcatatatccgaagattagtgggagtaaggttatttttctaatcctgtatgtttatgatatattgctgcaattaatgatcttggtcttctccatgagactaagaaatttctctctagcaactttgaggtgaaagatatgggagaggtaagctatgcgatagggatagaaatattctgtaatagatcac

SEQ ID NO: 8226 - DNA, 320 bp, Glycine max
agcttataatatattgatatttctaatattaaacattggaagctctcgagaaattcaaatggtcataacttttcacacggatgtccgattcgggcaaataacatatcgagacgctcataactaaacaacggaagctatagagaaattctaatggtcaaaacttttcacacggatggccgattcaagcgaattacatatcgagaggctcaaaattgaacaacagaagctttcgagaaattcaaatggtcataacatttaactcgaatgtccaatttaggcgcattacatatagtgacactcgaaattgacaacggaagctc

SEQ ID NO: 8227 - DNA, 370 bp, Glycine max
  unsure (1)..(370): unsure at all n locations
agcttgaaggcaaactggattttttgttaacttnggaaccaagctggccttgaatcagaaatttgtacctgtcgcaagggtttggggtttgtgcttctctgctgaccaccatacagacctttgcccttccatgcagcaacctggagcaattgagcagcctgaagcttatgctgcaaatatttacaatagacctcctcaacctcagcagcaaaatcaaccacaacaaaacaattatgacctctccagcaacagatacaaccctggatggaggaatcaccctaatctcagatggtccagccctcagcaacaacaacagcagcctactccttccttccaaaatgttgttggcccaagcagaccatacattcct

SEQ ID NO: 8228 - DNA, 398 bp, Glycine max
  unsure (1)..(398): unsure at all n locations
acgccgggatcttaagcacctgcagcatgcaagcttgagcaaatcaactagtaactttatatncggatgggcgaaagagncccggaatatatcgagaggctccaaattgaaaacggaagctcatatcaaattcaaaggacaataactttttactcggatgtccaatagagtcccgtaatatatcgaaacactccaaattgaaaatggaagctcgtatcaaattcaaacgacaataactttttactcagatctccaatagagtcccgtaatatatcacgacgctccaaattgaaattggaagctcgtatcaaattcaaacgacatttacttttaacttggatgtcccgatgagacccgtaatatatcgccacgctccaaattgaaagcagaagctctaa

SEQ ID NO: 8229 - DNA, 340 bp, Glycine max
  unsure (1)..(340): unsure at all n locations
agcttcacataggcaagngntnncttcttaattccaaatcatagatatgtcataaattgattttgcaggtcatttcccatcaaatcaaggataatatgcataatcatcatggatcaataagactttctaaagtcagacttcgtaggaaattggttttggttgctctggcctttcccctctctcttaccctttgttttgtgaagaataggagagtacacccaaagatttggttagtaacttaaatgggcgatcacttcctatcccttcatgtcttaaccaagttactattacccccctcctttttctccttttgacaactctgtacatggaacaccccttg

SEQ ID NO: 8230 - DNA, 367 bp, Glycine max
  unsure (1)..(367): unsure at all n locations
agctagaagcgattcacattattgtaatcgannaccagagcagaggngcagaaaatattatcaanagccacatctttttatgtgggtcttgaatggctatcaaaagcctatataaatgtgactcgagacacgaatttgctaagagttctttagaacaaaaaggtcttatcctcttaaaaagtaaaatcattttatcctcttacaaattccttggccaaattacttgtgattcaataaggaattatttaaattctcaaattgttcaatctatctctttcaagagagatttcttcttttcttcttcttcattctgaaaagggattaagagaccgatggtctcttattgtgaaagaattctaaacacaaa

SEQ ID NO: 8231 - DNA, 358 bp, Glycine max
  unsure (1)..(358): unsure at all n locations
agcttgaatccctctataagtacttatttgggagcttgntgagaaaccaactgatcaaaagattgttggttgcaagtggaaattcaagaagaaagatggtgatttgaagttgaagacaacctttctccatggtggtttggaggaaagaatttatatgcaacaatcagaggcgtttgatgtaccaggaaaataagaccatgtgcgtctataaaagaagtctttgtatggcttgaagtagtcacctaggcaatggtataaacgatttgacttgtttacgattgatattgggtattaagaagtgagtatgatagttgtgtttataataagaaattgccccaagattcttatatttacttgc

SEQ ID NO: 8232 - DNA, 365 bp, Glycine max
agcttcaagaataatggccttggcttacttcttattcccataaggaaattcaataaataggcctcctatttttaatggagaaggttaccactactgggaaacccgaatgcaaatcttcattgaggcaatagacttaaacatttgggaagccataaaagtaggaccttatgtacccaccatggtggctggaaatgcaacaatagaaaaacctagagaagagtggactaaagatgaaagaatattagtgcagtacaatttaaaggctaaaaacatcattacttctaccctaggaatggatgaatactttagggtttcacattgtaagaatgataaggatatgtgggacactctacaagttacacatg

SEQ ID NO: 8233 - DNA, 366 bp, Glycine max
  unsure (1)..(366): unsure at all n locations
agcttgttatcgattacacacattttattatctattaccagaggagattttcagaaaatattgtcaacagtcacatcttttcatttggntcttgaatggccatcaaaggcctatatatatgtgacttgagacacgaatttgctaagagttttcataacaaaaaaggtcttatcttcttaaaaagcaaaatcgttttatcctcttacaaattccttgtccaaaacacttgtgattcaataaggaattatttgagtgcttaaattgttcaatctatctctttcaagagatatttcttcttctcttcttctttattctgaaaagggattaagagactgagggtctcttgttgtaaataaatcttaacac

SEQ ID NO: 8234 - DNA, 370 bp, Glycine max
  unsure (1)..(370): unsure at all n locations
tagcttgtgaaatcaanggaattcatgattccgnnngacacaagncgntcaattctattcttagaaatgtgacctaagcgtttgtgccataatgctcctgagtttgtattatcaattctacccttagtaccacgcaattctgcattaaaggattcaccataggagaatacagtatcaagtaaatatagattatcattaaccaagagtgaaccggttccaacaatatctgaattaaaagacaacctgaacacattgtttccaaatgaatacaaataacccaatttatccaaataagaaactgaaaccaaatttcgtctaaatgacggtacaataaaagtgtctttcaaatccaaataaaaaccagtactaa

SEQ ID NO: 8235 - DNA, 373 bp, Glycine max
  unsure (1)..(373): unsure at all n locations
agcttcaagaataatggcctttcttatcttttatttccagaaagaaattcaatcaatagacctccaatctttaatggagagggttaccactactggaaaacccgaatgcaaatttttattgaggcaatagacttaaatatttgggaagccatagaaatagggccttatatacccaccacagtagaaagaaccacaatagatgggagcacaacaagtggaagcacaacaatagaaaaacctagagatagatggtctaaagaggatagaagacgtgtacaatataatttaaaagccaaaaacataattacatctgccctgngaatggatgaatatttcagggtttcaaattgtaagagtgctacggaaatgtggg

SEQ ID NO: 8236 - DNA, 358 bp, Glycine max
  unsure (1)..(358): unsure at all n locations
agcttgtaattgattacactaagtctgtaatcgattaccagagcagattttcagaaaatattctcaacagtcacatctttttatgtggntcttgaatggctatcaaaggcctatatatatgtgacttgagacacgaatttgctaagagtttttcagaacaaaaaggtcttatcctcttataaagcaaaatcgttttatcctcttacaaattccttggccaaattacttgtgattcaataaggaattatttgagtgctcaaattgttcaatctatctctttcaagagagatttcttcttttcttcttcttcattctgaaaagggattaagagaccgagggtctcttgttgtgaaagaat

SEQ ID NO: 8237 - DNA, 296 bp, Glycine max
  unsure (1)..(296): unsure at all n locations
aggatttccttttagtagggaatctatccttcctaagatggcgccaaacccagtcaccctcgttaagaactagctcttttcttcctctattgcctttagtttaatacacctttgtttggttctctatttggctcttaaccctcttatgcaacttctttacaaactcttacctagattccccttncttatgtataaaaaaagttgtctatgggaaaggaattaagtcttaccgtggttggggattgtacccatttacaacctcaaaaggggagtgtttggtggatttttaaaccccc

SEQ ID NO: 8238 - DNA, 372 bp, Glycine max
agcttactgggcagtgaagacttgcttcttctctatggatcaagctggtgaggaaagaaagttgcaactgagtgagttagatgaaatccgcctagaagcctacgagaacgccaagttctacaaagaaaagaccaagaagttccatgatagcatgatagttaaaaaagacttcgtggttgggcaaaaagtgttattgtataattctaggcttggactcatgagtggtaagttgagggctaagtggattggtccttttgttgttactaatgtttttccttatggggacagtgagatcaaaagcgactccacaaacaagagcttcaaggtcaacagacatcgacttaagccattcctcacgaacccttctttagt

SEQ ID NO: 8239 - DNA, 258 bp, Glycine max
tctccacgattcttgagtacgcgttctcgtgccgcttttcgttcgctgcgatggtcccgcataggcgcgccagcactggatccccgccctccttcgcgagccgagccgtgttcccgtgcgccacaaatgttgctcgctcttggaatgacgtgtacacaaaccccaaatatgggttgttgtctgcccaagggtcctccccaatttagtctaaccaaaatccattattccaattccattttaaaagaaaaaaatcttctt

SEQ ID NO: 8240 - DNA, 306 bp, Glycine max
  unsure (1)..(306): unsure at all n locations
gcttcatgtccaaaagatattatattttagggtctgaanattccctgtttttcttcgcacttacaatctcaagtaaaatcactccatagctaaagacatctgatttcacagagaattgcccactcacagcatacccaggaggcatataaccactgaagaaattttatagtaagataatcaaaagttgaaagagtaatataaaaaaatcaaaattggatagaaactaactaagttccggccactgtatttgtgtttgcctcaacttgatctcccaagaaagatcgagcaaggccaaagtctgatatt

SEQ ID NO: 8241 - DNA, 253 bp, Glycine max
tgtgtggaggaacacgctacataatgagagagccagacatgaacagcccatggttgatacatggactgagatgaaaaagatcatgacgaagcggcatgtgccggctagctactcaatggacttgaaattcaagctccaaaaactaacccacagcaacaagggggctgaggagtatttcaaggaaatggatgtgctcatgattcaagctaatattgaataagatgaggaggtgactatggctcgagttcttaat

SEQ ID NO: 8242 - DNA, 329 bp, Glycine max
ttctccactaagttgcctgatgcctgaattttcttttctgatggtattggtcctagatgcagggtagaatttctccaagaacaccattttaaggtcatcccatctgacaatggacctgtgagcaatattatatccaatcttgtgccactccctccaaagaatgaggaaaagcctttaaaaagatatgatcttcttggacatgagggggctttatggtggaacaaacaatatggaactccttaagatgcttatgaggatcttcacctgctaaaccatgaaactggggcaacaaatgttttagttcagtcttgagaacatatggaacaccc

SEQ ID NO: 8243 - DNA, 405 bp, Glycine max
  unsure (1)..(405): unsure at all n locations
gcttcaacattcaacttcgagcgtctcttatattatacgactcaattagacatccgagtataaagttattgtcgggtgaattntctcagaacttcaacattcaatttcgagcgtctcaatatatgacgggactcaatcagacatccgagtaaaaagatattgtcgtcttaattggctcagagcttctacattcaatttcgagcgtctcgatatatgacgggactcaatcacgcatccgagtaaaaagttattgtcgtttgagttggctcagagcttcaacattcaatttcgagcgtctcgatatatgacgggactcaatcaggcatccgagtaaaaagttattgtccgttgaattggctgagagcttcaacattcaatttcgagcgtctcgatatatgacgggac

SEQ ID NO: 8244 - DNA, 229 bp, Glycine max
agcttaagctccttcaactgcacaaggctcttaatatttgaagagtatccttgcggaaccttcacccgatgaagacactgacaaaaacttatctttgccttcttggacaaacgatggcaggctgcgggcaatgaaatctttttcccatcaaaccttggatgcaactgcgatcgtatacccatatcagctagatcttgatgggtattcaagccatccttcgtcttgcctt

SEQ ID NO: 8245 - DNA, 344 bp, Glycine max
acactctcgaacactcaagcttcgcaagccagcttccatcaaatctcaactcatctaatatcctatacaaagggtccgtaggagtagaaccctcaccattaacactagatgaagaacgaagactcatgttggttcttaagttgtggttctttcttgttgggggtttgaaaacaaaaggtaaaagaaactacggttgaaactagccaaaataaacactaaaagaggtgtgaaagataaggtaaaaactaattggtaaaaagcaagttatctaggtggtttgacaatggaagataaaggaaatttaaagcaagctagatagtttcctatgtgaaggcttagatgac

SEQ ID NO: 8246 - DNA, 234 bp, Glycine max
  unsure (1)..(234): unsure at all n locations
tgtaaggttaaagtctcacgattgtcacgttctgatgcaacaattgttagtcgtggctatacgagacatcttgccaaacaaagtcaggttagcgataactcgcctgtgctttttcttccatgctatatgtagcaaagtcattgatcctgtcaagtttgatgagtnggaaaatgaggccacaattttactgtgctagttggagatgtattttccccctgcttttttgacatcatg

SEQ ID NO: 8247 - DNA, 388 bp, Glycine max
  unsure (1)..(388): unsure at all n locations
gcttgttacttcactagcttcttaccatctttcttaagcttgaacacccacttattcttcaaggcttttctgccttcggaaactttcacaagcttataagtatcattcttctggaaggaatctatcttttcttacatcactttccttcaatagaatttatccttatgaatttcaacttttgcaaaacttcctggctttccttcattgatgatgaagatgtactccaaaccatggtaccttctagatgactggtgctctctatttgatcttctgaacagcaactggctttcttgctcaacaccttcatcatcaccatactttatagctagctcatcatcaaccctaaagtcattatcaagatctaccncttctatggcaattcttctag

SEQ ID NO: 8248 - DNA, 299 bp, Glycine max
  unsure (1)..(299): unsure at all n locations
atacctctctaatagcttaacttaccccatgacgaaaaacatgaaaattccaaaaaaaaagtccttactacaaagactactcaatagaatggccaaaatacaatgcccagacgaaagacaaacctattctaatatttacaaagataatcgggctcatacttaacccatgggcttgaaaactaccctaaggctcatgagaaccctcaggccttcccttggatctctagcccaatctacttggagtcttctacccaatgcccttgcggggtatgatngcatcacaagtgaaatgttatgac

SEQ ID NO: 8249 - DNA, 304 bp, Glycine max
ggactagatggggcctatgcaagttgaaagccttggaagaaacatgtatgcctatgttgctgtggatgatttctctagatctacctgggtcaactttatcagagaaaaatcagacacctttgaagtattcaaggaggtgagtctaagacttcaaagagaaaaagactgtgtcatcaagagaatcatgagtgaccatggcagagaatttgaaaacagcaggttcactgaattctgcacatctgaaggcatcactcatgagttctctgcagcattacaccacaacagaatggcatagttgagagga

SEQ ID NO: 8250 - DNA, 335 bp, Glycine max
agaagatcaacgacaatgcctacaagattgacttgcctagtgagtataatgtaagtgccactttcaatgtgtctgatctatctctttttgatgcagatggaggagccttggatttgaggacaaatccttttcaagaaggagggagtgatgatgacataaccaagggcaaggaccatgaagcacttgaaggtcccatgaccagaggcagacttaaacaagcccaacacgtcatagagacaaggctggtcatttgtatagctgccattgatgatgattgaaggcccaagtggagaaagatgaaggcccagaggcagaggcactaccaagactactaa

SEQ ID NO: 8251 - DNA, 329 bp, Glycine max
  unsure (1)..(329): unsure at all n locations
agcttgaatcggacatccgtgtgttaagttatgaccatncgaatttctcaagagcttccgtagttcaatttcgagcttctcgacatattatgcgcccgaatcggacatccgtgtgaaaagttatgaccatttgaatatctcgagagccttcgatgtttaatttccagctgatcgatatattataagcctgaattgcacatccgtgtgaaaaggtatgaccatttgaatttgcgagaggttccgatgtttaatttcgagcgtatcgatatattatacgcctgaatcggacatccgtgtgaaaagctatgaccaattgaatttctcaagag

SEQ ID NO: 8252 - DNA, 382 bp, Glycine max
agcttaagctccttcaactgcatattgttcttaatattttatgagtatccccgtggaaccttcacccgacaaagacactgacaaaaacttatcttttcctttttggacaaagtatgacaagctgggggcaagtaaattttcttcccatcagaccttggatgcaactgtgatcatatccctatctcagctagatcttgacgggtattcaagccatcattcgtcttgccttgaatgtaaaggagcgtcccaatcacactgtcacatacatttttctccacatgcataacatcaatacaatgtctaacgtctagatcagaccacgacacaagaacaaagaaaatggacctctttttcatatgcaagcttactttatccttctttg

SEQ ID NO: 8253 - DNA, 194 bp, Glycine max
ttctcgagagctgactatgtgtaatttggagcgtctcgatatattatacgcctgaatcgaacctcagtgtaagaagttatgaccatttgaatttctccagagcgtgcgttggtcatattcgagcgtctctatatgtgatgcacctggatcggacctgcgcgtgaaaagatatgaccatttgaatatctcgagag

SEQ ID NO: 8254 - DNA, 374 bp, Glycine max
agcttattataaaaagaaagttatgttagggaagacaaggaagataaaagcactacttgaaccattgtgtcattaaatacgacacttcctgaggatgtttctgatagaatctttctcttgaaagtttcatctttggtgaaggcataaatggcaagaggttttggctttgcattgataaactcaatactttcctgaattttatccaactgcacagattgcaagtgcaacaagagttgaatgagacaatgcacaatatatgtgagaattgaaaacataaaatgggactgttgattctcactgtgattataggaagcagtgggccgaatatctcttctgccattatctcagaatctagtggaggatctaacaaaatt

SEQ ID NO: 8255 - DNA, 383 bp, Glycine max
  unsure (1)..(383): unsure at all n locations
agcttttgcactgtgaaaaataatttatctacttaaaactttgacaacaaaaacaaatcataattagacagaaagaaatgggaaaaaaatatataaaaatggaacctttaataattaaatgttaatgttaattaattgacaatgattacgacaaaaataaatacaaaatttaagctgatttgaataatatggtaaaattgatagtgtaatatttggaaaaaaaccctttccattaataggtacttgccaattaatatttgcccattatatttttccaataaaaaataataaactctccaatctttcttttctcactttaatccacgngtaanttcattaattattattttattttgctcaatgcttacaccttcctcacatgc

SEQ ID NO: 8256 - DNA, 353 bp, Glycine max
agctattacctcagtgtgttccagctccagtggtccgatcgttaccaccagtgactcgacggccaacaaaaacctgtccaaagccacctttgcccagtttcctctctactttgtagacaggtgatcctcctacttgaaccttttattaacatatcaacaataagcaccttgacaatatcaacaaaagaattgagtaataattaaaagaaaagaataccctctccggaaaaggagctgcgttggtgtcatcttcttgagcaacgcccttgtttgcactcaagccaccactctcgtcggccatggcggcagcgtcgtctttcttagtgtgatcggatattattataaggggattc

SEQ ID NO: 8257 - DNA, 363 bp, Glycine max
  unsure (1)..(363): unsure at all n locations
agctttttagggcatgctatgttctacaggtggtttataaaagacttctcaaagatttccaaaccattcaacaatttgctcaacaaggacgcggtatttttattcgatgaagagtgtttgaaggcattcaacaccttaaagaccagtttagtgtccgctgccgtaattatagagccagattgaggtcgagaatttgagttgatgtgtgatgcaagtgattatgctatgggtgctgtattgggccaaaggaaaagcagagtcttccatgctatttactatgccaacaaagttntaaatgatgctcagattaattatgctaccacagagaaggaaatgcttgcgattgtctatttactagaaaaa

SEQ ID NO: 8258 - DNA, 237 bp, Glycine max
  unsure (1)..(237): unsure at all n locations
tatgaggtcatttcttcattcagctntgaagagaatgtcatagatcactgtatataccacaaggtcagtgggagtaagaatttgttccttgtattatgcgtagatgatattctgcttgtgactaatgataaaggtatgctatatgaggtgaaacaatttctctcaaagaactttgatataaaggatatgggagaggcatcatatgtcatacgcataaagatccatagagaaagatct

SEQ ID NO: 8259 - DNA, 339 bp, Glycine max
  unsure (1)..(339): unsure at all n locations
agctttcaagatattctttggccataactcttctcacggatgtctgattttgggacataatatatcgagaagctcaaaattgaacaacggaaactctcgagaaattcaaatggtcatgactttttattcggaagtccgattcagggacataactcatctagacgctcaaaattaaccaacaaaagctctcgagaaattccaatggttatcactttntactcgattcggggacataatatatcgagacgcttcgaaatgaacaacagaatctctctaaaaattcctatggtcataacttttcacacggatgtctgatttgtggacataatatatcgagac

SEQ ID NO: 8260 - DNA, 376 bp, Glycine max
  unsure (1)..(376): unsure at all n locations
ctttgactcggatgtccgattgagtcatttttataattgagacgctcaacattgaatgcaggagctcttaccaaattcaaatgccaataacttnttactcggatgtccgatngagtcccgtaatatatctagatgctcaaaattgataacagaagctctgagcaaattcaaacgaacatagctnttgactctgatatcctgatgagtcatttaataattcgagacgctcaaaattgaatacagaagctcttagcanattcaaatgacaataactttngactcgaatggtccgatgagtcatgttataatttgagacgcttcaaattgaatgcagaagctctaagcaattcaactacaataactttgactcgatgtc

SEQ ID NO: 8261 - DNA, 377 bp, Glycine max
agcttgaaggtgtgtattccgctatttttcataatagaacactggtaatgtgtctattatcattcttatcatttctttctctgtcattgagggaaccacttgagctgccaggtctctccacctttgggcgtattctttgaaagatttgtgcccctttttgcacatgttctgtagttgcatcctatccggagccatatcaaaattgtactgatactgcctaacgaaggcaaccattaggtccttccaagaatgaactcgggaaggttccaagttagcataccaggtaatagctaccccaatgagactttcttggaagacatgtatcagcagttccttatcttttgcgtatgcccccatcttccgacaatacatcttta

SEQ ID NO: 8262 - DNA, 307 bp, Glycine max
  unsure (1)..(307): unsure at all n locations
acctcctcctctaaataaccattaagaaagactggtttcacatccatttgttgcaactcaaggtcaaaataagcaactaatgccaagataatacaaagagaatctttcatagatacaggagaaaaagtctntgtgtagtcgattccttctttntgagtaaatccctttgcaacgagtcttgcctggtatctctcaatgttggctaatggaatccctttggtcttaaaaacccatttacagccaagggccttngccctattatgaaactcgacaggggtccaaactccgtactctgcatgggacttca

SEQ ID NO: 8263 - DNA, 378 bp, Glycine max
agctttgatgcaacatttggagatgtttatgaaacaacgagatgatgcgctccatgagaggttggatcaaatggagaatagagatcataatgaaaaagaaaggaggagaagagggaatgatggtgttcctaaaaaaaatcgaattgatggtattaaactcaacattcctccctttaaaggaaagaatgatccagaggcctacttggagtgggagatgaaaatagagcatgttttctcatgcaacaactatgaggaggaccaaaatgtgaagcttgccaccacggagtttttcgactatgctcttgtgtggtggaacaagctacaaaaagagagagcatgaaatgaagagccaatggttgatacatgggcggagatgaa

SEQ ID NO: 8264 - DNA, 396 bp, Glycine max
  unsure (1)..(396): unsure at all n locations
actcggatgaactgatgagtctcgtcatatatcgagacgctcgannatgaatgttgatgctctgagcaaattcaaacgacaataactatttactcggatgtntgattgagtcccgtaatatatcgagacgctcgaaattgaatgttgatgctctgagcaaattcaaacgacaataactntntactcggatgtctgattgagtcccgtcacatatcgagatgctcgaaattgaatgttgaagctctcagccacttcaaacgacaacaacattttactcggatgtctgattgagtcccgtaacatatcgagacgctcgaaattgaatgttgaagctctcagccaattcangcgacaatacacttttactcggatgcctgattgagtcccgtcatatat

SEQ ID NO: 8265 - DNA, 383 bp, Glycine max
agcttagtaaagctaggcactaactatctccctctttggcaaattttgtctaaaacatacttagacacttcctgagcaggtacgagcagttatgcaagtgggatcagcaactttcattatcagagtaatcaagcacagcggaaattctgcaagttgcaagtcgtttccaggatgtcaagacatctcacatgacatcagctttctgcttctgctccccctgtctccatgctcttactgcagcatcttctatcagctactagtcttttccaggatgtcaagacatctcatgtgacatcagctttcccttgtctccatgctcttactgcagcatcttctatcagctactagtagcttacatcagtcatcatcagcagcagcagtct

SEQ ID NO: 8266 - DNA, 289 bp, Glycine max
  unsure (1)..(289): unsure at all n locations
ccgctccagtgctagtnttgcctaacccgagagaaccctttgaggtgtattgtgatgcatcanagatggttntaggaggagtgttgatgcanaatggccaagtagtggccaatgcttctagacaactcaagactcatgagaggaactatcccaccaatgatttggagtaggttggtgtagtttttgcctttaagatgtggagacagtacctgtttggctccaagtttgaggtgtttagtgatcataagagccttaagtacttgtttagtcagaaagagctgaacatgca

SEQ ID NO: 8267 - DNA, 335 bp, Glycine max
  unsure (1)..(335): unsure at all n locations
agcttgtttcttgcaattccaagactctagagagcttcctaataggtggcatgtcccacttgtgctttttctatctaatttgcatcctgcaaaatcaaaatctaaaaagcctgttaaatttaaggaggtacctttgggatacctcaaacccacattggttgtgcccttaaaatacttaatgatcatattaacgaanattaagtgagattccttaggaatggactgacatcttgcacataagcaaacacttaacatgatatctagtctacttgtagtcaggtagagaagtgatccaatcatagctctacatcttgattcatcaacaaatttacctt

SEQ ID NO: 8268 - DNA, 281 bp, Glycine max
  unsure (1)..(281): unsure at all n locations
ctactctctaacactagctaaccaactaactgtgtttagttaacataactagctagtgggtaagtacaatctgtatatgctaagaatccccctcaagttgaggaatgaatgtcaatcattcccagcttggaatgaagaanatggaatgcacctggagaaaaagctttggtgatgatgtctgttaatgggttggcagaagaaatangaagcaacttgataagaccagagagtaacttttcgcagacaatatgacaatcaatctcaatatattttattctttc

SEQ ID NO: 8269 - DNA, 253 bp, Glycine max
cacgagagcttccgttgttcattttcgaacgtctctatatgtgatgcgccttaatctaacatccgtgtgaaaagatatgaccatctgaatttctcaagagcttacgtaggtcaattatgagcctctcgacatattatgcgcccgaatcggacatccgtttaataagttgagaccatttgtatgtgtcgaaagctatcttgggtcaattccgagcgtctcgacatattatttgcccgaatctgaccttcgtgtg

SEQ ID NO: 8270 - DNA, 362 bp, Glycine max
  unsure (1)..(362): unsure at all n locations
accttctcttccattggtnngttcttcatttttctccatgtatcttctcacatgtcttgtgataaatgtatntaacatggttctttagagtttccaccgattaaacatccgagtaaaaagttattgtcgttntgaattgctcagagcttctattntcaattntgagcttttcgatatattacgggactgaatcagacatccgtgtaaaatgttattgtcgtttcaatttcataggagccttctatttaaatttcgagcgtctcgatatattacagtacttaatcggacaaccaagtataaagttattgtncgtttgaattgatacgagctttcgttttcaatntggagcgtctcgatatatt

SEQ ID NO: 8271 - DNA, 374 bp, Glycine max
agcttctaaactttatacaagaatgaagctctgataccacttgttagacaagtggcctcagatatcttaagaagggggggttgaattaagatattccaaactacttacccaattaaaaatctatttcactttttattcaagttataaaatcccttaacaatgaacttcttaaatattaattcaaataaaaaaattttgaatatgaatataaagcaataataaacaaaggagtttaagagaagagaaagtgcaaactcagatttatactggttcggccacacccttaatgaattgagcactcaaataattccttaatgaattgcaattgaattggccaaggaattcttaagaggataaaatgattttgctctttg

SEQ ID NO: 8272 - DNA, 243 bp, Glycine max
  unsure (1)..(243): unsure at all n locations
gtcttctcttcttagagttgtgattaaagagaatataaagagctgggaagaatgtatgtctcatgttgagnttgcatacaatannggtgtacataacactacataacactctccatttgaagtagtgtatggttttaatcccttgactcctctntatttgttaccattgcctaacatttctaattntaagcataaggatgcacaggctaaagtngagtatgtgaaaaggttgcatgaacaagt

SEQ ID NO: 8273 - DNA, 400 bp, Glycine max
  unsure (1)..(400): unsure at all n locations
ctcggacactccatngactagtctatcgatgttgggcataaggtatgcatctttggggcacgccctattcagaccagtataattgattcacannttgccattttcattnagccttttgaccatgacgacattggcgagctaggtagaatatctggcttctctgatgaagttggcattgaggagctngtccacctcttctctaaccgatttgtatcattcttctcccatcttcctcttatatggtgataccagtttggcctggggacagatgatgagctngtggcagataatggtggggtggattccctacatgtcagaaggctatcaagcaaacaggtccgtgttcctgtgtaggacatcaactatgtgtctgtgcttatgggtggtgaggtccctactg

SEQ ID NO: 8274 - DNA, 300 bp, Glycine max
  unsure (1)..(300): unsure at all n locations
aaaacgttgtttttacttcaaaaccccttgaactacttcacattgacttatttggtccctcgaaaactatgggttttggtggtaattactatgtcctagttataatagatgattactcaaggttcacatggactttatttttgaaaaccaaaagtgaagcttttgatgcttttcgcaaacttgccaaggtgattcaaaatgaaaaaggtctcaacattgtttcacttataagtgatcatggaggtgaatntcaaaatgagtatttgaaaacttttgtgaaaaaaatgaaattcaccataa

SEQ ID NO: 8275 - DNA, 323 bp, Glycine max
agcttgaaggcaaactggatgcattggttaacttggtaacccagctggccttgaaccagaaatttgtacctgttgcaagggtctgtggtttgtgctcctctactgaccaccatacagacctttgcccttccatgcagcaacttgaagcaattgagcaacccgaagcttatgctgcaaatatttacaatagacctcctcaacctcagcagaaaaatcaaccacaacagaacaattatgacctctccagcaacagatacaaccctggatggaggaatcaccctaatctcagatggtccagccctcagcaacaacaacaacagcct

SEQ ID NO: 8276 - DNA, 365 bp, Glycine max
  unsure (1)..(365): unsure at all n locations
agcttgtaatcgattacacatatactgtaatttattaccagaggagtttttcagaaaccattctcaacagtcacatctttctgtgtggttcttgaatggctatcataagcctatatatatgtgacttgagacacgaatttgctaagagtttttcaaaacaaaatggtcttatcctcttaaaaagcaaatcgttttatcctcttacaaattccttggccaaattacttgtgattcaataaagaattatttgagtgctcaaatngttcaatctatctctttcaagagagaattcttcttttcttcttcttcattctgaaaagggattaagagaccgagggtctctttgtgtgaaagaattctaaaca

SEQ ID NO: 8277 - DNA, 367 bp, Glycine max
agcttgtaatttattacacaaggcttgtaatcaattatcagaagttttaaacgttttataatagccttcagaaatttgaatttaaattttaaagcctgtaatcgattacaacttgtgtataatcgattaccagaaatgaaaattcaaatttcaattctgaagagtcacaactcttcagaatctaactgtgtaatcgattacaacagttatgtaattgattaccagtaaggaattttcgaaaataactcccaagagtcacaactgttcaacaagtttttgaatgaccatcaaaggcctatagataggtgacttgggttacaaaattccttagagtttttctgaacaaattgtcttatcctctcaatac

SEQ ID NO: 8278 - DNA, 281 bp, Glycine max
tgtgcatatagagctacagatgtcttgcaattgatacatacagacatttgtgggccatttcatacaccttcatggaatggtcaacaatattttatatcattcatagacgattactccagatatacatacttgtttcttatacatgaaaattcacaatctctagatgtgttcaaaacatttaaagttgaagttgaaaatcaactcaacaaaagaatcaagagtgtcaaatctgacagtggtggtgaatactatggtagatacgacggttcaggtgaacaacg

SEQ ID NO: 8279 - DNA, 182 bp, Glycine max
agcttgccattgaacaagttcgagattctattttatcaccgagccgtgcactcgcattggtaccaccttgagaggtttgggtttggtgtgttaaaaggtgacaagagaaatgagtcaaaattctcaagttggattcacctaagggtgtgtcttgaaggtgcttatcatgtcctggatgagtc

SEQ ID NO: 8280 - DNA, 394 bp, Glycine max
  unsure (1)..(394): unsure at all n locations
tccgtatgagtagaaccctcaccattaacactagatgaagaacgaagactcatgttggttcttaaagtgtggttctttctttgttggggttngaaaacaaaaggtaaaagaaactacggttgaaactagccaaaataaacactaaaagaggtgtgaaagataatgtaaaaactaattggtaaaaagcaagttatctangtggttngacaatggaagataaagganatttaaagcaagctagatagtttcctatgtgaaggcttagatgaacccttggaggtcccaactggctcttcgcttagtctacacnggttacactaagctattacacacaaatagaggtttgggtggtctcttggagactctcaatacacncctgaagaatgtcaaatac

SEQ ID NO: 8281 - DNA, 333 bp, Glycine max
  unsure (1)..(333): unsure at all n locations
tggaagctcctaatatctcccacactntgtggggtgngccattcttggatggtcttgattntctcagggtccacttggaccccatttctaccaactaanaatcctagganaactatattatctacacaaaaagttcacttctctatatttgcatagaccaacaacactgggataacacatgggcttaggctctcttagacccagcccttctccaaacaatcttaacctgagtctctatctccttagtctcctgagagggttagtcctataggctatcctattaggaaggcttactcctgggaactaaatctattggtgttctattctccttaa

SEQ ID NO: 8282 - DNA, 396 bp, Glycine max
gcttgaaattgagcaacaaaagctctcgagatattttatatggtcataacttttaactcggaggtccgattcaggcgcatcacatatagagacgctcgaaattgaacaacataagctctcgacatattcatatagttataacttttaactcggaggtccgattcaggcacatcatatgtcgagacactcgaaattgaacaatggaagctcttgagcaattcaaatggtcttaacttttcactcagaggtccgattcaggcgtataatatatcgagacgcttggaattgtgcaacggaagctctcgtgaatttcaaatggtcataacttttcacttggaggtccgattcaagcgcatcacatatagagacgctcgaaattgaacaacgtaagctctc

SEQ ID NO: 8283 - DNA, 365 bp, Glycine max
agctttaacttaatcaatgcaatttccttttgtgcttgttcattccacccaaacgcacccttcttcaaacattcggtcataggacttgctatagtgctaaaattctggataaagcgtcgataaaatgatgcaagaccaaggaaagatctcacctccgaaactgttgtagggctcggccaagtcttgatagcatccacttttgtttgatcaacggatactccatctttagacaccacatatccaagaaacaccacactttcaaccaagaaatcacacttttccctcttcccatagagattttgtgctcttagggtctcaaatatttgcttcaaatgagtgaaatgctcctctatagatttgctata

SEQ ID NO: 8284 - DNA, 400 bp, Glycine max
tcttatccaaggctcatcttggtggtgaagctctcttctttcatggcttattccctagtggatggtgcctcctctcacctcttttcctttttcttccgctgcatccccatggtggaaaatcaccattaaaggacctcattgaagctcaaagatccagcctccatagaagccccacaagcaagcttccatcagaatgttcgaatgcggcccataataaattgaaacactcaaaattgaacacgaatgctccaagaaaattcaaatggccatgacttctaacttcgtatccgattgcaacccataatatatttagacgctcaaaattgaacatgaaaggttcgagcaaattcaaatgaccataactcttactttcgtatccgattgcagactattaaatatc

SEQ ID NO: 8285 - DNA, 398 bp, Glycine max
tgtcaccgttcgcaacccttttgggtttatgcctttggttatgggaaagagaagcaacggtgttattgttttcgcttctaaaacttgcttaacctaattgaagcgatttatgagagggaggtggttgtgccgcctgagaatttctacgacgacgtcgaagctcgcaagtacacctctttttctcatattgttcaaattcaggtttttccctttttattcttctcattccctattcaattttctttcgttgtgaaattcattcattcattaatttctctatgccaaataagtggcactatcaaagagagctctcgaactacttgctttgcctgatgaccacgttcctaaattactccttgatatcagtaattttaatttaattcaatttaattaatatc

SEQ ID NO: 8286 - DNA, 394 bp, Glycine max
tctagataaagtaactcgtcttctctctattttttgtttgagggcacacgtaacacaagctgaacttcattgtcagttccatgcactgtgggctggggtgattgaggaggttcgagttcaaagggataaatgttttggatttgtcagatacaacactcatgacgaagctgcactggccattcacatggctaatggaagacttgttcgtgggaagaatatgaaggtgagaattctttcacttgatgcttatctggtcaactaattaattgctattctttgttgaggctgatggttgccccatataataatgcctattgcctagtaaggatggtgatctctcttttttttcttcttgccaatggctgatcacgttactcgcatgtagagactcatg

SEQ ID NO: 8287 - DNA, 397 bp, Glycine max
tagctacacaccccctataatagctaatcttattccctcgacaaaaaacatgaaaatacaaaaaaaagtccttactacaaagactactcaaaatgccccgaaatacaaggctaaaaccctatactactagaatggccaaaatacaaggcccagacgaaggaaatacctattcaaatatttacaaagataagcgggctcatacttagcccatgggctcgaaatctaccctaaggctcatgagaaccctagggccttcccttggatctctagcccaatctacttggagttttctacccaatgcccttgcggggtaggattgcatcacatagcatgcccgttggcgtgcgttccaaacgagtcctcatggacttcctcgatcatgtggtccgctcatgaa

SEQ ID NO: 8288 - DNA, 396 bp, Glycine max
tctatagaaggttcgttcctaatttctctacaatttcatcacctctcaatgagctggtgaagaagaatgtggcatttacctggggtgaaaaacaagagcaagcctttgctttgctcaaagaaaagcttactaaggcacctgttctagctcttcctgacttttctaaaacttttgagctagaatgtgatgcctctggagtgggagttggagctgtattgttacaaggtgggcaccctattgcttattttagtgaaaaacttcatagtgccaccctcaactaccccacctatgataaagagctttatgccttaataagagccctccaaacttgggaacattaccttgtttccaaggaatttgtcattcatagtgatcatcaatcacttaagtacatta

SEQ ID NO: 8289 - DNA, 362 bp, Glycine max
agcttccattttcaatttggagcctctcgatatattacgggactctattggacatccgagaaaaaagttattgtcgtttgaatttggttcgagcttccgttttcaatttggagcatctcgatatattacgagactcaatcggatatccgagttaaaagttaatctcgtctgaatttgatacgagcttccatttttaatttggagcctcttgatatattacgggactctattggacatccgtgtaaaaagttattgtcgtttgaatctgatacgagctttcgttttcaatttggagcatctcgatatattacgggactcaatcggatatccgagttaaaagtaaaatctcgtctgaatttgat

SEQ ID NO: 8290 - DNA, 423 bp, Glycine max
actcttataatactcacgctctaaccgcctgagatctttgccttaacacattggatggttcatcctttgtggtataagtagagggtacatctacttgggtttgactgagaacaagagagggtacatctcttgtggatcagttctagtggagggtacatccactagggtttcgaagagaacaagggagggtacatcccttgtggatctttgcttgtaaaaggatttttacaaggttgaaagaaatctcaaggaccgcaggtctcttggggattggatgtaagcatgggttgttgccgaaccagtataaaaactcttgtgtgtttgtctccttcttccctactcttttaatttttgctgtgcatttaatttccgcttttactttctgttaagtttctcttatactccttattctcttaacaactt

SEQ ID NO: 8291 - DNA, 358 bp, Glycine max
agcttttgaggaatttttcaacttctttgtccataaattgtgttttgtagtccgagatcaaagtattaggaattccaaattggcataaaatgttcttcaaaatgaactttcgaacattggttgtcgagatggtggcgatgggctcggcttctatccacttggtgaagtgatcaatgcccactaggaggtattttacttgtccctttgctaggggaaaaggtttgagtatgtctactcaccaaatggcaaggggctttggtgttactatgttgtgtagctctttgatagacatggaagagatgttgttgaatttttgggattcttcccatttcttcacattctatataatcttttctca

SEQ ID NO: 8292 - DNA, 365 bp, Glycine max
agcttaataaatctatatatggtttaaaacaaacctttcgtcagtggtaccttaagtttcatgggataatttcttcatttggttttgatgaaaaccccatggatgaatgcatataccacaaggtcagtgggggtaaaatattctttcttgttatatatgtagatgatattttacttgcagccaatgatcggggtttgctacatgaggtgaaacaatttctctctaagaattttgacatgaaagatatgggtaatgcatcttatgtcatcaacattaagattcatagagatagacctcaaggtattttgagtctatcacaggaaacctatattaacaaaattctagagagatttcggatgaaaagt

SEQ ID NO: 8293 - DNA, 399 bp, Glycine max
gctattgggattgagaaagctttaatggattgtttatttgatagtgcaccgataccggtaactggttaataggatcttgagaggattgagggcatcaatattgtatttggaaagaccctaaagaaggaaaaaagtaaaacttccatatggaagaagaggtttatattgtttggtcttccatactggtcaaatttagatgtcaaacattgtattgatgttatgcatgttgagaaaaatgtttgtgatagtctcatcgacatgcttcttaacattcaaggcaagagaaatgatggtttgaatactcgccaagatctagttgagatggatatatgagatcagttacatccaaggtctgatggtaacagaatatacttgcctccagcttgtcatgctttgttg

SEQ ID NO: 8294 - DNA, 357 bp, Glycine max
agctttggctaagttcaaacactacctattttgccataaattcattattcatactgatcagcaaagcttgaaggaattattatagcaaaggttacaaactcctgagcaacagtagtggttacccaaatttttgggatatgattttgttattcagtacaagccgggtaaggagaatattcctacggatgaattgtccaaaagtttttctatggcatggtctgaagcagtaggagtatggatgactcaagtagcaacattaatgaaggaggatgctattttggctgcactttataaacaatgtatagagggaactgtgtcaggaactaaatatacagtgaatgatggattgttgttttg

SEQ ID NO: 8295 - DNA, 387 bp, Glycine max
tgtccttcgtttgattccaaatggtttatttcttaatgttcactgttgtacaagctcaagtgcacacatttttcatcaagcaaggtgccacaatggtacgttccataggaccacatttccaagtcccaccagcatcgctccaaggcctagttggagtcacaatactctttgctgtgccattctatgaccgtgtctttgtgccactagcaaggaaaatcacagggaaacccactgggataacagtgctacaaagaattggggtaggacttttcttgtcaatccttaacatggttgtgtcagcacttgtggaggccaaaagggttggtgttgcaaaagagagtggcctaattgatgacccaaaagcagtgttaccaatcagcatttggt

SEQ ID NO: 8296 - DNA, 350 bp, Glycine max
agcttctaaacaatggttttgtttttctccactaccctattcaccattggttaagggtgttccttagtcattctactagtgtatgtagatgacatcatcctgtcaggaccaaattttgcctctatgcaagctattcagacccaattgcaatctatgtttcaattgaagatccttggcactttgaaatattttcttggcttagaaatagctaaatccaacagtggtatctcactctcccagagaaaatacactctatctcttttagaagatgcatgtttcttggcatgcaaacctttcaatgaatcccaacctgaagctcaatcttcatgatagagacttactacctgatc

SEQ ID NO: 8297 - DNA, 402 bp, Glycine max
agcttctacattcaatttcaagcttttcgatatatttctggactcaatcggacatccgagtaaaaagttattgtagtttgaatttgctcagggcttcggtattccatttcgagcgtctcgatatattacgggactcaatcggacatcagagtaaaaagttattgttgtttgaatttgctcagagcttcggtattccatttcgagcatctcgatatattacgggactcaatcagacatccgagtaaaaagttattgtagtttcaatttgctcagggcttcggtattccatttcgagcgtctcgatgtattacgggactcaatcagacatccgagtaaaaagttattgtcgtttgaatttgctcagagcttctacattcaatttcgagcttttcgatatattac

SEQ ID NO: 8298 - DNA, 362 bp, Glycine max
agctttgagcaaattcaaacgactataactctttactcggatgtctgattgagtcctgtaatatatcgagacgctcgaaatggaataccgaagctcagagcaaatttaaacgacaataacctttttactcggatgtctgattgagtcccgtaatatatcgagatgctcgaaattgaatgttgaagctctgatcaaattgaaacgacaataaatttttactcggatgactgattgagtcccgtaatatatcgagacgctcgaaattgaataccgaagccctgagcaaattcaaacgagaataactttttactcggatgtctgattgagtcccgtaatatatcgagacgctcgaaattgaatac

SEQ ID NO: 8299 - DNA, 391 bp, Glycine max
ttccaggtttggtttatgatgacgggcttcttttttgggtacacgtggcaggatttccgagctggatacagaaaaaggtggaggaggcacagttagtgtacgcggaggttgggaaggaactacggttatgtagcagggattctccgtaccttggaaacacgaatgttgccacgtgtcacgagctgaacacgtatctgcacctcgttgatggcttcgtcagctccacgtgtcccttcagagcctccgcgaagaggttcctccagcgttgacagccaccgtagtgtggtgctctaacccaaaccattaacagaaaagataagttttcatgggaaaatgtaattattagctgtagttgtctaaattgttgcacaaccatcgtcattgtagttag

SEQ ID NO: 8300 - DNA, 395 bp, Glycine max
  unsure (1)..(395): unsure at all n locations
tgaccaggaattatttgtattggttggatgttgaattctggttgttcctggtgcggagatgatggtacagcgggtgaaccaggagcggcagtttcttttggtgaggaagccatggaaaaacagagcgtttggaatgatttcgtaaatctcagaaaactattgggaaatgctggagaaaacacgaatgccaagcagatataaatttgaatgaagaatgtagaggggcgtgtgaagcaacggtcgaatttgctttgtggtgaacgtgctattaatgttaagtgattcgtttgggcacgttcagattgcagtagctgctataattcctctagcagacaaatgcccagcttgcccctcagttnttcaaactgatttgcatccaaagcctttgtgaaaat

SEQ ID NO: 8301 - DNA, 371 bp, Glycine max
agcttgcttctacaccacttattgagaagatgagtcaagaagaagctcgccaccataggaagccatggataagagcttgaaggtaggagaagatgagtggagggagagggagagaagaagcacagaattttgtgcctcaaatgaggtctgaactttgaagtgtaattctcaaatgatcaaagttgaaaaaatgcacacacatggcctctatttatagcctaagtgtcacacaaaattggagggaaatttgaatttcaaatttcacttgaatttgtggagccaaattttggagccaaaatttcactaattatgattagtcaattttatctatggttcagcccactaatccaagatcaactccaagattctcc

SEQ ID NO: 8302 - DNA, 355 bp, Glycine max
agctttgggttcgatggcccctttgacatctattccccacatggaaaaaggacaaggggcagacatgacattcaaaggatgtggcggaacattgacattgtccgtgtatgcttgacatttatggcatttccttacatgggcgcagcaatcgctttccatagtgagccagtaataacctgctctaaggatcttcctggccatagcatgcctattggcatgtgtcccaaatgaacccccgtggatttcctcaatcatgtagtttgcctctttggcatctatgcatcgcaggagggtcatgtcgtggtttcgtttgtacaggatggtaccactcacaaagaaaccagtagccaatctc

SEQ ID NO: 8303 - DNA, 392 bp, Glycine max
tgcaactctttcggcatggcatcataaatctgtcaccacctcctgtgagccgagtcactcgcgaaaacatggcgatcctgcatgtcccagttacaatcataatccctataacacatccacggcttcagacccaggtagtgtacggcgtacacgtcatcagggagctcgtgcatcccatggccactactaggaaaagtcttgagctgattcaccttggccggcaaacggtgccaccacgtgaagatttcgttgagaaagccttggtcgccgccgttgtaagaacgcaccttggaagtcacgttcatcattttccggaacatgcattgcgacggctcgattaccatcaagcccgagttgaacagcgttttctcgttaggtgcggctgataactg

SEQ ID NO: 8304 - DNA, 355 bp, Glycine max
agctttttctccctttcctttgttcttctcctctccttgcgttcttcttcttcacgtttttccttttcttcttcttcaagaagcttcatctgtagacaaaatcatgcaattgggatttagaagtgcattttaaaaatagaaacaagagctttttttcctgtccccaacagcttttttcctaaaagcaaaaaactaagacctgcttttccaacgtaatgatttctttgcatgctacatgcactcgatcctccagcagttttagtgcaagacaaacgaatatgctatgtgcattttggcgtgctgtcccttctctgaaagccttttcaacctgaaaggatagtacacagtcagtggt

SEQ ID NO: 8305 - DNA, 398 bp, Glycine max
tgtgttgacaaggcccagttgatagaatttttttctccctgaagttggcatattactggtatggaacctgacacctgagtgttcatgttttcattgttgaactgctgtatgtttctgtgttttgtgtttacagcaccataacttaacaaatcaccaatctgcaattacctggttgtgataatgacagggttgttgtttgaagctcaatctttgcataaggaggcctttgtttccttctcagtctcgttgtcaatagaaccggattacattcccagtattatttcaacagcaaaattgttacttaaacttggaatgcaatcacttccaatagcaagaagctttttaatgaatgctttgagattagaccccacaaaccatgatgcatggtttaaccttgg

SEQ ID NO: 8306 - DNA, 349 bp, Glycine max
  unsure (1)..(349): unsure at all n locations
agcttgtgcctctttacgtctgttatattaatgnancatccaaagacccttatgtgctttgctgatggcttcttcccgttccaagcttcaattggagtcttgtcttttacagacttaattggacatctgttgattatgtaaacagcagcgtagactgcttcagcccataatgtgttaggtagacccttctccttgagcattgatctaaccatttccataactgtgcgattctttctctcgaacactccattttgttgaggagaatatgcgactgtaagttgtcactcaatgcctttatcctcacaaaaactttcaaactcgcgagaagtgtactctttgccgcgatcac

SEQ ID NO: 8307 - DNA, 394 bp, Glycine max
ttgaggtagtttggttcctttaaatatttgcatctatgattgtttgctattgtttatatcttgaattgtaggtattgatttaaacatctttaatttctgtgcagtatggttgttactgaacttcctccaaatgatgctaagagagctcttgaggcattatgcataccagtcataactcctttacaggttagtgtccaatctgcagagatatttttagttatacattttcttttgatgtttttgctttctataatttgcttcatcaggaagctatcaatcaaggtccagaaagcttgagtaaaagaccttctcgtcagttaacagttcatattgatcgatttgcctacatctttaggtgtgttccataattaatattgtcatgtctatgcaccct

SEQ ID NO: 8308 - DNA, 394 bp, Glycine max
tagcattagcatgtgttgacactggatcactttttttgggtacgtgtttgttactttagtggatcctatcaaagaacctccgcttataactacaaacatagttctgtctgtttttgttgtgtattgtcatgtggacaaagttccatgccatgtttgagacatctaagattggcgtcttgcctttgcccagtattattttttgcaacatcttcctttcttaaccttgtcattacctcgaaattttaatatggcaacttactcttgtggaaaataatttttaagaattaatataacactttaaaattaaatttagaatattaaaaaaatataaaacatagatataattctttaggtgttattgatacttttctcctgttagaattaaaatcgtact

SEQ ID NO: 8309 - DNA, 360 bp, Glycine max
agcttgaagaatgtatatacaattggcagtggggatgattctgcaccaaagttacctgatcgagagccccaaaaggcacctaatgggcatgctgttatgcatgttaaggatatactgcctcgaggccttatcaactctgggaatctatgttttcttaatgcaaccatgcaggctctcttgtcatgctcacccttcgttcatcttttacagcaattaagaacttgcaaccttcctaaggttagtttttctgctgctgcatttcaactattaactaatactgccatctactggttttagcttaacttatatatggcttaataacattaaaggaataaagacctaatagctgtattatgcatt

SEQ ID NO: 8310 - DNA, 354 bp, Glycine max
  unsure (1)..(354): unsure at all n locations
agcttatcctccaagccagaaagttccaaaacctcccaccaggtccaccctctctcgccataatcggcaacctccactgcgccccctccatcgcaccttcaaagccctctccaacaagtacggccacgtcatctccctatggttcagctcccgcctcgtcgtcgtcatctcctcccaaaccctattccaagaatgcttcaccaaaaatgacgtcgtcctcgccaaccgccctcgcttcctctccggaaaacacatcttctacaactacacaaccttagggtcctccccctatggcaagcactagcgcgtgagggggaggaggacngagggtggcgaaggaggagggaaaagggg

SEQ ID NO: 8311 - DNA, 399 bp, Glycine max
tccaaccacagaaatttcacccaaattagagttacttttattctaaaaagaactacagagattatatactaatactaaacccacaaatcaaactaatgttttgcaggattacaacgcaaaaatttcagattttggcttggcgaaattagggccttcgggtggagattcacacgtgagtacgaggatcatgggaacatatggctatgctgctccagaatacgttgcaacaggtgatcatctcatcttatctaaacacataaatagagagatggtttgtgaatatgctagttgaagttgaaactaattgttttatgattcaacaggacacctttacgtgaagagtgatgtttatggttttggtgtggtgctgcttgaaatgctgacagggatgagggcaat

SEQ ID NO: 8312 - DNA, 356 bp, Glycine max
agcttccatcacaaacactttatggttagaaggttggtagaaataatatcccattgtttcttcaggataaccaatgaatctacacttatcagaccttgcctcaagtttatctgtttgcaatcttttaacataatcagggcaaccccataccttgatgtgtttaagacttggtttctttcctttccatatctcatatggagttgtagagactgcctttgtaggaactttatttagcaagttggttgttgcttctaaagcatatccccataagtttaatggaagatcggtgaaccccatcatggatcttaccatatctagtaaggttcgatttcttctttcagatacaccattgtgtt

SEQ ID NO: 8313 - DNA, 395 bp, Glycine max
tctggtaagggctgcaaagggtccatatgttttatgtcaaaaactttcaaaagatataattaaaatagtgagaggcaataaaaaatgctaaatgatctgataagcacatgcataagactaataagtttgctgaagttcaaggctgaaaaacatggaccacaataagtgaataaaccaattggaaacataagaggagagcacctgctattgggatcataatagaatccactgatagagccatcgctgcaagagaaacaaatgtagtaaaatccggctatggttaatccacagtcggttccaacattcacaaagtactgctccttccacctctgcaacaaagaaataagtgcgatttgtaaaggttctcatttcagataaatactttttttttcaac

SEQ ID NO: 8314 - DNA, 351 bp, Glycine max
  unsure (1)..(351): unsure at all n locations
agcttagactgagttcagcctactcatcctcagactgatggccaanctgnncgaaccattcagtcattggaggaccttttaagagcatgtgtcttacagcagaagggaagcttggagagttttcttccattgatagagttcacttataataacagttttcactctaccattggcatgactccctatgaagctttgtatggtagaaggtgtaggacacccctatgttggttagagcccggagaaggcctcaccttatgaccagaagtggtacagcaaaccactaagaaagttaagttaatttaggaaaggatgagaactgctcagagtaggcaganaagttttcatgataag

SEQ ID NO: 8315 - DNA, 357 bp, Glycine max
agcttgtgtcgcactttcaactgctgaagctaaatatatagttgcagtaagttgttgtgctcaaagtctctggatgaagcaataacttgaagactttggagtacatcttgatcacattcctatacaatgtgacaacacaagtgttatcaacctaataaaaaactatgtcaagcattctaggactaaacacatagaaataaggcatcattttcttagagatcatgtgcctaaaggtgactactacattgagttcattgatagtgagcatcaactagcagaaattttcactaaacctcttgatagagataggttctttttcataaaaaatgaactaggcatattgaattcatctagcat

SEQ ID NO: 8316 - DNA, 350 bp, Glycine max
  unsure (1)..(350): unsure at all n locations
agcttccgagctgatgctctcttataaaaattnttcttatnngntttcattcttatgtgaccaaagcacagcttcaaatttgggcactttagatgtgtcacacaatcaaataaaggggcaactgccagattgttggaaatcagtaaagcaattactgttccttgatttaagcatcaatatattgtcagggaagattcctatgtccatgggcgcccttgttaatatggaagccttggttttacgaaacaatggtttaatgggtgagttgccttcttctttgaagaattgcagcagtttatttatgctggacctgagtgaaaatatgttgtcgggtccaataccttcatgga

SEQ ID NO: 8317 - DNA, 398 bp, Glycine max
taatacccaaaatcacatctacaggaccaaggtttcttcatatcaaaatttctagacaagaaagacttcacatcatttatgaattgcatattactaccaaatatcaatatgtcatccacatacaaacataaaatgacacatccattatcatcaaattgtttcacatacacacatttatcagtattattgatttgaaaaccatacgaaagaacaacttgatcaaatttttcatgccattgttttggagcttgtttcaaaccatataaagatttaacaagtttgcaaactttcttttccttcccctgttctacaaagccttcaagttggctcatataaatttcttcttctaattcaccatttaaaaaggcagtttttacattcatttgatgaatttctaa

SEQ ID NO: 8318 - DNA, 353 bp, Glycine max
  unsure (1)..(353): unsure at all n locations
agcttcaatggcttantaaggatggagaggtgcaagtaaggaagcaaatggagttggatatttccattggaaattacaatgataaggtgctttgtgatgttgttcctatagaggccagccacttactcttggggagaccatggcaatttgataagagggctaatcatgatggtttcaccaacaagatctctttcacgcatcaaggcaaaaaagatagtgctcaaaccattgagtccacaagaagtgtgtgaggatcaaagaaaaatgagagagaaaattcttcaagaaaagagagaaaaagaaaaagagagccaaacacttgagagttcaaaaagtgaggacaaaaagaggga

SEQ ID NO: 8319 - DNA, 359 bp, Glycine max
agcttattctataactaccaatttccacaggtaatcgattacaacctattgtaatcgattacaatggccttgttctacggtaatccattatagtgagtggtaatcgattaccagaccctaaaatatgagtttcaagtctaaaaatcaggacaaatatgtgattataagcaatcaatatacaattaaacaatcaaaaacatttatgagtatgaaaaattacaaaaaacaaccatcaaatgcaattattataaacattcaaagtaatcaatcatcataaacaagcaaaataaccattaaaaacagtcattataaacaatcaaaacattataagcaaacaaagtggctaggaatctaagtta

SEQ ID NO: 8320 - DNA, 423 bp, Glycine max
gagagcttcgcggcgctatttacgagtgcctgtatagtggtgcgcctgaatccgacatcccagtgtaaagttatgaccatgtgaatctctcgagaggtgcctatgtttaattttgagcgagaggatatattatacgcctgaatcggacctcagtgttaaaagctatgaccatttgaatttcttgagagcatccgacgatcattttcgagcggcgctatatgtgatgaaccttaatcggacctccgtgtgaaaagttatgaccatttgaatttctcgagagcttccgtcgttcaatttcgagcgtctcgacatattatgcgcccgaatcggacatccatgggaaaagctatgaccatttgaatttctcgagagcttccagcgttcaatttcgagcgtctctacatatgatgcgcccgaatcgga

SEQ ID NO: 8321 - DNA, 395 bp, Glycine max
ttgaatgctctattcaatggagttgacaagattatcttcagacttatcaacacatgcacagtggccaaggatgcatgggagatcctgaaaaccactcatgaaggaacctccaaagtgaagatgtccagattgcaactattggctacaaaattcgaaaatctgaagatgaaggaggaagagtgtattcatgacttccacatgaacattcttgaaattgccaatgcttgcactgccttgggagaaaggatgacaaacgaaaagctggtaagaaagatcctcagatctttgcctaagagatttgacatgaaagtcactgcaatagaggaggcccaagacatttgcaacatgagagtagatgaactcattggttcccttcaaacctttgagctaggact

SEQ ID NO: 8322 - DNA, 349 bp, Glycine max
agcttgtacggacagccactcttacatcttattcatgaaaggagagggaagaggatccatccttgttaccttgttaagatttttataataaaatgctgcattctccaatcggttattgttgatgagcgaaacaaatgatttttctcattcttaacaatagtcatgccacccttgttcacaaccacttgcactctactgacccatgcactattcaaaattgagtatgctattctaccttcgataagaataagatgctatctacttacccgttcctgtatcacaagactcaatctcctttacgattgaaccactagtttaaagtcttgattcatcataatttacgcatgca

SEQ ID NO: 8323 - DNA, 357 bp, Glycine max
agcttgtgtcgcactttcaactgctgaagctgaatatatagttgcaggaagttgatgtgctcaaagtctttggatgaagcaacaactagaagactttggagtatctcttgatcacattcttctaaaatgtgacaacacaagtgctattaatctaaccaagaaccctaccatgcattctagaactaagcacatagaaataagacatcattttatgagagatcaagtgtctaaaggtgacaacttcattgagttcatagatagtaagcatcaaatagtagacattttcactaaacctcttgctagagataggttctttttcattagaaatgaactaggcatattggatgcatctagcat

SEQ ID NO: 8324 - DNA, 426 bp, Glycine max
  unsure (1)..(426): unsure at all n locations
tttcttccatcataactcttgatcaatgtacatgcatacactatcaaatctcaaagatatttcattattctcagaaaaagcaacatcacttgtaactttcctcacactatttgtttcttatatcatgtctttgagtgagaaaaatgataaaaagaaatttcttcaaatgcccatccaaatcgattgagtaacacaattattaaaatagaagaaaatttaaaataattttgttcactcttaatttatataatctgcactaataaaaatagaattatataatatgcatgtaatcctaaagaaacgggactattaaaagaatatttaaaaaaaaaacatntaaaatcatgataagaatgtattagtaatattatttaagaaaatattaagtactttggaaaaaatgtaaaataattatatctttatgaa

SEQ ID NO: 8325 - DNA, 582 bp, Glycine max
  unsure (1)..(582): unsure at all n locations
tgtagcaaattcaaacaggaataactttttacttggatgtccttttgtgtcttgtagtatatcgagacgctcgttattgaaaacagaagctcgtagtaaattcaaatgacaataactatttactcggatgtccgattgtgtcccgtaatatatctagacgcttgtaattgaaaatggaagcttgtagcaaattcaaacaggaataactttttactcggatgtccgattgtgtctcgtagtatatcgagacgctcgttattgaaaacagatgctcatagcaaattcaaacgacaataaatttttactcaaatgttcgaatgtgtcccgtaatatatcgagacgctcaaaattgaaaacgaaagctcgtagcaaatgcaaaccacaataacttttaactcggatttccgattaagtccagtaatatatcgtgacgctcgaaattgaaaacataagctcttagaaaattttaacgacaataactntttactcggatgtccgattggaacccgtaatatatcgagactctccaaatngaaaacagaagctcctangaaattcaactacaataactttttactcgat

SEQ ID NO: 8326 - DNA, 616 bp, Glycine max
  unsure (1)..(616): unsure at all n locations
atcctctaagcacctgcggctgcagcttcattttaattacaagcgtctagatatatttttggacacaatcggacatccgagtaaatagttattgtcatttgaatttactacgagcttctgttttcaataacgagcgtctcgatatactacaagacacaatcggacatccaagtaaaaagttattcctgtttgaatttgctacaagcttccattttcaatttcaagcgtctagatatattacgggacacaatcggacatccgagtaaaaagttattgtcgtttgaatttgctcagatcatctgttttcaatttcgagcgtctcgatatataacgggagtcgatccgacatccgagataaaagttattgtcgttggaatttgcccagagcttcaattttcaatttcgagcgtctcaaaatattagagcactcaatcggacatcttagttaaaagttattgtcgtttgaatntgctacgagcttctattttcaagtacgagcatctcgatatactacgggtcccaatctgacatccgagtaaaaagttattgtcgnntaaaatntctaagagcttatgttntcaatttcgagcgtcacgatatattacgggacttaatc

SEQ ID NO: 8327 - DNA, 337 bp, Glycine max
tcttaaaactcactaaagaagtcttgatgttcctaccaaaatgctattgctaaaatatgaggaaatttttttgaaatattattctatgattccaaaaaggtacaagttctaacaagaatatattggttaatcataataactttaagaataaaggagatatgtagatttgtgctaactatagtggtataaaactctcaggtaacaccatgaaattatggaaaaaggtgattgagcataaattaatagaagggatgaggattatcgggaattaatttggttttataccaggaaaaggtttgcaacagtagcttacatacagtattattgacttggaaaa

SEQ ID NO: 8328 - DNA, 455 bp, Glycine max
  unsure (1)..(455): unsure at all n locations
cacctgangcatcaagcttctatagaaggtttgttcctaatcgctctacgattgcttcattctctctatgaggacgagaaaaagaatgcggcatttacctgaggtgaaaaactagaacaagcgtttgctatgctcaaagaaaagcgtactaaggcacctgaactagctcttgctgactttagtaaaacttctgagctacaatgtgacgcctgtggagtgggagtgatagctgtattgttacgaggtaagcaccctatttctcatattagtgatgaccttcgtagtgccgcccttaactaccccacctatgataaacagctctatgccttaatgagagcactccttacttgagaacattaccttgctatcaacgaattcgccattcatacagatcatcaagcacttacttacattggagggcaaagcaaggaagacatgatgcgtgcataatgggt

SEQ ID NO: 8329 - DNA, 479 bp, Glycine max
  unsure (1)..(479): unsure at all n locations
aaggggctatccagtcgggttcgtggatgattgtgtgttgtttcaatgctcttttgaggcaatcaaaagcctctttgcatttatcattaaagtcaaactccacctccttttgcaaaaagttggaaaatggaagggctactttgctaaaatctcttataaagcgcctatagaatcctgcatgaccaagaaaagatcgcacctctcgcatgcaagatgggtaaggcaattgtgaaataacataaatttttgcaggatctacttcaatgcccttattggaaataatgtggcctaaaattataccttgctcaaccataaaatgacatttttcaaaatttataacaaggttagtttcagtgcatctattcaaaaccttntccagactatccaaaaaaatatcaaaagaggatccatatacagtgaaatcatccataaacacctctattcaatnntctaanaaatcactaaaaatactgatcatg

SEQ ID NO: 8330 - DNA, 703 bp, Glycine max
  unsure (1)..(703): unsure at all n locations
aaagacaatacttcattcataacatcaaataaactagatagtcatccacaatattcaaataaaacatatatgaataattaaaaaaaataaaacacaataccaaatgtaagtacataccactagtcatatatcattaaagtaattaagtttaagacacataatcataaacaaccaagagcaagtcaatataatcataatgttcagtcatactaagcaagtattaaaagaaatactaagtattcaaatgtcataaaaacatagtcaaatacaaggcttaaaaacaaaatataattataatctaaatatattatcagagaatcaaaacttaattctaagtaacaaaaattagttatgaacacatacatggtaactcattacttatctcgattaattaaccactagattttaagtatcaaataacaatcatcaacacatatcatagtaattatttacttaattcaattattctaacatgtcaaaacattntttattttttaacagaatctaataatcttagaaacaaaacataagcaattcaagcattaatcagatcagacaaaattcaattaatcatacatatttcaaattaaaactaaatatnagtatttaaacatttgtaacacaatcaaacaattttcaacaattattttctattagccacaaaaacaacttaactaagaatactaatcattccttaattcat

SEQ ID NO: 8331 - DNA, 485 bp, Glycine max
  unsure (1)..(485): unsure at all n locations
cttgaatgctctattcaatggagttgacaagaatatctttttattggtcaacacatgcacagtggccaaggatgcatgggagatcctgaaaaccactcatgaaggaacctccaaagtgaagatgtccagattgcaactattggccacaaaattcgaaaatttgaagatggaggaggaagagtgtattcatgacttccacatgaacattcttgaaattgccaatgcttgcactgccttgggagaaagaatgacagatgaaaagctggtgagaaagatcctcagatccttgcctaagagatttgacatgaaagtcactgcaatagaggaggcccaagacatttgcaacatgagagtagatgaactcattggttcccttcaaacctttgagctangactctcggataggactgaaaggaagagcaagaatctggcgttcgtgttccatgatgaaggagaagaagatgagtatgacctggatacagatg

SEQ ID NO: 8332 - DNA, 426 bp, Glycine max
  unsure (1)..(426): unsure at all n locations
agcttttagtttgaatataagttttaacacatcggttttttttatttaaaaaaaccgatgttaacatagaatcgttaacatcggttgttaaaaaaaccgatgttaacatagaatcgttaacatcgattttaacaaaaccgatgttaacatagaatcgttaacatcaattttaacaaaaccgatgttacatacgtcatgttaacatcggttttcacaaaaccaatgttaacgattctatgttaacatcagttttttaaaaaaccaatgttaataaactggttttatttacaagtatgccactgtgtttgtgttaacatcggttttgtagaaaactgatgttaacctagtgatgttaaatgtatattntttagtagtctatatttgaaaacaaaaacacaaaaatggttaattaaattaaaatttttt

SEQ ID NO: 8333 - DNA, 581 bp, Glycine max
acctgccgcatgcaagcttcatcctcctctttgtgacaatcacttgctttttctcatcattgttttcagcatcatttcccaaagggtactcttcatgagtgacacgacttgtagtactagactttgttgtttgtttttcgaataaattctcggattgaggcacaatattgatattgttctttggtgcaacacttgttgtgccaatggacttgtttctcacacttgtcatgcttctcaaccttcctttccctaagtgatgctcgcaaagagagtaacccaccaaggtttgttggcaacacctccatcctctcccatttacacgactgcaccttgaaccttccattagtgcaccaccccttaccctcttcttaccaacgttttcttgttcgggttttgttgctcttgttgccacctcttcctcgatctctcttacctcttcttcctcttctttttctttgctgtcgtcttgcctcgaacatttctgcgttatctttgccttcattctcttccgctttgtttcaaatctttgttgcgctgtcatcattgtcataataattgtatcatcttccggtgcattctcg

SEQ ID NO: 8334 - DNA, 561 bp, Glycine max
  unsure (1)..(561): unsure at all n locations
tttagctagacaactntntattactatgttttattttctatatttttcttccatcttattcttttcttgctcgctctctttttgctcctttttttccatgagatattttgctacctaaacatacgtatatttttgtgaggtattttgctatatacatgcgtgtccaaggtatcttgctacctaaacatacatatatatgttttgtgagatatttttgctatatacatgcatatccaaggtatcttgctacctaaacatacatatatatattttgtgaagtatttttcctacatacatgcatatccaaggtatctttctacctaaacatacatatatattttgtgaggtatgactaccttccgagcttgtgcttgttttatttaaattcctaggatcatgagcaactaggtgtgtcctgctatgacttgagaaacaaaggtgatcaaataacaagcagagatttaaaaggtactaggttgcctcctagtagcgcttctttaacgtcttgagctggacgcctgatggcttgtcggtcacgaacctagcactttgcatactttt

SEQ ID NO: 8335 - DNA, 361 bp, Glycine max
tagagcttagctacacatacctctctaatagctaagctcacctccttgagatgagaagctagagcttagctacacaccccctataatagctaagctcacccccatgacaaaaaacatgaaaataataaaaaaaaagtccttattacaaagacaactcaaaatgccccgaaatacaaggctaaaaccctatactactagaatggccaaaatacaaggcctagacgaaggaaaaacctattctaatatttacaaagataagcgggctcatacttagcccatgggctcgaaatctaccctaaggctcatgagaaccctagggcctttccttggatctctagcccaatctacttggagtcttcta

SEQ ID NO: 8336 - DNA, 519 bp, Glycine max
agcttccacacatcatttttctggttttgcttctgaatagccatttagcacctactgctttctttccttgaggttctagagttgtaaactctataggccttagatattttaaagtatccaagtattattccattatcacacttagagtcaaactttcccaagttgtctttaatatttagaatgaaacattgacatctgaaaggatggaaatatgaaatgttgggctttcatcctttccacagttgatgtggagtccttctcaaaataggccttatataaattatgttttgtaaataacatggagtattcacggctttagcttgtaagtgtaaggtcattaagcatggttctggccatttcttgcaatgatatattctttctctcaatcacaccattttgttgaggtgttctatgattagagacaatatgaagaattccattttctttacagaatagatgaaagtattcattctcaaactctcgatcatgatcacttctaggtgaagtaatgcatactat

SEQ ID NO: 8337 - DNA, 497 bp, Glycine max
  unsure (1)..(497): unsure at all n locations
agcttcaatggatcttacatcatgtggtatcagagcttctattaaataaaattaaattgaatttctagaagcccaatccaattaaattttagagggggaggtgagcatttggttactacacctcattgccacattatatggtcacacgttgtgcatgtccttcatgctttacatgcctcatgccacctaagcacacttagtggagaatcttggaattgatcttggattagtgggctgaaccataactaaaattcactaatcataattagtgaaattttgtctccaaagtttgggtccacaaattcaatttcaaattcaagtgaaatttgaattgaaattcaaatttccctccaattttgtgtgacacttaggctataaatagaggtcatgtgtgtgcattttttcaactttgatcatttgaaaaataaactntagaattcaaagctctcttagagcacaaaatttcgggctcttctctccctctcccttcattcata

SEQ ID NO: 8338 - DNA, 489 bp, Glycine max
  unsure (1)..(489): unsure at all n locations
agcttagtgctcctcataaaaatcaaaantagntatttgaaattacttctattttaataacaatattggtaaatatatagggtaatatgtgatcaaatatttggcgagacatgaaatttataatacatcaataattttgaaataaaaaaggattaaaacattaataatttcgaagaggaatgagtacttagattagaaaaagggacattatttaagtttaaaaataattcttatattttgtcaaaaataaagttctattacgtatacatgaatggagacattttaatttgtaaatgactaattattgccccgattctttcgcttggatttcatcatcctttggtctaattaacttataaaactaagcagttgcaatcatatcctataattacgccagcctgatgatcataccattattgtttcttaggtactaggtaccaaaaaaaatatattgacagttttgagttctactcaaatataattctacta

SEQ ID NO: 8339 - DNA, 507 bp, Glycine max
  unsure (1)..(507): unsure at all n locations
cccatgttgaatttgcttacaatagagctgttcatagcacttcttattgntctccttttgaagttgtttatggttttaacccactaactcctcttgatcttttgcctatgcctaatgtttctgtttttaagcataaagaaggtcaagcaaaggcggactatgtgaagaagcttcatgagagagtcaaagatcaaattgagaggaaaaataaaagctatgctaaacaagccaacaaagggagaaagaaggttgtcttcgaacccggagattgggtttgggtgcacatgagaaaagaaaggtttccgaaacaaaggaaatcaaagcttcaaccaaggggagatggaccatttcaagtgcttgaaagaatcaatgacaatgcttacaaagttgagctgcccaatgagtataatgttagttccaccttcaatgtctctaatttatctctttttgatgcaaatggagaaatcgatttgaggacaaatccttctcaagaaggagagaatgatg

SEQ ID NO: 8340 - DNA, 491 bp, Glycine max
  unsure (1)..(491): unsure at all n locations
atgttagactattgacaagtgtattaatatcgttacttttacagattttaagaagagatagtctccagagagacttgagttattcaattcctctagataaaaataatcagtttaatagttatgtacaaatttaatgaaatatcatggatttgtctaactaacgaaagaaaactaaagcaacggaataacaaaaatgacgaaatttagtgtgtcagaaatacgtaaaattaagaaaacaataataacaaatttaattaattcaagaaaaaattaggattggatttcatcgttcataccctcaatatcctaataatattaacatatatgaatcattttctaacattattgatgcacacattaaattaccctgaatcgacccctcgcactcgagaatcctaagaatatntaccgaatatcgatccctcatatatgaaataaatatctcaacattacaatcataatctcgtgctacttgcaatcaaaatgttatg

SEQ ID NO: 8341 - DNA, 383 bp, Glycine max
agcttgtcaaggattaataaacaacctttattattcatatctatgtaaatgaaagactagaaagtcatttggttgtcaatgccattattatattatctttaaaatgagaataacaaattgcaaaagaaaacattatcaaaagaataaaataaatgatattatgatattttatttaaaacgaggaaaaatataattatcttctcagtagctatgaaaaaggaaataaaatatttcatcagaattaagaaaaatataaatagcactgaaatattatttattatctctaaaaatcaaaccttatcaataaaataaaagcaattactatagtattataaaatataattttatactaaaaaaatatttgaaaaaaccaggggtaacct

SEQ ID NO: 8342 - DNA, 491 bp, Glycine max
  unsure (1)..(491): unsure at all n locations
agcttaagctccttcaactgcacaaggctcttaatatttgaagagtatccttgtggaaccttcacccgacgaagacactgacaaaaacttatcttctccttcttggacaaagtatggcaggctgggggcaagtaaattttcttcccatcagaccttggatgcaactgtgatcttatacccatatcagctagatcttgacgggtattcaagccatccttcgtcttgccttgaatgttaaggagcgtcccaatcacactgtcacaaacatttttctccacatgcataacatcaatacaatgtctaacgtcaagatcactctattacggaagatcaaagaanagtggacctcttcttccatatgcaactctgactattatccttcttttgggtcttccaaatacagtgttcaggtgttgaacctgctgatatacctgctcaccagagaatggtatccgcacaatatcatgctcttgacttcattaaaagctttc

SEQ ID NO: 8343 - DNA, 418 bp, Glycine max
ttcgagcgtctcgatatgttaccgggacgcaatgattacatcccagtaaaaagttattgtcggttgaattggctgagatcttcaacaattaatttccagcgtctcgatatgttacggtactcaatcagacatccgagtaaaaagttattgtcgtttgaattaactcaaagcttcaacattcaatttcgagcgtctcgatatattacgagcctcaatcagacatccgagtaaaaagttattgtcgtttgaactagctcagagattcaacattgaatttcgagcctctcgatatattacgagactcaatcagacatcccagtaaaaagttattggcgtttgattggctgagatcctcaacaataaatttccagcgtctcgatatgttacgggactcaatcagacatccgagtaaaaaagt

SEQ ID NO: 8344 - DNA, 557 bp, Glycine max
gcttgtattaagaaaatataatacaaatactaaataactgggtaatttctgttatgacattgaaataaaacaataaattttgatgatgaagatatgaggattttgtaaagaaggttgatggttatttatgtaaaatcttgaaaattagagttggtttggtagtgaatataaaattattgtagatttaattataatcctttaagcaaatgtataaacaaagtaacaactctttaaagaatacacatatatcacagataattacaaattattaatgctaagtaaataggtttaaattaaatcttgaatttatttgtttcattaagcacataaactcatgtgttaaattaaaataatttatgaatagctgatctcttttatactgctacgtactactcataacaaaaaatactgctacgtactacagccattcatatttacactttatattctttacttttttttagcttgaattaatttattatgaataaatatactggtaagttaatatttgtgagaatattctgtgtaaaaaaaatatcgaaaagtaagttttgatt

SEQ ID NO: 8345 - DNA, 489 bp, Glycine max
gctcgcccggtccttgcattgtgctgagtgggtaacatccctatgtgctttccctttgaaaacctgtcgacgacgacgaagatacacgtgttgcctttgtaagaaagtaatcccacgataaagtccatggataaatctttccatggctgtaccggtatcggtagaggactcaacaacccaactggttttctgttatcgtatttggtacactggcacgttaagcatcctgctatgaaggcacgagtatcatctctaatggaatcccatgtaaagttttcttgtaagcgatgaagtgttttttgaatccccatgtgaccacctgtcggagattggtggaattcttctagtaacaacttagtgaaggaggaattcgagggaatccaaattcgacctctgtgtaagatgaaatcattagttaacgtgtactctgggtgtgcttcggggtcatctttaatcttacgatataactccatgaaagctgggtgagat

SEQ ID NO: 8346 - DNA, 507 bp, Glycine max
ccgccctcaaaagaaaacaaagcaaaaggagaaaattcccgatctatttataggaagaaagaaaaaggagaaaattcccaattaaagagtgggagaaagcaaaaaagaaagaaaattcccgatcaaggatcggaagaaaacaaaagaaatatgcagaaaattctctggaccagacaatatctgaacaatacagaattgtcaccaagtaaacaagaaaagaaaggaaaccacgaactaaagtggtcctctccctttgattgccaaccaaaatcctgtgcgtcagtgacttgttcgcctcacactaaacaaaaacagaaaaggaaaaggccaaaaacactcaaagccaaatttcccaacaaaaaaaacccattccgaagaagaagtcctattgatccatgatcacgcatgtaatctttgatttgataggagatgatttgcaaaatcaagtcatgacatatctatggttcggaattaggacgaaacactacttcgagtgatttatttcta

SEQ ID NO: 8347 - DNA, 536 bp, Glycine max
agcttttggcacaaaaaagaagaagaagttcaaagagtattctatgtcttgtttaggatcgcgccagattgattggaaaagtatattgaaaagtaaaccaaagccttgcttttatagactcttcatgtctggccaagaggaccatttagaagagttataacttttagaaaaacttaaaaccaatttgaaaaagtcaaaaaaccatttgaagagttacatcttttgtgtgattcagaaacaataactaataatcgattaccaaatcagtgtaatcgattacacaaagcttttatgtgaaaggatgtgactcttcacatttgaatttgaatttcaacgttcaaaggcactggtaatcgagtaccaaaacattgtaatcgattacagctgtttgaaatcaattgaaacgttgtcaattcatttgaaaactttgtcaaatccattttgctattggtaatcgattacaacaatctggtaatcgattaccagagagtaataactctttggtaaacatgttttgagaaaaatccatgtgctac

SEQ ID NO: 8348 - DNA, 470 bp, Glycine max
  unsure (1)..(470): unsure at all n locations
ntagctgtgaccccaaggcttcatgtagactggtccattttctctaagtgaacctcggatccctgtcagatacaatactagaaggaattccatgcaaccttattacttccttgatgtacaactccactagcttctccattctatacttcatattcactgggataaaatgagcagatttggtgagtcgatctactataacccacacagcatcatgtccacgactagtcttgggtaaactagatacaaaatccatagatatgctctcccatttccattctggaatttccaatggcttcaattctcttgatggtcgctggtgctcaaccttagccttttgacatgtcaaacatcttgctacatattcagctacatctttcttcatgccatgccacccaaaaactttcttcaaatttggtacatcttaatcattcctggatggaaactaagacgaactttatgcgcatcagata

SEQ ID NO: 8349 - DNA, 467 bp, Glycine max
gactctatttaatactcaagccttgatgcaacatttggagaggttaatgaaacaacgatattattttctccatgagaggttggatcaaatggagaatagagatcataatgaagaacaaaggaggagaagagggaatgatggtgttcctagacaaaaccgaattgatggtattaaactcaacattcctccatttaaaggaaagaatgatccggaggcctacttggagtgggagatgaaaatagagcatgttttctcatgcaacaactatgaggaggaccagaaggtgaagcttgccgccacggagttttccgactatgctcttgtgtggtggaacaagctacaaaaggagagagcaagaaatgaagagccaatggttgatacatggacggagatgaaaaagatcatgaggaagcggtatgtgccggctagttactcaagggacttgaaattcaagcttccaaaactaa

SEQ ID NO: 8350 - DNA, 566 bp, Glycine max
  unsure (1)..(566): unsure at all n locations
tctttgagaaaacttccttgagaagctagagcatattttctctcacctctctcataactaagctcacctccttgagaagcttccttaagaagattcctaaagaagctagagcttagctacacatacctctctaatagctaagctcacctccttgagatgagaaggtagaacttagctacacaccccctataattgctaagctcacccccatgacaaaaaacatgaaaatacaaaaaaaagttcttactacaaagactactcaaaatgccccaaaatacaaggcgaaaaccctatactactagaatggccaaaatacaaggcgaaaacgaaggaaaaacctattctaatatttacaaagataagcgggcttatacttagcccatgggctcgaaatctaccctaaggctcatgagaaccctanggccttcccttggatctctagcccaatctacttggagtcttctacccaatgcccttgcgggataggattgcatcanactttacatgactggatcatgtagcagtcagggcaatccatacaaatattaaataatcaaattttatga

SEQ ID NO: 8351 - DNA, 505 bp, Glycine max
gcttcgccttctaattcacaaaaacatggtttcatgcattgtaccaatatttctgagattaatcacaaaatttaagaattatcatatctgtaaaacacaattcggcaaaattcatcattggtgaaaaggggaaattgttacgaacatcataacaaaaaatttgtcccttcaaaataaaattaaacttatttggaatttttcaacccgttcaaatcaaggaaaaattatacaatagaaggaagagagagagctcactccccttcactcgaaaatatgattcccaaaggcaagacactgttgaagttgctacaaatttctagaatattcttaaatataatatgtatgaatatggtagaacaatctacaactatagtgtatatgaatatggtagaacaatctagaactataatgtgtatgaatatggtagaacaatctagaatcataagtgtatgtataagatagaagagtctagaattatcatgatactaatctatcatgaaaactc

SEQ ID NO: 8352 - DNA, 515 bp, Glycine max
  unsure (1)..(515): unsure at all n locations
agcttcttagtttcagatgatgcagatgggtttgtttcnacctcatgcactcctctaatgactatggcatcatttctggcgctaaactgctgggagttggaggccatcttctcaattaaatttctggcttcagcaggggtcatgtctccaagggctcaaccactggcagcatctatcatacttctctccatattactgagtccttcataaaaatattggagaagaagctgttctgaaatctgatggtgggggcaactggcacatagtttcttaaatctctcccagtactcatacaggctctctccactgagttgtctaatacctgagatatccttcctaatggctgtggtcctggaagcagggaaaaatttttctaagaatactctcttaaggtcatcccagctcatgatggaccttggagcanggtaatacagccagtcctttgccactccctctaatgaatgaggaaaagccttcagaaatatgtgatcctcttggacatctgggggtttcat

SEQ ID NO: 8353 - DNA, 500 bp, Glycine max
tccaagttcattaatcatacctttaagccagattgtttctttcactccttcagctagggccatgtactctgcttcagttgttgaaagagcaacaactgattgttgatttgctttccaactgattgttgtaccaaacaaagtaaacacatatcctgttaaagatttccttgtgtctacatttcctgcaaaatctgcatctacataacctgtgattgctgcctcatatgctgtcttcttgtaccttaatccaactttcgaagatccatttagataccttagtgtccacttcacaacttcccaatgtgcactgccaggatctcccatgaatctgcttataatacttacagcatgagctaagtcaggtctgctacaaaccattccatacattatgcttccaacaccactggcatagggtgtttgatccattttagacctttcttcagttatttccagtgtttgaataacagataactttgtatgatggccaagtggtgtgtaac

SEQ ID NO: 8354 - DNA, 542 bp, Glycine max
  unsure (1)..(542): unsure at all n locations
agctntgatggtgtcgagaagaaatcacatgtttgttattttatttaaggggtagaatgtgaatgtatgtatacatgattttgttagtgcttagctttactgagctttaaaagattggctaaaattttgttaaaacataagcacttagacaatgaaggaaagctggagttgctgcacatgatgtccaacgttatgtcaaggaatcagatcgggctgcacaatgcacaaagcaagatataatgtcaaatgaagaattgaagctgcacgatccacgatgtcggatacaatgtccaggacatcctgcccgaaaatactggacacataaatctgttatatctttaacagattaatgtgcacttagcaacagatttaagcgatctatctttatgaacgaattaaaagataattaaagttcgaattacaaacttgaatagttcgttcagggattagagattaaagataaaaactgaaagatcaaacttgatcttttatatctttaagtgcagattttcaggagaatgatagatctcatccagcgcaag

SEQ ID NO: 8355 - DNA, 498 bp, Glycine max
  unsure (1)..(498): unsure at all n locations
attttggcgatatcagggtacatatgcttgatgactttagtgagaacaccaaccttccacgccttctttaagtcatgtggtttcttgtaaggtggagggccttgatctttaggtagaccaatttgaggccaccattcttcattcccagttggccaccatggtggaggaacacccttctctagtgggaacctcctctgaggaggatcacagtgctgcataagtgctgacaagagagaacccaaggttgtgtcctgtaactcttgcaaggtgtgtggtgtaggaccaatggaattgcatccatcattctttccaggaattgcattatcggcttgatacttggctatggcagcaggaccatttcgatcaaacctgaccttatccttccaccattcgcgaagattatctgatgctccggtcactggctttcccttcttaagatttatcctatanacaaacccttgtgccttgcanacctncattatcttcagcatgtacttc

SEQ ID NO: 8356 - DNA, 413 bp, Glycine max
agaagaaatcaaaaagcaacaagtcaaaacttcatatatgatatttatttaaagattttttcaaaaaccaaatagcaccattttgttttacaaaagaattttctcaaattttctaaagttaccagagtgattactctttggtaatcgattaccagttggcagtaatcgattaccagtgaccagattggtttttaaaatgttttcaaatgatttgtaacgttccaaaattattttcaaatagtataatcgattacactatattagtaatcgattacaagtgaatctaaatgttggaattcaaatccaattgtgaagtcacaacttgtcataaaatacattatgtaatcgattacaccattggggtaatcgattaccagtgaatagttttgaagaaaagttaagagttataactc

SEQ ID NO: 8357 - DNA, 500 bp, Glycine max
  unsure (1)..(500): unsure at all n locations
agcttgcttcaaccctgaataggccttcccagttgttttctttctttctcgctcagggatttttccttgcttcacctcggactcgccatactaagttgccaggttgaaaggctcgaggttgaacctttgtattatatctccttgatgctcggagcttgttggcttcttccttgattttggacatcttttggacttcgtcttttgtctctagttccaccagcatgttttcttcgttttgttgttcctagaacaacggtctccttgtcgacggttccctaattttaatggggatcatggcgcttgtgtcttatgtgagttggaaaggatttttgntggtatttatttgggggtgaatagtgataagcccacagtatacttgggagttcctccttccatagacctttggacttgttgtgcgcttatcaattttttgacatttattgtttaatcgattaccccatgatatagtctagtaacatttattgcgtctatggttttat

SEQ ID NO: 8358 - DNA, 579 bp, Glycine max
  unsure (1)..(579): unsure at all n locations
tgagtaatttgttcttatttcttaccacatagatattggtatgggtggagtatggaataggagtgtcaaactaatgaattggataatttttttgaattgaaatggatagccaatccatttatgatccattaataatgtattgcaaaaatctaatttatccataacttatttcatagaaaaaggtccatccattatattttatttttttcaaaacaatatttttctaaaacaaagtttaatatttgtacacattcttacactgaaataccatagaatccaatatttgtctcataaagacctatgtccaagtaatgaacttggaactacttgattcactggattgcaaaatatgttggatggttcattatctatccaataccaaatggtaatccaattcaaataatgtattaagttttatttttataattgaatagattgattggttgatttatacttgatggattggactgttagtggataaaaagattgaattgccacatatngtaatgaatactaatttgccataggttatggaaaacatanactgtaattgtttttgtactttaggtaaaactatat

SEQ ID NO: 8359 - DNA, 631 bp, Glycine max
  unsure (1)..(631): unsure at all n locations
tcctcggggccattcctgcgaaggcaaacatttggttaagttatttcacaagaaatataacaatcattacaaacaagggccaaacaacacttctcatggcacgagtgtcaacatgcactttataaaataatcatattggggtcatgctattttatgacacatacgtatttgcacacataaaaattttgtatgaagcattttacgacacctatccatgtacatattttttttgacaaaccttttcatgctacatcctatatatatacacacattttttggaaggcttcttttgttacctactcacaaatacacctattttgaaaaacacttttacgctacccatccaacactttgtaaggcacttcatgctatatatattcatattatgcaaggcattttcatgctatatatatccatattatgcaaggcattttatgtaactctcttgcacgcattttattcaacattttgcaaggcatttccatgctatatatatttacatatatacataccgttgaaagtatttttcatgctacctangtgcaaggtattcctcatggggcagccaaatttaaattctaataacacctctcaacatgtncaatattcatgccttttttcattcaaacca

SEQ ID NO: 8360 - DNA, 587 bp, Glycine max
agctttagatgcctttaaagtttttaatgctgaagtttagaaacaatgcggaaaacaaattaagatcgtgagatcagatagaggtggggagtactatggtagatacacagaggatggaccagcaccaagttcatttgtgaaatttcttcaagaacatgagattgttgcccaatacactatgcctggttcttcggatcagaatggtgtggcagaacgaagaaatcgaaccttattagacatggtgagaagcataaagagtaatgtaaagcttcctcaatttttgtggattgatgctcttaagacggctgcgtatatattaaactgagttccaaccaaggctgtctcaaagacaccttttgagttattcaagggttggaaaccaagtttgcgacatatacgcgtttggggatgcccgtctgaagtaagaatttataatccacaagagaagacactagaccctaagactattattgggtatttcattggatatgctcgaaggtctaaagggtataagttctattgtccatcccaccacactatgattgtggaatcaacgaatgcaatatttcttgaaaatgacttgatca

SEQ ID NO: 8361 - DNA, 391 bp, Glycine max
gcttgagccaacaacctctctaacactgagagacttttcaatattttctcacaaggagagggatgcagccggctttaccaaccattttcttcatgtctgtggaactgcaagcgcagcatatcgcagccgcaactgcttgctgagcacctaatgatccggactataacacatgagtcagactggggatcaaaccgagggaaaccaaggattcctaagggactaatacaaccagtttctcaatgctccaaccacagattcctgaggaagtggaccatcaagataagccagaagactcctaacaccaccttgtgatatgacacatattcttacatactcattgcttgcagcgaggttctgcaagcactctgcagcatgctctttggaacctaac

SEQ ID NO: 8362 - DNA, 314 bp, Glycine max
tggactagccagtgatggaatgaatccaaaggcgttttaatttctctacacagttcatggccaggtctagaaatttatagtttgcttccttggctgaaaatacatgatgttgtctatgatgatataaggcccaagacagccaggaaatgacattgatgtttatctaagtccgctgattgaagaccctaacaaagttgtgggacaagggggttttagtgtttgatgggttttgaaataagacttttcaaatgcgtgcaatgcttttttgtaccattaatgactttccagcatatgggaatttgagcggttaccgt

SEQ ID NO: 8363 - DNA, 443 bp, Glycine max
  unsure (1)..(443): unsure at all n locations
tatgctgcatgaattaggccaaataaatcttcataaatgatagatagtgtgatcattctaccagtgcattaaaggcccatcccaatttatcactctgcactacttgttacatgtgttaagttttcgtttaatgagcgtactataggcaaaggtgctgaaaggcgtgcctaagccactgaggcatggtgcatgaagctttttttttcttttttttaatcattttatgcctgctatcttttcaatgagttgtgtctatcaagttaatagtgtgttgaacttatttatttatgcttggtattgtcgngcattacagccttcggacattattttcttactttcaggttttgtctgtgacattggatgaatggtcaagtgatggaatagatgcaatgatttgaaatggacgaaattcttctgctaattcaatatatgacgcttatttt

SEQ ID NO: 8364 - DNA, 362 bp, Glycine max
gcatgcaagcttcaacatcagaccacttcctgtgtgctggaactttttcacatggacttgatggggcctatgcaagccgaaagccttggaggaaagaggtatgcctatgttgctgtggatgatttctccagattcacctgggtcaactttatcagagaaaaatcagacgcctttgaagtattcaaggagttgagtctaatacttcaaagagaaaaagactgtgtgatcaagagaatcaggagtgaccatggcagagagtttgaaaacagcaagcttactgaatactgcacatctgagggcatcactcatgagttctctgcagccattacaccacagcgaaatggcatatttgaaaggaaaaa

SEQ ID NO: 8365 - DNA, 285 bp, Glycine max
  unsure (1)..(285): unsure at all n locations
tcaacatcagaccacttcagggggcttttactacttctcatggacttgatggggcctatgcaagtagaaagccttggnngaaagaggtatgcctatgttgttgtggatgatttctccagatttacctgggtcaactttttcagagagaaatcagacacctttgaagtattcaaagagttgagtctaagacttcaaagagaaaaaaactgtgtcatcaagagaattaggagtgaccatggcagagagtttgaaaacggcaagtttactgaattctgcccatctgaa

SEQ ID NO: 8366 - DNA, 353 bp, Glycine max
agctttgaatgctctattcaatgtgttttgacaagaatatcttcagactgatcaacacttgcacagtggccaaggatgcgtgggagatcctgaaaaccactcatgaaggaacctccaaggtaaagatgtccagactgcaactattggctacaaaattcgaaaatctgaagatgaaggaggaagaatgtattcatgacttccacatgaacattcttgaaattgccaatgcttgcactgccttgggagagaagatgacagatgaaaagctggtgagaaagatcctcagatccttgcctaagagatttgacatgaaagtcactgcaatagaggaggcccaagacatttgcaacatg

SEQ ID NO: 8367 - DNA, 233 bp, Glycine max
atcccctacttttgatgattgtcaagaattactaatcgtgctttgaatagatctacacttccatcaattttatgctttattttgtacacccacttgaagccaagtgctttctttcttagaggcaattgtgtgactgttcaagttccattggtttcaggggcatgtatctaactttacactgtatctctccatcggctatctttcaccgcgtcagtataagtgacaaacttttt

SEQ ID NO: 8368 - DNA, 345 bp, Glycine max
agcttgtgtttcttcacgtctagtttatgaatgtagcatatagatccaaagacccttaggtgctttgctgatggcttcttcctgttccaagcttcaattggagtcttgtcttttacagacttagttggacatctgttgagtatgtaaacagcagtgtagactgcttcagcccagaatgtgttaggtagtcccttttccttgagcatcgatctagccatctccataactgtgtgattctttctctcgggcactccattttgttgaggagaatatgcaattgtaagttgtctctcaatgccttcatcctcacaaaatctttcaaactcgcgagaggtgtactctttg

SEQ ID NO: 8369 - DNA, 345 bp, Glycine max
agctttactaggcttgagctcggtttgagttgaatatgcaaggcttgagcttgactcattacctatcataggcttttttaaaggctcgacttggcttacataaaagcctggcttggcctacgagcctatttaaaagcttgcttaaagatgtttttgatcaattaattattttaaacctagtgaaatactaactaaaaaaacttataaaatttcatataagtaatgtacaaatccaaaaataattgataaataaaatcatattgaattcaagtcgttaaaatacaaagtatatcaaaagaaaatgaaaaaacagagcataatattaaaaaatgtatggattataga

SEQ ID NO: 8370 - DNA, 310 bp, Glycine max
tgtaccggttgacaatggtttcagagttagatggtgtgggattgaacaagcaacaattcaccacaagaatccaatgtctttggcttcaacaccggttttctccaagagctcgtcgacggccccgaagagcaccgtgtccgtctccttccttgcctcctccaacgttagtctgggagggatctccaggagaccctccgggacatacgtccacggtcccaacccggaccggtcaagaatcttgttcacaagcttgtagttctcgtcggagaggaaaccgacgcgtttcgcccggtcgagcaacatttccttg

SEQ ID NO: 8371 - DNA, 346 bp, Glycine max
agcttgcaaacccatggaagctcttaatatctcccacactttttggggtgggccattcttggatggccttgattttctcaaggtccacttggaccccatttctaccaactataaaccctaacaaaactatattatctatacaaaaggtacacttctctatatttgcatagagggtgtttttcctaaggactgaaagaacttgcctgagatgtcctaagtgatcatctacgctcctactgtacactaaaatatcattaaaataaacaactacaaatatacctatgaaatcccttaagacatgatgcataagcctcataaaggtgtttggtgcattagtgagcccaaa

SEQ ID NO: 8372 - DNA, 334 bp, Glycine max
agcttcgtggaatgctttttagataaaataactcgctctaaaataatctactattggtagatttaatctattataagtacataccctatttttctctattctactgacttatttaatatatattgcgataacatataaatgtataaaaaaatattcttggatgccttaattgctttaatttatgtcatacaaataaataaatttcttcaattacttaaatataattataaatttggtttttcgatgaaatgtgaatattctcacaaacgtttggcccatatcacttatcgggttaatttatgatctgtgtcatacttaaagttttttacctctt

SEQ ID NO: 8373 - DNA, 304 bp, Glycine max
  unsure (1)..(304): unsure at all n locations
ttgaaggttctgaggattatgaatgctgttaatacacttccaaggcatgcaacacctactgtgagcnnatggaataattcatgaggtaacgacaccttatacaacacaacataatggcttggcagaacgaagaaatagaactatccttggcatggcaatgagcatgttgaagtagaagaagctacctcattcattctggggaaaagttgtgagcacaacaacttatctggtgaatagatgtcctactaagagattgaaagagaaagtcccaaaaaaggtttggtctggaagaaagccattggtt

SEQ ID NO: 8374 - DNA, 355 bp, Glycine max
agcttatagccccgagagcatttgtgttagccaacaatttagccgctaattgttcttgaatccatatttctttcatgcggcctataaggttatgcctcagtcggacaaccccaaatatgcaagtgtttaatgctgggctttttgtcagtccaaagttcataaggggttttgttaactgctttacttggcaccctattaaggatgtaagttgtggtctttaaggctcctctccaaagcgactctggcaaagaagaatgactaaccatacttctcaccatatccttaagagtttggtttcatcgttctgctacaccattcatgctaagtattcctgacatactgtattgtggaacaa

SEQ ID NO: 8375 - DNA, 317 bp, Glycine max
  unsure (1)..(317): unsure at all n locations
taagctccttcaactgcacaaagctctttatgtttttagagtatccttgtggaaccttcacccgacgaagactctgncaaaacttatcttctcctttttggacaaggtatggcaagctaggggcaagtaaattttcttcccattagaccttggatgcaactgtgatcgtatgcccatatcagctagatcttgacaggtattgaagccatccttcatcttgccttgaatgttaaggagagtcccaatcacactatcacaaacatttttctccacatgcataacatcaatacaatgtctaacatcaagatcagatcagt

SEQ ID NO: 8376 - DNA, 368 bp, Glycine max
agctttgagcaaattcaaacgagattaaattttgactcggatgtccgattgagccctgtaatatatcgagacgctcgtaattgaaaactgaagctttgagcaaattcaaacgagaataaattttgactcggatgtccgattgagccgtaatatatcgaaacgctcgtaatagaaaacgaaagcacgtagcaaattcaaaccacaataaattttaactcggatgttcgattgagttctataatatatcgagacacttgaaattgaaaacagaagctctgagcaaattcaaacgacaataactttttactcggaggtccgaatgaatcccgtaatatatctagaatctcgtaattgaaaaaggaagctct

SEQ ID NO: 8377 - DNA, 349 bp, Glycine max
agcttgatcaaaacaattatctattcattccaatccactcaaatcatacaattgcttattcaaatcattctcaaacattcatttcatgcaaaacaatccactgcatatcattttcaatcaattcactattcaaacacgctttaggtacaagcaaacaactcaaagtgctgaaatttaaataactgaaattaaaataactgaaatatgacaacgaaatcagctggaaatataaggtgtttaaccttcaccaaaacatcttcaatgactccatatggccttgtgatggagcggtcaactaactggagggtcatgcgtgtgggcattatctctatctctccaagtcgctggc

SEQ ID NO: 8378 - DNA, 309 bp, Glycine max
tcaatggctcaatgagcattgggaaatttttgtcaatcaacaagtaaagatacccttttctataagagactctgtgatgaagttttatgtgatataatccctatggaagtagagcacattttgttgggtagaccgtggcaatttgacaagaaagcaatccacaatggtctcaccaatgaaataaccctcacccatggaagcaaaaagtttaaacttgtttccttgacaccttcacaagtggttgtggatcaagtacgaataaaaatcaaatgggatgaggaaaagaatagaaaaataaaagaagaacat

SEQ ID NO: 8379 - DNA, 312 bp, Glycine max
ttcgagtaatacaaatggttataacttttcacactgagctccgattcaggcttacaatatattgagacgctcaaattaaacatcggaagctctcgagaaattcaaatggtcataacatttcacccggatgtcctatccaggcgcatcacatatagagacgtacaaaattatacaacggaagctttcaagaaattcaattggtcataacttttcaaactgaggtccgattcaggcttataatatatctgggcgctcgaaattcaacagcgaaagctcttgagaaattcaaatggtcataacttttaactcaga

SEQ ID NO: 8380 - DNA, 331 bp, Glycine max
  unsure (1)..(331): unsure at all n locations
agcttttcaccagcagtggcagatccttcaagatcctcagaggagagggtatatgaggtggtgttgaaacaagccgcactggtcaaggagaagaataagggcaccaagaaagcactgaatttacacaaaccaacaggtgaaggtgatttaacccatggggatctgttgagtgctgcttatgatangtgtggtgaagtctgtgctgaatatgccaagacattntatcttggtactctctctctgtcctgttttaggccttattgtttttcttaatcattttcccttgatccaatgagtttttgcgcattcttttaaagctcattataatatc

SEQ ID NO: 8381 - DNA, 356 bp, Glycine max
agctttatgcacctttgagcggttttcctctactcagttgtatccagtgtttcttctaatgctcattaagaaacgaaatgcaaaatgtcttaatctcattattggttaagagaaattctatctttgtgctttcattcctcattcttcccattatttttttggaaaaaatgtgtgttgttctgatcggtttggggctttgtttctttaccatgcgtgcttgcattttagtgaaagttttcagaaacttcaaggtcttcagtcttttacattcacaagaattcaatgtcttctgccttttacatttcaaatacttaaatgtcttttatcttatacatttacaagacttcaatgtcttt

SEQ ID NO: 8382 - DNA, 358 bp, Glycine max
agcttttggggaggaatttagggtttcaaatcctacattagagactgacacggttatggaagttatttgctggttttgaaatgcttgatatctataatgggtattttatgattaaatttgatatgtaggaagacggaacaaaagtgatgaaggagggcctctggatggtctttgatcactatctcacggtcaaaacatggaatccagactttagctccccggcggaaaaaactaacaaaaccctggtatggatacgttatcatgaaccttgtttattatgacgaaagtattcttttggcattggcatcagcagtaggacaccctatcaaagttgataacaatatgaaagattttcgga

SEQ ID NO: 8383 - DNA, 312 bp, Glycine max
  unsure (1)..(312): unsure at all n locations
gtcagcttctagatatattatgcgccttttcattcttccgtttcaaaagttatggccatatgaatttctcgagagcntcgttgctcaatttcgagcgtctcgatatagtctgcgcgttaatcggacttccgtgtgacaagttatgaccatttgaatttctcgagggcttccgtttttcaatttcaagcttctcgatatattatgcgcctgaatcagactttcggttacaaaagttttgaccatatgaatttctagagagcctgccttgttcaatttcaagcgtcctgatatatcatgcgcctgaatcggact

SEQ ID NO: 8384 - DNA, 333 bp, Glycine max
agcttcttgtatatattatgcgcctgaatcggacttccgtgtgaaaagttatgaccattgtaatttctcgagagctgtcgatgtttagtttcgagcatctggatatattatgtgcctgaatcggacatccgtttgacaagttatgaccatttgaatttatcgacaccatacgttgttcaatttcgagcgtctcgatatattatgcgcctgaatcggacttccgtgtgaaatgttatgaccattttagtttctcgtcagcttccgttgttcaatttcaagcttctcgatatattatgtggctgaatcggacttccgtttgaaatgttatgacca

SEQ ID NO: 8385 - DNA, 312 bp, Glycine max
tctggtgggacatcttgacttgctttcctatctgacattcaccacagattctgccttcttctattttcagatgggaatgcctctaacagcacctttgtcaatgattttcttcatgcctcttaagtgcagatgtccaaatctttgatgccatattttgacttcatcttctttggagaatagacatgtggaggagtaactggtttcttgaggtgtccataggtaacagatgtcctttgatctgctgcccttcattaggacttcactcttctcatttgtcaccaagcattctgactttgtgaagtttacattgaa

SEQ ID NO: 8386 - DNA, 304 bp, Glycine max
ttgagcaaattcgaactacaattacttttaacttggatgtctgattgagtcccgtaatatatcgagacttcgaaattgaatgttgatggtcgttgcaaattgaaacgacaataactttttactctgatgtctgattgagtcccgtaatatatcgagacgctcgaaattgaatcttgatgctctgagcaaattcaaacgacaataactttttactcggatgtctgattgagtcctgtaatatatcgagacgctcgaaatttaatacgaaagctatgagcaaattcaaacgacaataattttttac

SEQ ID NO: 8387 - DNA, 328 bp, Glycine max
agcttcataattcaatttcgcgcgtctcaatagattacgggactcaatcagacatccaagcaaaacattattgtcgtttgaattagctcagagcttcagaattcaatttcgatggtctcgatatattacgggtctcaatcagacatctgagtaaaaaagttattatcgtttgaatttgctgagagcttcaacattcaatttcgagcgtctcgatgtattacgggacttaatcagacatccgagtaaaaagttatcgtcgtttgaatttggtcagagcttcaacattcagtttagagcgtctcgatatattacgggactcaatcagaca

SEQ ID NO: 8388 - DNA, 310 bp, Glycine max
tatgctgcaaacatttacattagaccttctcaacctcagcagcaaaatcaaccacaacagaacaattatgactctctagcaacagatacaaccctggatggaggaatcaccctaatctcagatggtctagcccttagcaacaacaacagcagcctgctccttccttccaaaatgctgctggcctaagcagaccatacattcctcctccaatccaacaatagcaacagccccagaaacgaccaacagttgaggctcctccgcaaccttccctcgaagaacttgtgaggcaaatgaccatgcagaacatgca

SEQ ID NO: 8389 - DNA, 354 bp, Glycine max
agctttaggttcaatggctccgatcacatctatgccctatatagaaaacaaccaaggtgctaccaagacgttcaaaggtatgggtggagcattaacattattagcgaaggcttggcacttatggcatttcttcacatggatgcaacaatcactctccatagtgagccagtaataccttgctctcagaatttttcgggccatggcatgtacattatcatgcgttccaaaggatccctcatgtacctccaccagcatttgctcagcctctctggcatccacacatcgaagcagtaccatgtcatggttcctcttgtataggatattcccactcaagaagaaaccggccgccaactt

SEQ ID NO: 8390 - DNA, 360 bp, Glycine max
agcttgcttgcctctagttgacatttgtgcggataactattaggtatcttcgcatgccacctgactcacgggttggggtgacagaactgtggggtggttgacaaaagcgggacttttgctcctacatatcttcaattgcgagactacatagttcttcaatttttgtgtgagactacaaatagtctcaatgttattttactaaaatgcgaacatgctaacatgctttagcaaagaaacaaaccttcaactgatcaaggcaacatatatttttttgaataaaaacaatgcgtctattggagaaggaaagtatgctaataaaattttctcataaccacaaatgagattttggatgttagcatt

SEQ ID NO: 8391 - DNA, 309 bp, Glycine max
ttttagtttataaaaaaatatagaaaatttcttaaatgatatgctaaacatagtcaatatttaatgaaaaatatgaagtatatgatatatttgaaggaaagcaaagtgataataaacaaatgtttgaacattaaataattattggaacaactcatttaattttaggttatgtgaatgtaccgaataataaacatgaagatagaaattgtgacctcatatattgggattgaaactcatattttaagatgatatcatatctcatcctagtaattattgttaggtctattgtgttgtctattgtcgggttat

SEQ ID NO: 8392 - DNA, 311 bp, Glycine max
tattgagagtgtaacaatctattctaatagcatctgcccaaagggatttttgtaggtttgtcccattcacaaagttctagcgccttcttcaagagatctatttttcctttccacaacatcattttgttgaggtgttctcggggcagaaaaattgtggtgaattccattttcttcacaaaacttttcaaaatactcattttgaaattcacctccatgatcacttctaattgaaataatactaagacctttctcattttgaataactttggcaagtttgtgaaaagcatcaaaagcatcatttttggttctca

SEQ ID NO: 8393 - DNA, 340 bp, Glycine max
  unsure (1)..(340): unsure at all n locations
agcttctgttctaaatttcgagcttctcgatatactatgggacacaatcagacatccgagtaaaaagttattgtcgtttgattttgctcagagcttttgttctaaatttcgagcgcctcgatatactgtgggacacaatcggacatccgagtaaaaagttattgtcgtttgattttgctcagagcttctgttctgaatttcgggcgtctcgatatactacgggacacaatcggacatcagagtaaaaagntattgttgtttgattttgctcagagcttctgttctaaattttgagcgtctcgacatactacgggacacaatcggacatccgagtaaaaag

SEQ ID NO: 8394 - DNA, 309 bp, Glycine max
  unsure (1)..(309): unsure at all n locations
tgcacagagaggccacttaatctccttcatagtccccaaaagaacactaaccaaactacaacacctnaacttcaccctcacctcatcacctttgtccccatcactgttcctcgagttgatggtcttcctcaagatgctgaaaccacttcagacatacccttctctttgttcccacttctcgccacggctttggaccgcaccgagaaagacatcgaacttctcctaagggaactgaaaccacaatttgttttcttcgatttccaacattggctgcccaacctgactcgaagcctaggcatcaagagtgtc

SEQ ID NO: 8395 - DNA, 261 bp, Glycine max
  unsure (1)..(261): unsure at all n locations
aacaaaacttacctttcncccttttattgaagatataaaaaacaccacctatatcccaaaaaataatcatctgaaaaataatgaagtttgaaataaatgaaaaatcactaatttccttagaaataaagaacaaattcatatcaagaaaactggaaattgcaaccaacagtaaccccaatgaacctaagaagtagaaatggcccaaaagatgtgcttgctctttgaacctccatcatagagtatatgactacattgtgtgag

SEQ ID NO: 8396 - DNA, 362 bp, Glycine max
agcttcttacaaagcatacggctttctggatgtagatgatgatatctatacagatggatcttatatatctatatatctatagatagatatatagatatagatatatagatatagatcatacaatgaagtaccgcacgagtgggtatataggaatccaaatctgccgaatcactcatgttatgatcttctacatcctaggtcttcccgttccttcatctggcttatgttcttcatgtagcattcagactgaatgactctatgaaattacgtcgctacttccacatggtacgggtaacgtaggagacatctctatttttcccggggggaatccttagaattaccacagcttagctttcaattcg

SEQ ID NO: 8397 - DNA, 364 bp, Glycine max
agcttaatatacatattaatatattaaaatatttcaattttaatatagaaagagtgatagtaaaatacaaatatagacacaaagacacacaaacatgatagtacttgtatttcccctagttaattaataaaagtaaaagagaacaaatgaattagttacatgaacataatttgagagtggtttacacatgagcaattgagggcaagaagaatagttggtattttactaattatttaggggcaaaatcagtcaaataaagcatacaccatatgagtaatttccattattaatagttatagataattgaatttaaaataattttgaaacactgatttcacgattaatagtgtgggtgttgttacac

SEQ ID NO: 8398 - DNA, 310 bp, Glycine max
ttattggcttaacttgatctttaactccttgtttggcccaatgccaactagcttaacttctctcacctactatctcttcaacacaataacctcttgggctctattcctaactcatggggtggtagcttgaaaaataacttctttcggttttgaaaaatgatcatagatcataacttgtcgagtggaagcattcctgcttctttgggtggcttgagtgaactcagagagatttatcttagtcataaccaatttagaggagttatcccaaatgaaataggaaacctttctagacttaaaactctagattttt

SEQ ID NO: 8399 - DNA, 340 bp, Glycine max
agcttccatcaagtgtgtttcatatttcaataacaattgtggattatatggcacaacaaatcgattatcaagttcaataccatttttagcactgtacgcccatcatttcttctcctataaattggaaatccatcttggtcaacaattgttgatccatggaattttttaaggaaatatctaatacacttcccattgaccatacacagtgatcttttatttgcaaacccacatggtccatgaatcatatggctggagactatttcaaataattcgggatggctgtgtttgtttggtatttctgctaaaatgatgcgatcaatatcctctggatttggatatt

SEQ ID NO: 8400 - DNA, 310 bp, Glycine max
  unsure (1)..(310): unsure at all n locations
gcaagttattagtttgagttaaaaattaaaagggtggaaacttaccttncatatcaatgtcatctttatataaagatagaggtagggacaaaatataaaaaatgggcaaatataactagtaactaggataagataagaanntaaataagtatttattcctttaanttattttntagaattaattttgacttttaaaattaaattataagaacatcatatttatcacaatttaaaattggtacttaaaatgatttanattatcataaaatatatattnttttaaaataattaatattaaaaattagatgac

SEQ ID NO: 8401 - DNA, 268 bp, Glycine max
  unsure (1)..(268): unsure at all n locations
agtgcaattattttcttagtggtatatgtagatgacatatttactaattggaaatgacataccaacattgcaaggcacaaagaatgggctatcataacaattcttcatgaaggatntgngagaagcagtctatattctatgtataaagaattatagagatagatataaaanggtgctttggactctccaatctatgtacattgatactatcttaaagagatataacatggataatccaatgagctatttctgtngtgtggaatactct

SEQ ID NO: 8402 - DNA, 285 bp, Glycine max
  unsure (1)..(285): unsure at all n locations
tcttagcacctgcggctgcagcttggtcttgtgaactgcatgtctgcttgncatttgctacaagtcttcagggaaggtgtggagngcctaactgtggctgttctgggctatgctgttgtggattggggaggaatgcatggtctgcttggccatcaacattttggaaggaatgagcatgctgctgttgttgctgctgagggctgcaccatctgagattagggtgattcctccatccagggttgtatctgttgctggagaggtcataattgttctgctgtaggtgat

SEQ ID NO: 8403 - DNA, 315 bp, Glycine max
  unsure (1)..(315): unsure at all n locations
atagaagactccaagaagattgngccagagaagcaagagaagaccctangattctcatgagtcttanggtagatttcgggcccatgggctaagtatgagcccacttatctttgtacatattagaataatgtttcattanttttgggactnttatttanggctccataatgtaggtagggtaccctagaaatgtangatttttcggcccttgtattttanggaacctagactagttttttgtattatgggtagttntgtaatttcacatgcattaagtgaatatttgatgtgtgtgtnggggaaataaattaatta

SEQ ID NO: 8404 - DNA, 397 bp, Glycine max
  unsure (1)..(397): unsure at all n locations
ctgctggctgatcattagaactaatgaactcagtgacaatctncttggacagaagcttctcctaaatgaaatgacaatcaacctctatgtgcttagtcctttcatgaaagactangtttgaggcaatatgaagaacaacctaattatcacagtacaacttcatttgcaactcttcacagaaccctcattcttgcagaaattgttaatccagatgagttcacaagaaccatagcatagatcgatattaacttctgattggactgacaacaacatttgttcttgctttcaaagataagattcctcaatgaaacacataactgatgcgatctctatcatggacagtcagccatcacatacatatctcatagtgcgtataccctngcttcatacacatctt

SEQ ID NO: 8405 - DNA, 234 bp, Glycine max
  unsure (1)..(234): unsure at all n locations
agtctattctgcaaatactagttntgaatctctgctggagtcactacttgcctgtgctaagccttctccacagtctggtggcattgctaacaagctctgcattcgatagctcagtgtgttgctgttctatgcctngctgcttgtgatcagaagtgtcatctacagtgcaatgctcactgacattctcaaggatgacagcagttctaacttcgtaagctttctcttcagtatttc

SEQ ID NO: 8406 - DNA, 347 bp, Glycine max
  unsure (1)..(347): unsure at all n locations
tcttcaggttcgaagacaaccttctttcttccttttgtggcttggttagcataactnttatntctcctctncaattgatttttcactctctcatgaaacttcttcacatagtccgcctttgcttgagcttctttatacttaanaacagaaacattatgcataggcaaaagatcaagaaggagtagtggggtaaaaccattaacaacttcaaaaggagaaacaatagtggtgctatgaacaactctattgtaagcaaaatcaacatggaggtaaacaaccttcccaagttttaagttcttcttanaactggccctaagcaaagtcccaatgtccctataacaacttcc

SEQ ID NO: 8407 - DNA, 139 bp, Glycine max
gatgcatgggagatcctgacaaccactcatgaaggaacctccaaagtgaagatgtccagaatgcaactattggctacaaaattcgaaaatctgaagatgaaggaggaagagtgtattcatgacttccacatgaacattc

SEQ ID NO: 8408 - DNA, 253 bp, Glycine max
tatcacatgatcgagaagaacaacacatgggagttagtaaatcgtcctcatggaacagatatcataggtgttaagtgggtctataagacacaactcaaccctgatggcaccatacagaaacacaaggcgaggctagtatctaacggttactcacagccacccagaatagactacaatgagacattggcaccaatagctcatcttgataccataagagctctaatagctcttgcgtcacaaagaggatggagta

SEQ ID NO: 8409 - DNA, 306 bp, Glycine max
  unsure (1)..(306): unsure at all n locations
agtttctgactatgctcttgtgatgtgtaacatgcttcannaagagagagcaagaaatgaagagccaatggttaatacatgggcagagatgaaaaggattatgaggaagcggtatatgccaactagttactcaagggaattgaaattcaagctccanaaactaacccaaggcaacaagggggttgaggagtatttcaaggaaatggatgtgctcatgattcaagcaaagattgaagaagatgaagaggtaactatggctcgattcttaatggttgactaatgatgttngtgaatattgtgagctac

SEQ ID NO: 8410 - DNA, 450 bp, Glycine max
  unsure (1)..(450): unsure at all n locations
gaaaaaaaaatgggcatttacctggggtgaaaagcaagagcaagcctttgctttgctcaaagaaaagcttactaaggcacctgttctaactcttcctgacttttctaaaacttttgagctagaatgtgatgcctctggagtgggagttaaagctgtattgttacaaggtgggcaccctattgcttattttagtgaaaaacatcatagtgccaccctcaactaccccacctatgataaagagctttatgccttaataagagccctccaaacttgggaacattacctaatttccaaggaatttgtcattcctagtgatcatcaatcacttaagtacattagatggcaaagcaagttaaacaagaggcatgcataatgggtagagtacctagaccaatttccatatgttatcaaatacaaaaaagganaaacacatgtggtagttgatgccct

SEQ ID NO: 8411 - DNA, 327 bp, Glycine max
  unsure (1)..(327): unsure at all n locations
tcatgaggaaatgagaaccttanaaactactttagcatttctttttattggaactaataatcttaatagacttttaggatagtgtagaagttcctttgacaaatctagaaatggatattgttagtgcttagctctactgagttttaaaagattggctaagattttgttaaaacataagcacttagacaatgaaagaaagctggagttgctgcacatgatgtccaacgttatgtcaaggaataagatcgggctgcacaatgcacaaggcaagataaaatgtcaaatgaagaattgaagctgcagaatccacgatgtcggatacaatgt

SEQ ID NO: 8412 - DNA, 361 bp, Glycine max
  unsure (1)..(361): unsure at all n locations
tgccttgccccttgatatatttgagggactcatgtgtcatttatgaatgacaanatttccttgggataaaggtagtgttgccatgttttcaaagcacgtactaaggcatacaactccttatcataagttgaatagttaagggtaggaccacttaacttttcactaaaataagcaattggatggccttcttgcatcaacacagccccaatcccaacatttgaagcatcacactcaatttcaaaagatttttgaaagtttggcaatgcaagtatgggggcattagttagcttttgcttaagaacattgaaagcttcttcttgtttctctccccatttgaaaaccaacatttttcttgagcact

SEQ ID NO: 8413 - DNA, 438 bp, Glycine max
  unsure (1)..(438): unsure at all n locations
aatactcagctcgcatacaagattctacttgcctggcacttcaaaaccttcagtgtgtgtcatatagangnctacctgtaaatccccatgcaagaatgcagttgtaacatctaactgctccaagggaagattctctgcagctactatgctcagaataactctgatggtactcatctttacaactggagagaagatctctgtgaaatcaattccttgtttctgctgaaaccctttcaccacaagtgtcgccttgcatcttcttcttccgtcacattcttcctttagcctatagacccacctattctgtaatgccttctttccttctggccattaagtgcaagaccacgtcttattcttctgaaggaagtcatcttattcttcattgctagcttccacctcaatagtgtcattcccctgtgtagcctccatgaaacattc

SEQ ID NO: 8414 - DNA, 337 bp, Glycine max
  unsure (1)..(337): unsure at all n locations
gtcacctgccgcatgcagcttgacgttaatctcaaaatggcaaagacatgaccttgngtttgtttaccaaggatgtcatacaaagatgaaacaaattaaaacctctttttcaagcaaaaactttgtttcctcaagaccacttgaactattacatattgatctgtttggctacaatgaatgactacattagatggacatgggtaatgttccttgctcataagaatgagttctttgaggtattctttataatttataaaagagcttaaaatgaaaaaaaagtctgcgttacttcaattagaagtgatcatggtggagagttttgaaatgagaacttttt

SEQ ID NO: 8415 - DNA, 480 bp, Glycine max
tccttgagaaaattcctaaagaagctagagcttttcttttcacacctctctaatagctaagctcacctccttgagatgagaagctagagcttagctacacaccccctataatagctaagctcacccccatgacaaaatacatgaaaatacaaaaaagtccctactacaaagactactcaaaatgcctcgaaatacaaggctaaaaccctatactactagaatggccgaaatacaaggcctaaacaaaggtaaaatctattctaatatttacaaagataagcaggctcatacttagcccatgggctcgaaatctaccttaaggctcatgagaaccctagggccttcccttggatctctggccaatctacttggagtcttctatccaatgcccttgcgggatatgattggatcattcctcccttcttctcattctctctatttgggtcacgcttttttttgtcccagcaggatgatcgaatt

SEQ ID NO: 8416 - DNA, 402 bp, Glycine max
  unsure (1)..(402): unsure at all n locations
ctattaaactaagcttatcatctttgataaggatgcccccatgcgtattgtttttntacacattagctcaaatggggtgtccaataggtgcctgaatgataaggtggtagtcaccgcacgcttgaggcaatcaaaagcctctttgcaccggtcatcaaaatcaaactccacctcctgttgcacagattggacagtggaaaggccactttgctaaaatctttgataaagcacctataaaaccctgcatgaccaagaaaagaacgaacttcttgcatgccaaaggggtaaagcaattgtgaaataacatctatttttgcagggtctacctctatgtccctactggaaatgatatgcactaaaactattcctttgtctaccatgaagtgacatttttcaaaattc

SEQ ID NO: 8417 - DNA, 274 bp, Glycine max
cagatataatccacggtggagtaatcatccaaatgtaagaaggacaagtcctccacaacaacaacagcctgtgccttcctttcaaaatgctggtggtccaagcaagccattgttcctccttcaatacagcagcaggaacaacaacaacagtcacaacaaagacaacaagccactgaggcttctcctacaccttccttaaaagagttagtgaggcaaatgaccatccagaatatgcaatttcagcaagagaccagagccttcattcagagtctca

SEQ ID NO: 8418 - DNA, 431 bp, Glycine max
tgaccaggaattacttgtatgggttggatgttgaattctgtttgttcctggtgcggagatgatggtacagcgggtgaaccagaagcggaaatttcttttggtgaggtagccatggaaaagcagagcgtttggaatgatttcgtaaatctcagaaggctattgggaaatgctggtaaaaacacgaatgccaagcagatataaatttgaatgaagaatgtagaggggcgtgtgaagcaacggtcgaattcgttttggcttaatagtgaacgtgctattaatgttaagtgattcgtttgggcacgttcaaattgctgtagttgctataattcctctagcaaacaaatgcccagcttgcccctcagtttttcaaactgatttgcatgcaaagcctttgtgaaaatatctgctatttgttcctcaatgtcaacatg

SEQ ID NO: 8419 - DNA, 240 bp, Glycine max
  unsure (1)..(240): unsure at all n locations
cttaactcggatgtccgatcaggcgcattttatttgagtattttganaanngaaaacagaagcgctcgagaaaatcgaagggccataactcttcacacggatgtcccgatcgggcgcataatatgtcgagacgctcgaaaatgaacaacagaagctctcgagaaagtccaatggtcataactttccactcggaggaccgaatcaggcgcataatatatctatacgctcgaaattgaacaa

SEQ ID NO: 8420 - DNA, 264 bp, Glycine max
agaaactagaacttatctaccccgcccctataataactaagctcacccctatgccaaaaaaaacatgaaaatacaaaaaaaaagtccttactacaaagattactcaaaatgccccgaaatacaaggctaaaaacctatactactagaatggccaaaatacaaagcctaaacgaaggaaaaacctattctaatatttacaaagagaagtgggctcatacttagcccatgggctcgaaatctaccctaaggctcatgagaacccta

SEQ ID NO: 8421 - DNA, 281 bp, Glycine max
acgacaataactttctactccgatgtctgactgagtcccataatacatcgagacgctcgaaattgaatgttgaagctctcagcaaatttaaacgacaataactcttttactcatatgtcggattgagtcccgtaatatatctagatgatcgaaattgaattctgaagctctaagcgaatccaaacgacaataactttttgctcggatgtccgatcgagtcccgtaatctaatgagacgctcaaaataggaatctgaacctgcgagctaattcagacgacaa

SEQ ID NO: 8422 - DNA, 252 bp, Glycine max
agcttctgtccctgagaaactggttcccagatgacatagtggagttgaagatgctgaaaaccctagccttgcaacaagtcctagggaagtagacacggagatggacaagaaaatccgcagtattgtgagtagcattttaaaagacgcctctgtttctgaagctgatgaagatgttccaacatcttccaccccgaatgtttgtgtgcccgatgctaaaaaatatggggcaacatcttaccgcccaagtgctga

SEQ ID NO: 8423 - DNA, 267 bp, Glycine max
tgaatggttcgttcagtctgaccatctgtttgaggatgataagctgaactaagcttcagctttgtccccaaggcttcatgtagactcgtccaaaatcgcgaagtgaacctcggatccctgtcagatacaatactagaaggaattccatgcaaccttactacttccttgatgtacaactccacgagtttctccattctatacttcatattcactgggataaaatgagcagatttggtgagtcgatctactatgacccacacagcatca

SEQ ID NO: 8424 - DNA, 364 bp, Glycine max
  unsure (1)..(364): unsure at all n locations
tgagccttttgtaaatggcgacataaagtagcatgttaattgttttgtgnaaccaacaagtcatcaactacttctgcctgaaaggtaccctanaggtactggggtattgacgatgggagcttcccataagtggcttcggatattgaaataccagtgctcaaatgaaccaaagtattgtatgaccactccgtaataggaagatacttgaaccactatgatggtcgatcatggacaaacgaatggaagtattgctctaaaacatggttgaggacctccatctgtctatcgatttggggatgataggcagtgctcatccatagcttcgtcccacataagcgaaagagtttccgccaaaaggcactta

SEQ ID NO: 8425 - DNA, 351 bp, Glycine max
  unsure (1)..(351): unsure at all n locations
agcttttgacggactataccaagctcnatgactcgttattgagaaagatctatatataggcttgctaaggatagagagaggaagactacagatttggatcaagtaaagtgtgttaaggatgaagaaagcaaagtcttagtgcatgaaaaagatattaaggaaaggtggaaggcgtatttccacaacttatttaatgatggatatggatatgactctagtagtctagacacaagagaagaggaccggaactataagtactatcgtcggattcagaaacaggaagtgaaggaagcgttgaaaagaatgagtaatggtaaggcggtggtgccagacaacatacctattgaagtg

SEQ ID NO: 8426 - DNA, 291 bp, Glycine max
agcttgcaaatctatttttaatccatgcccataaataaaataaaatctagataagataagataagataagatctagatgaaatcaaatctagataagataagataagataagatctagatgaaataatatctagatgagatcaaatctagataagataagatctaaatgaaataatatctagatgagatcaaatctaaataatatataaatgagataaaatctagataagataagatttggtagaataaaatagtctactctctccaagtccaagcccaattctggattca

SEQ ID NO: 8427 - DNA, 282 bp, Glycine max
agctttcaactaaatttacaatgttctaatcaatttcaaaatggtgtaatcgattacaatatattggtaatcgattaccagtgtgtttgaacgttgaaattcaaattcaaatgtgaagaatcacatcctttcacaaaaatgctttgtgtaatcgattacaatgatttggtaatcgattaccaatgataagttttgaacaaaaatcaaaagatgtaaatcttccaaaggttttcaagtttttttaaaggttataactcttctaatggttttcttgactagaca

SEQ ID NO: 8428 - DNA, 361 bp, Glycine max
  unsure (1)..(361): unsure at all n locations
ttgatctaccaccaccaccgccaccatcatcttagttttctattatttttaatattactagtactttgttttctagtcgtgtatttagctatattatgacatttggataatttagtatttctttatttgcatggtttgattgaacaattatgaattatgttatatgactatgtgatttttatatatttgatctattcatgtttcttgcttcatgattggtttatattcttcaatgtatgtcttgtgaatgattaatagtatatggttgtcttatacttgttacgcactttggctttntgttgatgccaaagggggagagaaataggaattaaatcaagaactcacataagtaatcaactta

SEQ ID NO: 8429 - DNA, 344 bp, Glycine max
cttgatgcaacatttggagaggttaatgaaacaacgagatgatgcgctccatgagaggttggatcaaatggagaatagagatcataatgaagaagaaaggaggagaagatggaatgatggtgttcctagacaaaaccgaattgatggtattaaactcaacattcctccatttaaaggaaagaatgatccggaggcctacttggagtgggagatgaaaataaagcttgttttctcatgcaacaactatgaggaggaccagaaggtgaagcttgctgccacggagttttccgactatgctcttgtgtggtggaacaagcttccaaaagagagagccagaaatgaag

SEQ ID NO: 8430 - DNA, 285 bp, Glycine max
agcttccctttctttggccaatgctggactcgtttggcagtgatttccttggcaatttgatgctcagaaacatcaatatctatcactccatcagtaggtctgcccagatatttgttaatcacagcaggggagaatttaacacactttcctctgacaaacaccttttgatactcatcactttttctgttagatatgtcagagggaatgttgacaatgaattccctgactaagccttcatagcaatctcccaacttgctgacagtcttcagcagtccagcagccttg

SEQ ID NO: 8431 - DNA, 281 bp, Glycine max
agcttattacgtgttgatgattataacacatatattgtatatgaattgttaaaataaattaggaattaatagttcaaataataaaattaaaattgaaggaaattaatatatcaagattcaacgataaattctttcaatgcatttttagtttaattatttattaactctttttaattgaaaataatatagttcgatttaatatatacatgttttgtgccatgtaaatattaatactgtgtgatgtttatatgatttatgaggtgtgataacatgttaagttg

SEQ ID NO: 8432 - DNA, 326 bp, Glycine max
  unsure (1)..(326): unsure at all n locations
tatgcattcaatatcctgatgagggtgtttcatatgttcttaagactggactaatacatttgctgcccaagtttcatggtcttgcaggtgaagatcctcataagcatcttaaggagttccatattgtttgttccaccatgaagctccctgatgtccaagaagatcatatctttctaaaggcttttcctcattctctggagggagtggcaaaagattggctatactaccttgctcccaggtccattttcaactggtatgaccttaagaggatattcttggagaaattcttccctgcatctangaccactgccatcagaaaagacatt

SEQ ID NO: 8433 - DNA, 289 bp, Glycine max
agcttatttcaggttgactaattgttgagttctgcaaagcccccactacaaaccgatagagagtaggatcaaaaaagatatcagccctagacttagacagtttacagttagtaaccataggagaatatatgagttgtgcctctgccatgtgagttttctgtaagagatttctgatatatgtactctgagtaagtactaaggagttatcagaaagagtcttgacctcaataccgaaaaaatagtcaaactttcctagctgttttaaagagaaagtggagttaagtttggc

SEQ ID NO: 8434 - DNA, 363 bp, Glycine max
tgaaggaaaactggatgcattggttaacttggtaacccagctggccttgaatcaaaaatctgtacctgtcgcaagggtttgtggtttgtgctcctctgctgaccaccatacagacctttgcccttccatgcagcaacctggagcaattgagcagcctgaagcttatgttgcaaatatttacaatagacctcctcaacctcagcagcaaaatcaaccacagcagagcaattatgacctttccagcaacagatacaaccctggatggaggaatcaccctaacctcagatggtccagccctcagcaacaacaacagcagcctgctccttccttccaaaatgctgctggcccaagcagaccatacat

SEQ ID NO: 8435 - DNA, 368 bp, Glycine max
tctcaggaagtttctcaagggagctacctatgctataaatacgagcatgtgtaacacttgttgtaactgtgatgaatgagagtcttgtgagacacacttcaaagttcaacttctctgcctctttttgatgtagctccatgtggagcttgtaagccttggatcttcttcatcaatggattcctttgcttcttgaggtttgattgcgatctaatatagaacgagaaagatgaatggagacttcacatcaagtataagatgggtatacaagaagctcaccaccataggaagccatggataaaagcttaaaggtagaagaagatgaatgaatggagaggaagagaagagcatgaaatttactgcctctaaag

SEQ ID NO: 8436 - DNA, 282 bp, Glycine max
agcttgatatttacctctaagttcttctccaaagccttcacttgttccacacttagtcgacgcttcttctcagattgatgccccggttcttcaacacacccttcctcgtcgagtccgtccaacatcgatcggaactccctgccatacatgtggtggctgttcctcggactatgttcctctaaaccaatgcaaattaaatcagacatcatcattattagtataaccaacataaaacatggatcttggatctgtgtctgaattttaaaaaacaaaaaccaatat

SEQ ID NO: 8437 - DNA, 288 bp, Glycine max
agcttgccaccacgaagttttccgactatgctcttgtgtggtggaacaagctacaaaaagagagagcaagaaatgaagagccaattgttgatacatgggcggagatgaaaaggatcatgaggaagcggtatgtgccggctagttactcaagggatttgaaattcaagctccaaaaactaacccaaggcaacaagggggttgaggagtatttcaaggaaatggatgtgctcatgattcaagcaaagattgaaaaagatgaggaggtaactatggctcaatttcttaatg

SEQ ID NO: 8438 - DNA, 285 bp, Glycine max
agcttctacaattggtttttcctaattcctttacactttcctcacctctcaatgagccagtgaaaaagaatgtggcattcacttgagatgaaagacaagagcaggcctttactttgctcaaagaaaagctcaccaaggcacctgctctagctctttttaacttttctaaaacttttgagctagaatgtgatgcctctagagtgggagtgggagttgtattgttacaagatggacaccctatttattattttaatgaaaaacttcatggtgccaccctcaactacc

SEQ ID NO: 8439 - DNA, 282 bp, Glycine max
agcttgttctttacctctctatcatccccctcagcaagaatcttgagcacctcctctgcgagcttctggcagtgctgtggatcaatctgctgctcaaaagcctgagagattttcctctgaagccaataagcatcaatatcctgcacattcaaacccatcccttcattaccctcttccatatcctcatcatcaattccacccatctgcatagccccagaactgttcggctctgtgacatcctcatcctcttcctcctcatcctgcacaatatccaaatcactc

SEQ ID NO: 8440 - DNA, 353 bp, Glycine max
tcaacatctcaatttcgagcgtctcgatatatgacgggactcaatcagacatccgagtaaaaagttattgtcgtttgaattggctcagagcttcaacattcaatttcgagggtctcgatatattgcggtactcaatcagacatccgagtaaaaagttattgtcgtttgaattggctcagagcttcaacattcaatttcgagcgtctcgatatatgacgggactcaatcagacatccgagtaaaaagttattgtcgtttgaattggctcagagcttcaacattcaaattccagggtctcgatatattacgggactcaatcagacatcccaataaaaagtattggtcgttggaat

SEQ ID NO: 8441 - DNA, 282 bp, Glycine max
agctttgagccaattcatacgactttaactttttactccgatgtctgattgagtcccttcatatatcgagacgctcgaaattgaatgttgaagctctgagccaattcaaacgacaataactttttactcggatgtctgattgagtcccgtaatatatcgagacgctcgaaattgaatgttgaagctctgagccaattcaaacgacaatacctttttacttggatgtctgattgagtcccgtcatatatcgagacgctcgaaattgaatgttgaacctctgag

SEQ ID NO: 8442 - DNA, 288 bp, Glycine max
agcttttctttgagcaaagcaaaggcttgctcttgtttttcaccccaggtaaatgccacattcttcttcactagctcattgagaagtgatgcaattgtagagaaattaggaacgaaccttctatagaagcttgctaacccatggaagctcctaatatctcccacactttttggggtgggccattcttggatggccttgattttctcagggtccatttggaccccatttctaccaactacaaacccaaagaaaactatattatctacacaaaaagtacacttctctata

SEQ ID NO: 8443 - DNA, 371 bp, Glycine max
tgccgccacggagttttccgactatgctcttgtgtggtggaacaagctacaaaaggagagagcacgaaatgaagagccaatggttgatacatggacggagatgaaaaagatcatgaggaagcggtatgtgccggctagttactcaagggacttgaaattcaagctccaaaaactaacccaaggcaacaagggggttgaggagtatttcaaggaaatggatgtgctcatgattcaagcaaatattgaagaagatgaggaggtaactatggctcgatttcttaatggtttgactaatgatatccgtgatattgttgagttgcaagagtttgttgaaatggatgatttgcttcacaaagcaatccaagtggagc

SEQ ID NO: 8444 - DNA, 280 bp, Glycine max
agcttcggtagttcaatttcgagcatctcgatatattatgcgcctgaatctgacatctgtgtaaaaagttatgaccattttagtttatcgggagcttccgtttttcaatttcgagcgtctctatatgtgatgagctcgaatcggacatccgagttaaaagttatgaccatttgaatttctcgagtgctttcgtttttcaatcttgagcgtctcaatatattatgcgcttgaatctgacctccgtgggaaaagttatgaccatttgaatttctcgagagct

SEQ ID NO: 8445 - DNA, 280 bp, Glycine max
agcttgtagagttgagtctcgtatcagtttcatcgattaccgatatctcgtaatcgattgcactattgtttgtgatgtaagctaaattggagcttgtaggcctatgatcttcttcaccaatggatttctttgattcttggaagatgaatgacaatggaatggagaaggaagagagagaggagaccccactttaaggagaagatgagtcaagaagaagctcaccatcataggaggctatggataaaagcttggaggaagaaggagatgaatgaagggagag

SEQ ID NO: 8446 - DNA, 288 bp, Glycine max
agcttgtaagaagacaatttccaattatgctcccttatgcaatgacgattaataagtctcaaggccagtcattatctactgttggactatacttacctaacccattgtttagtcatggaattataaatcaaagaatggattaaaagttttaatacatgataaagacaaaacaagcttgacctctaccaccaatgtagttttcaaagaggctttcaaaagcctgttaaggtatatatataatatctatatactgaccattttccttaagcattataatgtattcactac

SEQ ID NO: 8447 - DNA, 281 bp, Glycine max
agctttgaaaaaattcatatgctaataacttttcactcggttgtccgattcaagagtatcacatattgagacgctcgaaattgaacaacggaagctctcgagaaattgaaatggtcataacttttcactcggatgtcccattcaggtgcatcacatatcgagacgctcgaaattgaacaacgggagctctcgagaaattcaaatggtcataacttttcacacggaggtcaaattcaggcgcatcacatatcgagacgctcgaaattgaacaacggaagctc

SEQ ID NO: 8448 - DNA, 306 bp, Glycine max
actcagctttcagaaattaaattgtcataacttctttctcggaggttcgattcatgcgcataatatatcgacacccccgaaattgaacaatggaagctctcgagaaattcaaattgtcataacttttcactcagaggacccattcatgcggataatatatcaagacgctcgaaattgaacaacggaagctctcgataaattcaaatggtcattacttttcaactggagtttcgattcatgcgcatcacatatagagacgctcggaattgaacaacggaagctctcgagaaattcaaatggtcattg

SEQ ID NO: 8449 - DNA, 272 bp, Glycine max
agcttccattgttcaatttctagcgtactcgatatattatgcgcctgaatcggtccttttagttaaaagttatgaccttttgaatttgtcgagagctttcggtgttcaatttcgagcgtctggatatattatgcgcctggatcggacctccgagtgaatagttatgaccatttgaattatgtcgagagcttccgttgttcaattttgagcgtctggatatattatgcgcctgaattggaccttcgagtgaattagtatgaccaattgtattg

SEQ ID NO: 8450 - DNA, 358 bp, Glycine max
tctacattcaatttcaagtcttttcgatatattacgggactcaatcggacatccgagtaaaaagttattgtagtttgaatttgctcaaggcttcggtattccatttccagcgtctcgatatattacgggactcaatcggacatcagagtaaaaagttattgttgtttgaatttgctcagagcttccgtattccatttcgagcatctcgatatattacgggactcaatcagacatccgagtaaaaagttattgtagtttcaatttgctcaaggcttcggtattccatttcgagcgtctcgatgtattacgggactcaatcagacatccgagtaaaaagttattggcgtttgaatttgct

SEQ ID NO: 8451 - DNA, 279 bp, Glycine max
agctttgagaaaattcatacgacaataactttttactcggatgtctgattgagtcccgtaatatatcgagtcgctcgaaattgaataccgaagcgctgagcaaattcaaacgacaattactttttactcggatgtctgattgagccccgtaatatatcgaaaagctcgaaattgaatgttgaagctctgagcaaattcaaacgacaaaaactttttactcggatgtctgattgagtcccgtaatatatcgaaaagctcgaatgtgaatgtagaagctct

SEQ ID NO: 8452 - DNA, 273 bp, Glycine max
agctttatctccttcaactgcacaaggctcttaatatttgaagagtatccttgtggaaccttcacccgacgaagacactgacaaaaacttatcttctccttcttggacaaagtatggcacgctgggggcaagtaaattttcttcccatcagaccttggatgcaactgtgatcttatacccatatcagctagatcttgacgggtattcaagccatccttcgccttgccttgaatgttaaggagcatcccaatcacactgtcacaaacatttttc

SEQ ID NO: 8453 - DNA, 283 bp, Glycine max
  unsure (1)..(283): unsure at all n locations
agcttgacaggttcaggttcatgtgctgntattagtggaggcactccaatttgcttgccagacctcaaggtgatggcactcacattttttggattttgcatagtttgtgaaggcaatttgtcagaattttgggactgagcttggttcaattgagtagccatctgccccctctgatttgtcagactctgaatgaaggctcttatttcttgctgaaattgcatattctggatggtcatttgtctcactaactcctctaaggaaggttgagaaggggcctcatttg

SEQ ID NO: 8454 - DNA, 242 bp, Glycine max
  unsure (1)..(242): unsure at all n locations
tctacattcaatntcaagcttttcgatatattacgggactcaatcggacatccgagtaaaaagttattgtagtttgaatttgctcagggcttcggtattccatttcgagcgtctcgatatattacgggactcaatcggacatcagagtaaaaagttattgttgtttgaatttgctcagagcttcggtattccatttcgagcatctcgatatattacgggactcaatcagacatccgagtaaa

SEQ ID NO: 8455 - DNA, 284 bp, Glycine max
agctttgagaaaattcatacgacaataactttttactcggatgtctgattgagtcccgtaatatatcgagtcgctcgaaattgaataccgaagcgctgagcaaattcaaacgacaataactttttactcggatgtctgattgagtcccgtaatatatcgaaaagctcgaaattgaatgttgaagctctaagcaaattcaaacgacaaaaactttttactcggatgtctgattgagtcccgtaatatatcgaaaagctcgaatgtgaatgcagaagctctgagca

SEQ ID NO: 8456 - DNA, 357 bp, Glycine max
tcattcttagaatgaagttagtagagatatatatatcgtgaataatcatctataaaggttatgaagtatttcagactatttgcatccatgtctggacaacatatgtctgtatgtatgatttctaataaattaaaactcctctttgcaccctttttagacttgttagtttgcttacccttaatgcaatctacacaagtctcaaaatcagcgaaatccaaagtactaagtactccttcatttactaatcgcttgattctctcaataaaaatatgtcctaatctctggtgtcacaatatagaggttcttcattcacaatacatcgttttaacccaacagaaacgtgcatagaagtagcgt

SEQ ID NO: 8457 - DNA, 280 bp, Glycine max
agcttgccaaatgctctattggctgatgagttggtccatcctctcgaagtccaatcgtatcatgagtcatcacataaataacttcagcttcacacagtgcataaatccttatggcagctctcatgtagtcagtgaagacaaagggcatttatattttgctgaaacagatttcttgtagcatatgcagggctttctggagtgtatgtctgaatgttgaaatttaattagaagggtagtcaataatccagaaacaaatgatggaagtcaagttttatttatc

SEQ ID NO: 8458 - DNA, 338 bp, Glycine max
tctacctcgccaggggcatgaattcggtgtccacattcacgctaaccgcttcaactaaatgtctgggattggcatcacaatgttttgctcgagctaattcttcgatcgctaatgtctcctttagttcaatagcaatctcactcatgattggcctttcgctgggattttgagaaacacaagccattgctatttctaaggctttccaagctgagttaatgtcataatctccttctaaccttgagtcaactatggccctgatatcccctttctcaatcaaggacctaacccttccacttatgtgacccttttcttgattcctttccattactggttgggtt

SEQ ID NO: 8459 - DNA, 301 bp, Glycine max
  unsure (1)..(301): unsure at all n locations
agctttncgtcaatggtattacaagttctatcaagtcattaccttgtatggttttgaggaaaatgcagctgatgattgtgtatatcacacgttcaatgggagtaaatacttattcttggtattatatgtcgattatatactgcttgataggagtaatataggcttcttataggagactaaaaaaatttatgaccaaaaattttgaaatgaaaaatcttggggaagcctcttttgtgttaggtattaagatactaagagatcactcccaaggtatcctaagactgttagaagagagttatat

SEQ ID NO: 8460 - DNA, 308 bp, Glycine max
tgctaacccatggatgctcctaatatctcccacactttttcgggtgggccattcttggatggccttgattttctcaaggtcaacttggaccccatttttaccaactacaaatcctaagaaaactatactatgtacacaaaaggtacacttctctatatttgcatagagggtgtttttcctaacgactgaaagaacttgcctaagatgtcctaagtgatcatctaagctcttactgtacactaaaatatcatcaaaataaacaactacaaatctacctattaaatcccttaagacataatgaataagcc

SEQ ID NO: 8461 - DNA, 294 bp, Glycine max
agcttggctctggccattataaccatttcattcttaagttccttaacctttaaatagacattctggtcaagtaagtgcttttctgcatcaaacagatcaaacttgatcttctaatcatctatgcccatttctagtttatcctttcccatatccaccacacaaccggcggttaacataaagggatggcccaaaatcaaggggattttagcgtcctcttcaatatccatcacaacaaaatctgcagggaaactaaactgcttcaccttaaccagaacatcttcaattatgctataa

SEQ ID NO: 8462 - DNA, 288 bp, Glycine max
tctcgatatattatgcgcctgaatcatactttcgtttcaaaagttatgacgatatgaatttctccactgtattccgtgtgacaagttatgaccatttgaatttctcgatagcattcgttgttcaatttcgagcgtctcgatatattatgcgcctgaatcggacttccgtgtgacaagttatgaccatttgaatttctcgagggcttccgttgctcaatttcgagcttctctatatattatgcgcctgaatcagacttccgtttgaaaagttatgaccatatgaatttc

SEQ ID NO: 8463 - DNA, 290 bp, Glycine max
tttagcttgctaagatacatggcccaataatgagcctaaagctgggacaaataaccactgttgttatgtcttcagcacaaatgcccaaataggtgcttctaaccaatggccaattcttgtcaaaccgaaccattccccaatctgtgccagttctaaactatgaacaatacaaccttgctttcatgcccatttcacctctttggagggaactcagaaaaatatgcaacacttagttatttgcccataagtctcttatgctagccaagacgttaggcgtaagatagtgcaat

SEQ ID NO: 8464 - DNA, 284 bp, Glycine max
agcttgtgaaacaacaatttatcttttccaatacgaaagatcccaaaagatacttctttttgcccaattatgccactccccatgtccttctattggtttaacaccattttttgtaactcttggcaaattccttactctatgctacacttgattaggtgtcaacctaggtggtagctcatcatattcttcttccccttttctaaaggttttttgttagtcctaaatggatgaatgctgggtaagaacctacgatgcgagtcaaataaacaatttttcctctcata

SEQ ID NO: 8465 - DNA, 301 bp, Glycine max
agcttcactcaaagattcatcggaaaattgatggaatgaagaaattgtagcttttccctctgttgtcttggactcaagaaaatatttcttcaaaaacttttccacaactttatcccaagtccttaagctattacctttgaatgaatgcagccacctcttggcttctctagataatgaaaatgaaaataagctgagccgaatagcatcttctggcacaccgacaatcttgacaatgttgcatatctcaatatatgttgccaagtgtgcatatgggtcttcattgggtagaccatggaacaaa

SEQ ID NO: 8466 - DNA, 313 bp, Glycine max
tgtttcaatccatatatagatcgttgctacttgcaaacttcattacaaccagccaataatgtgaatccttcaggttgtgtcatgtatacttcctctttcaactcaccattaaggaaagtttttttcacatccacttgtcatatctcataatcatagtatgctgctatggcaagtagaatccgaattgacttgagcattgccacaggagaaaatgtttcgtcataatctattccttcctgttgacgatatcctttagcaacaaggcgagctttataggtctcgacctttccatctgcttcaatcttttttcttg

SEQ ID NO: 8467 - DNA, 295 bp, Glycine max
agcttgtaatctttggtttcttgaagatatcttaacactttctttgcagctgtctagtgctctattcctgaattactttgatatctcccaagcattccaaccacaaatgcaatgtcaggtcttgtacacacctgcgcatacataaggcttcctacaatggaagcatatggaatgtttctcatttgttccctttgaagcttatttttaggacattgattcaaattgaatctatcacctttcacaataggtgtcatgttgggtgaacaatcttcatccgaaatatttctagaacttt

SEQ ID NO: 8468 - DNA, 292 bp, Glycine max
agcttaagcagtgatcaaacttgctctttggaactggctttgtaaacatattaacaggattgtgcagagtgataatcttatgaactttgattcttctttctgaccgaatgaagtgatatctaacatctatatgcttggttctatcatgatgaacctaatccttggccaagcatatagcactaaggctgtcacagtagatgttagcatattcttgattaatttcgagatcatttatcagacctctcagccaaattccttcctttgcagcttcaataagagccatatatttagc

SEQ ID NO: 8469 - DNA, 310 bp, Glycine max
tgaaggcaaactagatgccttgtttaactctggtaacctaactggccatgaataaaaaatctgcacctgtcaccagactatgtggtttatgctcctgtgccaaccaccacacagacctttgcccttctatgcaacattatgaagaaattgaacagcctgaagcttattctgcaaacatctacaataggcctcctcaacctcagtagcaaaatcagccacaacagaacaattatgacctctccagcaacaggtacaatcccgggtggaggaatcatcccaaccttagatggtcgaatacttcacaacaaca

SEQ ID NO: 8470 - DNA, 311 bp, Glycine max
tctattttcaattacgagcgtctcgatttattacgggactcaatcggacaaccgagtaaaaagttattgtcgtttgaatttgcttagtgcttctgttttcaatttcgagcgtctcgatatactacgggacacaatcggacacccgagttaaaagttattgtcgtttgaatttgctcagagcttctattttcaattacgagcgtctcgatatattacgggactcaatcggacatccgagtaaaaagttattgtcgtttgaatttgcttagagcttctgttttcaattacgagcgtctcgatatactacggga

SEQ ID NO: 8471 - DNA, 304 bp, Glycine max
tattgggccttaaaatttctgatcttttatgaagccgcatctagagagtaaaggaggctacaactattggagttagaagaaatgagattgactgcatatgaatcttcaaggctgtataaagagagggttaaaacttaccatgataaaaatcttctaaagaagaattttcaaccaggacaacaggtgctactattcaattcaaggctgaaattgttccctgggaagctcaaatctaaatggtctagaccatttaccatcaacaaagtcaagccatatggagcagtagagctttgtgatcctcaac

SEQ ID NO: 8472 - DNA, 303 bp, Glycine max
agcttatgctgcaaatatttacaatatacctcctcaacctcagcagcaaaatcaaccacagcataacaattatgacctctccagcaacagatacaaccctagatggaggaatcaccctaaattcagatggtccagccctcagcaacaacaacaacagcctgctccttccttccaaaatgctgctggcccaagcagaccatacattcctccaccaatccaacaacagcaacaaccccagaaacagccaacagttgaggcccctccacaaccttccctcgaagaacttgtgaggcaaatgactat

SEQ ID NO: 8473 - DNA, 303 bp, Glycine max
tgaaattgaacaacggaagctctcgagtaattcaaatggtcataacttatcacacggaagtccgattcagatggataatatatcgagacgctcgaaattgaacaacgaatattctcgaaaaattaaaatggtcataacttgtcacacggaagtccaattcaggtgcataatatatcgagaagctcgaaattgaaccacgaaagctctcgagaaattcaaatggtcataacttatcaaacggaagtctgattcaggtgcgtaatatatcgagaagcttgaaattgaaccacggaagctctcgag

SEQ ID NO: 8474 - DNA, 272 bp, Glycine max
agcttctggatatattatgcacccgaatcagacttccatttgaaaagttatgaccatttgaatttctcgagagcttccgttgttcaattttgagcgtctcggtatattatgcgcctgaatcgaacttccgtgtgacaagttatgaccattttaatttctcgatagcattcgttgttcaatttcgagtgtctcgatatattatgcgcctgaatcggacttccgtgtgaaaggtattaccattctgatttgtcgagaaccttccttggttcaat

SEQ ID NO: 8475 - DNA, 302 bp, Glycine max
agcttcaacatcagacctcttccagggtgctggaactacttcacatggacttgatggggcctatgcaagttgaaagccttggaggaaagaggtatgcctatgttgttgtggatgatttctccagatttacctgggtcaactttatcagagagaaatcagacacctttgaagtattcaaagagttgagtctaagacttcaaagagaaaaagactgtgttatcaagagaatcaggagtgaccatggcagagagtttgaaaacagcaagtttactgaattctgcacatctgaaggcatcactcat

SEQ ID NO: 8476 - DNA, 310 bp, Glycine max
tgtccaatgaggtgacaatgaaaatacctagtgttactacctgatatacagtttttgctgctcgttttattgtcaattccaactgcatcaatgcatctttaacaagcataccacgaaccagagcagcaaccaagttgaccttctttggactctaaaataccatagaaaacaaggtatgtaaaatgtgcaactagtcagatattaatcagatccttcttaaaccataaattaaggcattttccacagcaaaccagggaaggcatttcaatggctaaaaaattagatgccaacttttctgcaaaataacatg

SEQ ID NO: 8477 - DNA, 306 bp, Glycine max
ttaccaagggcattggttgctggctttgttaatactgacaaagaatttcagagcagaggtgtgaactttagcttttattcttgtgtttttttggggataaaatattgggagggtcgaaatacagaactggaggatctggaatttaatttttttctcttcgtattactgattatataagtcctcatctggttttgtccaggagaaacttcgggaaccacagctacattcgtaatagtggataggtggactgtgactgttgcatctgttggagattcccgttgtatactagatacccagggtggtgct

SEQ ID NO: 8478 - DNA, 301 bp, Glycine max
agcttgaatgacaatcatttcatggggctccgaataaaagtggagaatggaggataggcgaacagcgctaggcaatcaattcgcgggtctcccgactcgttggtggaggatgcatgaatgacaatcaactcatggggctccgaataaaagtggagaatggaggataggcgaacagcgctaggcaatcaattcgcggggctgcatactcgatggtggaggatgcatgaatgacaatcaattcatggggctccgaataaaagtggagaatggaggataggcgaacagcgctaggcaatcaatt

SEQ ID NO: 8479 - DNA, 309 bp, Glycine max
tcacaaagaaaatcatattgatatgacttctttggaagtcctcttacgaggctatgctttttaagctttgagattaaccttaagctagcatgaccaagcttcttatgccatatgcaatgactctctttgactgagagtaagcacgacaccttttgactagacagatcaccaagtttaatcttatagaaatttccttgtctcttagcatagaataatgaagatttgttcttattatggacgatacacatatccttgttaaaggtgacattttatccactgtcacataattgacttatgctcagcagatta

SEQ ID NO: 8480 - DNA, 297 bp, Glycine max
agcttgaatcggaccttttgtgaaaagttatgaccatttgaatttctcgagagctttcgttgttcaatgtcgagcatctcgacatattatgcgctcgaatcgaacatccgtgtgaaaagttatgaccatttgagtttctcgagagcttccgtggttcaattccgagtatctagacctattatgtgcccgaatctgaccttcgtgtgaaaagttatgaccatttgaatttctcgagagcttccgatgtttaatttccagcgtctcaatatattgtacgcctgaatcggacctcagtgt

SEQ ID NO: 8481 - DNA, 311 bp, Glycine max
tatgctgcaaatatttacaatagaccttcccaacctcagcagcaaaatcaaccacaacagaacaattatgacctctccagcaacagatacaaccctagatggaagaatcaccctaacctcagatggtccagccctcagcaacaacaacagcctgctccttccttctgaaatgctgctggcccaagcagaccatacattcctccaccaatccaacaacagcaacaaccccagaaacagccaacagttgaggcccctccacaaccttccctcgaagaacttgtgaggcaaatgactatgcagaacatgcagtt

SEQ ID NO: 8482 - DNA, 295 bp, Glycine max
agcttctaaactttgtttaagaatgaagctctgataccacttgttagacaagtggcctcagatatcttaagaagggggggttgaattaagatattccaaacttttctcctaattaaaaatctatcttactttttacttaagttatgaattcccttaatgacaatcttcttaaatattaattcaaatgaagcaacttgaattatgaatataaagcaataataaataaaggagattaagggaagagaaaatgcaaactcagttttatactggttcggccacacccttgtgcctacgt

SEQ ID NO: 8483 - DNA, 304 bp, Glycine max
taataaatcaatctatggcttgtaacatgcttcccgccaatggtatctaaagtttcatgatgtcatcacttcatttggctttgaagagaacatcatggatcaatgtatataccaaaaggtcagtgggagtaagattttttttcttgtgttatatgtggatgacattttgcttgcaactaatgataagggtttgctatatgaggtgaaacaatttctctcgatgaacttttatatgaaggatatgggagaggaatcttatgtcattgacattaagatccatagggaaagatctcgaggcattttg

SEQ ID NO: 8484 - DNA, 288 bp, Glycine max
agctttactctatagcctgttgcttgagtgctccggcatcttggaaaaacaagaagcgttctacaagcataaatctttgtgctggtacagtttattcaactaatgtatggcatcaacgaggcgggatgatctaatataaatagccccataatatgaatcgcctgcaacataaagaagcttggctgtttgatgacatgtggatcaaatacagcttatttcaacatgtgtttggcttaaaaaaagtgaatcctgaatagtacctcgtctattgtgagcccatccaaacta

SEQ ID NO: 8485 - DNA, 353 bp, Glycine max
tgtcatggcaatcctttggcaggaaaaattctaaaacaaaatcagcggaggcactccggagtggaatgcccagaacagcatgcaagccaaacatgttatcatgatgtgccacaggatactccgccttgctgaaagaagtaatgtcatttgcaaaacaaagtttggtggttgtgaaagctgtcccaactactccttgcccccccaaaaggtggcacttagagcaggctttcaggaaacccattagctctacatccgccacaaaactagcagcatacacagtcgacacataattcatctcatcgtttgaatgcccacatccactctttcctgcttgttggatgcagggagcccat

SEQ ID NO: 8486 - DNA, 358 bp, Glycine max
  unsure (1)..(358): unsure at all n locations
atggatgccactaacaacattaacatataattggtataaaaaaacaatgacacaaaatgtttaattttcaagaaatttcttatttaatttatcttatattttaagatgttagatatattgattttttttgtatattattttctttataaagtattacaagataagattaatatgattaagccaacttatttgtagttatttttattttaatggttnttatttnttaatcttgatagctctcatgataaaagtttaaaactttatatcaaatatcaaaatataggttatccaaatgaaacttcaattctgataagagaatagtatacaaaatatttacgtaactacatatgagttttac

SEQ ID NO: 8487 - DNA, 638 bp, Glycine max
ttgtatggtagaaggtgtaggacacccctatgttggctagaatccatagaggacctcaccttaggacctgaagtggtacaacaaaccattgagaaggtcaagttgatccaagagaggatgagaactacttagagtaggcaaaaaagttatcaggacaagaggaggaaagacttggaatttgaggttggtgatcatgtattcttgagagtcactccgtggactggggttggtcaagcattgaaatcccaaaaactcacacctcgttttattggttcttccaaattctcaaaagtgtcggtcctgtggcataccaaattgcattacccctgtctctttctaatcttcacaatgtctttcatgtgtctcatccatgacccatcttatgtgatcgaattggatgacgtacaagtgaaggagaacttgacatatgaaacattgcctttgaggatcgaggataggcatacaaagcacctaaaagggaatgagattccattggtcaaggtgatatggggaagtgcatcaaaaaaaatgccacgtgggaactagagagtcagatgcaatgagcctatccagccttgtttgagtcaggtaaatttcaggaacaaaacttctatacggtgggagagttgtacaccctg

SEQ ID NO: 8488 - DNA, 510 bp, Glycine max
  unsure (1)..(510): unsure at all n locations
aaattnaataggggagtcataaatgtgtcaagaaaataattaataggacagagaaaatattagtaagtcattcaagaaatatgtattttgtatcgacttatctatattaaatatacaagatgatcatcaagtgtatagggcgaacattctgctcgaaaaaacaaaaagcatagaataatcattggagtgatacctcctatatttttaggtgataaaaaccacttattttaataaatattctattgactaatccgttatagtaattgaatttagctttaacccactctagtgaataaaagatttgttgcatggtttgaatatatatttttttaaagatctttcaactataatctgagcactaaatattcaatttatcaaatggggttgggtcaaggataagcactagccttctgtaatatgttcaattaagggtggatctctaatgagagatatgcatattttagtttttcattgtgtctggaattccaggatactcgtcaagatgaaaag

SEQ ID NO: 8489 - DNA, 439 bp, Glycine max
  unsure (1)..(439): unsure at all n locations
gggggtgaattaagatacaaaaattattcccaattacaatttaacttccttttggaattactcaaaagacaattcaaaaataaacttctttaaagcaaaagataaataacaataaataaaagaagtttaagggaagagagaatacaaactcaaattttatactggttcgaccacccctctgcctacgtccagtccccaagcagcccgcttgagatttccactatctttaaaaagctttttacaaactctgaaccacacaggaacatccttcccttgtgttcagatatccttacaacttaaaagaccatcggtctcttaaacagatctctttgaataagaagaataattttctctcattaagaaaaagatattacaattgaagatcgatcaagattccttattgaatttgcagtgtnttgccaaggaatattttgagagt

SEQ ID NO: 8490 - DNA, 448 bp, Glycine max
agcttccattgttcaatttcgagggtctcgatttattatgtttttgaatgagacctccgaaataaaagttatgaccatttgaattgctcaagagcttccattgctcaatttcgagcgtctcgatatattatgcgcctgaatccgacctccgagtgaaaaggtatgaccatttgaattgctcaagagcttccgttgttcaatttcgagcgtgtcgatatactatgcgcctgaatccgacctccgagagaaaagatatgaccatttgaattgctcaagagcttccattgttcaatttcgagcgtctcgatatattatgcgcctgaatcggacctccgagtgaaaagttatgaacatttgaattgctcaagagctttctttggtcaatttccagccgtttgatgtattatgcgccctaatccgacctccgagtgagaagttttgaacattt

SEQ ID NO: 8491 - DNA, 346 bp, Glycine max
  unsure (1)..(346): unsure at all n locations
tgtatcagtataaccccttcagtttcaattcagagtctccatattcgattaattggtgtttagttcttcttaagtacttaagtatggccttaaccattttccaatgttcctcactgcactagcatatggtactctactcatgcgttctctttcttcaggagttgttggacaattctccctaccaagagtaattccaacacctacaggcaaatagcctcgtttggaattatccatgatatatctctntaagatagtatcaatgtacatagattgggagagtccaagcaaccttttagatctatctctataaatctttatacttagaatatagactgcttctcccaaa

SEQ ID NO: 8492 - DNA, 490 bp, Glycine max
  unsure (1)..(490): unsure at all n locations
agcttccattattaattttgaggggctttatattttatgggactgaattgtctcacctgagtaaaaagttattgccattggaatttgctcgggtcttcttttctaatttggagcatctcaatatatttcgggactaaatcggacatccgaaaaaaaaattattttcgtttaaattttctctgatcttccgtttttaatttcgagtgtctcgatatattacaggactcaatctgacattcgagttaaaagttattgtcttttgaatttgctcgtagcttccgattttaatttcgagcgtctcgatatactatgggacttctgagtaaatagttattgccgttataatctgctgggagtttctgtttttaatttcaagcatctcgatatattaggggactcaatnggacattcgagttaaaaagttatggtctttgaatttgctcggaactttcgcttttaatttcgagcatcttgatataattacaggact

SEQ ID NO: 8493 - DNA, 443 bp, Glycine max
agcttgaagacaagactatacgaggtgtttgtcttttttatagcaatatctctaagggctaccgtgtctacaacttgcaaactaagaaactcgtcatcaatcgagatgttgaagttgatgaatatgcttcatggaattgggatgaagaaaaagtggagaagaacgttcttatacccgctcaactacctcaagaagaagatgaggaagaagacccaggtgaagcaccttctccttcatcacaacaacaagatcaagaactatcatcaccagagtctactccaagacgagtaagatctttggtggacatatatgaaacctgtaacttggccatacttgaacctggaagctttgaagaagcgtcaaagcacgaagtatgggtcaaggccatggaagaagagatacagatgattgagaacagccacacatgggagttagtaaatcgt

SEQ ID NO: 8494 - DNA, 435 bp, Glycine max
  unsure (1)..(435): unsure at all n locations
agcttcacaaaagtttgtatggcttgattcnatcttctatacagnggtacaagaagtttaatgagtttatgagcaactcacgattcaaaagatgtgacatggaccattggtgctatgttaaaaaatatactaatagttatgttatccttgttgggtatgttgatgacatgttgattgtaggatctagtacggcagaaattaacaggttgaagcagtagttggcagaaaactttgaaatgaaggatcttggtccagctaaacaaatccttggtatgagaattcttagaaacagatcagaaggaattttgaagctgtctcaggagaaatatatacacaagttgcttgacaggttttaccttggagattctaagaccaggaatacccctttgggatctcatttgaagttntcaaagaagtaatctttgcagacagatg

SEQ ID NO: 8495 - DNA, 410 bp, Glycine max
agcttactaaggataggagtctctatatttttctttgacgactaacataagcgtcgtgtgatttgctctcaaagtccctaccctgcctatatacattggccagcccccatcattgcaaaagctacttgttctctcaaacatggttcattcatcataaaaaacaatgaattttacctcccgtgcccatagatcttcatatgtcgaggctatcagctttgagctgatgccaaccagctgaagctccctcctatgcacagccttcacagatgagaatcgatcgacagagttcaaggtggaatatagagatgtcggatgagctcaaactgcctgtgctcgtctatcaaccagccccagagatagaactcatctgggcattaatatctggctgcgaacccatgtacacatgcaca

SEQ ID NO: 8496 - DNA, 541 bp, Glycine max
  unsure (1)..(541): unsure at all n locations
tattaagatactaagattatgaacgatgaaatccaatcctatgttcctcattattatncaagncgntattattttcataatttacgtatttccgacgcactaaatttcgttatttttgtatttcccgtatttctgttatttctgtcatttccattatttttgtaaatccgttatttttacttttcttttactttaaagttgtctttagttaatcaaaccaaaaccaatgacatttgattaaatttgtacataactattaaactgataacctgtatccaaatgaattaagtaaactcaagttcttgtggagacgaactcgtttataaatgtgaaacctacaatgtcaattggtacgcttgtcaaaagtcttaacaagttcatggcgctgttgccaaggacttgagccatccacttagttctttcggaataaactttcaggttgataggctattttactctggaaattacttttaatttgtattaaattcatcttttatttcttctcacccttgacttattatttacatttgataaatttctc

SEQ ID NO: 8497 - DNA, 557 bp, Glycine max
agctttttagtaaaaaaataaatatttaaatatttatagagcaaataataggctgagtaccctaggtataaatagttatattaagtcagctgcctccttttggcctcattttcgtttttccccttctcctctcaaaaccctttctttttcccgcagcccaccaaaccagtctcagaaaaatgacgatcttgaacccgttcaccgttggatcgtcgtgaaatttgagtatcatgttcgcaacagaattccgagcattctcaccgttgggaatttcgatatcatgtctgaactgagagaaacacccttcgcattgtagcctttttctttcccgcagaaacccagagctgtcttggtaaaactatgatcccggtttcgttaaccgttggattattgtgaaatttggatatgttgttcgaaattcaattccgcacgcttccaccgttgggatttgcgagataatattcgtggagggagaaaaaggaatcgcatgaagacagtataagtggagggttcaatctcttctccgtctctctgacgtttgggaattctatcggagc

SEQ ID NO: 8498 - DNA, 486 bp, Glycine max
agcttctatagaaggtttgttcctaatttctctattattgcgtcacctctcaatgagctagtgaagaagaatgtggcatttacctggggtgaaaaacaagagcaagcctttgttttgctaaaagaaaagcttactaaggcacctgttctagctcttcctgacttttctaaaacttttgagctagaatgtgatgcctctggagtgggagttggagctgtattgttacaaggtgggcaccctattgcttattttagtgaaaaacttcatagtgccaccctcaactaccccacatatgataaagagctttatgccttaataagagccctccaaacttgggaacattaccttgtttccaaggaatttgtcattcatagtgatcatcaatcacttaagtacattagagggaaaagcaagttaaacaagaggcatgcaaaatgggtagagtacctagattcaattccatatgttatcaaatataaaaaggga

SEQ ID NO: 8499 - DNA, 507 bp, Glycine max
agcttgcagtagtggggacgcacggagagttgtttatattgtttgagacgaacatataccaaatcgcctagctggaaatggacgtcccgacggtggcgatcagcatggttcttcatagtcatttgtgctttcaataggcaattttgcagtttggtgtgcagagcttgtcaggtggtaaaaatggagtctgcagcctcgacgggagatgtgccggtagtatacggggccaatgttagaggtggtttgccatacgtgatctcgtatggagaaatgccggcagcagagtgggttgacgtgttgtaactccactcaatcaatgaaagagaagagtgccacagggcaagcctgtcatggacgaacgagcggaggtgttgctcgagagttcgattaaaaaccttggtttgtccgtctgactcagggtggtacgctgtgctataccggagtttggtgccactaatgcagaataattcgcgccagaatgagctgagaaagatggggtcttgattg

SEQ ID NO: 8500 - DNA, 634 bp, Glycine max
  unsure (1)..(634): unsure at all n locations
agcttccatgagtcaggcaaaggagatgtgtttgtttctgtcctttgagatggtcatgatggttccatcgttcaagattgctatgatgagaaccatgaagggagagaagtcgaacttccagatcagagcaacgagcatgaagccaaacacgatacggattgtgatagaaacagcataaattgtgtagttcttcatcctctggaagatagccctgcttgtcaacacagcactcacaatcacactgagtccgggctccgtcaagacaatgtcagaggcactccttgctgcgtcggttgcatcatccactgcaatgccaatgtctgctttcttcaatgctggtgcatcgttcacaccatctccggtcattccaacaatgtgatttctatcctgcaacctcttcacaatctcatacttatgctctgcacatgtagaaaatctcatcagtttttcttattaaccttattcatttctctcttaatttgtggcatcaaggttttacattgtcaattaattttgataggatcatactattgttaattaattagaaatcttagtcaaatactataaaagtcaataattttatcatatatgacaatctatgatcagatgacagntgagatatcaatgtttttaa

SEQ ID NO: 8501 - DNA, 434 bp, Glycine max
cccaactggccatgaagaaaaaatctgcacttgtgggcaaactctgtggtttaagcttctctggcgaccaccacacaaaactttgtccttctgtgcgacaatctgaagcaattgaacaacctgaagcttatgctcgaaacatgtacaacaggaccttctcaaccttaacaacaaaatcagccacaacagaatgactgtgacctcttcagcaacaggtacgatcccggatggaggaatcatcccaaccttagatggtagaattcgtcacaacaacaaccttattttcaaaatgttgttggcccaaacagaccatatgttcctccaccattgcagcaacaacaacaacaacaacatccccatagacagaaacagttgatgccactgcgcaccttccttgaagaacttggaggcaaatgactatgcaaaacatgcag

SEQ ID NO: 8502 - DNA, 343 bp, Glycine max
  unsure (1)..(343): unsure at all n locations
agctntaagcaaattcaaacgacaatcacgttttactcggatgtccgaangagncccggaatatatcgagacgctcgtaattgaaaacagaagctctgagcaaattcaaacgaccataacgttttactcggatgtccgattgagtcccgtaatctatcgagacgctcgtaattgaaaacagaagctctgagcaaattgaaacgacaataactttttactcggatgtccgattgtgtcccgtagtatatcgagacgctcgtaattgaaaacagaagctctgagaaaaatcaaacgacaataactttttactcggatgtccgattgagtcccgatatatatcgag

SEQ ID NO: 8503 - DNA, 620 bp, Glycine max
  unsure (1)..(620): unsure at all n locations
agcttgtaatcgattacatcatttatgtaatctattaccagacacaaaaaattcaaatttcaagtctgaagagtcacaactcttcagaaactaactgtgtaatcgattaccacatttatgtaattgattaccagtaaggaattttcaaaaataactcctaagagtcacaactgttcaagaagtttttgaatggccatcaaaggcctataaataggtgacttgggatatgaaattccttagagtttttttgaacaacatagtcttatcctctcaaaaccaaattgtcttatcactctcaaaatattccttggtcaaaatacttgcaaattcaataaggaatcttgatcgatcttcaattgtaatatccttctcttaaatagagaaaattcttcttcttcttattcaaagagatctgtttaagagatcgagggtctcttaagttgtaaggatatctgaacacaagggaagggtgtccctgtgtggttcanagtttngtaaaagaattctacaagatagttgatatctcaagtgggttgcttggggactgaatgtangcatangacgtggccgaactagtataaaatctgagtttgcattncttaaatccctatctatcttct

SEQ ID NO: 8504 - DNA, 354 bp, Glycine max
atccttttcctgtggtccttgttcacaagtttcttactaagtctttagctaccggtgatattgatggccaatgtgaatgatcaaagctaggatttgctcttaagacagatcggaaaattcctgattccgtgcgtgcgcagaatggtctacttccacataacaatatgtatgagataaccccaatactccataagtctccttcaacactatgagatctatggagcacttcaagtgccacatagtaagcactgccaacaatatcattgaggcgttgatctgcatgtttattagaagtcagagctggtagtgaaaaaaccaacaagaggatatcaccgattacaagagaatgaatga

SEQ ID NO: 8505 - DNA, 488 bp, Glycine max
tgctaacaaaaatattcatgtaggtggaccttcttcttcttatcatgactcacagcagcctcctatccctcttccattcccacctagagcaatttcaaacaaaaagatggaagaagcagaaaaagagatcttggagaccttcagaaaaagtagaggtgaacatacctctactagatgccatcaagcagattccaagatatgctaagtttctaaacgagctgtgcacccacaaaaggaagttcaagggcaatgaaaggattagcatgggcagaaacgtgtcagcattgataggtaaatctgttcctcatattcctgagaaatgtaaggacccaagtactttctgtataacttgcattattgggaacagtaaatttgagaatgccatgctagatcttggagcatcagttagtgtcatgcctctgtccattttcaattctttatttcttggacctttggaatctacagatgtggtgattcatttggcaaat

SEQ ID NO: 8506 - DNA, 435 bp, Glycine max
  unsure (1)..(435): unsure at all n locations
gcaagcttcttagtctcagatgatgcaccttttntttagctacctcatgcactcctctaatgactatggcattatttctggcactaaactgctgagagttggaagccatcttctcaaataaatttctggcttcaacaagagtcatgtctccaagggctccaccactggtagcatctatcatacttctctccatattactgagtccttcataaaaatattggagaagaagttgttctgaaatctgatggtgggggcaactggcacataatttcttaaatctctcccagtactcatacaggctctctccactgagttgtctaatacctgagatatccttcctgatggctgtggtcctggaagcacggaaaattttttctaagaatactctcttaaggtcatcccaactcgtgatggaccttggagcaaggtaataca

SEQ ID NO: 8507 - DNA, 517 bp, Glycine max
  unsure (1)..(517): unsure at all n locations
ttgaacaatatatttgtccttcatttaactgtctnttttcacggctgccacgctcaacaaagtattttcgacacctactgtacgttgatttgaccaacgctgttatgggaatgttgcgacaatccttcaaaaccttattgatacattctgagaggttggttgtcatgtggccataccgacgtccttctctatcataagccatcgtccatttttcttttgaaatgcgatcaatccatgttgctatggctggactcagttcacgaaatttttctagattttgatcaaaaatgtgctcgcaaggagtataggctgcatcaaattagttatgaataagaattttaagtatatatcaaagttaaataaacttgaccatgaaatatgaaatcttacccaatttctttaacatttcttnttgtttggcattattgaatttccgattgaaagtgctcgctatgtgtcgcacgcagtagacatgatagccgtggggaggttaccaaccaagtgcttcgttagcgac

SEQ ID NO: 8508 - DNA, 570 bp, Glycine max
  unsure (1)..(570): unsure at all n locations
agcttggttcccaacgctctgttaagctctctaatttttataggtaaatctaggatctttgtcagatactatgctagatggcacaccatgtaacttgacaacctcacttatatacaaggtggtcaacttctccaaggaaaatctgatattaatgggaatgaagcgagtacacttagtcaatctgtcaacaataacccagatagaatctaaacctctaggggttctaggttgtcttaccacaaaatccatggaaatactgtcccacttccactggggtatctctaagggttagaacttcccttaaggactctgatgttctatcttagccttctgacagactaggcatgcatacacaaactcactaacgtgtctctgtatgttgggccaccaaaacatcatctttaaatcttgatacatcttggtagcaccaggatggatgctcaaattactgctatgtccttcctctaagatcatcttnctaagttcaagcacattgagaacacaaatcttatcttgaagtctcgaaacttcatctgatccaacattgaaactagtgtcccttcctgactc

SEQ ID NO: 8509 - DNA, 635 bp, Glycine max
  unsure (1)..(635): unsure at all n locations
agcttttaactcataatataccagaattatattattttctattagttaatagttgaagatgaactttataaaatatccatagaggaattacaaccaccatgtatccaaatatgacttttttaaaatgcatagagtttgataatagttaataaaacaaatgaaaaggtaaaagtagaaccgaacaggacatgaagagaaaaataaggttactgataattaagacatttgtattactttttttatctgcgtttataagtattatttattaatatagaataaatacataaacagaataacttttctagcattaactaattggatgagtgcaactaaacgttgttggttggttgcgcgcaacttaagtaaactttacttacaatagaaagtttaaatcttctaaatctaaagattagtctcataattatatagaaacattcggttaaaatcttgctataaccccactccgtttaattattagggtaccacggaaaataacaatccaagagttgggcaaagtttaatggatagaanaggaagaaaaaaaaatatatagacatgatgtaacctggaccaaaaagtcttacataagataatatcannttgtatcttattcttcagtgatcataagtccttat

SEQ ID NO: 8510 - DNA, 490 bp, Glycine max
  unsure (1)..(490): unsure at all n locations
ttcaacccttttctttcgtagtttctctgaggtaaccttaacttcttcgcctttcccctagttagtttaagcttctcttagtatctcatantttttgcgtaccttaataggatgtttttagacttcacttgaaaacccttaaaactgagatngttgcaaaagttaccttttataaaattgatgttgttttcgtgaccttcattgaaccccagccacattggcgtaatcagaatttcaaaatgacgtctccttgaagtagaaaccaaaaacaccattttcgtcccttttaaaactgaatgggtatttgacccaaatgttaatatcaaccttgcccttgaaatatatatgttagtgcttagctntactgagttttaaaagattggctaanattttgttaaaacataagcacttagacaatgaaggaaagcttgagttactgcacatgatgtctaacattatgtcaaggaatcagattgggctgcacaatgca

SEQ ID NO: 8511 - DNA, 618 bp, Glycine max
agcttaagctccttcaactgcacaaggctcttaatatttttagagatccttgtggaaccttcacccgacgaagacactgacaaaaaattatcttctccttcttggacaaagtatggcatgctgggggcaagtaaattttcttcccatcagaccttggatgcaactgtgatcttatacccatatcagctagatcttgacgggtattcaagccatccttcgtcttgccttgaatgttaaggagcgtcccaatcacactgtcacaaacatttttctccacatgcataacatcaatacaatgcctaacgtcaagatcacaccagtacggaagatcaaagaaaatggacctcttcttccatatgcaactctgacttttatccttcttttgggtcttcctaaatacagtgttcaggtgttgaacctgctaatatacctgctcaccagtgaacggtatcggtgcaatatcatgctcttgacttccattaaaagcttttctcagtcgtttgtaaagatgattgggtgttagaaagcggcgatgcctactgtagactgtttttcttccatgtttcagtggtatgtaacttgtattttcttcacagatggggcatgcatgatgaccct

SEQ ID NO: 8512 - DNA, 577 bp, Glycine max
  unsure (1)..(577): unsure at all n locations
ccttgtattaatcttgaaacaatacttaacttttgaatgtttgttgaagtaatcttgaaagcaacattgttggattattctttggcatcatcaaaatcatgtattcatacattcacaacaatattaggaaaaatcctttgaaatgactttcttttaataatcattggtttatttattttaagaaaccctcaaatattaatatttaaacttaatatatacaacttttatatataaatggtgtttatatttctttttatataaaaacattcttcatttattttaatttaaaagtataaaaattatatttttaaataataatatgttttatttatgttggtgccatccatatttatattcacctgtcaaatacagtgattggacaaatcatttgaaatgattttctttntataattattgattttttatcttanaagactcttagatatttaaatttaaattaatatatataactttatatgaaaggtgttaaattcattttatatcaaatattttatttttatttgataaagatatttcttaacattttgaatcttttatgcacaataacatattatat

SEQ ID NO: 8513 - DNA, 545 bp, Glycine max
agctttcttgagaaaacttccttgagattcttttttgagaaaacttccttgagaagctagagcttagctacacacacccctctcataactaagctcacctccttgagaagcttccttaagatgattcctaaagaagctagagcttagctacacatacctctttaatagctaagctcagctccttgagatgagaagctagagcttagctacacaccccctataatagctaagctcacccccatgagaaaatacatgaaaatacaaaaaaaatccctactacaaagactactcaaaatgccttgaaatacaaggctaaaaccctatactactagaatagccaaaatacaaggctcaaacgaaggaaaaacctattctaatatttacaaagattagcgggctcatacttagcccatgggctcgaaatctatcctaaggctcatgagaaccctagggccttcccttggatctctggcccaatctactaggagtcttctatccaatgcccttgcggagtaggattgcatcaagcagtgtcatccacgtct

SEQ ID NO: 8514 - DNA, 515 bp, Glycine max
agcttctcgcctcttccacctacattcgggaacttgcagccatcacaatggccgttaagaagtggcgccattatttgttaggccacccctttgtgattctcactgatcaccagagcttaagggacctaatgactcaggcagtgcagacaccggagcagcactagtatctcattcggttattgggattcgaatatagtatccagtatcggccaagacgcgagaatggggtagcagacgtgttatcgagggttgccggagaagaagctaaggcctccttgtacctactttcagtacctcaattctcctttattggtgaccttaagcatgagctagccacacacccagaatttttgacgttgctggagaaaatctgctaagacttagcagtagtctctgagtataaaattgagaatggattaattcttcacaagcagtgcatttggctttccatgggatctttcatcattcgcgtactcatggaggaatttcacagcacaccaacacgaggtcattat

SEQ ID NO: 8515 - DNA, 455 bp, Glycine max
  unsure (1)..(455): unsure at all n locations
agcttgtgagattttatcattggtttttcnttantacaccagaatagatagttggaatcatcaagcttttctgaaatcgaaggaaaagattgatgtgaatgatgagaggaagcggacacagcaaaattgttttctgccattgatgaatccttctaagagattggacattatatcctccaggttctgagtctgtacgaaatgctgttggagttcttcaagagattggggcattgtcagttgatgaacaactcactcagctagggcagaagcttggctgtcttcctattcatccatcaacaggcagaatgcttattttttccatattgatgatatgtcttgatccagctttaactcttgcttgtgcattcgagtttaatgatccatttgtgcatcccattttacctgatgaaaagaagagagcttcagctgctagatctgagcttggttcttgtatg

SEQ ID NO: 8516 - DNA, 517 bp, Glycine max
  unsure (1)..(517): unsure at all n locations
agcttgtgcattcaatatcctgatgaggatgttcatatgttctcaagactggactaatacatttgttgcccaagtttcatgatcttgcaggtgaagatcctcataagcattttaaggagttccatattgttttttccaccatgaaaccccccgatgtccaggaagatcatatctttctaaaggcttttcctcattctttggagggagtggcgaaagattgactgtactaccttgctcccaggtccattaccagctgggatgaccttaagagggtgttcttggagaaattcttccctgcatctaggaccattgtcatcagaaaagatatttcacgcatcangcaagtggagagagcttgtatgagtactgggaaaaattcaagaaattgtgtgcaagttgtcctcaccaccagatttctgagtaactccttctacaatatttctatgagggacttagcaacatggagaagagtatgattgatgctgncagtggtggagctcttggtgatatgactctt

SEQ ID NO: 8517 - DNA, 560 bp, Glycine max
  unsure (1)..(560): unsure at all n locations
tcaagagatcatcccctcgacaatattattggtgatatctaatatgggtgacaactagacattctcttaaagatttatgcaataatatggcttttgtatctatgattgaacctaaaaatataaaagaagccataatagatgataactggatcattgccatgcaagaagaactgaatcaatttgaaagaaacaatgtgtagaaattagtagaaaaacctgaaaattatcctgtcataggaacaaaatgggtttttagaaataaattagatgaacatggtataattattggaaataaagctatgttagtagcaaaaaggtataatcaagaaaaggaatagactatgaagaaacatatgctcttgttgcaagattagaagccattagaatgctcttagcatatgcatccataatggattttaaactttatcaaatggatgttaagagtgctttttctaaatggcttaattcaagaagaggtatatgttgaacaacccnctggttttgaaattccggatacaccaaatcatgtttattaattacaaaatggctcttatggtttg

SEQ ID NO: 8518 - DNA, 597 bp, Glycine max
agcttcatacatcagacccacttccaggtttgcgtgattctacttcacatggatttgatggggcctatgcatgttgaaagccttggaggaaagaggtttgcctatgttgttgtggatgatttctccagatttacctgggtcaactttatcagagagaaatcagaaacctttgaagtattcaaagagttgagtctaagacttcaaagagaaaaggattgtgtcatcaagagaatcaggagtgaccatggcagagaatttgaaaacagcaggttcactgaattctgcacatctgaaggcatcactcatgagttctctgcagccattacaccacaacagaatggcatagttgaaaggaaaaacaggactctgcaagaggctgctagggtcatgcttcatgccaaagaacttccctataatctctgggctgaagccatgaacacagcatgctacatccacaatagagtcacacttagaagaggcactccaaccatactgtatgaaatctggaaagggaggaagccaactgtcaagcactttcacatttttggaagtcatgttacatcttggcagatagagagcaaaggagaaagatggatc

SEQ ID NO: 8519 - DNA, 267 bp, Glycine max
ttgaagagaatccttgtggaaccttcacccgacaaagacactgacaaaaacttatcttatcctttttggacaaagaatggcaagctgggggcaagttaatttttttcccatcacaccttggatgcaactgtgatcgtatgcccatatcaacttgatcttgacggggattctagccatccttcgccgtgccttgaatgttaaagagccgcccaatgacactgtcaccaacatttgtctgcacatgcataacatcaatacaatgtctaa

SEQ ID NO: 8520 - DNA, 498 bp, Glycine max
cctttaatctaagctagttggtaaaggtagacacccttgagggtgtatccctgatgacctaaccttaggacctgaagtggtacaacaaaccattgagaaggtcaagttgatccaagagaggatgagaactacttagagtaggcaaaaaagttatcatgacaagaggaggaaagacttggaatttgaggttggtgatcatgtattcttgagagtcactccgtggactggggttggtcaagcattgaaatcccaaaaactcacacctcgttttattggttcttcctaattctcaaaagtgtcggtcctgtggcataccatattgcattacccctgtctctttctaatcttcacaatgtctttcatgtgattgatccatgacccatcttatgttatcgatttagtgacgtacaattgaaggataacttgacatatgaaaactttgcctttgatgatcgatgattggcaaacaatagctccttaaagggaaggagatttcat

SEQ ID NO: 8521 - DNA, 315 bp, Glycine max
agctttggggtcgatggccccaatgacattttttcttttcatggaaaaaggccaaggggtggacatgactttcaaaagatgtggcggaacattgacattgtccgtgtacgcttgacatttatggcatttccttacatgggcgcagcaatcgctttccatagtgatcttcctggccatagcatgcccattggcatgtgtcccaaatgaacccccggggacttcctcaatcatgtagtttgcctccttggcatctacgcatcgcaagaaggtcatgttcgggtttcgttggtacaggaaggtaccactcacaaagaa

SEQ ID NO: 8522 - DNA, 403 bp, Glycine max
aacattaaatagcaccgttcacctaactgagaccaaaaacaaaattcgacccgttggcttcaccacggtccctactacatatccgtcatgtcaaacttaataattttcggggggacatccttcaattttcagcagtaccaccatacagcctctcagaagatttaacgaagatcattgcaaacggctttgggttctccatggctaacctcaccaacaagaaaccttcagcttcctggctcacccctctgtactcatctatctccatcatccaccaaaagcaccatcaaaccaaggaacgacctgagatcaatatccagcccatacagatgattcctggtcaagaccctgttcctgaaaaactggatcccaaacgaacaccgggtgggaaagaccctgaaaaccc

SEQ ID NO: 8523 - DNA, 438 bp, Glycine max
ctaatacgtttcaaaatttttttatttaacacacaagaagatccgactccagtgtatacaaaataatcttattaaactaaagtattacctgttgagaattgcagatgatttggcccagagaaaatgaatgacaatgaggaagaggagaacattaggaacaagagacagaagagtataaccagatctttcaaacacaacccaaacagctagtgtgaccaacaatatccccacagtaaggttctttcgcctccacagtattaaatctgcaactgcgttgaagcatggcattgattcagcatagattcaaagatcatgatcaattaccaattcattattttcttctgagtctgacccatttcccattggtactaaatgcaaataaataactaaaacaaacaagcacaggcgcagcccatatagctatttcacagttaaaaa

SEQ ID NO: 8524 - DNA, 467 bp, Glycine max
  unsure (1)..(467): unsure at all n locations
agcttgagatgaggaagtgtgaaagggttatcagtttgaaaaactgaggggcaagctgggcatttgtctgctagaagaattatagcagctactggtatctgaacgtgctcaaacgtctcacttaacattaatagcacgttcactactgagccaaaacaaattcgaccgttgcttcacacgttcctctacattcctcattcaaacttatattttcgtggtaatctcattttcagcataccccaacagctctcagagatttacgaaatcattccaaacgctctgcttctccatggctacctcaccaaaagaaacttcagctcctggttcaccctctgtaccatcatctncatcatccaccaaagcaccatcaaaccaggaacgacctgaattcaatatccagcccatacagatgattcctggtcaagcccctgttcctgaaaaactggttcccaaacgacaacagggag

SEQ ID NO: 8525 - DNA, 406 bp, Glycine max
agtattacctggtgagaaatgcagatgatttgggccagagaaaaagaatgatcgtggggaggaggagaacattggaaacaagagacagaagagtataaccagatcttttaaacacaagccaaacagttagtgtgaccaacaatatccccacagtaaggttcttccgcctccacagtattaaatctgcaactgcgttgaagcatggcattgattcaacatagattcaaagatcatgatcaattaccaattcattattttcttctgattctgaccccatttccattggtactaaatgcaacataataactaaaacaaacaagcacaggcgcagcccatatagctattccacagttaaaaacaggtcccaaatggacataaacaacacaccaagggaaataaaagaaaa

SEQ ID NO: 8526 - DNA, 246 bp, Glycine max
  unsure (1)..(246): unsure at all n locations
agcttgagaatggaggattgccttgaggtttttcttttttgcaagcaaggaacacaacgccaaactcaaaaatggaggaacacaagaaagacaacgccactnaatcatggggctccgaaaaaaggtaagaatggaggaattgcttgacggtccactcttatgccgccatggaacgccggggccatactcaaaagtggaggaccccacgaacacgcctaagcaatagcactcacgcggccccaaaaa

SEQ ID NO: 8527 - DNA, 329 bp, Glycine max
aacgctggttctacctcaaaaccccttgaactacttcacattgaattatttaatccctctagaactatgaatttaagcgtaaattactatggcttagcaatagtggatgattactcaaggttcacatggactttgtttttgaaaacaaaaaatgaagcttttgaggcttttcgcaaacttgccaagatgattcaaaatgaaaaaggtcttaacattgtttcacttggaagtgatcatggaggtgaatttcaaaatgagtccttttaaaacttttgagaagaaaatggaattcaccacaatttttctgcccaagaacacctcaacagaat

SEQ ID NO: 8528 - DNA, 434 bp, Glycine max
agcttttgcaagctggaatcatttattctattttcgatagccaatgggtgagtcctgtccaggtagttctgaaaaaaaccggcctcaccgtcatcaaaaatgagaaggaagagttgattcctaatcgggtgcagaacagttggagagtctgcatcgactataggaggctgaaccaggttaccaaaaaggaccattttcccctgccattcattgaccagatgcttgaacgcctggcaggtaaatctcactactatttccttgatggtttttctggttatatgcaaatcattattgcttctgaggatcaggaaaagaccacattcacctgccccttcggcacttttacctataggaggatgcctttcggcctgtgcaatgcccctggtacctttcagcagtgcatgatcaatatttttagtgattttttaaaaaaa

SEQ ID NO: 8529 - DNA, 534 bp, Glycine max
agcttaataaaaatgttagtaggttgatgttttttttaccccaatttcttataaacagagtaaggcatcaaattaatgttagcacctaagttataaaatgctctatcaaaggacaagttgccaatggcataatctcctttaaaaatttggcatacttcggcatttcagcaattgcctcaacaaaaggaatgttaacatgcaatttcttaaacatttcaacaaacttatcatcctatttagacctctgatcatgatactgaaggcttatgcaaatgttttgattttgattttaattttgcaggtgatgagacttgtacacattttggttctgactctaaccttgcctttgatctctttgctttttccaagagaagtttaggtaatgtctcgacccttggttgtaggtattaaagtagggctataaataatacttcttccaccaacatagttaacttccctagggccctgatgtattggcagcctacaaatcacattttcttattccccacacttcctaaaaaacaaaagggtggg

SEQ ID NO: 8530 - DNA, 451 bp, Glycine max
agcttgttcacataggtaaaagaataggttttttctacatgttgaataatgaacatgcatcatttcatgaacttagttgcttggtaagtaagattgatgattcttggttatgacatcgtagggttgcacaataaacatgcatcatcttaatcatctagttaaaaaggacttagtaattggtattttgaaactcaagtttgagaaaaataaattgtgtgaagcatgtcaaaaagggaaacaagttaaaaattattttcaaagtaaaaacgttgtttctacttcaaaaccccttgaactacttcatatagatttatttggaccttcaagaactataagttcaagtggcaactactatggtttagtaattatagatgattattcaaggttcacttggactttgtttttgaaacccaaaaatgaagctttggatgcttttcgaaaacttgccaaa

SEQ ID NO: 8531 - DNA, 464 bp, Glycine max
agcttcacgcacaaatcataaaagctggtcttaaccaacacgaacccatccccaacactctcttaaacgcatacggcaaatgcggtcttatccaagacgcactccaactgttcgacgcattgccccgccgagaccccgtcgcatgggcctccctcctcaccgcctgcaacctctccaaccgccctcaccgcgccctctccatctcccgctcccttctctccaccggcttccaccccgaccacttcgtcttcgcctccctcgtcaaggcttgtgctaacttgggtgttcttcacgtcaaacaagggaaacaagtccatgctcgcttcttcctatcacccttctccgatgacgacgttgtcaagtcttctttgattgatatgtacgcgaaattcgggttgcccgaataccgacgtgccgttttcgactccttttcttccttgaatttaatttcttggactaccatg

SEQ ID NO: 8532 - DNA, 388 bp, Glycine max
  unsure (1)..(388): unsure at all n locations
agcttttgcttctgttcaatatataattactgaatcnttactttggnnggggaatccgagccgttcattgatggtcggcaagtatgatggtcttaatgaagatcctacacgtatttcgggtgtatctcacaggcggttttaaaaaacctcgcgaattaacttggggtacgggtgtagttttggctgtattgactgcatcttttggtgtaaccgggtattccttaccttgggatcaaaatggctatggggcaggtttaattgtagcagacgatcccgactctaagtttgtcctctgatgctattggcctttgctctactttatgatctttcaactgggtaaccccaattttttgatggggagcttttgaaaaaatgtgttattttcccc

SEQ ID NO: 8533 - DNA, 487 bp, Glycine max
agcttccttgagaaactaccttgcgaaatttctttttttatctgccttgagaagctagagcttagctacgcacacgcctgtaataattaagctcacctgcttgagtagcttccttgaaaagcttccttgagaatattcctagagaagctagagcttagctacacacacttctctagtatctaaacacacctccttgagatgaaaactagaacttagctacacacaccccctataatagctaagctcacccccatgccaaaatacatgaaaatacaaaaaagtccctactacaaagactactcaaaatgccctgaaatacaaggctaaaaccctatactactagtatggccaaaatacaaggcccaaaagaaggaaaaacctattctaatatttacaaagaagagtggacccaaccttggccgatggtcgcagaaatctaccctgagcttcatgagaatcctagggccttttttagtagctctagctc

SEQ ID NO: 8534 - DNA, 305 bp, Glycine max
cttctggggggacatcttgacttgctttcctaactgacattcaccacagattctggcttcttctattttcagattgggaatgcctctaacagcacctttgtcaatgattttcttcatgcctcttaagtgcaaatgtccaaatctttgatgccatattgtgacttcatcttctttggaggatagacatgtggaggagtaactggattcttgaagtgtccataggtaacagctgaactttgataagctgccctttcttagaacttcggtccttccatttgtcacctagcattctgaatttggaagtt

SEQ ID NO: 8535 - DNA, 407 bp, Glycine max
agcttgtgtcacgattcactgttttattttttagcgccactcacttaacgaatcaccgaatgtaccatgagaggacaaagcacatagatgcgaaactacactctatgaaagatgtgattgaatctgagaaggtgaaggtcgataatgtttcaacagaagaaaacccggctgatatgtttacaaaatccctctctagtgtcaagttcaagcactgcttggacttgataaattttgaggatgcctaaagcagattggtagaagtgcatccctgaatcgcaagataagcacttgttgatttggagtcaaggtggagatttgtggtgtgtgactcaaaatcacaaatggcacaagtgggaagactttaagaggtgctattctaactaaattcagttatgataaccgaattg

SEQ ID NO: 8536 - DNA, 399 bp, Glycine max
agcttagtaaagctaagcactatcaatctccccctttggcaaattttgtctaaaacatacttagacacttcctgagcaggtacgagcagttatgccagtgggatcagcaactttcattatcaaagcaaacaaccacaacgggatgtgtaagggcgacaggaaaattctgcaagttgcaagtcggtttccggatgtcaagacatctcacgtgacatcagctttttgctccccctgactccatgctcttactgctgtgaagcaggtcactgcagcatcttctatcagctactagtcttttccaggatgtcaagacatctcatgtgacatcagctttttgcttcccctgtcttcatgctcgtactggattttctatcagctactagtttcaatagcttacat

SEQ ID NO: 8537 - DNA, 284 bp, Glycine max
ttgagcaaattcaaacgacaataactttttacacggatttctgattgagtcccgtaatatatcgagacgcttgaaattgaataccgaagctctgaggattttcaaacgacaataactttttactcgaatgtctgattgagtcccgtaatatatcgagacgctcgaaattgaatgttgaagctctcagcaaattcaaacgacaataactttatactcgaatgtctgattaagtcccgtaatacatcgagacgctcaaaattgaatgttgaagctctcagcaaatt

SEQ ID NO: 8538 - DNA, 323 bp, Glycine max
agagcgtctctgtatattacctgactcaatcagacatacaagtaaaaagttattatcgtttgaaaatcctcagaacttcggtattcaatttcgagcgtctcgatatattacgggactcaatcagacatccgagtaaaaagttattgtcgtttgaattagctctgaggttcagaattcaatttcgagcgtctcaatagattacgggactcaatcagacatccgagcaaaaagttattgtcgtttgaattagctcagagcttcagaattcaatttcgatcgtctcaatatattacaggactcaatcagacatctgagtaaaaacg

SEQ ID NO: 8539 - DNA, 275 bp, Glycine max
tagcattctcatcaatggctttatacttgaattcttcacgctaaacgcccacttgcatgacccacatcgagtgaaacgcctcaacaaccatgcccatagtttttatcaaccttggcccctgtctattgatggagtgacccttctgcaccatactgtcaaacaactttacaccgttgctcaactccatgaccagaagcacggccgagaaatcctcgttcttcacttacatgcagacaatgttggcgagatccgacaaagagcgcattatatgaatc

SEQ ID NO: 8540 - DNA, 286 bp, Glycine max
ttgaatgctctattcaatggagttgacaagaatatcttcagactgatcaacacatgcacagtggccaaggatgcatgggagatcctgaaaaccactcatgaaggaacctccaaagtgaagatgtccagattgcaactattggccacaaaattcgaaaatctgaagatgaaggaggaagagtgtattcatgacttccacatgaacattcttgaaattgccaatgcttgcactgccttgggagaaagaatgacagatgaaaagctggtgagaaagatcctcagatctt

SEQ ID NO: 8541 - DNA, 284 bp, Glycine max
tgtgccttttcacgtcttttatatgaatgtagcatatagatccaaagacccttaggtgctttgttgatggcttcttcccgatccaagcttcaattggagtcttgtcttttacagacttagttggacatctgttgagtatgtaaacagcagtgtagactgcttcagcccagaatgtgttaggtagtcccttctccttgagcatcgatctagccatctccataactgtgcgattctttctctcggacactccattatgttgagaagaatatgcgactgtaagttgt

SEQ ID NO: 8542 - DNA, 331 bp, Glycine max
  unsure (1)..(331): unsure at all n locations
actttgattatccttctgatacaatgctgtcaagaatgaagattggatgaaacctcaaaagaaatcttattattcaccttacagcttggaagaatgctgattatccatttttgtttttttnttttttcttgaagcagtagttctaggtcgtctcacttttttcaaaatgtttttcattattaagaaaaggtaacgaagatcaaattcgagcttgttttatagtccaggagacttcacttggggtattattctgcacccttatcctgagatctatataatgaagggaaccaaaaagtaccacagagttggaccatggaatggtttgtgtttc

SEQ ID NO: 8543 - DNA, 281 bp, Glycine max
tgtaatcgattacacacatactgttatcgattatcagaggagtttttccagaaaacattctcaacagtcacatctttttatctgtttcttaaatggccatcaaaggcttatatatatgtgacttgagacacaaattgaacaagattttttcagaacaaaaaggtcttatcctcttaaaaagcaaaattgtttcatcctcttaaaaattccttggccaaaacacttgtgattcaataaggaattatttgagtgcgcaaattgttcaatctatctctttcaag

SEQ ID NO: 8544 - DNA, 362 bp, Glycine max
agctttggaaatgatttctatacaaaagttagtcgtataaagcgactaacaaatcttcagtaatatcccgccaaacccagaaaactcctaatctcaaacacagacttaagactctcccacttaagtacaacttctatcttagaaggatctatatctatactgccttaggatatcacatgtcctagaaaactaactttatctaaccagaactcacacttggacaacttagcataaagttgtcggttcctaagggtttgcaacacaatcctcaagtgctcttcatgctcctttctagtctttgagtataccaaaatatcatctatgaaaactaccacaaaactatcaagataggggtgaaagat

SEQ ID NO: 8545 - DNA, 361 bp, Glycine max
agcttcccaggatctttcatttttgaaatttttaggtagaaaatcttctgggtctcctgtaagaagcctatatctctgttagcaagcagtatatcatcggcatataatactaagaatatgtatttactcccactgaacttatgatatacataatcatcaactacatttgcctcgaaaccatatgaggtaatgacttgatggaacttgtaataccattgacggaaagcctgtttgagaccatagatggatttctttagtttgcataccatggactttgagtcacctaacacaaagttttctggttgcaccatataaatcgtttcttcaatgtcaccatttagaaacgcaatcttgacatcca

SEQ ID NO: 8546 - DNA, 282 bp, Glycine max
tcgaacctctgttggagttgtcggttgttgccactccataaccgactccaccttgttcggatccaccgcaaccccgtccttagaaatcacgtgccctaagaactgcactttctccaaccaaaagtcacatttcgacaatttggcgaacaacttcctgtccctcaggatatgcaatacaatcctcaagtgcttctcatgctcctccttattccttgaatacactaggatatcatcaataaacacaaccacaaactggtccaagtaatcatggaatatacggtt

SEQ ID NO: 8547 - DNA, 349 bp, Glycine max
agctttttattctaattcagttttccatgagagtaccctaatgtctgaagtttatgggattaagaaggtcattgaccaatccttattttatgatttaacaaaattacctagtgaaggtgtgccttttgagggtgcactaattgatgattggaaattcgatttttctgtgcatgatgcccgccggttggttttcaacaaccaagcggatatgaccgaaaggcttcttgccggatcattggcttttgaaagccacatcctccattaccttattgttcgcatcttactccctagatcttcaaaccttgctcaggtttctaaagaagatctcattgtcatgtggacctttcat

SEQ ID NO: 8548 - DNA, 285 bp, Glycine max
ttgagtttctttgagcagatgttgaattatggttgcattccaaattcaaatacatgggagattctttctgagggccacattgcagataagaggatttctgaagccatgtcctgcttgaaagaagcttttatggctgctggtggttcaaagagttggagaccaaagccctcatacttgtctgcattccttgagctttgtcaagagcaagatgacatggaaagtgctgaggttttaattggacttctgaggcagtcaaaatttaataaaagtaaagtttatgcatct

SEQ ID NO: 8549 - DNA, 331 bp, Glycine max
agcttgtcgatatgatcgcattttgagcataacccaatcacctggggggtactctacttctcttcttttagcatctgcgatggtcttcattttctcctgagctttgagaagctttttcctaattgtttgaaatattccctccctgtctgtcagcatttcatcaacgacattgagtttggatgatcctgcgagatattccgaaaaattgaatggcttgcggccaaatgtgatttcatatggagtcatccctcttcctgcgttccatgaggtgttgtgagaccactccacccagagaaggaattttccccattgtttaggtctgccatggacg

SEQ ID NO: 8550 - DNA, 350 bp, Glycine max
aactagatgcatgggttacttgggaacccagctggccttgaatcaaaaatctgtacctatcgcaaaggtttgtggtttgtgctcctttgctgaccaccatacagacctttgcccttccatgcagcaacctggagcaattgagcagcctgaagcttatgctgcaaatatttacaatagacctcctcaacctcagcagcaaaatcaaccatagcagaacaattatgacctctccagcaacagatataaccctggatggaggaatcaccctaacctcagatggtccagccctcagcaagagaccagagcctccattcagagcttaaccaatcagatgggacaattggctaccc

SEQ ID NO: 8551 - DNA, 289 bp, Glycine max
tccgttgttcaattttgaggtactcgatatattatgcgccagaatcgaacatccgagtgaaaagttatgaccatttgaatttctcgagagcttccgttgttcaatttcgagcgtctcgatatattgtgcgcctgaatctgacctccgagttaaaagttatgaatatttgaatttcacgagagcttccgttgttcaatttcgagcgtctcgatatattatgcgcttgaatctgaccaccgagtgaaaagttatgaccatttgaaattctcgagagcttccgttgttcaat

SEQ ID NO: 8552 - DNA, 280 bp, Glycine max
taggagaggatgtaaccgaagtcacaaaaggagatgtggttgttccaattttcttacctgattgtggggagtgtatagattgcaaatcaagcaagagcaacctttgttcaaagtttccttttgaggtgtctccttggatgcctagacatgccacctctagattcacggatttaaaaggagatatcatacaccatttcttgtttgtgtctagttttagcgagtataccgtggttgacattgctcatctaaccaagattgatccagcaataccacccaacag

SEQ ID NO: 8553 - DNA, 285 bp, Glycine max
tccatcatgggctaagtttgatttatgtagggctgctgtctattggaaaaccatgaatggcctccctccttcttcagtaagtataaaagtattgagttaactcctagcttgttacttaatcaattaccttttagtaaaaaaatttacaaattttggcagggagaaaagctaaaacttttctataatccagctgcaactcaacttgtccctaatgaagaatttggaattgcttttaatggtaatttttgcaatgtcacttggttgcccaaaaatgtcattttccat

SEQ ID NO: 8554 - DNA, 348 bp, Glycine max
agcttggcccatttgctccaaccaattatgcattggaaggatcagttgctatcgccggagctgcagtgcagtggcttaaaaacagccttggcatcatttctagtgcttcagaaatagaagagatggcattacaggttgaatccactgttggggtttggattgtttgctccatggtggcgtgaggatgctcgcggggtttgtattggaataacaaggtttacaagcaaagctcacattgctcgagctgtgctcgagagcatgtgtttccaagtgaaagatgtcttggattcaatgcataaagattcacgagaaagtgaatcccaaaagaagtttgtgcttagagtggat

SEQ ID NO: 8555 - DNA, 349 bp, Glycine max
agcttattgatttttgtatctaacattttagtctttaaaggcttatccatccttcccttgacctctgggaagtgtttgagtcttaagcagctaccaaaacaaaggtattcgagagatgacaaatagattgtcggcacaaaactttggagttgagtgcagtttttagcacttacgacaacaaggttagtgagatgcccaacttatttatgaatgctaaccagattctcgcatccattaagtgccaattctcttaaattcatggcactagacacataaggaaatttagtaaccatacgacaataagataaattcatgtaagtcaaacttttgcaatgatgtataaagaaaa

SEQ ID NO: 8556 - DNA, 280 bp, Glycine max
tgtgcattcaatatccttatgagggtgttccatatgttctcaagactggactaatagattttctgcccaagtttcatggtcttgcaggtgaagatcctcataagcatcttaaggagttccatattatttgttccaccatgaagccttctgatgtccaagaagatcatatctttctaaaggcttttcctcattctttggagggagtggcaaaagattggctatactaccttgctcccaggtccattttcagttgggatgaccttaagagggtgttcttgga

SEQ ID NO: 8557 - DNA, 286 bp, Glycine max
tgaatcggacatccgtgtgaaaagttatgaccatttgaatttgtcaagagctaccgttggtcaatttcgagcctctcgacatattatgcacctgaatcggacatccgggtgaaaagttatgagcatttgaatgtctcgagagttttcgatgattaatttccagcgtatagatatattataagcttgaatcggacatccgtgtgaaaaggtatgaccatgtggatttcacaagagctttcgctgttcaatttcgagcgtttcaacataagatgcgcccgaatcggac

SEQ ID NO: 8558 - DNA, 306 bp, Glycine max
agcttataatatatcgatacgctcgaaatttaacatccgaaactctcgggaaattcaaatagtcataacttttcacatggatgtccgattcgggcgaataatatgtcgagaggctcgaaattgaataacgcaagctcttgagaaattagacaggtcttacttttcacaccgaagctctcgtgaaagtcatatggtcataacttttcacactgaggtccgattcaggtttataatatatcgatacgcgcgaaatttaacatacgcaactctctataaattcaaatggacataacgtttcacacggat

SEQ ID NO: 8559 - DNA, 290 bp, Glycine max
tcaacattcaattacgagcgtctcgatatataacgagactcaatcagacatccgagtaaaaagttattgtcggttgactttgctcataactttatcattcaatttcgagcgtctttatatattacgggactcaatcagaaatccgagtaaaaatttattgtcgtttgaagttgctctgagcttcaacattcaatttcgagcgtcttgatagattacatgactcaatccgacatccgagtcaaaagttattgtcgtttgacttggctcagaactttaacattcaatttcaa

SEQ ID NO: 8560 - DNA, 344 bp, Glycine max
agctttgaggaaattcaaacgtctataccttttgacacggatgtcggattgagtcacgtaatatctcgagacgcttgaaattgaataccgaaactctgagcaaattcaaacgacaataactttttactcggatgtcggattgagtcacgtaatatgtcaagacgctcgaaatagaataccgaagctctgagcaaattcaaacgacaatacctattgactcggatgtcggattgagtcacgtaatatctcgagacgctcgaaattgaataccgaagctctgagcgaattcaaacgacaataactttttactcggatgtgcgattgagtcccataatatgacgaga

SEQ ID NO: 8561 - DNA, 284 bp, Glycine max
tgaaaaaatagtgggcatcatgcaagatggtctacttaagaagtttaaactcacatcctctattagcacaaacaacatgcatctatttgacacagaagggaaaattaagaaatatgagaatccagaacaaagtacaacctttatcatgttaagttttgaataagatcaattaacaataatgtttcacacgctcactattttatgtgatttcttatgcagttcttgaagagttcttcctccttcggctgaagtattatgagagaaggaaggtgagttttgtgttt

SEQ ID NO: 8562 - DNA, 281 bp, Glycine max
tggagaatcgtctcttcaacaatatgatttgaagacaattgaagtaattcaaagaaaactctttctcatgaaattgagattaattcattttatttgttgtgtttttgtgcaggaaaaccactttcttggaacactcggcttaaaatggctatcagtgcagctcggggattagctttcttacacagctccaacaaccatgtcatattcagagatttcaagcccttaaatatactacttgatgaggttagttattttttgttagttgatttctcacgatggaa

SEQ ID NO: 8563 - DNA, 289 bp, Glycine max
ccttgagagaggtcctatagagcctcccttgtcgtcggaggcaaagtattgaccaattggtgagagagcatagagtctctctctcacaccatcttcagtggtgcgaatggagcaattgagaagagagtaacttgccaacaccggcaatatgcgttcaagcctattagccaattgagggtgtggatttggaagcaaagaagcaatctcagaggctgacaaagtcgaactctctgccttgtctatgatatcaaacaaattcagatcaacagcagcgttcaagattgccgga

SEQ ID NO: 8564 - DNA, 290 bp, Glycine max
taacaatcagtgtcatactattgatcaaaacatagcaggtataaatatgcaatactagactcaaaatatgcaacaaacactagacctaaatcagtgtcacagaaattggaagaaaatattttatccaagcacaaacttcaagccttattccatgtattggggggaagttatggctggccatatgggtagaggtgtcatagaggagcaggtatggaggaagggaccttggactgctgaagaggacaagttgcttgttgagtatgtcaggttgcatggtgaaggcagatgga

SEQ ID NO: 8565 - DNA, 283 bp, Glycine max
ttgagccaattcaaacgacaataactttttacttggatgtctgattgactctcgtcacatatcgagacgctcgaaattgaatgttgaagctctgagcaaattcaaacgacaataactttttactcagatgtctgatatagtctcgtaatatatcgagacgctcgaaattgaatgttgaagctctgagctaattcaaacgacaacaactttttacacggatgtctgattgagtcctgtcatatatcgagacgctcgaaattgaatgttgaagctctgagccaat

SEQ ID NO: 8566 - DNA, 340 bp, Glycine max
agcttcaacattcaattttgatcgtctcgtaatattacgggactcaatcagacatccgagtaaaaatttattgtcgtttggattggctcagagattcaacattcaatttcgagcgtctcaatatattacgggactcattcagacatccgagtaaaaagttattgtcgtttgaattagcttagagcttcaacaatcaatttcgagcgtctcgatatatcacgggactcaatcagacatccgagtaaaaagttattgtcgtttgaattggctcagagcttcaacattcaatttcgagcgtctcgatatatgacaggactcaatcagacatccgagaaaaaag

SEQ ID NO: 8567 - DNA, 280 bp, Glycine max
tgcatcaatataaccctttaattttaactcagaatctctccataagtgaggaactcgtctttagttcttctcaagtacttaagaatggtctgaagtacttttcaatgttcctcaccgaggtttactggatattgactagctgcacttagtgaataagcaacattaggacgtgtacaaatcatgatatacatgatagctcccactgcgctggcatatggtactctagtcatgcattctttctcttcatgagtttaatataattttgtaagatgacccttgt

SEQ ID NO: 8568 - DNA, 330 bp, Glycine max
agcttttcgtttggcataactatatcagccaaatctatttcaggtgtattgtttggagcacaaaagttatattaaacatttgtgtacaaaagctgacaagcaagatgtcacagtagttatatgtccactttgtgccaaaggagttcgcctagttcctgatcaagatccaaacataacttgggagaatcatgtcaacaccgagtgcgacccatcgaattacgagaaagtcacaaagaagaaaaaatgccctgtccctggatgcagagaaatattagtattctcaaacacaattaagtgcaaggactgcacagtagagcattgtttaaagca

SEQ ID NO: 8569 - DNA, 346 bp, Glycine max
agcttgctaacccatggaagctcctaatatctcccacactttttggggtgggccattcttggatggccttgattttctcaaggtccacttggaccccatttctaccaactacaaaacctaagaaaactatattatctacacaaaaggtacacttctctatatttgcatagagggtgtttttcctaaggactgaaagaacttgtctgagatgtcctaagtgatcatctaggctcctactatacactaaaatatcatcaaaataaacaactacaaatctacctatgaaatcccttaagacatgatgcataagcctcataaaggtgcttggtgcattagtgagcccaaa

SEQ ID NO: 8570 - DNA, 343 bp, Glycine max
agcttatcaccctgaccccatattgcataaacttcttcaccatgagcagcctcatcacctatctccatatcctctttaaaaattctcaatggaaaaaagatccgaatgaaggtgacaaagataacaaagataatcccaaggatttggactcccatttgcctgaagccggtgctgagcttgttggaaccgaaaccataaaagaaaacaacgtattgagcatcatgtccatagaacaaccggttgagtcttggatcagcaaagagcccagtgaggagtcctcctatggtttctgcaatggcatgagtatggaacactgccataatatcatcaaccttctgcagta

SEQ ID NO: 8571 - DNA, 339 bp, Glycine max
agctttgcttctacatagaggtttaagaataatcttctgatcatggtgctggaaagaaatcttgttggtgaatcatgcactgctttggtgtaatactgttatggtcttcccaacaatatatgagtcacctccattggaactacatcacacatcaccctatcattgtatcttccaatggtgaaacacacctcaacctgctaagtcacttttacctcatcatcttcactaagccactgaagtttgtatggcctaggatgtggcttaatatccaaattcagtttgacattaacctggaatttgcaacattggtacaacttcctctatcaacaattaaagaac

SEQ ID NO: 8572 - DNA, 367 bp, Glycine max
  unsure (1)..(367): unsure at all n locations
atactcggatgtccgatagagtctcgttatttatccagacgctccanattgaaagcagaagctcctagcaaactcatatgacaataacttattctcaaatgtccgattgagtcccgtaatatatcaagactctcgaaattgagaacagaagctntgagcaatttcaaaccacaataactntatagtcgaatgtcctattgagtcccgtaatatatcgagatgctccaaatngataatggaagctcgtacaaaattcanacgacaataacattatacacggatgtctgactgagtcccgtaatatatcgagacgctccanannttgaaatggaagctcgtaccaattcaaacgacaatnaacttttac

SEQ ID NO: 8573 - DNA, 337 bp, Glycine max
  unsure (1)..(337): unsure at all n locations
ctgcagctggattcctttagtagggaatctatccttcctaagatggagccaaacccagtcaccctcattaagaaactagctctttcttcctctattgcctntagttgaatacacctttgtttggttctctattaggttcttaaccctctcatgcaacttctttacaaattctgacctagattccccttctttatgtataaaagaagtgtccaatgggaggggaatgaggtctaacagtgttaggggattgaacccatagacaatctcaaanagggactgcttggtggttctatgaacccnncttgtgtangcanattctacatgaagaatatactca

SEQ ID NO: 8574 - DNA, 286 bp, Glycine max
  unsure (1)..(286): unsure at all n locations
tggagaagagagtgattgtcgagtcacaacgtcaggtagacgtcatctctatcctccaggaaggatcatgcatatagtccctactgcacatttgtctganaatattcctaattcacatcacaatgtgtctgatgagaaacatgtctacctatatgaaacgcctagagatctgtatggaaagctcagactntctagagggatgatacttgatcatatgacgaaccagtatctgaagatgttacaacaattaatcaatcaactagagaaagacagcttcaaatatcgt

SEQ ID NO: 8575 - DNA, 280 bp, Glycine max
  unsure (1)..(280): unsure at all n locations
actcggatgtcggattcaagttcataatatatcgagacgctcganattgaataatggaagctattgagcaattccaatggtcataacttttaacttcggaagtccgatgaggcacataatatatngagacgctcgaaattgaacaacggaagctctcgagaaattcaaatggtcataacttttaactcggaggtcggatcgagacgcataatatatcgagacgctcgaaattgaacaatggaagctcttgagcaattccaatggtcataactnttaactc

SEQ ID NO: 8576 - DNA, 264 bp, Glycine max
  unsure (1)..(264): unsure at all n locations
tttgatatagcgaagaattcgtgttacggccttaagatgagtagtggttggagtctncatgtattggcttatgagtccagtagcatatagaatgtcaggtcttgtgcacgtcanatatcacaaactacccaccanacgcttgaaatttgtagcatccaccttgatgctttgtcaaacttcaataacttcattttgcactccaccggtgttccaattggcttatagctatccatcttgagtttcttgagcatcttcttcacatag

SEQ ID NO: 8577 - DNA, 269 bp, Glycine max
  unsure (1)..(269): unsure at all n locations
tcagactgatggccaaactgaacggaccattctgtcgttggaggaacctttgagggcgtgtgtcttagagcanaatangagttgggagagntttctgccattgatagagttcacttataaaaatagttntcactctaccattggcatggctccctatgaagctctgtatggtagaaagtgtaggacacctctatgttggctagagcccggagaagacctcaccttatgatctgaagtggtacaacaaaccaccgagaaggtaaagtgat

SEQ ID NO: 8578 - DNA, 311 bp, Glycine max
  unsure (1)..(311): unsure at all n locations
gcggaagtatatgtaaatcacacccctagatttgaanactcagacaagcctaatcatgnttttagaattaaaaaggctntatatggcttanagcaagcccctaaggcttggtatgagcattngagtaagttccttttagaaaaggatttctcaagaggcaaagtagatactactatnttcataaagagaanattacatgatanntttattggtcaacattatgttgatgaataatatttnggatctanctaatgaatatcgtgcaaggaattctctcatgacatgcanagtgagtttgaaatgtcaatgat

SEQ ID NO: 8579 - DNA, 328 bp, Glycine max
  unsure (1)..(328): unsure at all n locations
agtatccttgtggaaccttcacccgatgaagacactgacananacttatctntgccttcttggacaaagtatggcaggctgggggcaagtaatatttcttcccatcaaaccttggatgcaactgtgatcgtatacccatatcagctagatcttgatgggtattcaagccatccttcgtcttgccttgaatgttaaggagcgtcccaatcacactgtcacaaacatctttctncacatgcatatcatcgatacaatgtctaactgtgagatcacgccagtacggaagatcaaagaaaatggacctcttcttccatatgcaacgctgact

SEQ ID NO: 8580 - DNA, 364 bp, Glycine max
  unsure (1)..(364): unsure at all n locations
agaagctagagcttagctacacatacctctcttatatctatctcacctccttgagatgagaagctagaacttagctacacacccnctataatagctaagctcacccncatgacananaacatganaatacaaaaaaaaaaatccttactacaaagactactcaaaatgccccgaaatacaaggctaaaaccctatactactagaatggccaaaatacaaggcccaaacgaaggaaaaacctattctatatattacaaagataagcgtgctcatacttagcccatgggctcgaaatctaccctaaggctcatgagaaccctanggccttccctnggatctctagcccaatctacttggagtcttc

SEQ ID NO: 8581 - DNA, 171 bp, Glycine max
  unsure (1)..(171): unsure at all n locations
cactcggatgcgatcaggtgcataacatatcgagacgctcgaaattgaacaacagaagctctcgagaaattcanatggtcatatactttcacatggatatccgattctgtggtataatatatctagacggtctaaattgaacaactactcgatatattaaatggcataact

SEQ ID NO: 8582 - DNA, 302 bp, Glycine max
acttctttcttcgacttatattccttaaatttgtgtttagatcttaagaatgagtcttttattctctggtatatcacaaatgaattctgtatcttaattatattgtccacattctcgagatggacacatacagataccatggccactccatgtctgatcctggcagcacataccgtacacgtgatgagaattctggtgtaagacaggtgtattactataatcatagataaatgtcctatgtgttaattaatattgaggagtatactctatctctgttataatctcctgtccaatctgattat

SEQ ID NO: 8583 - DNA, 234 bp, Glycine max
  unsure (1)..(234): unsure at all n locations
ttgagcgtctcgatatattatgcngcctaatcggacctccgagtgaanagttatgaccatcttaataactcaagagcttccattgttcaatttcgagcgtctcgatatcttatgtgcctgaatctgacctccgtgtganaagttatgaccatctgaatntctcgagagctctcgttgntcaatttcgagcgtcttgatatcttatgcgcctgaatcggacctccgagtgaaaag

SEQ ID NO: 8584 - DNA, 409 bp, Glycine max
  unsure (1)..(409): unsure at all n locations
gctatgctganatatntacaatagaacccctcaacctcagtagcantatcnaccacagcagaacaattatgacctctccagcaacagatacaaccctggatagaggaatcaccctaacctcagatggtccagccctcagcaacaacaacagcagcctgctccttccttncaaaatgctgctggcccaagcagaccatacattcctccaccaatccaacaacagcaacaaccncagaaacagccaacagttgaggcccctccacnaaccttcctcgaagaacttgtgaggcaaatgactatgcagaacatgcagtttcagcaagagaccagagcctncattcagagaataaccaatcagatgggacaatnggctacccaattgaatcaacaacagtcccagaattctgac

SEQ ID NO: 8585 - DNA, 306 bp, Glycine max
  unsure (1)..(306): unsure at all n locations
gcgtctcgatatatgacgggatctaatcatacatccgagtnaaaagatatggtcgntngaataggctcagagcttctacattcaatttcgagcgtctcgatatgttactggactcaatcagacatccgagtaaaaagttattgctgtttgagttggctcacagcttcgacattcaatntcaagcgtctcgatatatgacgggactcaatcagacatccgagtaacaagatattgtcgtcttaattggctcagagcttcgacattcaatttcaagcgtctcgatatatgacgggactcaatcacaca

SEQ ID NO: 8586 - DNA, 397 bp, Glycine max
  unsure (1)..(397): unsure at all n locations
acatgatagagagactcatcttggataccaaccttgtgctacaacaattgcagcaagacccactatccataatgagagaataatctttggttaacaccttgcatcttgtatgaaagatgttttctctttgggtttgggttaggtcacaagaatgactcccaatgagccatctctccattagaagatcaccttcttcgtaggggcaaacctcttcaatatgctcatcacccttggcttcaccctcacttccacctgaggaaggagaagaagtagccttctcttgactactgtagatgtcttgatcccacatgatcatggttntctttgtagtggcattgagaaagaatgtggccttctccaatacattntaagcacttaatggtactagttctatctt

SEQ ID NO: 8587 - DNA, 463 bp, Glycine max
  unsure (1)..(463): unsure at all n locations
tttcttataattgttntttcccttattacatctgtcaagtgccaattaggaaagtttctatatataccaagtgtgctataaagatattttagtaactattatatatatattcctagaaaaaatgtcaaacaaacacatantttaattanttttaggcgtatgaaaaatatttttggctatttttaatagttaatcaaacacatttgtataatgatattttcatatcttattcccaaaaataatattcttgagaactaataacattttctgtganacanattcntccttanaattcttaatttataaaaactatntaaaaattaaattatatgtntatatcatgtatagtacgagtatttgacttataacaataatttcataaaaactgctgatatcttggagatttcctcatcacataataatatatttgaaacatatataatataatatctgattttatcca

SEQ ID NO: 8588 - DNA, 358 bp, Glycine max
  unsure (1)..(358): unsure at all n locations
tgctaactatgtatggcanaacttattactggtgtcaagacatacaagtgatctngtatanatcttctacactgggagtgatcacctgcagtcctcttgaacccttaccacccactctgtcatcatgccgagactcangaagcccaacaggtttagccttctctaagtattctgaacaaaattcaatggcttcttctgcaatgtacctctcaacaatagatgctcttggacgatatagattctntgtatacccntttaagatcttcatgtatggctcaaccgggtacatncaccgtagataaacaggaccacaacatttgatttctctgaccagatgcacaatcaagtgaatcatgat

SEQ ID NO: 8589 - DNA, 486 bp, Glycine max
  unsure (1)..(486): unsure at all n locations
tgcttatattcatcgntatcgcagcaattctgattattgntatgtacgctgtctgtcccctttctncaatttatagtttcttcccattttcttgtantagacctttgtggtcctttatgaccacccaacaataatagaatggacaatcaaagcagaaacgtaactattatatataaaaattctcttaaacaataattttcttattaaatataatgcaattattataaaaattattattatgtgtgtattcattacaattcccatcattggttagaanaataattngtannacatagnaaanatcaatatccanatgatgaaatcttagtttaatacattaatacttgtgctaatcattagtatactattgattatattataataataataagagtataaacactttaatttaaataaattgatgcgtcaatagaaaatactgttgaatgaacaaatcgatataagacttattaacataccttatat

SEQ ID NO: 8590 - DNA, 408 bp, Glycine max
  unsure (1)..(408): unsure at all n locations
gcgatctctgagtcacctgcggcatgcaagctngagaatatcaatgcgtcanagtcgctaaccaatcaccttngtttgaagatggagttgtatcaactcanaatggagatgggaggagatctccatgaccacatcaacaagttcaatcggctagtaagttaactgttgaatgtggatgataaattctctaatgaggagcnaagcgctcttgtgttggtctcactaccaaagtcttccaaagctttggttcanacgttgcttgtgggaagatcaactttgaatntggatgaagtgactgtcgctcttagagaanatgatgagaatngaaaatgtngatgatgaacacaatgcaatagctgtgatggaatctgagcgagggaggaatcattcaaggagacatgatggtct

SEQ ID NO: 8591 - DNA, 323 bp, Glycine max
  unsure (1)..(323): unsure at all n locations
atgtgacattcacttggggtgaaagataaagcaagcctttgctttgatcaaagaaaagctcaccaaggcacctgttctagctcttcctgactnttctaanactnttgatctacaatgtgatgcctctagagtgggtgtggaagctttattgntgcaaggtgggcaccctattgcttatnntagtgaanaaattcatgggtccaccctcaactaccccacctatgataaagatatttatgccttaataagagtcctccanacttgngaacattatcttgttncaanggaattgcattcatagtgatcatgaatacttaaataca

SEQ ID NO: 8592 - DNA, 251 bp, Glycine max
  unsure (1)..(251): unsure at all n locations
gtacctgtngcaaggggttgtggtttgtgctcctctgctgaccaccatacagacctttgcccttccatgcagcaacctggagcaattgagcagcctgaagcttatgctgcaaatatntacaatagacctactcaacctcagcagcaaaatcaaccacagcagaacaattatgacctctncagcaacagatacaaccctggatggaggaatcaccctaacctcagatggtccagcccttagcaacaacaaca

SEQ ID NO: 8593 - DNA, 305 bp, Glycine max
  unsure (1)..(305): unsure at all n locations
tgcattaccaaaatttcattntccctctaatctatataactccactntcaaccctgcaagaaaaatcttttgaatccatggcacccatagagacaagaattttcttaagctctggaatgtgataaacttcaatcaattntctaacaacaccatcatgcattctgatttgtatagaacccataccgataaacatacaaggagcttcgttacccatgaggacgttaccaccagacttcttctcacatgtcatanaccaatgcctgtgtcgacacatatggtaagaacaactngagtccaatacccat

SEQ ID NO: 8594 - DNA, 290 bp, Glycine max
ctcctctgctgactaccatacagacctccgcccttccatgcagcaacctgtagcaattgagcagcctgaagcttatgctgcacatatttacaatagacctactcaacctcagcagcataatcaaccacagcagaacaattatgacctctccagcaacagatacaaccctggatggaggaatcaccctaacctcagatggtccagccctcagcaacaacaacagcagcctgctccttccttgcaatatgatgctggcccaagcagaccatacattccttcaccaatcccac

SEQ ID NO: 8595 - DNA, 350 bp, Glycine max
  unsure (1)..(350): unsure at all n locations
tgtccggttaaagtctcacgattgtcacgtgttcatgctacaattgttagacgtggctatacgagacatcttgccaaacaaagtcaggttaacgataactcgcatgtgctttttcttccattctatatgtagcaaagtcattgatccagtcatgtttgatgagttggaaaatgaggccgcaattatactgtgccagttggagatgtattttccccctgctttctttgacatcatgattcacttgattgtgcatctggtcaaagaaatcaaatgttgtggtcctgtttatctacggtggatgtactcnggtgagcgatacatgaagatcttaaaagggtatacagagaatc

SEQ ID NO: 8596 - DNA, 414 bp, Glycine max
cccatttcctgaactcatgttttctggtggggttttttgtcttataagaatgaaagaggagttggtggtgcaagaagggtaccttttcaaaaaaagagacgaagctcacagtgctcaaaacatccctcttcttcaacagtgatggcttcgatgtctacgattgcaagggcaaactcatcttccgctttgactcctatggtccccccgcacgtgacaaggacgagcttgttctcatggatccccatgggcgatctcttttcaccctccgtcgaaaggtacaatttctttccctctcttttggtaacaaacccctattcagcatgaagagatcgtcgatcatcggaaagtctatgacgaccgtggccattgatgtgtacgatagccccattgtggaatacctctttgaaggtgctt

SEQ ID NO: 8597 - DNA, 448 bp, Glycine max
aaaacaatttttttttttgtttcccttagatatagatatggctatgtattggtacattattgttattgcaattacaatataaaatgctatggtagtaacgctgattatttgtgtcttttaactaacaactctagctgggaatgggtactgcattgtctacactttgtggacaagcatatggtgcaaaagaatatggcatgatgggagtgtatattcaaagatcatggatagttttgtccttaactgcactttgtcttcttcccctgttgatcttcgcaatcccaattttgactctcttagaccaggatgagaccatagcacaagtggcaggaaccatttccctttggacaattcctgtcttgatctcttttattggctcattcactacccagacattcctacaatctcaaagcaagaacattatcattgcattcttggcggctttttc

SEQ ID NO: 8598 - DNA, 456 bp, Glycine max
  unsure (1)..(456): unsure at all n locations
tcaagctgattctatttccaattatatcggagattgaacatttacttatgaaagcatctatttggtgcagcattccgttttctgttgatgacatatcgaaatcaatggagcagatagatatcgcagatatagagcccccgcctctaattcgtgaaaactctggctttagctttttgttgccacgcccagattgatagcttttggtgcagatttgatccaccggtattcttacccacctccatggtattaccaagtcacaacaagtcagtgcttgaaattgttgactttggttgtgtcaaaaacaagtcagtgtattaaacataccaaatttacatctcagtgatggatgacanaaggtagatagatcatcacgtcgtgcaagtagatttttgggctgacagtaaaagggagtaatattgttatatgggccttttctatgaagtttcactcattttt

SEQ ID NO: 8599 - DNA, 473 bp, Glycine max
  unsure (1)..(473): unsure at all n locations
ttactatgcaaggaataaacaaggaaaattccttcatctgtcttttcttaaattttcctaggttttctttaccattgtttaatacaaaacatttgcatccaaaaacatgaagatgtgaaatgttgagttttctaccattaaacagttcatatggagttttctttaaaatgggtcttattaaagccctattcatgatataacatgcaatattaatggctttagcccaaaaatattttggaagaggagtgtcattcaataaagttctagcaatctcttccaaagacctatttttcctttcaacaacacaattttgttgaggggttctaggtgcagaaaaattatgttcattgccaagttnttcacaaaataaattcaaatcttttattttcaaattcacccccatgatcacctctaatagatattaatttgagattttcctatttgaataacctttgcaagttcctaaatgcttg

SEQ ID NO: 8600 - DNA, 311 bp, Glycine max
  unsure (1)..(311): unsure at all n locations
ttgaggattttcaaacgacaataactttttactctgatgtcttantgtagtcccgaatatatcgagacgctcgaaattgaatgttgaagctctgaccaaatgcaaacgacgataactttttactcagacgtctgattgagtcctgtaatatatcgagacgcttgaaattgaaagttgaagctctcagcaaattcaaacgacaataacttttttactcagatgtttgattgagacccgcatattattgagacgatcgaaattgaatttggaagctctgagctaattcaaacgacaataactttttgctcgga

SEQ ID NO: 8601 - DNA, 396 bp, Glycine max
  unsure (1)..(396): unsure at all n locations
agcttggaacgataaagacattcatggtttctgtcngcaatnnggnatcgcgaaccacttgatccaatcagtggtgagaagattggaaaagtaaggccaattgcaccagaagactcgatcaatatagccggcctctcccaagtacctgacggtgtagcttcgtggcacgttgctgttagcaagtttacagattcgccgttgctttctgcagcattgccagtttgggattcttctaataaaagcattgaggcagttgtgggtgtcacaactgcactttacagtgtggtgcagctcatgaaagagctagttgagacgcatagtgggcacatgtatttgacctcccaaaaggttacttacttgcaacttccacanatgctcctttactattaaattcta

SEQ ID NO: 8602 - DNA, 459 bp, Glycine max
tgtcaaggagtgtgaaacaatgctggaccaccttttccctgtttttatcctgctccagtttccactgagacaactccccaagctgaaagttttgatccttcaacttcaaccactaccaagagtgatggtttggtgattccgaaggaattagctgagatcgagtacatggagagcctttatatgaagagtactgtatcagcctttgcatgttttgcaggaaaattagaagtggaagctcaacagttagcattgttcattgccaccggtgaagataagtggttcagataaaaaacatggaaaaaaatccttgtctggaacaagcaccaagtacctgctgggttacgtgctgataatgtagaggatagcttttcccatctattttcttctttaaatcgacgcctttgtttgcacccttaaatctacacgatgtagaagctaatgaaaaatgggttaatttat

SEQ ID NO: 8603 - DNA, 346 bp, Glycine max
tataatatatcgatacgctcgaaattaaacatcggattctgttgatattattcaaatggccataacttttcacacggatgtctgattcgatcgcataagatgtcgagaggctcgaaattggacaacagaagctcttgagaaattcaaatggtcataacttttcacacggatgttcgattcgggcgcataatatgtcgagacgctcaaaattaaacaacggaagctcttgaaaattcaaatgggcataacctttcacaccggtggtccaataaggcgcatcacatattgagacgcttgaaaatgaaccaccgaagctctttggaaattaaaatgggcctaacttttt

SEQ ID NO: 8604 - DNA, 432 bp, Glycine max
tctgcttatgagtgcacaactctttcaagaatttttcatatcttggaatttgctttattgcatccagcagaggtatgtttacctctacttttctaaatttttccaatatctccttctctgtctcttccatttttttgttggaaattgctcttggagggaatggaagagggatatgctacttctgtaaatcagaattaccagtggaagattcacctgcatagaacttgttaggtaactttttaaatttttgtcatcatctttttttggagtagagtgagattgggcaggttcatttgcggatgaagaagatgttgctggttgaggttcttgacactgctttcccaaccttaatgtaatggcactcacatttttgggattctggacagattgagaaagaatctgtcagaattctgcgactgttgttgattaact

SEQ ID NO: 8605 - DNA, 383 bp, Glycine max
  unsure (1)..(383): unsure at all n locations
agctttctggtgggacatcttgacttgcttcnctattctgacattcaccacagattctgccttcttctattttcagattgggaatgcctctaacagcacctttgtcaatgattttcttcatgcctcttaagtgcagatgtccaaatctttgatgccatattttgacttcatcttctttggagaatagacatgtggaggagtgactggattcttgaggtgtccataggtaacagttgtcctttgatctgctgcccttcattagaacttcactcttctcatttgtcaccaggcattctgactttgtgaagtttacattgaatccttcatcacacaactgactgatgctgatcaagttcgcagtcagtcccttcaccagcagtact

SEQ ID NO: 8606 - DNA, 389 bp, Glycine max
  unsure (1)..(389): unsure at all n locations
ttgaatgctctattcaatggagttgacaagaatatcttcagacttgatcaacacatgcacagnggccaaggatgcatgggagatcctgaaaaccactcatgaaggaacctccaaagtgaagatgtccagattgcaactattggccacaaaattcgaaaatctgaagatgaacgaggaagaatgtattcatgacttccacatgaacattcttgaaattgccaatgcttgcactgccttgggagagaggatgacagatgaaaagctggtgagaaagatcctcagatccttgcctaagagatttgacatgaaagtcactacaatagaggaggcccaagacatttgcaacttgagagtggatgaactcattggttccttcaaacctttgagct

SEQ ID NO: 8607 - DNA, 493 bp, Glycine max
  unsure (1)..(493): unsure at all n locations
ctacagcaaatgccactctactccaagtttttaaaggatatgtttatcaaggaaacacaagtatattcaccaggaaaatattgttgtggaaggaaattgtagtgatgtgattcaaaagatccttccacccaagcataaagaccctgggagtgtaaccattccttgttcaattggagaagtcattgtgcgaaaggctcttattgacctgngagccaatattaacttaatgccaatctccatgtgcagaaggttgggagagttggagatcatgcccactaggatgactntacagcttgttgaccgctccattaccagaccatatggagtaattgaagatatgttggtcaaagtaaaacattttatcttcccggaaaactttgtggtaatggctatctgtgaagatataacattcatgtaattttgggaagacccattcatgtaactgcaagctgcatagtggatatggggagaaagaagctggaactgggctttg

SEQ ID NO: 8608 - DNA, 423 bp, Glycine max
tcaagaataatggccttagcaaaaattttattcccagaagattatctctataaataggcctcctatttttaatggagagggttactactactggaaaatccgaatgcaaattttcattgaggcaatagacttaaacatttggtaagccatagaagttggaccttatgtacccaccatggtggctggtaatacaacaatagagaaacctagagaagagtggtctgaagaagaaagaagattagtgcagtacaatttaaaggctaaaaacatcattacttctgccctaggaatggatgaatattttagggtgtcaaattgtaagagtgctaaagatatgtgggacactctacaagttacacatgagggaacaactgatgtcaaaagatctaggataaatactctaactcatgagtatgaatattt

SEQ ID NO: 8609 - DNA, 467 bp, Glycine max
  unsure (1)..(467): unsure at all n locations
tgacattaatagtttgaatatatttattacctaaaaagttngttttttatttattacatttacttgacaaattataattttgtttattattatctaagatataccatttaccgaatttcaattttaaatgggtgactacaagttgtataaaattcaccatttccatcatcaaagatttcattttaaatcttgagtaatctttatgaatataaaattatgttttattacttatttacttcactttctagcttcaaagtatctatcagaaaaataatcaagccataaacaaataaacgaatcaagcccaagcttcatatattttaaccaactcaagttgaagttttaaatttgttcagtttaaataaacgagtgaagcttgagtaacccattttcttcacaaggcaaacctaaactttagctcagctaaacttgtttacaccagtgaatgcgggtggagaaaaatcatg

SEQ ID NO: 8610 - DNA, 590 bp, Glycine max
  unsure (1)..(590): unsure at all n locations
tgaactcttgcacctccttgaagttcaaccatgctttctttttactttggcttcataaaccttcttttgcccaccatcttttgcctccaaagtgatggtgtacaaggtaccagaaaccacttgctgttttgcacttactaccttttcaaactccaaaagggcattctgcataaccattaacaattcaataaaaataaaatagaagtcatatttaaattcccttaccacaaaatgaaaagataatagaaacccactagtgtttctataactacaaagaataaaaaattaacttcattattgaaattggcgccaccaacctatttattccttgacataatgaacatgcaaatntgtcgcaacaatcaattgattttttttggctaacaaaanattatggggaggagggaatggcccagtacacaacagaaaaaagcctctaggctcaaagaacatntatacanaaacttacatataccccactccanataaacaaatganggttcaaacctgcnnatctatagatgcaagattntgtcttactctactcaatgaatcctttgatgttccacaatcaatatattagtgcttaa

SEQ ID NO: 8611 - DNA, 353 bp, Glycine max
  unsure (1)..(353): unsure at all n locations
agcttagaagttaccttcattaaccaactttatgctgnatttgccncannnncgaagagcgcacaaccaaaaaatacagncttcccatgactattcatacccacaaaaatcccaaatggcatttcataagaattgaccttgtatggagtatcaaatacaacaacatcaccatatttttggtaccaatcagagcaggaagtatgagaccaaaaaatatgctctaaccttctctcttcataagtgtatatgcatcctgaaatttagagccacttttttttgcatccttacagaccttgaaaagaactttgcatcatttttttcaacttttttttttggtttcacaaaaagattac

SEQ ID NO: 8612 - DNA, 484 bp, Glycine max
tggagaaggtggatttggaactgtgtacaaggggctattggattattatgaggtagctgtgaagagagtctctaagaactcacgccaagggaagcaagaatttgtggcagaagtgacaacaattggaagccttcaccataggaatttggtgaaactcacaggttggtgctatgagaaaagagagcttctccttgtgtatgagttcatgcctaagggaagcctagacaagtacctctttggtgacaaaacttttggtaacaacacccttgaagaggggtgttcttcaacactgacttgggaaacaaggcacagtgtgattcatggcgtggctcaagcattagactatctccacaatgggtgtgagaagagggttcttcacagagacatcaaggccagcaacataatgttggactcagactacaatgccaagttgggagactttgggatgtgcagaaccattcagcagagaaatgaaacacaccac

SEQ ID NO: 8613 - DNA, 446 bp, Glycine max
  unsure (1)..(446): unsure at all n locations
acctaatcacaacctcatctatgaaggttttttttatttttcaggaccaattactttatttcaagggtcgtctattcaatacctgatcatagcttcaagtctagaaacattaacaagggtttatgtgaaatctatgtctttctggtgggtaaaagccttgagctactaacatagctttgntccttactaccttatcttgttcatccaatttatntctaaatgcccatcttgttcccaagatgctnttgttctcaggcttgggaacaagcatcttgacatcatttccagtgaactagtggagttcttcttccattgcaataatccaaatattatatgtgattatttcatttatcatcttaaggtctatttcaaacatgaaagcataagacataagatcttaaaatgatgatctggntttgactccttcagtctgatcttaataatct

SEQ ID NO: 8614 - DNA, 603 bp, Glycine max
  unsure (1)..(603): unsure at all n locations
agccttcaccttcaattggctgtttaattantttaatgctatgnnnaatnngaacatattgactaatattttacgatgtataagaataaggcttactgtattatatatattccaagtaaacaaacaagtaaaataacacacatgtcattgcaatgttcgtgatgataaaggttttctttttaaattttgttctgattttaatttctattagatattcaagtgtgttactaggatatgttggcgtttggtgccaaactgtgcactttctctctctctcgctatatttcttttaaattctaaaatttagtaatttcacttaaattttcatggatttgagaaattaatttttgcctctagtagtttaaaaagaattaagaaaagatttcactcactttttcaacaaaaattggcaaatagtttgacttccaaaaaggaaagaaagtgtaaaaaattaaaacattagactttaaacttgtgccatacacattggttgggctaaaacaaagtttcaaatagaaccttttccctgacaaacaaatgggaccctttttttaactaataaaaatttaataaaatttttcatattttatttaaaattatttt

SEQ ID NO: 8615 - DNA, 507 bp, Glycine max
  unsure (1)..(507): unsure at all n locations
tgtgctattccaagttcattaatcatacctttaagctagatttcttccttcactccttcagctagggccatgtactctgcttcagttgttgctctatcaaaaactgattgttgatttgttttccaattgattgctgtaccaaacaaagtaaacacatatcctgttaaagatttccttgtgtttacatttcctgcaaaatctgcatctacatagcctgtgattgctgcctcatgtgttgtcttcttgtaccttaatccaactttcaaagatccatttagataccttagtgtccacttcacagcttcctagtgtgcactgccaggatctcccatgaatctgcttataatacttacaacatgagccaagtcaggtctgctgcaaaccattccatacattatgcttccaacaccactggcatatnggtgttgatccattttagacctttcttcagcttgtttttgtgcttgaataacagatagttttgtatgatgaccaagtggtgtgcta

SEQ ID NO: 8616 - DNA, 330 bp, Glycine max
  unsure (1)..(330): unsure at all n locations
agcttccacctatgtcagggagctctttttatcaccgccgnagttaagaaatggcggcaatacttgttaggccactctttcatcatattgacggatcacaagagtttgaaggagctaatgaattaggctgttcanactccagaacagcataaatatctcgcacgattactgngttttgattatgtaatccagtatcgagcagggaagagcaatatcgttgcagacgcattgtcccggtcaacacctgcctcattattcattatctcagtccctcacttcgtcttcctcgacgagctgcgaagggagttgcaggcaaatccagcgttcatg

SEQ ID NO: 8617 - DNA, 593 bp, Glycine max
gaaacacccatttggttccaattggcttgtgagaggcagattgaaggactaaatcccactcttcattccttttaaactgatttagttctttatgcatagccaacaagcaatgttcgtcatgcaatgcttcatctatgtttctaggttcaatttgaggaacaaattccatgttattgcataaaattctaagtctagatcaagtggatactctcttagatatttcacctatgatgttgtccaaggggaggtctcattgagttcctcattcctttgggaggtctttatgaggtgtggttgtgatttccttattttgttcaagatccttaaccttggtttcatcttcaagtgcaatgttcttatcctgaagacctatatcttcatcttccaaagcattttctttgaatagagagttatgttcatcacacacaacatgtatagattcttccacacataatgttcttctattaaacgctctatataccaccttgccttccaatgaataaccaagacaaaatgcctcatcagcttttgatcaaaatttcctagagattcttttccattgtttaaaacaaagcatttacattccaaaagcc

SEQ ID NO: 8618 - DNA, 551 bp, Glycine max
tgtgtcgcactttcaactgccgaggctgaatatataattgtttgaagtttatgtactcaaagtctttggatgacgcaacaacttaaagactttggagttatcctcaatcacattcctcttaaatgtgacaacacaagtgctattaatctaacgaagaacccaattatgcattctagaaccaagcacacagaaattaggcatcatttcctaagagatcatgtgtctaaaggtgactgttgcattgagttcattgatagtgaacatcaattagtagacatcattgatagtgaactaggcatattcgatgcatctagcatagaatgacatcttatttgcataagggtatgtttcactttgtcattcatatcattagtctttgtttggtatgtgttttagcttagtgattcatgtgcattcttagtttggttgaatatcacatgtttttcttagtcattttgtaatttcttgctggtataattgattacctggtcatttcaatcgaatactatatgatttctggttggtaagttgttcaaaactttttgttttaa

SEQ ID NO: 8619 - DNA, 452 bp, Glycine max
agcttagcagattatcagcatctttgttattgaaatttccttgttggggctcagtccaataccacttcaactcattttcaaacacagcccagttaaaatgcttcacaacgaagttaacaaagtcctcattgtcaatgttcattctactgatgcatgttccaattgggaaatcattctgtgtttgtataacttttaccgaggtgttagcatagctgccagagtccagtccagagaatttcaggataacatcacgtttacgaatctgcagtgcagcaagtacgtataaattaaaatatatataaaaataatgcaaatcatctcatattctatcaatgaaaaatggatcatgtaatattaagaataggcacagaagtcttgaacatacttaacttcatgcaacattatttactggcatgaaaaatttgttttgtcacaaaaaaaaatatgccttt

SEQ ID NO: 8620 - DNA, 404 bp, Glycine max
agctttgagcaaattgaaatgacaataactttatacacggatgtctggttgagtcccgtaatatatcgagacgctccaaattgaaaacggaaactcttaaaaaattcaaacgacaataactttttactcggatgcccgacaaagtgtcgtcatttatcgagggatgctccaaattgaaaacggaagctcgtatcaaattcaaatgacaataactttttactcggatgtctgattgagtcccgtaatatatcgagacgctcaaaatttagatccgaagttctgagaaaattgaattgacaataactttatacacggatgtcaaggtggagtctgtaatatatcgagacgatgcaaatttgaaaacggaagctcggaagaaaattcaaaagaaaataactttttac

SEQ ID NO: 8621 - DNA, 384 bp, Glycine max
agcttcatgcttaactatgtatggcaaattttcattactattggtcaagacatacaagtgagcttgtaacaaatcttctatacttggagtgatcacctgcagtcctcttgaacccttaccacccactctgtcatcatgccgaaactcaggaagcccaacaggtttagccttctctaagtattctgaacaaaattcaatggcttcttctgcaatgtacctctcaacaatagatgcttctggacgatatagattctttgtatacccttttaagatcttcatgtattgctcaaccgggtacatccaccgtagataaacagaaccacaacatttgatttctctgaccagatgcacaatcaagtgaatcatgatgtcaaaaaaataggg

SEQ ID NO: 8622 - DNA, 384 bp, Glycine max
agcttcttagtctcagatgatgcagctgagtttgtatctacctcatgcactcctctaatgactatggcatcatttctggcgctaaactgctgagagttggaattcatcttctcaattaaatttctagcttcagcaggagtcatgtctccaagggctccaccactggcagcatctatcatacttctctccatattactgagtccttcataaaaatattggagaagaagctgctctgaaatctgatggtgagggcaactggcgcataattttttaaatcgctcccagtactcatacaggctctctccactgagttgtctaatacctgaaaaatccttcatgatggctggggtcctggaagcagggaaaaattttttctaaaaatac

SEQ ID NO: 8623 - DNA, 521 bp, Glycine max
  unsure (1)..(521): unsure at all n locations
tctcgttctatatnntaatntnatatttcttcactgtattctaatatggtattcatttntctggtactcttagacataaatatgagttgtgagttttctgttatttatatttttaactacttcaatgattaatttatcagacactntataattaataatagttgttcaattattagcttcangacttcagttactaattagttgtatcgaacatantcctaaatgctaatattgtctgtactaggaatgctagcaacatttctttaacnatatctgtgtaattgatggannattntaaattaagaaagaatcataaatgaggagaatgacccatcaaaatagatatttctctataatacatntaatcaatacgaacaagagaagtttganagatgaaaagagtcataatccaatataatacttatttaaagtacatatatctcatctactaataatgtgatgttaatttaattcttaaataatgtcatcctatatattaaaatggtactagtatacattag

SEQ ID NO: 8624 - DNA, 377 bp, Glycine max
  unsure (1)..(377): unsure at all n locations
agcttatctctcaattggtgacccaagataacattttttttatctaaccccccatctattggtgagattaaaaatgtagttttcattatgagtagctctagttcccctatccctgatggtttcagaggccacttctaccacaggtactaggaaattatctcaaaggttgtctataattttgtccttcaacttttttcaaaagaattggcttctccttggatttaaatcaaacattttttgcctttattcctaaatttccataagaggatagaatagagaacttcagacccactgctctgggtaatttccaatttaagattatctctaaaatcgtcacaagtagattggcctanattactcctaagctgattttaata

SEQ ID NO: 8625 - DNA, 328 bp, Glycine max
agcttgcctccatcgcgcgaggggaattatcgtatcaccctcttgccatccacagctgcggtgaacgtacgtccataccggtaccctcattttcagaaggctaaaatcgaaaaaaaattgcagaattgctctccgcgggcttcatacggccaagcacgagtccatactcgtctctggtccttttggtgaagaagaaggatggaacctggcacctatgtgtcgattacaggtccctcaacgccgttacagtctgagataggttcccgatacccactatcgacaaactattggaccagctgggtcacgcttcttggttcactaaactcaa

SEQ ID NO: 8626 - DNA, 493 bp, Glycine max
gcttgaggccttggatcttcttcatttatgaaatcatttgcttcttgaagatcatggaagtggaatggagaaggaagaaagatgattggagacgccacttcaaggagaagataagtgtagaagctcaccaccataggaagccatagataagagcttgaaggttgcagaagatgaattgatggagagggagacaaggagcatgaaattttgtgcctcaaaagaggtttgaactttgaggtttaattctcaaatgatcaaagttgaaaaaatgcacacacatgacctctatttatagcgtaagtgtcaaacaaaattagaggggaatttgaatttctattcaaatttcacttgaatttgaaattgaatttgtggagccaaaatttcactaattatgattagtggaatttagctatggttcaacccactaatccaagatcaagtccaagaatcttcactaagtgtgcttaagtgttatgaagcatgtaaaacatga

SEQ ID NO: 8627 - DNA, 308 bp, Glycine max
agcttgaatcggacctcagtgtgaaaagttatgaccattttaatttcctaagagcttccgctgttcattatcgagtgtctctatatgtgatgcgtcttaatctaacatccgcgggaaaagttatgaccatttgaatttctcaagagcttccgttgttcaattccgagcctctcgacatattatgcgcctgaatcggacatccgtgtgaaaaggtatggccatttgaatttgtcaagagcttccgatgtttaatggcgagcgtatcaatatattataaccctgaatcggatatccgtgggaaaagcttt

SEQ ID NO: 8628 - DNA, 271 bp, Glycine max
  unsure (1)..(271): unsure at all n locations
ctcagctggccatgaatcatatatcagcacctgttgcaagagtctgtggtctaagttcttctgtagatcaccatacagatctatgtccttctntgcagcaacctggagtcaatgagtaacctgaagcttatgctgcanacatttataatagacctncttagcagcaaaaccaatagcagcagaataattatgacctttcaagagacagatacaatccatgttggaggaatcatccaaatccgagatggacangttctccacaacaacaaca

SEQ ID NO: 8629 - DNA, 419 bp, Glycine max
  unsure (1)..(419): unsure at all n locations
agcttgtaatggtccttgttgtagagcacatgttttatatcaccgtanaatggatgaatgtcgtcaagccgggggaactcgtcgattatggtggagagcttgtcgtgaaaattctgctgagtatacttcactttgcgcatgtagaattggcgcagccgtgaaatcgcatatcctttgtgcacaacggttggtgtctgacgctgggtgcgagagaggataatgtcgaccacatgcttcccatttggcaccacggtaatcttcttaaaattgtactgaaccatcgtgctctatcaaccttgttgccacagaaaattaagaaaaagggactataagagtaaaacatgataaagtccgcggagctacataatttgagatcccaattgaaagctgagagaaaataaaaagcgattatgtgaatg

SEQ ID NO: 8630 - DNA, 657 bp, Glycine max
agcttgtgactctttgagcaaattgatttaacaagcaatttattgtttctttattaaagctagacaatgaaagacacgtgggtgatcatgaccattttaattagagtgggaaggagggtgtttaaaaccattctaaacaactaaaactaaaaatataaaataatcattttttaattgttctttaattaaattttcagtttctatatattattaaatcagaatccagccacactaaaccaaacccttattatatttgtaatattgatttgtaatacttatgtagtagtagtgttttaaactttttataatagtagcttatatgtaattttatgtgttgaacgtttaagttatattaaagaaaaaatgatttatttgggttttatcttatttttttttgggttatcttcattctttatctattaaaaagcttaaattaattatttattctatttttatattaagtttagtcctttacctttaaaaaatttattttggctaattaatttgtgtttctttcaaatttttcgctatttccctctacttcaattttaacaatttttttaatgattaacaatatcaatcttaaatcagccacccaaatatccaaattctacccaaaattatttaaatctaagaaccttaaggggttgcttttgt

SEQ ID NO: 8631 - DNA, 415 bp, Glycine max
agcttgaaggtaaactagaagccttggtttacctgggaacccaactggccatgaataaaaaatctggccctgtcgccaaactctggggttatgctcctctaccgatcaccacacagacctttttccttctatgcaacaatctaaagccattgaacaacctgaagcttatgctgcgaacatctacaacagaccttctcaacctcagcagcaaaatcagccacaacaaaataattatgacctctccagcaacatgtacaatcccggatggaggaatcatcccaaccttagatggtcgaatccttcacaacagcaggcaacaacaacaacaaccttattttcaaaatgctgctggcccaacaaaccatacgttccttcaccaatccaacagcaacagccccagaaacaacaaacaatt

SEQ ID NO: 8632 - DNA, 295 bp, Glycine max
tatcaatacatttgtagaggtcatccaccacttcattatcactgtcaatgtttggattggtgtaaaagaactttggatttagataataacccgctgcatgcaaagggtggtgaagttggcaatcccatcttttatcaatgattgcaaggatatccttatacttcccttcattgttattgaaagctctttgaattgcttctttggccctatccattgcttcataaatgaaacccattgcaggtttttttttcattatccaccaaccttaacacacttacaagaggccccatttgat

SEQ ID NO: 8633 - DNA, 284 bp, Glycine max
agcttcctccttgtgcagtttcccgggctcagacgtatcactttccgaaggttaaagatgccgacattgtatgcagactagaaaaaatttgcgccgaagaaggtcttgaatttgaacaggatgctttggacttcattgctgcgaaatcctgtggttctgttagggatgcagaaatgatgcttgatcagatgagcttgcttggaaaaaagatcaatatttctttagcttatgagctggtaagactagtgcttttgtaccatacatgtatatactccaaactacag

SEQ ID NO: 8634 - DNA, 295 bp, Glycine max
tactaacccatggaagctcctaatatctcctatactatcaggggggggccattcttggatgaccttgattttttaagggtccacttggaccccatttctaccaactacaaatcctaagaaaactatattatctacacaaaaaggtacaacttctctatattggcataaagagtgtttttcctaagaactgaaagaacttgccttagatgtcctaagtggtcatctaggctcctactatacactaaaatatcatcaaaataaacaactacaaatttacctatgaaatcccttaaga

SEQ ID NO: 8635 - DNA, 286 bp, Glycine max
gcgagctgattgtcgttcgaatttgctcttagcatttgtcttcaaattcgagcgtctcgacatattacgggactcaatcagacatccgagtaaaaaagtgattgtcgtttgaatttgctcatagcttcaacattcaattttgagccgttttgatatattacgatactcaatccgacatccgagtaaaaagttattggcgtttgaatttgcttaaagcttcggcattcaagtccgaccctctcgatatactacgggactcaatcagacatccgagtaaaaagttatt

SEQ ID NO: 8636 - DNA, 284 bp, Glycine max
agctttgagctttattcatatgacaataactttttactcggatgtctaattcagtcccgtaatatatcgagacgcttcaaattgattatcgaagctctgaggaaattcgaacgacaataactgtttactcggatgtctgattgagtcccgtaatatataaaaaggcttggaattgaataccgaagctctgagcaaatttaaacgataataactttatactcagatgtctgattcagtcccgcaatatatcgagatgctcggaaatgaatgccgaagctctgagc

SEQ ID NO: 8637 - DNA, 284 bp, Glycine max
agcttttggattgatcattaagtgctttatgaatcctcccgtgcttatgccaccagtgcctggaaggcctctcattttgtacatgacaatcttggacgagtcaatggggtgtatgctggggcaacatgacgaatccgggaagaaatagcgcgttgtttactacctaagtaagaagttcacgacctgtgagatgattactccttgctcgaaagaacgtgttgtgctttagtatgggcatcccatcgcctaaggcagtacatgctgagccatactacctggttgat

SEQ ID NO: 8638 - DNA, 284 bp, Glycine max
agcttgaaggttaactatatgccttggttaacttggtaacccagctggccttgaatcataaatctgtacttgttgcaagagtctatggtttattctcctctgctgaccaccatacaatcctttgcccttctatgcagcaacctggagcaattgagcagcctaaagcttatgttgcaaacatttacaatagacctcctcaacctcagcagaaaatcaaccacaacagaacaattatgacctctccagcaacatatacaatcccggatggaggaatcatcctaatc

SEQ ID NO: 8639 - DNA, 284 bp, Glycine max
agcttgacacattccttttataatgtaacaacacaagtgctatcaatttgtctaaaaaccatgtcatgcattctaaaaccaaacatatagagataagacatcattttcttagagatcatatatcaaagggtgattgttgcattgagtttattggtagtgaacatcaactagctgacatctttactaaacctctagccaaagataggttcttcttcattaggaatgaactgggtatcttagatggatctagtattgaatgatgttatgcttagaacatgtagctt

SEQ ID NO: 8640 - DNA, 287 bp, Glycine max
agcttgcataataagaattttcttggtatagccataatctggacagcattatagccaagccttttaattcgaggcaatacatcatctctaaaattgacatatgtgttgatttttggctcctgcaccacatggttcacaaaattgttaatagtagaagtagaaaaagaactgatactatacataggaactttcttgaacatcatagatttaatctctaatactaaacaaaatattctattattcaaattcaattaacattgactgtacaaatgagaccaatgccttca

SEQ ID NO: 8641 - DNA, 317 bp, Glycine max
ctatccaatactcaagcttgaaggcaaactggatgcattggttattttggttacccagtttgccttgaatcacaaatctgtacctgtcgcaagggtttgtggtttgtgctcctctgctgaccaccatacacacctttgcccttccatgcagcaacctggaacgattgagcagcctgaatcttatgctgcaaatatttacaatataccttctcaaccttaacatataaatctaccacagcataacaattatgacctttccatcgacagatacaaccctggatggaggaatcaccctaacctcagatgggacatccctg

SEQ ID NO: 8642 - DNA, 300 bp, Glycine max
tgtagggttaaagtctcacgattgtcatttgctcatgcaacaattgttagccgtggctatacgagacatcttgctaaacaaagtcaagttagccataactcgcctgtgctttttcttccatgctatatgtagcaaagtcattgatcctgtcaagtttgatgagttggaaaatgaggctgttggatcgaatggcctcagaataattaagaagggggggtgaattaattattcctaaaccattactaattaaaaatttctcttctaaggattttactaaattgttaagagaatgaggggtag

SEQ ID NO: 8643 - DNA, 284 bp, Glycine max
agcttctcatgctcaacctcattagttttattggttaaatcaacactcttttgctcctcttcaatggaagcaaccctcaaaggggcactcactttcagcccccaattcctctccctgaggttgcacctcaaaggttgaaacttatgacctgccactaccttgtttgtgtccaaaaattcaacccttgacgtgctggacaaagcacccccaattctatgtctaggaattactggaacaagaggcttcaaaccacattctgataatatccaagttgccattggact

SEQ ID NO: 8644 - DNA, 289 bp, Glycine max
agctttaagcaaattcatttgacatttacttttgactcggatgtccgattgagtcatttaataattcttgacgctagaaattgaatacagaagctctcaccaaatttaaatgacaataactttttactcagaagtctgattgtgtcccgtaatatatctagatgctcaaaattgaaaacagaagctctgagcaaattcaaacgacaatagcttttgactcggatatccgattgagtcatttaataattcgagacgctcaaaattgaatacagaagctctaagcaaattc

SEQ ID NO: 8645 - DNA, 254 bp, Glycine max
tctcgatatattatgcgcctttttcggacttccgtgtgacaagtcatgaccatctgaatttcttgacaccatccgttgtttaatttcgagcgtctcgatatgttatgcgcctgaatcggaaggccgtgtgacaagttatgaccattttgaggatctcgagagcttccgttgatcaattcccagcttctcgatatattatgcgcctgaatcagacttgcgtgtgacaagttatgacctttggaaattctcgagag

SEQ ID NO: 8646 - DNA, 282 bp, Glycine max
agcttctcgatttattatttgcctatttgggactttcgtttgaaaagttatgaccatttgaatttgtccagagctttggttgtccaatttcgagcgtctcggtatattatgcacctgaatcggacatccgtgtgacaagttatgaccattggaatttctcgagagcattcgttgttcaatttggagcttctcgatctattatgcgtctgaatcggactttcgtgtgacaagttatgaacatttgaatttctcgagaccatacgttgttcaatttcgagcgtc

SEQ ID NO: 8647 - DNA, 288 bp, Glycine max
  unsure (1)..(288): unsure at all n locations
agcttgtgggatnnngtttagtgtttttgccggagatgttgatgatagaaaaagtactaccggatttgtattttttatgggtgattgtgtttttacatggagttctaagaagcaaggcattgtgacactttctacttgtgaagccgagtatgtagctgcaacttcttgcacatgtcatgccatttggctaagaagattgttggaggaacttcagttgttgcaaaaggaaagcacaaagatctatgttgataatagatctgcacaagagcttgccaagaatccggtgtt

SEQ ID NO: 8648 - DNA, 291 bp, Glycine max
agcttctaaactttgtacaagaatgtatctctgataccacttgttagacaagtggcctcagatatcttaagaacggggggttgaattaagatattccaaactgtttcccctaattaaaaatctatttcactttttactcaagttatgaattcccttaatgacaatcttcttaaatattaattcaaatgaagcaacttgaatatgaatataaagcaataataaataaaggagattaagggaagagaaaatgcaaactcagttttatactggtttggccacacccttgtgcct

SEQ ID NO: 8649 - DNA, 295 bp, Glycine max
tggatttccttttaggagggtatctattcttcctaagaaggagccaaacccagtcaccctcattaagaactagctcttttctccctctattacctttagttgaatacacctttgtttggttctctatttggttcttaaccctctcatgcaacttctttacaaactctgacctagattccccttctttatgtataaaagaagtgtcccgtgggaaggtaatgaggtctaacggtgttaggggattgaacccatagacaacctcaaacggggactacttggtggttctatgaactcc

SEQ ID NO: 8650 - DNA, 293 bp, Glycine max
ttatacaagttttctacaatcacaatttccaaatgcaatgcagttcacagaatgtgtttcttccccatttagtaatatgtcaagtgaaatcattcacaatgaaatgaatcattttcagtttattctaatatatctggaaatgcaatgttgaacatacagactttatagatgctaatggatgttgacatgtgtttatttcaatttcaaagttcccagataagttcaaactatacagcctcaagctaaccaaacaaataaaaaattgcttaccagttgtacgaccacttgcatac

SEQ ID NO: 8651 - DNA, 301 bp, Glycine max
tccattttcaattacaagcgtctagatttattattggacacaatcggacatccgagtaaatagttattggcattagaatttactacgagcttctgttttcaataacgagcgtctcgatatactacgagacacaatcggacatccaagtaaaaagttattcctgtttgaatttgctacaagcttccattttcaatttcaagcgtctagatatattacgggacacaatcggacatccgagtaaaaagttattgacgataaaattttctaagagcttatgtattcaatctcgagcgccacgata

SEQ ID NO: 8652 - DNA, 274 bp, Glycine max
ttgagcaaatttaaacgacaattactttttactcggatgtatgattgagtcccgtaatatatcgagacgctcgacagtgaattttgaagatctgagcaaattcaaacgataataacgttttactcggatgtctgattgaggcccgtaatatatcgagacgctcgaaattgaatgttgaagctctgagcaaattcaaacgacaataactttttacccggatgtctgactgagtcctgtaatataacgagacgctcaaagttgaatgttgaagctc

SEQ ID NO: 8653 - DNA, 284 bp, Glycine max
agcttcaacatttaacttctagcgtctcgttatattatatgactcaattagacatccgagtaaaaagttattgtcgtttgaatttgctcagagcttcaacattcaatttcgagcgtctcgatatatgacgggactcaatcaggcatccgagtaaaaagttattgtcgtttgaattggctcaaagcttcaacattcaatgtcgagcgtctcgatatgttacgggactcaatcacacatccgagtaaaaagttattgtcgtttgaattggctcagagcttcaacat

SEQ ID NO: 8654 - DNA, 294 bp, Glycine max
ttgggaagaagcagcaacagggctactttgaagatggtggtcttccaaaagatgtgccaaaagggcactttgcagtgtatgttggtgaaaacaggacaagatacattgtcccaatttcatggttggctcatacacaatttcgaagcttgctccaaagagctgaggaggagtttggcttcaatcatgacatgggccttacaatcccatgtgatgaagttgtttttgagtttcttacctcaatgattagatgagaattaagggaaagttgatagaagtacacttattggcattttg

SEQ ID NO: 8655 - DNA, 324 bp, Glycine max
agcttgcatgatttacattctccccctttctcaagcttattcttatattttcttgacatcatcaaaatcttcatcatcaataatcttaagaaggataggcttaaaatacagaagaagccacaacaatcaatttaacaatgttctttaaacatgcaagacacaattgattgcaaaaaattaaataagataagggaagagaagaatgcaacacagttttatactggttcggccacatcccgtgcctacgtccagtactcaagcaacccacttgagatttccactatctttgtaaaatccattacaaagtctgaaccacacagggac

SEQ ID NO: 8656 - DNA, 497 bp, Glycine max
  unsure (1)..(497): unsure at all n locations
tgggtacaattctctcatcctatcctccaactcccatgtataatcaccctcatcggttccccaccgcaccttcaccaacgcgatctcctttcctctcaacgacttcattcttcggtcagtgatcttctgaggttgtgctttataagtgaggttatccttcacctgtacctcgtcctctgcaagaatatgtgatggatccgggttgtaccgtctcagttgagagacatggaacacagggtgcaaattcgataaactcggaggtaaggcgatatgataagctacaggcccaatcttcttcaaaatctgatatagacctagatacttgggtgtcaacttcctagccttgagagctcttccgaccccggttatgggagaaaccttcaaaaacacatgctccccttcctggaaatctagtggcttcctccttctatcataatagctcttctgcctatcctgagatgnctttatcttctctcgaatcaacttcacttgttcgt

SEQ ID NO: 8657 - DNA, 324 bp, Glycine max
agctttcacatggatgtccgattcggggacataatatatcgagattctcgaaatcgaacaacggaagctctcgataaattcgaatgggcataacatttcactcggatgtccgattcggggacataatatatcgagacactcgaaattgaacaacggaagctctcatgatattcgaatgctcataacatttcacacggatgtccgattcggggacataactcatctagacgctcgaaattgaacaacggaagctctcgagaaattcgaatggtcataagatttcacacgaatgttcgattcggggacataatatatcgatacgct

SEQ ID NO: 8658 - DNA, 352 bp, Glycine max
tatagtcattacttgttaagaaccataatctagagtctattgttcctttgataaagtgaagaatttgttttgcagccttgaaatgagtagtggttagagtctcgatgtattggctgatgagtactccagtagcatatataatgtttggtcttgtgtgtcaaatatcataaactacccaccaaactcttgaaatctatagcatccagttttcttgcttcgtcgaactttgataacttcattttgcactccatcagtgttccaattggcttgcatctatccatcttgaatttattaagcatcttctttgcgtagctttgcagtgaaatgaagatttcatcttctttctgcttta

SEQ ID NO: 8659 - DNA, 480 bp, Glycine max
  unsure (1)..(480): unsure at all n locations
tcagatttgtgtttaagtagaaataaccatgngaatcttgagcagtcatctaccaatgtaagggaagatctctgcccctcatatgtagggtgggcatagggaccccatatatcacattagagtaaatcaaaaggtaaataagataaattgttagagttaggaaaggataatcttctaagtttagcaagtggaaaaatagaacaattagaagaaaagaaattaggagagaattgtaaactaattttattattcaaatgattgaaaactttgtcttatatatgaccaaacctagaatgccaaatatgagcatttttacaaagagtggaatttacgtgtgaattcataacagaaaaagtaaatttgcaatcatgagtgtccttgaggtctaggacataaacgccttagatgagataccctttaccaatcctcttgcaagcttgcttctcttgaatatcaaattcattttgggaaaaaatggac

SEQ ID NO: 8660 - DNA, 484 bp, Glycine max
tctaatctggatttcttggattttgagaagtatctttttcaattaagattgtcaaataatagacagaaaaggttgtgttatcaactgaatataaagaagtcagttaaaatgaaaaaggttgttcagtagaatatgaaactaactgcgccataattcttaaataatataatattgagacttgagagaattcccagtgtggagaacgtataatggcttaatataaataaggttaagatgataacccaaattttgagaagtatgccagtggttcatcacgagcaggaccagcataaacaagtgaaccctctgttagcaagatgatgtcatcaaatttactatacactgaacctcttggctgatgtatcgaacaaattacagtatgaccatcttgtgcaagttgtttgagagtttccatgactttctcagcctggaaggcatcaagttcttggaaacacagaaaacaactttcatgacaaaaatatgt

SEQ ID NO: 8661 - DNA, 178 bp, Glycine max
agcttagaaggaacctatccaggtttgtaacggtcttttttgcagtgagagcagagaatccatagtgagcattgactttcagtatccattccactgcctcacgacgaagctgagaaagacaagagtccaaaagcgcattattgttattattattgctatcattgctattatcatcact

SEQ ID NO: 8662 - DNA, 401 bp, Glycine max
ctaagcttatggaacaagtgagaggtgggagagcaaaatttgactcctaaagatttgttttcactgcaggtgcaactgcagccaacgaactcttaaccttcatcctcgctaacccaggagatgctttactcgttccaaccccttactatcctgggtaagtaattaacaacaagctctttcatttaattagaaatactaactgacactttcaatattgattggaatttatcggaaatcaccattttttttagattctggtgctcctcatctaataattctcacttcttatatatattaaatgagaaatgaaatctattagaattgatttttaataaatcataaaaagtgtgagagagaaagtgtcatcttcatttactttatagtaaaaataaaatgacatt

SEQ ID NO: 8663 - DNA, 321 bp, Glycine max
  unsure (1)..(321): unsure at all n locations
agcttgcatccggtgcttgttgtcagggtgaagntttctatcctttttatcctgcncnnancttganttcccatttgcaccgtaccaaagtcaccgctttggtaggatgagaagaaacttccatgtgcagtaacatggaaggaggcaccagaattgacaatccaagaactatcatcacaagcaatgtttaggatattaccttcaccaacgagacataacaaatcttcttttgaaactatgacaggaggattcttctcttcttgcttctttgatgggttgacttggtctggcttaacgttactggccttttgatctctcttg

SEQ ID NO: 8664 - DNA, 517 bp, Glycine max
  unsure (1)..(517): unsure at all n locations
ttgactctttctttgtagagttttgaagattcataagttgtcagttttagttcttccaactccaacagttgaatattcctgtgttccctggatgccttctcatcaaaattcagaaattttaaagcccaatatgctttgtgttccatttcaactggtaaatgacatgattttccatacaccagttgaaaaggagataagccaattggggtcttgtatgaagttctgtaagcccacagtgcatcttccaatttggttgaccaatcttttctagttgacgccactgttttctctaatatcttctttaattntctattggacactttggcttgcccattagtttgagggtgatagggggatgccaccttatgattcacatgatattgactcaacaccttttgaagctgagcattacaaaaatgtgaaccaccgtcactgatcaagatccgaggcaccccanattgagcaaaaatattcttctttataaaaattaccacagtcttagcatcatttcttggag

SEQ ID NO: 8665 - DNA, 662 bp, Glycine max
  unsure (1)..(662): unsure at all n locations
ctcagcttatcattttttgaaggattggagaatttatatngtcgnattttttaaanacnnnngatttatattaaaataattaacgatatctttattttgatatcatatattttttccttataatgattttaaaataaaataatagaggagtgtatactatatatatatataacataacaactttagggatgtgttgatgattgaggttcgtcggaaaaccatgaatactaataatgacgtgttgtctctgaatctaagcatcatgaatcattaatccccaccgtcccggccccgagggctgaattggatccacataacacattcatttcccaccgtccgaaaagtgtgagacgattccctgaaataatgataaattaatcttataaataatttgataaattagtatggtagataatttagttattgaatataaaaaaaatatgataaattagtcttgtagataatttagtaataaattggtcactaaatattacaaattaataacaaattgatcataaaaaatataatatattatctaattgatcattaaatattacttttctctgatctcaaatttaagattaaaaaattgacacactagaaagtagtttatcatgttaattggcttaaatttagttaaaaatatttttgtctcaactact

SEQ ID NO: 8666 - DNA, 422 bp, Glycine max
  unsure (1)..(422): unsure at all n locations
tgacaagaaagcagaacctggaatttntttgtgtatatctcaacttcaaaggcctacagaatctacctaccatagagcaacaaagtaatcatcagcagggatgtcaaatttctggagtcagatagttgggactggaaaaatgataagaggtccgagtttcaggaggagaatgaagatgttgatgaagaacccataagaggaaccagatcactttcagacatctgccaaaggtgtaatgttgctgtgatggagcctgacggatatgaagaagctacagctgatcagaaatggataaatgcaatgaaagaggagcttacaatgattgaaaaaaataaaacatgggagctggtggacagacctaaccacaagaaagcgattggtgtcaagtgggtttatagaaccaagctcaatccggatggttc

SEQ ID NO: 8667 - DNA, 428 bp, Glycine max
  unsure (1)..(428): unsure at all n locations
tttgtagtcctctttgatcaaaggttcatttataacatttctcaggccataatagggatgatagaaatagatctaaaccaaacagtctccctaatttatatttcacctaattacactatgaatcttagtgatttcatacaaaacataaacctagaagtccaaacaataggttttggaagaaactttgagggacataatttatacttggatattaacttcattggtagaataagtgatcaaatatcccctagatacaggataaacactaatccattagtgacaaccttatcatctgatggaatccaatttttgccacccaaaatatttgattcctccagaaaccaaaacaatcaatggcaaacacatattgaggctggatcctctaggagtgcaataaccactcccgggatcactatnnatacaaacaa

SEQ ID NO: 8668 - DNA, 380 bp, Glycine max
actcagcttgagaaaactacgacaattttttaactcggattctaatcgagccctgtaatatatcgagacgctcgtaattgaaaacggaagctctaagaaaagtcaaacgacaataacttttaactcggatgtctgatcgagccctataatatatcaagacgctctaaattgaaaacggaagctctaagaaaagtcaaacgacaataacttttaactcggatgtcctattgagccctgtaatatatcgagacgctcgaaattgaaaacggaagctctaagaaaagtcaaacgacaataacttttaactcggatgtccgatcgagccctgtaatatatcgagacgctcgtaattgaaaccgaagctctagaaaagtcaaacg

SEQ ID NO: 8669 - DNA, 290 bp, Glycine max
agcttcaggtttcaatttcgtgcgtctcgatatacttctggacacaatcggacacccgagttaaaagttattgtcgtttgaatttgatcagtgtttttggtttcaatttcgagcgtctcgatattttacgcggctctatccgacatccgagttaaaagttattgtcggtagatttttctaagggctttccttttcaattccgagcgtcttgatatattaacggacacaatcggacacccgagttaaaacttattgtcgtttgaattttcttagagcttgtgttttcaatt

SEQ ID NO: 8670 - DNA, 322 bp, Glycine max
  unsure (1)..(322): unsure at all n locations
agcttgccgccacggagttnttcgactatgctcttgtgtggtggttctagctacaaaaggagagagcaagaaatgaagagccaatggttgatacatggacggagatgaaaaagatcatgaggaagcggtatgtgccggctagttactcaagggacttgaaattcaagctccaaaaactaacccaaggcaacaagggggttgaggagtatttcaaggaaatggatgtgctcatgattcaagaaaagattgaagaagatgaggaggtaactatggctcgatttcttaatggtttgactaatgatatccgtgatattgttgagct

SEQ ID NO: 8671 - DNA, 323 bp, Glycine max
agctttactagtgaggtcgtgcttatttttaaaccttttgctaaatctcgataggtgatcctttgtgataaaggaagctgacaaaattcatcatcatttaattgaacactcttcactccacaattttttttcctatgagacacatcacctatcttgattctttgcctccaaatgcattcaatcacactaatggaaactgaatatgttgaagcaactaattctttggtattttctttcaatttcctattagaattgtgctaatataggaaattagctatggccatacggtcttcattgcttaaaaacttatgttgaccatttat

SEQ ID NO: 8672 - DNA, 357 bp, Glycine max
tcggtattctatttcgagcgttccgatatttttgggtttcaataagacatccgagtaaaaagttattgtcgtttgaatttgctcagagctttggtattccatttcgagcttctcgatatattacgagactcaatcggacatccgagtaaaaatttattgtcgtttgaatttgcttaaagcttcaacattcaattacgagcgtgcggatatattacggtactcaatcagacatccgagtaaaaagttattggcgtttgaattggctcagagcttcgggagtccatttcgagcttctcgatatattacgggactcaatcagacatccgagtaaaaaggtattgtcgtttgaatttgctc

SEQ ID NO: 8673 - DNA, 473 bp, Glycine max
  unsure (1)..(473): unsure at all n locations
tgatccttgaatcttgattcttgattcttgttatcattttttcttttgaatcntgaagggttcttgattctatcttgaacatcttgaactcattctttcttgattctatcttgaacatcttgaactcattctttgattaacctttgagctttttgtcatcacctttgttatcatcaaaacatctttgaatcaatattgattcatcatgaagctttgcttctacacatgaccctccagttagctgatcgctccatcgcaagaccatatggagtgattgaagatgttttggtgaaggtgaaacaccttatattcccagctgattttgttgtgatagacatagaagaggacactgatattcctctcattcttggtcgcccattcatgtctactgcaagctgtgtagtaaatatgggaaagaaagatgtgcaaatgggcatagaagatcaggaaatcagctttgatttatttcatga

SEQ ID NO: 8674 - DNA, 317 bp, Glycine max
agcttagagtagaactcatcatcccaattatgttaacaccatgagaactaaaaaccagcctaagtatgattaaagaaacagaaaaaacaatcacagaggacataaagataaaacagtcaagaaaaacataaattggataaatcaaaatttattattatgatataatatacatacaacaatttataaataatttttgtgtgtatttttctctatatcattatgacatgtaataaataatgtgtagaagagaagtagacacaaaataactattgtatgaatattattgagcaaataatatttctttcaaaattatatat

SEQ ID NO: 8675 - DNA, 405 bp, Glycine max
  unsure (1)..(405): unsure at all n locations
tgtcctatgaaacatttatgctttacaatttgttaactttgatattatcaaattgtgaatttcttattcagttgccacgaccgataggaaatctggttaatttacgccacctggacatcagttacactaattttccagagatggcaacacaaatctgtagactacaatatcttcgtactttgacagtttttattgttggcaaacaagatggattaagtatcagagatttaagaaaatttccttatttgttgggcaagctttccattctgaacctgcaaaatgttgtcaatcctgtggatgcatttcgggccaacttanagaacaaagagcaaattgaggagcttatgctggagtggggaagcaatccacaagatccacagatcgaaaaaaatgtacttaacaact

SEQ ID NO: 8676 - DNA, 312 bp, Glycine max
agcttccgcttgaggggaaggctacgatgtgtaatatactcacactggagggggagatgtgttgagtacaagtgtgaggtaaagtcccacatcgggtaaaagtggaaaggttgagcaccatataagtgaggagaagacccataaacatgagccttaaggttttgggttagagtgtggtgtcaggcctccttatgtggtggctcgtggtccagaggtgtacccctcgaatctccccaacatcagagccatatgaatcatgtccaaagtattgggcgatggtgacacctattcttgtagcacaaacacaacaag

SEQ ID NO: 8677 - DNA, 507 bp, Glycine max
  unsure (1)..(507): unsure at all n locations
ttggagtttccaagtgccaattcgncgtcttctttagttcagtcttcctctggcttcaattcttcagtgggctttccttctgtgtccagcatcttgggatgttcccagcctttgatgacagctttccaggttctgctatccagtgatttgaggaaggccaccattcttgctttccaatattcatagttgcttccatcaagaattggtggtctgttcactggtccgccttctttctccatgttcatcagaatttatctccctagatctcactctgtgatttcgagtgttggctctgataccaattgaaattctgataccaggggacagatgtcgtaccggatgtcacgacatcacgcttcagaacatgcagattatatgtgtccgtatgaacagattaaacaagtaaataacacaagagaattgtttacccagttcggtgcaacctcacctacatcttggggctaccaagcccaggaggaaatccactctcaatagtgttagttcaag

SEQ ID NO: 8678 - DNA, 314 bp, Glycine max
agcttagatgtcttttctaacttttaagtgattattttttataacaaagcattgcaaaaattattacctcacatggagctacatgccctgatacattcaggatttctgatctcttggaatttaaagacgaccagtgtataattgagtaactcgaaacaagatatgcatcatgctttgatgttgcccaaaccaagtttcttaactgcaaatgaaaaaatagaggtataacattaattttagttaactcattgatcatggcatactctgaatttttagaaggtaatagtaggataatttaattctattatatgcaa

SEQ ID NO: 8679 - DNA, 507 bp, Glycine max
  unsure (1)..(507): unsure at all n locations
tcaagctttctccactaagtttcctaatgccggaaatggcnntattgatggctttggtcttagatgcagggaagaatttctccaagaacaccctcttaaggtcatcccagctaaaaatggacctgggagcaaggtagtagagccaatcttttgccactccctccagagaatgaggaaaagcctttagaaagatatgatcttcttggacatcagggggcttcatggtggaacaaacaatatggaactctttaatatgcttatgaggatcttcacctgcaagaccatgaaacttgggcagcaaatgtattagtccagtcttgagaacatatggaacaccctcaccaggatattgaatgcacaagctttcataagtgaaatcatgtgcaaccatctccctaagagtcctctcacgaagtggaggttgagccatgttctcactatgaaaattagtagtgaaatgctcaaaaacagaatattcagaacacccttcacagaatgctcaaaatg

SEQ ID NO: 8680 - DNA, 325 bp, Glycine max
agcttaacagtttttttttttccttagtgcaaacttttcaaaatttttatcaaaataatcttcaaatgattcatattttagtgtattttaaatttttttgaatttttatctacatatgaattagttatcaaataattttttattaatgcaaaatttgataaatatgatatgcatgaaaggaactttcaatctaatatgaattttaaaataaaattattcaattaaaagttattaaaagttattaaatgatgtaatatttaatgcattacattcatgtcatttgatctctcctatatatttattaatttttatatattaataagat

SEQ ID NO: 8681 - DNA, 325 bp, Glycine max
  unsure (1)..(325): unsure at all n locations
agctntacaacaaatgccactttactccaagttntatattgatatgttaacaaggacacacaagtatattcaccaggaaaacattgttgtggaaggaaattgtagtgttgtgattcaaaagatccttccacccaagcataaagaccctgggagtgtaaccattccttgttcaattggagaagtcactatggaaaggcacttattgatctgggagctagtattaccataatgccactctccatgtgcagaaggttgggagagttggagatcatgcccactaggatgactttacaacttgttgaccgctctattaccagaccatatg

SEQ ID NO: 8682 - DNA, 471 bp, Glycine max
tgaaggcaaactggatgcattggttaacttgtaacctatctggccttgaatcagaaatttgtacctgtcgcaagggtttgtggtttgtgctcctctgctgaccaccatacagacctttgcccttccatgcagcaacctggagcaattgaacagcctgaagcttatgctgcaaatatttacaatagacctcctcaacctcagcagcaaaatcaaccacagcagaacaattatgacctttccagcaacagatacaaccctggatggaggaatcaccctaacctcagatggtccagccctcagcaacaacaacagcagcctgctccttccttccaaaatgctgctggcccaagcagaccatacattcctccaccaatccaacaacagcaacaaccctagaaacagccaacagttgaggcccctccacaaccttccctcgaagaacttgtgaggcaaatgactatgcagaacatg

SEQ ID NO: 8683 - DNA, 499 bp, Glycine max
tctaagctttcgtgttaatttcgagcgtctcatataattgcttttgaatcgacctccggggaaaagttatgaccatttgaatttctcgagagctttcattgttcaatttcgagtgtctcgatatattatgcgcttgaatcgaacctccatgtgaaaagataagaccatttgaatttctcgagagcttccgttgttcaatttcatacgtctcgatatattatgcgcctaaatctgacttccgagtgaaatgttatgacagtttgaatttctcgagagctttcgttgatcaatttctagcgcctcgaatattatgcgcccgaatcggacctccgagtgaaaagttatgaccatttgaatttctcgagagctatgcttggtcaatttcgagcgcctcgatatatcatgcgcctgaattggacctccatgtgaaaagtatgaccatttgaatttctcgagaactttcagttgtccaatttcaagcgcccaatatattatgcgc

SEQ ID NO: 8684 - DNA, 593 bp, Glycine max
tcaagatgaatcaagattgattcaaagatttttgatgtttacaaagatgatgacaaaaagcaaagctcaaaagtcaagaacacttcatgataacaaagatgatgatctcaagaatcaaagaatgagttcaagattgaatcaagaacacttcaaggttcaagaggaaatttgatttcaagaatcaagtttcaagattcaagttccaagaatcaagatcaagattcaagactaaagattcaagaatcaagagaagactcaatcaagataagtattaaaaagtttttttaaaaaactgagtggcacatgaatttttctcaaaaaccttttaccaaagagtttttactctctggtaatcgattaccagattattgtaatcgattaccaatagcaaaatgtttttcaaaaagctttcaactgaatatacaacgttccaattgatttcaaaatgttgtaatcgattacaatgatttggtaatcgattaccagtatgtttgaacgttggaatttcaaattagatgtgaagagtcacatcctttcacaaaaagctttgtgtaatcgattacactgatttggtaatctattaccagtgatag

SEQ ID NO: 8685 - DNA, 314 bp, Glycine max
agcttggtccccaacgctctcttcaatctctcccaaaatctagaggtaaacctaggatctctattagatactatgctagatggcacaccatgtaatctgacaatcccacttatatacagggagctcaacttctccaaggaaaatatgatattaatggcaatgaagtgagtagacttagtcagtctatcaacaataacccagatagaatctaaacctctaggggttctaggtagtcctaccacaaaatccatggaaatactatccctcttccactagggtatctctaagggttgtaacttccctgaaggtctctg

SEQ ID NO: 8686 - DNA, 320 bp, Glycine max
agcttgacaagcacccaatcgcccttctgaaagttgacttcgtgtctattgctatccgtgaagtgcttcataaattgttgtgccttaataattttcttcccaaggcttctaaatatttcttcgtgattgactaggaaatcaactgcttcgatgttggatgttccagccaaatactgtggcatattgggtggtttcttgctaaaagtggcttcatatagtgaaatccagttccaacgtgcactgaagtattataagaccatccggtccacatcaagaaatagccccatgtcgatggatgatgatggacaaaatcctcaagt

SEQ ID NO: 8687 - DNA, 549 bp, Glycine max
taactgttttgttaaatgacatatctaatctaaatcatttttgtgataacaagatttgtcttaaaccagttcaatcatatgcatcaaagtataaaaactttcataaaacaaaaaaatggttttgtggatgaaaagctggaaataacattctgagtacaacattatgacaaaaaacattcttagtattgcatttgcataacataaactgagattttcataataacaatattctgataaatttttttatttaaataatgaacatcaaaacataagaaaatgtgcattgacattaggttctcataatcatatcaaacatttcataatgagttttgtgactaaccaagtagagagtttagttatctaagtgtttgaacctctatgttaagactttttgcataccaaaataatcttgagtaaaagttcaaaaaaggtaaagtttcaagaaaggttaacaaagtcacaataacccctcattcttgtgatgttttaatcacttcaaccataaccaccaccagtgtcgtcgcaaccaccaccaccaacaacaccaca

SEQ ID NO: 8688 - DNA, 438 bp, Glycine max
tctaaactttatgcaagaatgaagctctaataccactttgttgaaaagtggcctcagttatcttaagaagggagggttgaattaagatacaaaaattattccccaattaaaaatttcactctctctttttggattaacaatgcatccttaatatgaattactcaaaagacaatcctaaataaacttctttaaagcaaaagatgaatagcaataaataaaagaagtttaagggaagagagaatgcaaactcagtttttatactggtttggccacgccctgtgcctacgtccagttcctaagcaacccgcttgagatttcgactatcttgtaaaatgccttttacaaagtctgaaccacacaaggacaatccttcccttgtgtcaaaaatccttacatcttaagagaccctcagtatcttaaccaaaatttcttttgaat

SEQ ID NO: 8689 - DNA, 447 bp, Glycine max
cggagatgatggtacagcgggtgaaccacaagcggaagtttcgtttggtgagggagccatggaaaaacagagcgtttggaatgatttcgtaaatctcagaaaactattgggaaatgctggtgaaaacacgaatgccaagcagatataaatttgaatgaagaatgtagaggggcgtgtgaagcaacggtcgaatttgctttgtggtgaacgtgctattaatgttaagtgattcgtttgggcacgttcagattgcagtagctgctataattcctctagcagacaaatgcccagcttgcccctcaatttttcaaactgatttgcatccaaagcctttgtgaaaatatctgctatttgttcctcagtgtcaacatgcttcagtgtgatcactttatcatcaacaagatctctgatatagcgatgtctaatgtcaatgtgcttggttctgct

SEQ ID NO: 8690 - DNA, 586 bp, Glycine max
  unsure (1)..(586): unsure at all n locations
ttgatatcgaaataagattgaatgtgaaagtgggtatttttagaacattgtgtaaggctatgttgggcgagagctgaattgttcctgaatgagtggcatgaacatattggccggtcggaagttttactgtgattgggttgattcgtctatgggagtgaaggttatgcaaggagctagtcacatgatctgtagcccctgaatctagtatccaggaggtggaaagcgcactggtagaaggtgacatacctaggtttattggagtattgacggtgcatgaagaaattgatgcaacctgtttgggttgattgggtgtcgtgttctcggcggatggctcctggattaaggcgagtagtgccttgtactgctcaggggagaagcgaacgaactcatgggactcatgatgctgagctngatcatcagtggctttgctttctactgtcactacgttgttcatggtggtcctttcatcgtaaggcttgtatcccggcgggtacccatgtttccgatagcagacatccactgtatgtcctaacttgccgagtgggtgcacgtttttccttccttgttactctaatttttccattgg

SEQ ID NO: 8691 - DNA, 240 bp, Glycine max
tgccaacccatggaagctcctaatatctaccacactttttggggcgggccatccttggatggactcgagcttctcagggtccacttggaccccatttctaccaactacaaactctaagaaaactatattatctacacacaaagtacacttatctatatttgcatagaaggagattttcctaaagactgaaagagctagcctgagatgtacctaaggatcatctaggctcctactgtacac

SEQ ID NO: 8692 - DNA, 325 bp, Glycine max
agcttaacaaaaggcatgcgaagtgggtggaattcctatagcaatttccttatgttatcaaacataaaaagggaaaaagtaatattgtagccgatgctctttctcggcgtcatgcattactttctatgcttgaaaaaaaattgattggtcttgaatgtttgaaaagcatgtatgaaaatgatgaaacttttggaaaaatttttaaaaattgggaaaaaatttcagaaaatggtttctttagacattaaggctttcttttcaaagaaaacaaattgggggtgcctaaatgttctactaaaaatttgcttgtttgtgaagcacatga

SEQ ID NO: 8693 - DNA, 508 bp, Glycine max
tgaaatgctacaaaaaatggccaaatgcccaaggagttttacaacttgctaacttttatttaaatgataactgataggcttgtaagtaggggcaaattattcctagattattacattttcaattggcttctacatataatgcaactcatgtttttggtagttttggagcattggtagtattgttatgaatatatgatattctatattagttgttaaatctaatttcgatttctcatatttgtgtgtatttataggttaattcatttattgtctattttgctattcatcaacttgcttttgtatttgacttgtttatgtaaataggtacggacttagagctcttaactttgagtatgcttcagtgtgtctacaaggtagatcattaaattaacctcttgttatgaacttatgatattctatattaaattgtaaatctaaatacggtttctcgtatttgagtgtatttataagttaattcatttattggctattttctattcatcaactt

SEQ ID NO: 8694 - DNA, 313 bp, Glycine max
tgccaacccatggaagctcctaatatctcccacactttatggggcgggccattctcggatgggctcgatcttctcacggtccacttggaccccatttctaccaactacaaactctaagaaaactatattatctacacacaaagtacactttctctatatttgcatagaggagcgtgtttctaaagactgaaagaacttgcctgagatgtcctaagtgatcatctaggctcctactgtacactacaatatcatcaaaataaacaactaccaatccacctatgaaatcccttaagacatgatgcataagcctcat

SEQ ID NO: 8695 - DNA, 314 bp, Glycine max
agctttgagaaatttctaacaacaataactttttactcggatgtccgaataagtctcgtaatatattgagacgcttgaaattgaaaacaaaagctctcagcaaattcaaacgacaataaccttttactcagatgtccgattgtgtcccgtaatatatcgagatgctcgaaattcagaatagaagctctgagcaaaatcaaacgacaataacgttttactcggatgtccgaatgagtctcgtaatatattgagacgctcataattgataacagaagctctgagaaaattctaacgacaataaccttttacgcaga

SEQ ID NO: 8696 - DNA, 649 bp, Glycine max
  unsure (1)..(649): unsure at all n locations
tcctttccaaagactcgtaagggaaatcgctcaggacttcaataccaatctctacttccacagcagcgccgtctccactctccaagaagccgtagaggcctacctcgttgtgctcttcgaggacaccaacctctgcaccattcacccaaaagagttaccattatgccaaaggactgaggcctaccttgttgggctcttgtttattttcattgaatattgaaattttaatttttaaataaatatttaaaaatgaaaatttgaattttattgaaattgaatcactttgtccaaataagaaaattaaaatacaagaatttgaattacctcatccaaacaaaatatttacaaaaggaaaggaattaaaatcaaggcaatcaaaatgttatgaatttaaatttcttagaaatttttaaattcctcatccaaacacatggttagggtcatttntgtagagggaaaagaaatataatgnaaacaaattaagataaattcttaaattaaagtacaacgtaaaagtgtgaatatcacatcattataggatttatttaggtttttttggtccgtttctttgcattgaccgatgttatgagaaagagagaaaatnaanatatatatatatatatatatatatatatatatatatatatat

SEQ ID NO: 8697 - DNA, 574 bp, Glycine max
  unsure (1)..(574): unsure at all n locations
tttaagatgtgctcatttgtgtaaacattttctatattttggtagtagntcatgctcacgtaaccacaagctgcaataatgtgtgaacatggatagtgaagcgcagaataccttctgcattgacaatgatgaccatttaagttaactgcccacttttgtccgccgcgttgcgttatagggttgaaggtctcctctacttcaaaccttgtggagtggatatcatacacgcaaatgatgtgcgtacaagcttgttcttgatttttcctaagttctttaacaagcttcgaacaatatacttgtccttcatttaaaagtctttgggcttggtggccacgctcaacaaaatactttcgacacctacagtatattgatttgaccaatgttgttatgggaatgttgcgacaatcctttaaaaccttattgatacattctgagaggttggttgtcatgtggccatatcgacgtccttctctatcataagccatcgtccatttttcttttgaaatgcgatcaatccatgttgctatgggttgactcaattgacgaaatttgtctaaatttgatcaaaatgtgc

SEQ ID NO: 8698 - DNA, 316 bp, Glycine max
  unsure (1)..(316): unsure at all n locations
tctgacattcaccacatattctttcttcttctatnttcagatagggaatgcctctaacagcacctttgtcaatgatattcttcatgcctcttaagtgcagatgtccaaatctatgatgccatattctgacttcatcttccttggatgatagacatgtggaggagtcactggtctcaagaagtgtccatatggaacagatgccctttgatctgctgcccttgattggaacttcactctcttcatttgtaccaagcattctgaccttgngaagtatacattgaatccttcatcacacaactgactgatgctgatctat

SEQ ID NO: 8699 - DNA, 349 bp, Glycine max
agcttaataaatctatatatggtttaaaacatgactcccgtcagtggtaccttaagtttcatgggataatttcttcatttggttttgatgaaaatcccatggatcaatgcatataccacaaggttagtgagagtaaaatatgttttcttgttttatatgcaaatgatattttaattacatgaggtgaaacaatttctttttaagaattttgacatgaaggatatgggtgatgcatcttatgtcatcggcattaagattcatagagatagacctcgaggtattttaggtctatcacaggaaacctatattaacaaaattttgagagattttggatgaaagattatctacc

SEQ ID NO: 8700 - DNA, 265 bp, Glycine max
agcttcgtccatgtcgccagtcaactggcttttgtggtcaatactccaagttagcaaaaaggttctacgacccatttcaaattgttcaaaggatcggacctgtagcatataaacttgacttaccttcaacctctagaatccaccctgtcttgcattggtccttactcaagccttatcactctttactgaccacaacagaaacacccatccccttgcccaatgctgatgaagatttctaacccttcctccacccctctcactgtat

SEQ ID NO: 8701 - DNA, 255 bp, Glycine max
atacagaatacagatcccttctgcataatgggcaagaaccatgtctgaagagccacttatctatgcaagggaggtgaaacatgtgatggcaatgaggcaaacttcttactgtctctccaagcataaagtcctatatattgcacaaatgcacaaatttcatatatcacaatacacaatcttagaaaacatatagttcaagggatacacatctagtggtattgacgatgtaaagtgtaaaactaacctgcagcaaac

SEQ ID NO: 8702 - DNA, 314 bp, Glycine max
  unsure (1)..(314): unsure at all n locations
agcttcaaaccacaacaacacaaattctaggtatcccaaacccctcaatttgatggattttcatggtttgagaagtgaaattgagaatgaggtaaatttgaagcaaactctcacctcacacaagtctataagtactaacgtaacaactcaaacgatatgtatgcacaaaacaaaagtcaatcaaaacgaaacaaacgttagcccctcagttaaacaaaaataaaatgatatgtaacagataaaagaggaaacataanaagagaatatggatctagggatctcccaatcatgtggctccgcatgccacccggact

SEQ ID NO: 8703 - DNA, 320 bp, Glycine max
  unsure (1)..(320): unsure at all n locations
ttggagttcaaaagactctgtacatttctcttggcaaaaaatgaaacatgatgttatcaagtntntttctaattgcattgtgtgtcataaggcaaagttcaaagtcatgcatcatggtttgcatactccattgtcaattcctacctccccttggacctacatttccatagattntgtgcttgctcttccaaggtccaagagggacaaggattccgatttcttggttgtgataagtttccaagatggcacacttcattccatgtcataaggtggatgatgnctgtcatgtagcggatctgttcttcacagaagtaatgtgt

SEQ ID NO: 8704 - DNA, 221 bp, Glycine max
agcttctatttataggttcactcctattttctctacaattgcatcacctttcaatgagctggtgaagaagaatgtggcatttacctggggtgaaaaacaagatcaagcctttgctttgctcaaagaaaagcttactaaggcacctgttctagctcttcctgacttttctaaaacttttgagctagaatgtgatgcccctggagtgggagttggaacttgat

SEQ ID NO: 8705 - DNA, 274 bp, Glycine max
  unsure (1)..(274): unsure at all n locations
tgtgcttcaatgttcaattntgagcatctcgatatattatgcacctgaatcgggcatctgagtgaaaagttatgtcatatgagttagccgagagcttcgttgttcgatttcgagcgtctcgacatattattggcctgaatcggacatccgagtcacaagttatggcgggttaaactctccatgtgcttccatgtgtaattttgagcatctcgatatattatgcaccttaatcggacatctgagtgagaagatatgccatatgagatagccgaga

SEQ ID NO: 8706 - DNA, 293 bp, Glycine max
ttgatctaccaccaccgccgccaccattatctttgttttctattattattagtactttgatttctagctgtgtatttggctatattattatgaaatttgaacaatttagtatttcttttatttgcatggtgtgattgaaaaattatgaattatgtcatatgactatgtggtttttatatatttgatctattcatgtttcttgcttcatgattggtttatactctttaatgaatgtcttgtgtatgattagtagtgtatgtatgtttttttcttgttacgcactttggcttttt

SEQ ID NO: 8707 - DNA, 465 bp, Glycine max
gttatcaaacataaaaagggaaaaggtaatattgtagccgatgctctttctcggcgtcatgccttactttctatgcttgaaacaaaattgattggtcttgaatgtttgaaaagcatgtatgaaaatgatgaaacttttggagaaatttttaaaaattgtgaaaatttttcagaaaatggtttctttagacatgaaggctttcttttcaaagaaaacaaattgtgtgtgcctaaatgttctactagaaatttgcttttttgtgaagcacatgaaggaggtttaatggggcattttggggtccaaaagactctagaaacattacaagaacatttttattggcctcatatgaaaaaggatgtgcagagattttgtgaacattgcattgtatgtaaaaaggcaaagtctaaggtaaagcctcatggatcgtatactccattgacaattccggagtatccttggattgat

SEQ ID NO: 8708 - DNA, 286 bp, Glycine max
tcaacatcagaccacttccagggtgctggaactacttcacatggacttgatggggcccatgcatgttgaaagccttggaggaaagaggtctgcctatgttgttagggatgatttctccagatttacctgcgtcaactttttcagagagaaatcagacacctttgaagtattcaaagagttgagtctaagacttcaaagagaaaaagactgtgtcatcaagataattacgagtgaccatggcggagagtttgaaaacagcaagtttactgaattgtgcacatctgaa

SEQ ID NO: 8709 - DNA, 448 bp, Glycine max
tcgattaccaatagcaaagtttgttttcaaaaagctttcaaactgaatttacaacgttccaattattttcaaaatggtgcaatcgattacaagattttggtaatcaattaccagtgtgtttgaacgttgaaatgcaaattcaattgtgaagagtcacatcctttcacaaaaatgctttgtgtaatcgattacaattgaaattctgatactggggacagatgtcgtacaggatgtcacgacatcacgcttcagaacatgcagattgtctttgactgtatgaacaaattaagcaagtaaataacacaagagaattgtaacccagttcggtgcaacctcacctacatctgggggctaccaagccagggaggaaatccactaaaatagtgttagttcaaggtctaacagccactgtttacaaccttctcacctaaccactacccgtgcaatc

SEQ ID NO: 8710 - DNA, 399 bp, Glycine max
caccctcaagcgggacgtcgtcgcgccgcacgccggtggagatgttacccgccttctgggagtccaccagattcaaggtctttggaggcagcgttagggtttgcttttcccgcctaagagtcgagaaattggcgctctggggccgccgcgccacgaagggggacgagtggcgggggatcgataacctttttctgggaatggggatggaatctgtcgtgggtttctgtttgaagggagggtcaatgttgtccccaggggctctggggtttattgttggaaattggtaatgttgtgttggataaatattgattgtggtttattttggatcaatgagtgcatgattatgaaatgctgatgtttgattcagtctatacagtgccttgtgtatatacatttaac

SEQ ID NO: 8711 - DNA, 283 bp, Glycine max
taattggagcttggatgcctatgatcttcttcatcaatggattcctttgcttctaggaagattaatggcagcggtgtggatattggaacagagagaggagacgccgcttaagggataacatgagtctagaagaagcttaccaccataggaggccatggataaaagcttggatgacgatggatatgaatgaacggagagggatataacagcccgaccttttgtgctctaaaggcgctctgagatctgacatttaatcttcaaatgatcatagcttagacaattg

SEQ ID NO: 8712 - DNA, 294 bp, Glycine max
tgctggcctcaggcgctgtggcaagagttgtctccttctttggacgaattatcttcgcccagacttgaagagagggctcctcacagaggcagaggagcaacttgttattgatctccatgcccgtcttggcaacaggttttttgttcttcgcaagcttagctacatgcattgccttctttttgtgaacaattctttcatgaacacagtttttataagtatgaaaaactgattttttttgttatttattattttagtacatcttggacttgtaagtgtccgtgcctgctgtagacc

SEQ ID NO: 8713 - DNA, 458 bp, Glycine max
  unsure (1)..(458): unsure at all n locations
gggagagataactgaccaaatcttttcatggctattcttccagaagaacgctcccctgatgtagtttcgtttatagcttggaccatctcatttttgctgacatatccatccttgttcttgtctaagaatacaaatgtatcaaccaaagtctcaaatgtgccctccagctttggcatcccaattcgtgatttctagggaagtcatggaaaaaaattcgaagatgtagcaaaacatggaaattcaaggtttattgttatcaatgcaagcatgatgaaattctaggctgccctgaagaaatgcatgaaatgtccataaaataaaataaaaaaggaatgaacatatagaatngaattgttcataaagtacaaacatcttctgaatatagaaatgatggcgcataagctgcaaaagacagaatccgattcaatctcaaaagtaatgttacaacccaactaatc

SEQ ID NO: 8714 - DNA, 290 bp, Glycine max
tgcatacaagattctccttgtctggctcttcataaccttctggttgggtcatatagatgtcttcctctaaatccgcatgcaagaatgcagttttaacatctaactgctccaagtgaagattctctgcagctactatgctcagaataactctgatggtagtcatctttacaaatggagagaagatctctgtgaaatcaattccttgtttctgctgaaaccctttcaccacaagtctcgccttgtatcttcttctaccgttagattcttcctttaacctatagacccaccta

SEQ ID NO: 8715 - DNA, 362 bp, Glycine max
aacacagcagctttcggtgaaccaaccccataatacacagaaatcactaactaatactagagctccctctactcttacagatggagatgccccatcatgctcaacttcaccatctactaataactgccagatatctccgaatctgatgaaaagaaatcaacaagtatcagccacattaggaggaccttcggtagttgaacccaccaatcatctgatgcaggagcttcatagcaagtctgagatgcagatcaaacatgaattgcccagtgtaagaggaactgatcagctgaagttcacagggactgttgctgatcagatggaagcttcttctggaacatcttactgtattgatcctaataata

SEQ ID NO: 8716 - DNA, 297 bp, Glycine max
ttgactacccttcagatacaatactttcaggcatgaagttgggattgaacctcagaactggtattgaatggagaatgacatcttggaagaatcccaatgatccatccccaggagacttttattggggtcttttgctttataattatcctgagttttatctgatgatgggaacagaaaagtttgtgagagttggaccatggaatggcctgcatttcagtggcataccagatcaaaagcctaacccgatttatgctttcaactacatatccaacaaggatgagaagtactacacttata

SEQ ID NO: 8717 - DNA, 295 bp, Glycine max
tctacttatgttaaagaattggccgctatcactgccgccgtgaagaaatggagacaatacctccttggccatcactttacaattcttacagaccatcgaagcctcaaggagttaattactcaggttatgcaaacccctgaacaacaattatatttagccagactcattgggtatgattattctatccaatttctttccgggaacactaatgtcatcactgatgccctatcatgaattcccacaacttagactagtgcctttctcttattatcaatgcctaattttgtgttcctgg

SEQ ID NO: 8718 - DNA, 295 bp, Glycine max
tgaggacacatgaacgaaaatgcaatttatggtgctccgaaaaagggatgagaatggagaattgcactaagcaatcactacgcatggctccaaactcgaaggtggaggacacatgaatgaaaatgcaattcatggggctccgaaaaagggtgagaatggagaattgcactaagtgttagtgtttggctctactgagctttaaaagattggctaagattttgttaaaacataagcacttagacaatgaaggaaaactggagttgctgcacatgatgtccaacgttatgtcaaggaa

SEQ ID NO: 8719 - DNA, 287 bp, Glycine max
tgaatcggacatccgtgtgttaagttttgaccatttgaatggcacgagagcttccgttgttcaatttcgagtgtcactatatgtgatgcgccaaaattggacattcgagttaagtgttatgaccatttgaatttctcaagagcttccggtgttcaattctgagcgtctcgttatgtgatttgcctgaatcggacatccgtgtgaaaagttatgaccatttgcatttctcaagagctatcgatgttcaatttcaagcctctcgacatattatgcgcccgaatcggaca

SEQ ID NO: 8720 - DNA, 336 bp, Glycine max
cacggatgtccgattcgggcgcataatatgtcgagaggctcgaaattgaacaacggaagctcttgagaaattcaaatggtcataacttttcacacggatgtccgattcaggagcatcacatatagagacgcacgaaattaaaatggtcataactttgcacactgctgtccgatataagcttatactctgttgttccactcgagattatacatcgtacactctctagaaattgaactggccgataacttttcacacatatgatcgattcgagcgcatactatgacgagaggctctggcttgaataacggaagcacttgagaaattcaacaggggata

SEQ ID NO: 8721 - DNA, 297 bp, Glycine max
ttgagcaaattgaaatgacaataactttatactctgatgtccggttgagtcccgtgatatatcgagacgctcaaaatttagatccgaagctctgagaaaattgaattgacaataactttatacacggatgtccggttgagtcccgtaatatatcgagacgctccaaattgaaaacggaaactcttagaaaattcaaacgacaataactttttactcggatgcccgacagagtgtcgtaatttatcgagggatgctccaaattgaaaacgaaagctcgtatcatattcaaacgacaat

SEQ ID NO: 8722 - DNA, 346 bp, Glycine max
cgagtaaaaagttattgtccgttgaattggctcgtaggttcaacattcaatttcaagcgtctcgatatattaccggactcaatcagacatgtgagtaaaaagttattatcgtttgaattggctcataggttcaacattcaacttcgagcgtctcgatatattacgggactcaatcagacatccgagtaaaaagttattgccgtttaaattagctcataggttcaacattcaatttcgagcgtctcaatatatttcgggactcaatcagacatccgagttacaaagttattgtcctttgagtaggctcagaggttcaacattcaatgtcgagcgacccgatatatta

SEQ ID NO: 8723 - DNA, 482 bp, Glycine max
aatccgatccttggttaatggatatttgaagatgtcagcaatttgatccacagaagaatacatgacagatttggagcaatttggattcaacaagctcatgaatgaaatggaaatccaaagcaatatgtttggacctagtgtgtataacaggattcttggtcagaaaaatggcgctgacattatcacataacaataatggaggacgtctaataggaacacaaagatcttgaagcagttgtttgatccacaacagctcaccagcagtgtatgcgagtgaacaatacttaacttcggtgctagatcttgcaacaactcgttgttttcgagaagtccacctgataagattggatccatgaaagatggcatatccatactaagacctgctatcttcagtgtctaaaaagccaccatcattctgaataagcgagaagagattgagctcttgtaggtgtgaaatgaatgcagcgatgtgaggttccttt

SEQ ID NO: 8724 - DNA, 397 bp, Glycine max
tccaggtaaccaaaaaagatcattttcccctgccattcattgatcaaatgcttgagcgcttggcaagtatgtctcattacaatttttttatggttcttatggttatttacaaattcatattgctcctgaggatcaagaaaacaccacattcacctatccctttggcatttttgcctataggaggatgccctttggcctatgcaacgcctctggtaccttccaacggtgtatgcttagcattttcaatgattttttacagagttgcatagatgtgtttatggatgattatactgtttatggatcctcttttgatgcatgtttggatagtctacatagagttcttaataaatgcattgaaactaaccctgtgctgaatttctgaaaatgtcacttcatg

SEQ ID NO: 8725 - DNA, 418 bp, Glycine max
  unsure (1)..(418): unsure at all n locations
gaataagaatgaaaattagaaacgggaaagaaaagctgggttgcctcccagtaagcgctcttttaatgtcactagcttgacacatcatcctgttatctaggatccaatagagttcctacttcaaggaccttcttctcaagtctcctttcctccatcacatacactttaaaatagacattttggccaggtggatctttgtcctcatggaacaaatcaaagctgatcttctatgcccatctgcagcatcttctttcccatgtccgccatgcagtttgcagtatatatgaatgggcggccaagaatgagaggaatgccaacatcctcttctatgtctatgacaatgaaatcagctggaaatataaggtgtttaaccttcaccanaacatcttcaatgactccatatggccttgtgatggaa

SEQ ID NO: 8726 - DNA, 293 bp, Glycine max
tggatttccttttagtagggaatttattcttcctaagatggagccaaacccagtcaccctcattaagaactagctcttttcttcctctattgcctttagttgaatacacctttgtttgattctctatttggttcttaaccctctcatgcatcttctttacaaattctgacctagattccccttctttatgtataaaagaagtgtccagtgggaggggaatgaggtctaacggtgttaggggattgaacccatagacaacctcaaaaggggactgcttggtggttctatgaacc

SEQ ID NO: 8727 - DNA, 265 bp, Glycine max
ggcgcataatatatcgaaacgctcgaaattgaacatcggaagctctcgagaaattcaaatggtcataacttttaactcggatgtctgatttaggcgcataatatatcgagacgctcgaaattgaacatcggaagctctcgagatattcaaatggtcatatctattcactcgggggtgcgatttaggcgcataatatatcgagacgctcgaaattgaacatcggaaacctccagaaactctaacgggcataaattttcacttcggg

SEQ ID NO: 8728 - DNA, 288 bp, Glycine max
tcaacatcagaccacttccatggtgctggaactacttcacatggacttgatggggcctatgcaagttgaaagccttggaggaaagaggtatgcctatgttgttgtggatgatttctccagatttacctgggtcaactttatcagagaaaaatcagacacctttgaagtattcaaggagttgagtctaagacttcaaagagaaaaagactgtgtcatcaagagaatcatgagtgaccatggcagagagtttgaaaatagcaggtttactgaattctgcacatctgaagg

SEQ ID NO: 8729 - DNA, 287 bp, Glycine max
tgtgcaccaatgcacactccacgagactatccgagtaaaaagtggagcctgggatgacaatggcatttttatttacacaacattaaatcatataaaatattgcctccccaatggagatagtgggataattaaaacattggatgtcccaatttatattacaaaggttgttggaaacaccatcttctgcttgggtcgggatgggaaaaacaaagctataactgttgatgcaacagaatatatctttaagctttccttgttgaagaaaaaatatgatcatgtaatgaaca

SEQ ID NO: 8730 - DNA, 469 bp, Glycine max
attttgacatatcatttaaataatagcactgtacatccatgaccataactctaagctgaatgcagagcaagaaaatccaaacataccttcaggtcactaaatgtttcagttgctataaaacgaactgaaatggggaagaatgctgatggttcggcttgtggaacaacaaattccattgacccactggcaaatatatttagtcaggcaaaacaagttcaaaaataccatgacaataatactgcacatgttagctcttaaaagcatcacactatcaccccaaatttagcatacctgcggtttgaattatcaatcagaaggacagaccactccaaaaaggaattccttgagtcatacctgcaaagccaaattataggagattattaagagagacagaccgaaatgtgaaataaaatgatctcaaaatatatatgataaacgtcatcacatgatgattctgggagtggagggg

SEQ ID NO: 8731 - DNA, 465 bp, Glycine max
  unsure (1)..(465): unsure at all n locations
ctcctataatgactatggcatcatttctggcgctaaactgctgggagttggaggccatcttctcaattaaatttctggcttcagcaggagtcatgtctccaagggctccaccactggcagcatctatcatacttctctccatattactgagtccttcataaaaatattggagaagaagctgttctgaaatctgatggtgagggcaactggcacatagtttcttaaatcgctcccagtactcatacaggctctctccactgagttgtctaatacctgagatatctttcctgatggctgtggtcctggaagcagggaaaattctgtctaagaatactctcttaaggtcatcccagctcgtgatggaccttggagcaaggtaatacaaccagtcctttgccactccctctaatgaatgaggaaaagccttcagaaatatgtgatcctcttggacatcntgggggttca

SEQ ID NO: 8732 - DNA, 292 bp, Glycine max
tatgctgcaaacatttataatagaccctctcagtagcaaaaccaacaacagcagaataattatgacctttcaagcaatagatacaatccaagttggaggaatcatccaaatctgagatgggcaagtcctccacaacaacaacagcctatccctcccttccagaatgctgctgctccaagcaggccatatattcctcctccaatgcagcagcagcagcaacaacaacaacaaagacaacaagcagctgaggcccctcctcaaccttcagaatatgcaatttcagcaagagaca

SEQ ID NO: 8733 - DNA, 425 bp, Glycine max
gattgattcctttcttgattcgaaatacagtattatttggaaagagtatgagcaggttctagcaaaggaggaagttcattggtatacaaaatctaaggctaaatggcttcatttgggggatcgcaaccccaagtcctttcatggtgtgactattatccgtcgaaggaggaataggtatgatatgattaaagatggtgatggtaattgggtggtggattccgagaagttggaggagatggctactaagttctataaggacttgtatacaaaggatttcatatatcttcctttggtgacatctcatgcgtttccaaaattaagggatgaggccagagaggagttaaggaggattccatcactaagagaaatctattataccatcaaacaaatggggagtctcaaggcttcttgccctgatggattct

SEQ ID NO: 8734 - DNA, 472 bp, Glycine max
gaaatcaagagacacatacacattctttttgaaattctgatactggggacagatgtcgtacaggatgtcacgacatcacgcttcagaacatgcagatcgtatgtgtccgtatgaacagatttaaacaagtaaataacacaagagaattgttaacccagttcggtgcaacctcacctacatctgggggctaccaagccagggaggaaatccactaaaatagtgttagttcaaggtctaacagcccctgtttacaaccttctcacctaaccactacccgtgcgatctctacctaagagccactcttagatatgagaacctgcgctcactccctctcaaccacactcccgtgtttacaaattaatcaaagacacaccagagatcaactctgaacaaaagagatcaactctacacactagagatcaactctacacactagagatcaactctacacacaagagatcaactctacaca

SEQ ID NO: 8735 - DNA, 288 bp, Glycine max
tgaaaccggcatattcacagtttttgtctcgttatcaaagaattgaccaagcagtggacatgaagcagagttcaatgattcaatactaaaaacatttaactcgaatgacacgttgatgtccttggcgtattggatcaaattctctctagtgaaattgagctcaacctcatcacaagtggagggtgacacaatggcagtgaccttgagtgaaggtgccccactactcctcaaggcaagctcttgcataaaagatgaccactgtactccaaacccaatatcaaaatcaat

SEQ ID NO: 8736 - DNA, 419 bp, Glycine max
tcaccatggccactacgaattctgtgtgatgccattcggcttgtgtaatgctctatcgtccttccaagccactatgaacaacatctttggaccatacctacacaagttcattattgccttctttgatgatatattgatttatagtaagacctttccagagcatattgatcacctcacaaaagcttttgcagtttttctcgaaggaagcttcttcctcaagctcactaaatgtacctttgcccaacaacaagtgtggggcatattgtatcccgacagggcatagaacctgttcccaccaaagttgaggcaattcaggcatggctagttccgcggtcaacgcgcggattatggggtttcctggactttcagtgttctatcagcacttcaccaagggctatgcatccatcatagctcctttg

SEQ ID NO: 8737 - DNA, 431 bp, Glycine max
taactaagttgttattatgtgccaacatttttgtgtttcaagcccattacaagacacactagatcctatccctattacagaacctataacttgcactcaatggtccattacttgcaatgttaccaatctgattctgatataataatgaagacttgaatagtgatgatgattcttgtatcaccccagcttttacttggaaatcctcgaaagtcatttccacaagtgtttgctaccttttgagtagtggctcattcccgacaaggctattattagcttcattgtagtgtggttggcttttgtggatctgagaccaaatttcatccacagttttcttgcaaattgggggagggacagataatggttgggaaatagtggtgggttctgttgctactacacttttaccctttgcagcttcatcaagggtgggtagt

SEQ ID NO: 8738 - DNA, 284 bp, Glycine max
tctatagaagggtcgttcctaatttctctacaattgcatcacctctcaatgagctagtgaagaagaatgtggcatttaactggggtgaaaaacaagagcaagcctttgctttgcttaaagaaaagcttactaaggcacctgttctagctcttcctaacttttctaaaacttttgagctagaatgtgatgcctctggagtgggagttggagctgttttgttgcaaggtgggcaccctattgcttattttagtgaaaaacttcatggtgcgacccttaactacccc

SEQ ID NO: 8739 - DNA, 383 bp, Glycine max
tttctcgagagctttcgttgttcaatgtcgagaatctcgacatattatgccgctcgaagtcgaacatccgtgtgaaaagttatgaccgtttgagtttctcgagagctttcgtcgttcaattccgagcatctcgacatattatgtgcccgaatctgaccttcgtgtgaaaagttatgaccatttgaatttctcgagagcttccgatgtttaatttcgagcgtctcagtatattgctagcctgaatcggagctcagtgtgaaaaggtatgaccattttgatttctcgagagcttccttggttcaattccgagcgtctctacatattatgtgcccgaatctgaccttcgtgtgaaaagtaatgaccatttgaatttctcgagagct

SEQ ID NO: 8740 - DNA, 447 bp, Glycine max
tctgtggctgtcttactggtttagccccatcctctaaatttatccgatgcatacatgtggatgggctaataccaggaatgttcgctagggtccagcctatagccttcttgtgcttcttgagaactgataatagcttctcctcttgctcatcagcaagggaggtagatgtaattactggaaaacttttgctatcatccaagtaagcatattttaaatttgatggcagaggcttcaattctggtgtgggcggctggataatggtagaaagagatggtttctcagcctgtacctcaaaaataaagtcagaggtatgtgtatttcctgaaacatggttagttctatctgactctagaaaatcaatctcaagaggtaaaacatcaccagacatgtaatcaatatcaatttcagattcactctcagcatccaattcatccatatgatcaacta

SEQ ID NO: 8741 - DNA, 293 bp, Glycine max
ttgaatgctctattcaatggagttgactagaatatcttgagactgaccaacacttgcacagtggccaaagatgcatgggagatcctgaaaatcactcatgaaggaacctccaaagtgaagatgtccagattgcaactgttggccacaaaattctaaaatctgaagatgaaggaggaagaatgcattcatgacttccacatgaacattcttgaaattgccaatgcttgcactgccttgggagagaagatgacagatgaaaagctggtgagaaagatcctcagatccttgcctaa

SEQ ID NO: 8742 - DNA, 286 bp, Glycine max
tcgattcaggcgcataatatatcgaggctctcgaaattgagcaacggaagctctcgagaaatttaaatggtcatagcttttcactcagatgtccgattcatgtgcataatatatcgagacgctcgaaattcaacaatggaagctctggagcaattcaaatggtcgtaacttttcactcggagatccgattcaggcgcataatatatcgagacgctcgaaattcatcaacggaagctctcgagaaattcaaatggccataacttttaactcggaggtgcgattcacg

SEQ ID NO: 8743 - DNA, 428 bp, Glycine max
agaggtttagaaatattaaaaaaagagacaacatcatttttatttaaaaaccaatgttatctacacatttgacaacatcagttttcaaaaaccaatgtactagcaacatcttaaaaactgatgttaagtttctgctagtaacatcagttttttgaaaattgatgttaggaagttccatttaattacaaaaatgccaccacaaataatttcacattagtttttcttgtaaccaatattaaattggtgatgttgattgcatattttgtagttgtgatatcatgtatcataactgaaaacaagtgctcaaagctaagaaacaactgatttgggaggacattatggtatttccactaaacaatctacgttatagtaattcaatgtatttagcttgcattatgttttcattcactaactgttacataccattt

SEQ ID NO: 8744 - DNA, 369 bp, Glycine max
gctcacccccatgccaaaatacatgaaaatacataaaaagtctctactcaaagactactcaaaatgcccttaaatacaagtctaaaatcgtatactactagaatgaccaaaatacaagacccaaaagaacgaaaaacctattctaatatttacaaagaagagtggacccaaccttggcccatgggctcagaaatttaccctgaggtccatgagaaccctatgaccttctttagcagctctagcccaatcttcttggagtcttctatccaatacccttgtgggtaggattgcacttgatgacccttctctcttctctaactaaattctcaaatggcgttgttgggttggttagttttcccccctcggacc

SEQ ID NO: 8745 - DNA, 410 bp, Glycine max
tgaaggataacttgatgccttggtcaacctagtaactcagcttgccatgaatcagaaatctacacctgttgcaagagtttgtggtctatgttcttctgcggatcaccatacagatctttgtccttctttgcagcaatctggagtcaataagcaacctgaagcttatgttgcaaacatttataatagacctcctcagcagcaaaaccaacaatagcagaataattatgacctttcaagcaacaaatacaatccaggttggaggaatcatccaaatctgagatggacaagtcctccacaacaacaacagtctgtccctcctttctagaatgttgttggtccaagcaagccatatgttcctcctccaatgcagcaacaacagcagcagtcacaacaaagacaaccagcaactg

SEQ ID NO: 8746 - DNA, 365 bp, Glycine max
aatccatcttgggcctttttcccacaactctcataaatgggagagaatgttcatctaaagcatacaagtccctaatattatcaaatcctaaaatttgagctcctagggagtaaaacaatgtgtgtctcctagagagggcatcagctaccacatttgtttctccctttttgtatttgataacatatggaaattgctctaggtactctacccattttgcatgcctcttgtttaacttgctttgccctctaatgtacttaagtgattgatgatcactatgaatgacaaattccttggaaacaaggtaatgttcccaagtttggagggctcttattaaggcataaagctctttatcataagtggggtag

SEQ ID NO: 8747 - DNA, 400 bp, Glycine max
  unsure (1)..(400): unsure at all n locations
agctntaatatgcaaagaataccaagaaangttnctcatctgacttagcatcaaactttcctaagttttcatttccattgtttaaacgaaacacttgcaaccaaaaacatgaagatgcgagatgtttggtttcctatcaatgaacagttcatatggagttttctttaaaatgggtcttattaaagccctattcatgatatagcatgtagtattaacggatttagcccaaaaatattttggaagaggagtatcatttaataaggttctagcaatttcttccaaagacctatttttcctttcaacaactctattttgttgaggggttctaggtgcagaaaagttatgttcaatgccatgcttatcaccaaataaatcaaattctttattttcaaactcaccc

SEQ ID NO: 8748 - DNA, 399 bp, Glycine max
  unsure (1)..(399): unsure at all n locations
agcttcctcaaccacctcattagaatttaanncctgaagaatatgtctgtctttaatgaaagctgtttgtctttcatcaattaagcaggtataacctgtctcaacctgcttgctagaagcttagctatcactttgtacatgcagcctatcaaggatattggtctataatcatttagggactgaggatggttaactttggggataagagccaagaaagaggcattgctgcctctagggaaacaaccgttgacatggaactcatccacaaatcttctgaactctggttttagcacactccagaattccttaataaaattgaaattaaaaccgtccggcccagggcacttatctccaccacaactccacactgcttccttaagctcctggtctgagaaaggt

SEQ ID NO: 8749 - DNA, 245 bp, Glycine max
  unsure (1)..(245): unsure at all n locations
gctgcagcgaaggcaagaaagttcantncttcactcggatgccggatacaagcgcataatatatcaagacgctcgaaatgaataatggaagctctcgagcagttccaatggtcttaacatttaactcagagggccgattgaagcacatagtatattgagactctccacaatgagcagcggaggctctcaaggaaaggaaataggcataacatgtaactcggaggtcgaattgagacgcataatat

SEQ ID NO: 8750 - DNA, 407 bp, Glycine max
tcaacattcaaattcgagcgtctcgttatattatatgactcagtcagacattcgagaaaaaagttattgacgtttgaatttgctcagagcttcaacattcaatttcgagcgtgtcgctatattacgggactatatcagacatccgagtaaaaagttattgtcgtttgaatttgctcagagcttcaacattcaatttcgagcgtgtcgatatattacgggactcaatcagacatccgagtaaaatgttattgtcgtttgaatttgctcagagcttcaacattcaagttcgagcgtctcgttatattatacgactcaattagacatccgagtaaaaagttattgtcatttgaatttgctctgagcttcaacattcaatttcgagcgtgtcgatatattacgggactcaa

SEQ ID NO: 8751 - DNA, 386 bp, Glycine max
  unsure (1)..(386): unsure at all n locations
agctntgagncaaagaaacatcantttcttttactcagatgtctgattgcgtcccgtaatatatcgagacgctcgaaatgaatgttgaagctctgagccaattcacacgacaataactttttactcggatgattgattgagtcccgtaatataacaagacgctcaaaattgaatgttgaagctatgagccaattcaaatgacaataactttttactcggatgtctgattgagtcccgaaatatatcgagacgctcgaaattgaatgttgaacctctgagccaattcaaacgacaataactttttactcggatgtctgattgagtcccgtaatatatcgagacgctcgaaattgaatgttgaagctttaggcaaattcaaacgacaa

SEQ ID NO: 8752 - DNA, 339 bp, Glycine max
tgaatcggacatccgtgtgaaaatttatgactcatttttatttctcaagagcttccgttgttcaatttcgagcttctcgatatgtgatttgcctgaatcggacatacgtgtgaaaagttataccaattgaatttctaaagagcttccgttgttcaattttgagcgtttcgatatgttatttgcctgaattcgacattcgtgtgaaaagctattaccattggaatttttctagagctgccgttggtttatttcgagcctctctatatattatgcgaccgaattggatcttcgtgtgaatagatctggtctttagaattttgtgagagtttcctttgttta

SEQ ID NO: 8753 - DNA, 406 bp, Glycine max
  unsure (1)..(406): unsure at all n locations
tctggtgggacatcttgacttgctttccaatctgacattcaccacagattctgccttcttctattttcagattgggaatgcctctaacagcacctttgtcaatgatnttcttcatgcctcttaagtgcagatgtccaaatctttgatgccatattttgacttcatcttctttggagaatagacatgtggaggagtaactggtttcttgaggtgtccataggtaacagttgtcctttgatctgctgcccttcattaggacttcactcttctcatttgtcaccaagcattctgactttgtgaagtttacattgaatccttcatcacacaactgactgatgctgatcaagttcgcagtcagtcccttcaccagcagtactatgttcagactaggaagtccatcatggac

SEQ ID NO: 8754 - DNA, 398 bp, Glycine max
tcaagaataatggcctcagcaaacttcttattcccataaggaaattcaataaataggcttcctatttttaatagagagggttaccactattggaaaatccaaatgcaaatcttcattgaggcaatagacttaaacatttgggaagccatagaagtaggaccttatgtacccaccatggtggctggaaatgcaacaatagaaaaacctagagaagagtggactgaagatgaaagaagattagtgcagtacaatttaaaggctaaaaacatcattacttctgccctaggaatggatgaatattttagggtttcaaattgtaagagtgctaaggatatgtaggacactctacaagttacacatgagggaaaaactgatgtaaaacgatctaggataaatac

SEQ ID NO: 8755 - DNA, 378 bp, Glycine max
  unsure (1)..(378): unsure at all n locations
tgtagggttaaagtctcatgattgtcacgtgctcattctacaatagttagccgnggctatacgagacatcttgccaaacaaagtcaggttagccataactcgcctgtgctttttcttacatgctatatgttgcaaagtcattgatcctgtcaagtatgatgagctggaaaatgaggccgcaattatattgtgccagtaggagatgtattttccccctgctttctttgacatcatgaatcacttgattgtgcatttggtcagagaaatcaaatgctgttgtactgattatctacggtggatgtacctggtagagcgatacatgaagatctttaaagggtatactgagaatctatatcatccagaagcatctattattga

SEQ ID NO: 8756 - DNA, 415 bp, Glycine max
taagggtcttgcaacattctccatggacagccaaactcatgatcattgaattccaagagcacaagtttctcaagctgccaatctcattgaacaccttccaagcaacatcaatcttaccacattttgcatacatctccaacacagcattgctcacatataaattcttaaagaacccattcttccttgcgtatgcttcaaccctctgcccaatctccagtgctccaagatttgcaaaagctggaaaaatgcttgccaaggttactgcattgggcatcatccctttctcctgctccatcctcaggaacaaccccaaagcctccccgtactttttgctccgcgagtaacctgatatcatggtggtccatgacaccacattcctagaaggcatcaatctaaacaattccaaagctacatc

SEQ ID NO: 8757 - DNA, 395 bp, Glycine max
  unsure (1)..(395): unsure at all n locations
tgaaggaaaacttgttgtcttggtcaacctagtaactcagcttgccatgaatcagaaatctacacctgttgcaagagtctatggtctatgttcttctgcagatcaccatatagatctttgtccttctttgcagcaatctagagtcaatgagcaacctgaagcttatgctgcaaacatttataatagacctcctcagcagcaaaaccaacaatagcagaataattatgaccctntcagcaatagatacaatccaggttggaggaatcatccaaatctgagatggacaagtcctccacaacaacaacaacctgtccctcctttccagaatgttgctggtccaagcaagccatatgttcctcctccaatacagcagtagcaacaatagcaacaacaaa

SEQ ID NO: 8758 - DNA, 393 bp, Glycine max
  unsure (1)..(393): unsure at all n locations
agcttcaagattatggcctnatcatctatcttgtttcccgagggaaattctataaatagacctcccatttttaatgagtgggttaccactactggaaaacccgcatgcaaatctttatagaggcaatagatttaaatatttgggaagccatagaacaaggaccttatgttccctctatagtggctggaagtgcaacaatagaaaaacctagagcagattggactgaggaagaaagaagattagtacaatatatttaaaggccaaaaatattattacatctgccctaggaatagatgaatactttagggtttcaaattgtaaaagtgctaaggatatatgggatacactacaagtaacacatgaaggcacaacagatgttaaaagatctaggat

SEQ ID NO: 8759 - DNA, 370 bp, Glycine max
  unsure (1)..(370): unsure at all n locations
agcttgtaggctacattacaaccattcttggctttgaacaccatgaggaaattcacacaaaaaactgaattagagacatgagttacaagatttgctaccactttcttaactttgcaaagattgcataagcaaaaggccaatcttanaaggatgtttaattcagatgaatggttgaagtctaaggcagctaaagagcccaaggggaagcaagcaacagatgttgttcttatgccatcattttggaatgatgttgtttatgctttaaaggctatggggcctcttgtaagtgtgttgaggttggtggataatgaacaaaaacctacaatgggtttcgtttatgaagcattggatagggccaaagaagcaattc

SEQ ID NO: 8760 - DNA, 413 bp, Glycine max
  unsure (1)..(413): unsure at all n locations
agcttcttattttcagatgatcaaatttttttgtactacctcatgcactttcctctaattgactatgggcattcattttcttggcgcttaaactgctgagaggtgggaggcccatctttctcaaataaaatttctggcttcagcangagtcatgtctccaagggctccaccactggcagcatctatcatacttctctccatattactgagtccttcataaaaatattggagaagaagctgttctgaaatctgatggtgggggcaactggcacatagtttcttaaatctctcccagtactcatacaggctctctccactgagttgtctaatacctgagatatccttcctgatggctgtggtcctggaagcagggaaatttttttctaagaatactctcttaaggtcatcccagc

SEQ ID NO: 8761 - DNA, 402 bp, Glycine max
tggagtttccaagtgccaattcatcttcttctttagtccagtcttcttctggcttcaattcatcagtgggctttccttctgtgtccagcatcttgggatgttcccagcctttgatgacagctttccaggttctgctatccagtgatttgaggaaggccaccatccttgctttccagtattcatagttggttccatctaggattggtggtctgttcactggtcctccttctttctccatgttcatcagaatttatctccctagatctcactctgtgatttcgagtgttagctctgataccaattgaaattctgataccaggggacagatgtcgtaccggatgtcacgacatcacgcttcagaacatgcagattagatgcgtccgtatgaacagattaaacaag

SEQ ID NO: 8762 - DNA, 414 bp, Glycine max
  unsure (1)..(414): unsure at all n locations
gctttgtgaccttctctattaagatatacatttcttatcatattctgcaaatcctcatcagaggacacagaaaccaaagcatcaagatcttccccaggaagctgatacttgattgcatgaacctgattatatatttgtaatgctttctgcatgagctcctgccaagatatgtcctttcttattcgaagaatgcgtgtttggcctccaacataccttagctttccatcacatggtcgtggcaatattctaccaccaaagctgcaaagaaacttcatcatcattgatctatcataaactccaaaagagccatagccaggcacanattgtctattgtcctgattcaatgaagttcttggcattgatcgaatcgacccatagttgcttctgtctncaggtaatgatgtattcattcta

SEQ ID NO: 8763 - DNA, 393 bp, Glycine max
agcttgcaaagccctgatggattgtattatctataagagcttggtatgaaagactaagtttattcttactctagatagtactctagagaaatagtggacacttcactattcagaaaggcttagaaaaaggatctgctgattatacatatatatgtgaatgacatcattttttatgtaacctctgaaaggatgagcaaggagttttctgagctaatgaaaagagaatgtaaaatgagcttgatgggtaagttgaagttctttataggacttcaaatcattcaaaaagattatggaattttcatgcataaagagaaatacatcaaggacctattgaaaaggttcataatggatgaagcgacacaaatggctaccggtgcatccttccactatcat

SEQ ID NO: 8764 - DNA, 376 bp, Glycine max
  unsure (1)..(376): unsure at all n locations
agcttgntgtttttagctngacactttttattactattttttattttctatatttttcttccatcttattctttcttgctcgctctctttttgctcctttttttccatgagatattttgctacctaaacatacgtatatttttgtgaggtattttgctatatacatgcgtgtccaaggtatcttgctacctaaacatacatatatatgttttgtgagatatttttgctatatacatgcatatccaaggtatcttgctacctaaacatacatatatatattttgtgaagtatttttcctacatacatgcatatccaaggtatctttctacctaaacatacatatatattttgtgaggtatgactaccttccgagctt

SEQ ID NO: 8765 - DNA, 386 bp, Glycine max
  unsure (1)..(386): unsure at all n locations
agcttagctcagacactgcttaatttttttggattcagacactgttgactgaactcaaagttccccttctgcactcccatgtcttctgtgataactacagtgcagttgtcattgcccacaacccagttcttcatgcaagaacaaagcatatgaaaattgatgttttttttgttcgggagaaggttttgaccaagcagctcattgttcatcatgttcctgctcttgatgaatggcagatgcactcaccaagccactctatccaccaagatttatttttccaagagccaaactcaatgtgcttgaggcttcatcaaagtctcaaccaccttgagtttgagggggggtattanagcattgtcagagcggtgcagcttaactacactctt

SEQ ID NO: 8766 - DNA, 402 bp, Glycine max
ttatgatactgatgaaattcggtcttatggtttacaaaaatcatagttgttgttaggcggttatcgttatcaaaattctagaatgctttgtaaagatgttcatcaggtccaagtctgtgcctatgcattgtagtcgaaatgaattcaagatagtcaattgacccatttccgtcaacatcagcctgaggaaaaaatatacatgtcttgcaaattgaaacaattaggaacaaagcaaaaatgcatgacaacaaaaaaaagtataaagatataggaaatatcatagtttaatcacaacattaaaaaaggctttagctagagcctacataataataattataataataataataataacaacgaagcatacatgcattacaacaaaacaaaattaagaaataataa

SEQ ID NO: 8767 - DNA, 358 bp, Glycine max
cgtaatctctataaggcctcaaacaatctccaaggcgtggtttgacaggctaacaatagttgtcaagcaagatggttttgctcaatgccaaacaaaccatactatgtttgttaagcattctctggatggaaagatagctttgtttattgtttatgtagatgatatcataattctaggagacgattatgatcaaataaatcatctgaagaatcttctagccgaggaatttgaagtcaaggatctatgccagctcaagtattttctagggatggaaattgctcggataaagaatggtatttttgtttctcaaagaaagtacactctagatttacttcaagaaacggggatgcttggatgc

SEQ ID NO: 8768 - DNA, 332 bp, Glycine max
  unsure (1)..(332): unsure at all n locations
tatgggaaggcccatttgcctgagaaagctgtggacttgtttcacagaatgtggggtgagtntcagtgcaaacaaaccgtgaaatcattcaattctgttctcaatgtgattgttcaagagggtcttttcaatcgtgcattggagttttacaatcatgttgttgcatccaagagtttgaacattcaccctaatgcactcacttttaatttggtcattaaggccatgtgtacgcttggtttggttgataaagcaattgaggtttttagagagattccactcacgaattgtgctccggataattatacctattcgacattgatgcatgggttgtg

SEQ ID NO: 8769 - DNA, 360 bp, Glycine max
tttctctaactactcatgttataaaataagttccaataaatctgtaaatcacctgttccaaatatatcattggaacccgtgctttaattaacaaggaaatccaagtttgacaaaagtcgtttcaaatatatttaataacagaaaaatcataaactatataaatattatacgcgtgaatatcatattataataactatcatattgtacgaataaaaaacatggtaggttgttgaaaaaacaaacatcagatacatatttaaatattttctatcaatatcaatcacgagacaaatctcatccgttaaacatatcatataaaatacttaaccacacattgaacaattatgtttatatacatca

SEQ ID NO: 8770 - DNA, 443 bp, Glycine max
acactataaaactcagcttttatccaggcaattcttggtggtgaagctccttcttccttggcttattccctagtggatggtgcctcccctatcctcttctcctttgcctttcgctgcatctccatggtgaaaaatcaccattgaaggacctcattgaagctcaaagatccagcctccatagaagctccacaagcaagcttccatcaagttatgctcgagatcttccgtggttcaatttcgggcgtctccatatgtgatgtgcttgaatcggacctccgtgtgaaaagatatgaccatttgaatttctcgagatcttccgtggttcaatttcgggcgcctccatatgtgatgtgcttgaatcggacatctgagtgaaaagtaatgacaatctcaattactcgagagcttctgtggttcaatcttcaagcgctcgatatattatg

SEQ ID NO: 8771 - DNA, 344 bp, Glycine max
  unsure (1)..(344): unsure at all n locations
acattcaccacaaattctgccttcttctattttcagattgggaatgcctctaacagcacctttgtcaatgattttcttcatgcctcttaagtgcagatgtccaaatctttgatgccatattctgacttcatcttctctggagaatagacatgtggaggagtaactggtttcttgaggtgtccataggtaacagttgtcctttgatctgctgcccttcattaggacttcactcttctcattcgtcaccaagcattctgaccttgtgaagcttacattgaatccttcatcacacagntgactgatgctgatcaagtttgcagtcagtcccttcaccagcagtactt

SEQ ID NO: 8772 - DNA, 429 bp, Glycine max
  unsure (1)..(429): unsure at all n locations
tgttgttctcgctaagtctatgcctcgcgctaagtgcttgagacgtgctaagcacgccccttcatcaaatttccaatgtgctcttttgggctttactttactcattaaacatcataaattcatcaacttttaatattttagacacaaaaacttaaatgatgttaaaataatagttatttgcaccaaaaggaagaaatatgagaaaaaaaattaccaatatctatataatttaatcacagaacatacctataaatagtcgttacagttacaagtattaaattaattgtttataccaatacatttttatgtataaagtatccttaacagatacataaacttattatatacctcaatcaatatcatataatacaaaggtacaaataagaaaatcctaacatatgtacaanaaagggatgaaaaattaaattt

SEQ ID NO: 8773 - DNA, 324 bp, Glycine max
tataatttaatttaagacaaaaactaattacatgctatttgttaagtattttgtggattgtcgtgagtaccaattttctcttgtaataaaattcagtataacttaacaaaaagaaactgtcattttaattataaaaacaataagaaaaatattaccataattttaaaagtcccgtcatttaaatttactaacatacaaagtagcatgggaataacaatttttcgttactatatttattagtaatttattgattcttaataatcttaaaagaactttatttggatttttagattattttatactttatggtaaataagaaaaata

SEQ ID NO: 8774 - DNA, 444 bp, Glycine max
  unsure (1)..(444): unsure at all n locations
ntgtcgattgtgagagagtctgagaatccacttccgaatccaaaccctaaactacaacagccccaggttttgcaagtcagcataaaaatggaaggataaatcataaatggaaacaaaaaatagtttacatggaaacataaagtataaatcaaatatgcaaataacaaaatacatgttaagtaaacactattagaaaatacactttcaacatcggttatttagaacattctacattggttctaaaattgatgttgaaagtgacgatgttgaatgtatgaatgttaacatcggttttggagaaccgatgttaacatacatatgacaacatcggttccctaaataaccgatgttaaacacaatgaacaacagcaaanaaagtgtacgaatgatgaacgttgacatcagttttccactaaanaccgatgtaatatgttagtttaacat

SEQ ID NO: 8775 - DNA, 354 bp, Glycine max
ttggttagagctcggagaaggcctcaccttagcaccataagtggtacaacaaaccactgagaaagttaagttaattcaggaaaggatgagagctgctcagagtaggcagaaaagttatcatgataagaggaggaaagatttggaattcgaggttggtgatcacgtattcttgagagtcactccatggactgggttggtcgagcattgaaatcccgaaaactcacatctcgctttattggtcctttccaaattcttaaaaaagttggccctgtggcataccaaattgcactacccccgtcttttttaatcttcacaatgtctttctgtgtctcaacttcgtaagtatattcatga

SEQ ID NO: 8776 - DNA, 401 bp, Glycine max
  unsure (1)..(401): unsure at all n locations
cgtgggagtttgtgatagtgattntgccacagatgttgatgatagaaaaagtactaccggatttgtattttttatgggtgattgtgtttttacatggagttctaagaagcaaggcattgtgacactttctacttgtgaagccgagtatgtagctacaacttcttgcacatgtcatgccatttggctaagaagattgttggaggaacttctgttgttgcaaaaggaaagcacaaagatctatgttgataatagatctgtacaagagcatgcctagaatccggtgttccatgaacaaagtaagcatatagatacaaggtatcatttcattagagagtgcattaccaagaaagaagtagaattgactcatgtgaaaactcaagatcaagttacggatattttca

SEQ ID NO: 8777 - DNA, 368 bp, Glycine max
taagtgccttcttggcagggaaatagaaaaaacgaaaagagaacaacaactacatcatcattctttaaaattaaacccgtgttgtttatagagctgctcttgcaaaggcctcacatgattgtggtaaacatgtgcatccccaataacatggataagatcacttggaatgagatctgacaagaaaaacacatagtataaaaattgattattttatgtttaaattgtttttaatgatgtattttctctagtcatattatcaaaatcaacacacttttgaaccctgaatctacctagactagaacttaaattaaaaacttattcataaacttctgaaaacaactctaccaaaaaatctataaaaataattg

SEQ ID NO: 8778 - DNA, 451 bp, Glycine max
  unsure (1)..(451): unsure at all n locations
ggaaggtgtgtaccccaccatttnttcatagtaaaacactggtaatgtgtctactattattgtgatcatctccttctccgtcattggaggtaacacttgagctgccaggtctctccacctttgggtgtattctttgaaagatttgtgcccttttttacccatgttttatagttgcatcctatccggagccatatgagaattgtattgatactgcctaacaaaggcaaccattaggttcttccaagaatggaatcgggaaggttccaagttagtgtaccaggtgacagctaccccagtaagactttcttggaagaaatgtatcagtagtttctcattntttgcatatgcttccgacaatacatctttagatggttcttggggcaagtagtcctcttgtacttgtcaaagtctggcaccttgaacttgggaggggtgacgatattgcgtacta

SEQ ID NO: 8779 - DNA, 319 bp, Glycine max
  unsure (1)..(319): unsure at all n locations
tgtatggntgctggctagcttgatatactcggcatatcacacggccattgactatatactcccactcagctcgtgggttcacaatcgtgcactgcatttgaccagaaccatatgatgtgcgacttggcgaacccgtgatccattgacagcgatgctagtttctcaccatagatggacttatttaccttacaaaccatagactttgtatcacctgcagcaaagttttctggctgcatcatataaatagtttcttctgtgtcgccagatagacattgacgtttaagattcatttgatgtaactatacaatataatgagcta

SEQ ID NO: 8780 - DNA, 243 bp, Glycine max
atccactgttaacagcgatgccctacgctttggttatggcatcatcacctcagaatttcccatcattgaatttgaaagtgaagttgttgacgtgtatcttttgcatggacctatccacttagagtgcacgtacttgtgcttcctccatggtcccatgtgcattttgttttccttcatgcacctttatgcttccatgcacaacaccttgatgatgttgcttaatctctctattgtccccacata

SEQ ID NO: 8781 - DNA, 441 bp, Glycine max
tgcaaaaaccacccagcacacaggacacgacagtgtaagtgaaacacaaaggaagcgtaaaactggaaggcgtagtaaatttaaagaaaaacaagataggggcaaaattgtcattaaaattttatgaaaaccgaagcttgcattaaatatttttttaattcggattattattataaaatttaatgcatatttaattcacgttgttataaaataaataatatttatttaatattattaaattttttaatacaaataaaatgttgtcataaaaaatattttttatttttaaaaaaatatacagattacataagtaaatatttattattcaaatttacatgcgcattaaatatgtattagaaatgttagtgataattatgtataataataatttatgtatactaatattatttattttataatataattgattcattagtttag

SEQ ID NO: 8782 - DNA, 342 bp, Glycine max
  unsure (1)..(342): unsure at all n locations
tcttctagactcattttctccttgaagtggcgtctccaatcatctttcttccttctccattctgctgccatgatcttcaagaagcaaaagacttcattgatgaagaagatccatgacctacaagctccacatggagctacatcatttttccccctttctataaaggttttgtctaatgtcacttgttacctggaagaagttacatttggattgtaggattcttttggcatgttcaaaaggggaaaaaaattattttgattntgatgtttctagtgagttctatggtaatggagccctaaatcttatctttgtggcgagggggtggagctggattgttgaata

SEQ ID NO: 8783 - DNA, 450 bp, Glycine max
  unsure (1)..(450): unsure at all n locations
tccccgacttcaccccaaaggtgcatttggttgggtttacttttaattggtatttccgcaaccttccaaacagcttacgcagattgacaaggtgttcagcctcaatccgagacttggcaatcatgtcatctacgtagacctctatttccatttttcccaacacacacttatggttcacacaaaagtttcttcatatacactcgttactcacacacacaagaattcctttccacgcatcatttacacacataaaaaccttctatacacattttccttttacatacatgtataaataaaaacctttttcttttctttatgaacatgacttttattcacaacgcttctttctttttattaggatttttggttcattntatttttaggacgacgttcctaaatgaaaaactctacacgggtccggaatttcaacaaacactattgacaacaatg

SEQ ID NO: 8784 - DNA, 355 bp, Glycine max
tcacgcttagttggagtctgcaaagccccaatcattcaacactttgctgaaacaatttctggtactacaactattagaagctttgatcagcagtcaagatttcaggaaacaaatatgaaactgactgatggatattctcggccaatgttcaatattgctggtgccgtggaatggttgtgtttccgtttggatatgttgtcttctatcacatttgccttttccttaatattcttaatatctattccacagggattcatagatccaggtgagttattcctatctgttacaaatcaaaatttaattcttttatggtatatggaattaaacataataagttctcttttataactttttt

SEQ ID NO: 8785 - DNA, 335 bp, Glycine max
  unsure (1)..(335): unsure at all n locations
ntatgaacatatcagcaggattgtgtagagtgctaatcttatgaactctgattcttctttctaaccgaatgaagtgatatctaacatctatatgcttggttctatcatgatgaacttgatccttggccaagcatatagcactaaggctgtcacagtagatgttagcatattcttgattaattccgagatcatttatcagacctctaagccaaattccttcctttgcagctttagtaagagccatatatttagcctcagtagttgagagagcaaccgaaggttgaagtgttaccttccaactcaccaagcagccaccaagggtgtaagcataccct

SEQ ID NO: 8786 - DNA, 359 bp, Glycine max
tgtataccccatgttgcatttgcttacaatagagttgctcatagcaccactaattgttctcctttcgaactcggttatcgctttaacccactaactactcttgatcatttgactatgcctaatgtttctgtttttaagcttaaagaatgtcaagcaaaggcggactatgttaaaaaactctatgagagagtcacagatcaaattgatacgaataataaaagctatgctacactagccaccagagggagaaagaaagttgactttgaacccagacattgagattgggtgcacatgagaaaagaaaggttctcttaacaaacgaaattaaagcttctaccaaggggagatggaccatttta

SEQ ID NO: 8787 - DNA, 213 bp, Glycine max
taacaaaaggcatgcgaagtgggtggaattcctagagcaattcccttatgttatcaaacataaaaagggaaaaggtaatattgtagccgatgctctttctcggcgtcatgcattactttctatgcttgaaacaaaattgattggtcttgaatgtttgaaaagcatgtatgaaaatgatgaaacttttggagaaatcttaaaaaatggtgaaaa

SEQ ID NO: 8788 - DNA, 346 bp, Glycine max
gactcaatcggacatccgagtaaaaagttattgttgtttgaatttgttcagagcttcaacattcaatttcgagattttcgatatattacgggactcaatcagacatccgagtaaaaagttattctcgtttgaatttgctcagggcttcggtattcaatttcgagcgtctcgatatattacgggactcgatcagacatccgagtaaaaaattattgtcggttgaatttgctcaaagcttcaacattcaatttcaagcggttcgatatattacgggactcattcggacattcgagtaaaaagctattgttgtttgaatttggtcagagctttggtattccatttcgag

SEQ ID NO: 8789 - DNA, 345 bp, Glycine max
catgcactcctctaatgacaatagcatcatgtttggcactaaattgctaggagttggaagccatcttctcaattaaattcctggcttcaacaagggtcatgtctccaagggctccaccactagcaacatctatcatgcttctctccatgttactgagtccttcataaaaatattggagaagaaactgctccaaaatctggtggtgagggcaactggcacataattttttaaatctctcccaatattcatataggctctctccactgagtttcctaatgcttgacatatcctttttgatggtcgcggtcctggaagcagggaaaacattttctaagaatactctct

SEQ ID NO: 8790 - DNA, 363 bp, Glycine max
caactttgccaagagccagctgggagcaattggtcaatctgatcagtggatcagatctgctgctgatctcctaaattgtggtcccctgcagcttcctttctgctacctagggctgcctataggtgtcaatccgagaaggaagatggtgtgggaacctatcatcaacaaatttgaggctagactgaacaaatggaggcagagaagcatatccatggctggtagaatcaccctaattaatgctgtcctaacagctctgccattgttttacatgtcttttttcaggactccttcaacagtgatcaacaaactcatctccattcaaagaaaagttctttggggtgataatcaagaaaggaggaagat

SEQ ID NO: 8791 - DNA, 448 bp, Glycine max
aatctcagcttcacatcagaccacttccagggtgctggaactacttcacatggacttgatggggcctatgcaagttgaaagccttggaggaaagaggtatgcctatgttgttgtggatgatttctccagatttacctgtgtcaactttatcagagagaaatcagacacctttgaagtattcaaggagttgagtctaacacttcaaagagaaaaagactgtgtcatcaagagaatcacgagtgaccatggcagagatgttgaaaacagcaagtttactgaattctgcacatctgaaggcatcactcatgagttctctgcagccatcacaccacaacaaaatggcatatttgaaaggaataacaggactttgcaagaagctgctagggtcatgctccatgccaaagaactctcctataatctttgggctgaagccatgaacacagcatgc

SEQ ID NO: 8792 - DNA, 454 bp, Glycine max
  unsure (1)..(454): unsure at all n locations
ntacaacaaatgccactntactccaagttttaaaaggatatgttaacaaggacacacaagtatattcaccaggaaaacattgttgtggaaggaaattgtagtgttgtgattcaaaagatccttccacccaagcataaagaccctgtgagtgtaaccattccttgttcaattggagaagtcactatggaaaggcacttattgatctgggagctagtattaccataatgccactctccatgtgcagaaggttgggagagttggagatcatgcccactaggatgactntacaacttgttgaccgctctattaccagaccatatggagtaactgaagatgtgctggtcagagtaaaatattttatcttcctggcagactttgtggtaatggatatctgtgaagataatgacattcatgtaatattgggaaggccattcatgttaactgcaagctgcat

SEQ ID NO: 8793 - DNA, 347 bp, Glycine max
cactggctgacatgttctcaattagctcagttgcttctttcggggtcttcaattttatctttccccctgcagaagcatctaacagttgcttggtttgtggtctcagcccatctataaacatattcaattggattggctcggaaaacccatgagtaggagttcttctcaacaagcctctgaatctctccaatgcttcactcagagattcatcaggaaactgatgaaatgaagagattgcagctttcccttctgcagtcttggactctggaaagtatttctttaggaacttttcaacaacttcttcccaggtttttagactattgcccttgaatgagtggagccacccc

SEQ ID NO: 8794 - DNA, 340 bp, Glycine max
aagtggcctcatatatcttaagaaggaggggttgaattacaaactatttccccaattaaaaattctactttgattttaatgcaagttccaatttcccttaaaaatgaatttctaaatgatgattcaaattaaacaatctgaatgtaaatgttaagcaacaataaataatatagtttaagggaagagaaagtgcaaacacagtttttatactggttcgacaaagtccgttgactatgtccagtccccaagaaacccgcttgggagtttcactatctcacaaatcctttacaccttctaaaacacacaaggaaaacccttcctttatgttcaaatgctttac

SEQ ID NO: 8795 - DNA, 318 bp, Glycine max
gcatcagtcccgctaactgttgcagcatctgagtgccacgcttcgggaaacgcctcatcagcttgtgtacccatccaaacagccagcattagctcccccttcgctttgtcaccctttctgtcttccagcctataccactgcggtgccaaaggactgtccggtggaacacgcttcgggatctcattgaggtcaaacaagacacgaccaatgaagtcatccttcacgacatccttgtccttcacagtgacttccagtatggaagcctgaatgcggtctttggagaaagcaaaaacctgattccattcaggattacacttc

SEQ ID NO: 8796 - DNA, 312 bp, Glycine max
tcattcacttaccaaatcatcaaatgtaccatgagagttcatagcatatagatgtgaaactacacttcatcagagatgtgattgaatctgacaaggtgaacgtggagaaagttctaacagaaaaaaaccccgctgatatgttcataaagtccctctctagtgtcaagttcaagcactgcctggacttgataaattttgaaggtgtctaaagcagattggtagaagagcagcccaaaaacacaaagtagacactcgcttatttaaattcaaggcggagatttgtggtgtgtgaactcaaatcacaattgacac

SEQ ID NO: 8797 - DNA, 359 bp, Glycine max
gttcaacacctatcataaataattgacttaactattattggattgtgaaaaagcttggataaatatcaaattaaaatattttttaatgaattgaattttaaaattattatatataatcttaacacgtccttgtttcaatttaactttaaattttgatacaccatatgaataaagattatgtgtcccaatttaaatattttttttatagttttctcctcatgtttaaaagtattatcgtaaatttatttatatctactaaaataaaatactcaccattaaccaggaaaatatctaatattacgaagtcttatttttaaaaattatatatgtgtgtaattttacacaattaattattgata

SEQ ID NO: 8798 - DNA, 341 bp, Glycine max
  unsure (1)..(341): unsure at all n locations
aaacctttgctaattcaattaggaattcccttcctaatattctagtgatcatcttgatgttgtgacttgtaatcttgaagtattgtcttgaattttaatcttgaaaagcccatttgcatcaattgcaacacatcatcatgatcatcatcaaaacatcaaagccaattgcatctacacatgtgtcctccaccttcgagattggagctatgtttcacgattgcctaagtgcggaccctcaaagcaatccgccattcttcctttttttttcggagacccatgaatgtatngcctaacgctattcatgtgccctccaccttcaaggttggagctatgtttcatga

SEQ ID NO: 8799 - DNA, 423 bp, Glycine max
  unsure (1)..(423): unsure at all n locations
gcttctaagaaaaacttcttgagaagctntcttaagaaaacttgcttgagatgctagagctaagctacacacacncatctaataactaagctcacctccttgagaagcttncttgagaagctagagcttagctacacacacccatctaataactaagctcacctctntgacaaaatacatgaaaatacaaaataaaagtctcgactacaaagactactcanaatgccctgaaatacaatgctaanaccctatgctactagaatggcacaaatacaaggcccaaacgaaggagaaacctattctaatatttacaaagataagcaggctcatatntagcccatgggctcgagatctaccctaaggctcatgagaaccctanggtcttnccttggatctctgacccaatctacttggagtcttcta

SEQ ID NO: 8800 - DNA, 316 bp, Glycine max
  unsure (1)..(316): unsure at all n locations
tctgacattcaccacagattctgccttcttctattttcagatngngaatgcctctaacagaacctttgtcaatgattntcttcatgcctcttaagtgcagatgtccaaatctttgatggccatatttgacttcatcttctttggagaatagacatgtggaggagtgactggtttcttgaggtgtccatangtaacagttgtcctttgatctgctgcccttcattagaacttcactcttctcatttgtcaccaagcattctgactntgtgaagttacattgaatccttcatcacacaactgactgatgctgatcaag

SEQ ID NO: 8801 - DNA, 322 bp, Glycine max
  unsure (1)..(322): unsure at all n locations
cgagacgctnganattgaacaacggaagctctcgagaaattcanatggtcattaactttcacatggatgtccaattcaagtgcataatatttngagatgctctaaatntaacatggaagcacaagggaaattaanacggccataacctttaacaaggatgtccgattcaggccaataatatattgagacgctcgatattgaacacttatgctctcaagagaatcanattgtcatacattntcactcggatgtccgattcagacgcataatataccaacatgctcgaaataaacatacagcgcaagcanattcaacggtatac

SEQ ID NO: 8802 - DNA, 453 bp, Glycine max
  unsure (1)..(453): unsure at all n locations
tgacatctatccccacatggaanaaggccaatgtgcggacatgacattcagaggatgtggcggaacattgacattgtccgcgtatgctngacatntatggcatntccttacatgggcgcagcaatcgctntccatagtgagccagtaataacctgctctaaggatcttcctggccatagcatgcccattggcatgtgtcctcaatgaacccccgtggattccctcaatcatgtagttcgcctctttggcatctacgcatcgcatgaaggtcatgtcgtggtttcgtttgtacaggatggtaccactcacanagataccagtagccaatcttccttaacgttctttctcattgtcganaatccctggtggatattctgtgttctcgatgtactatntgatatcgaaataccacggtntcccatctcgcttntcctctntcacacaacaatgtgt

SEQ ID NO: 8803 - DNA, 282 bp, Glycine max
  unsure (1)..(282): unsure at all n locations
tcaatcctataccattcaggagccaatggactattatgtggaacacgtctaggaacatcatggagatcaaacttcacagtgccaataacttcatcaagtaacatattcttgtctttgaccacaacttcaagcaaagttgactgctgattntcccttgcataggcaaacactngattccattcaagatcttgtgttttctcagagtgtatggtaattcctctgaaattgcaacctttacctccacatatggatcaatgctcccagtcaaacgagctcttacaa

SEQ ID NO: 8804 - DNA, 365 bp, Glycine max
  unsure (1)..(365): unsure at all n locations
taagagctagagctagctaccatacctctctaatagctaatctcacctgcttgagatgagaaactagagcttagctacacancccctataatagctaagctcaccctcatgaaaaaatacatgagaatacaaaatagaaatccctactacaaagactactcataatgcctggagatacaaggctaaaaccctatactactagaatggccaaaatacaaagctcaaacgaatgaataatctattctaatatgtatatagataagcgggctcatacttagcccatgggctcganatctaccctaaggctcatgagaactctangaccttcctttggatctctggccagatctacgtggagtcttcta

SEQ ID NO: 8805 - DNA, 300 bp, Glycine max
  unsure (1)..(300): unsure at all n locations
acatagacttcttgcttaataagtccattgaggaacacacattctacatccatttgatacaacatcataccatgatgggcagcanaggatattaaaatgtgcattgcttctagacgagcaacatgagcaatagtttcagtcgaatctataccttcttgttgtgaataacccattgccacaagcctagcattgtccactcacaaccttacatatttcatcgagcttgtntctgaacacccactntgctccatagcatatatgccattgggaagatctacaagcttctagacatcattcttc

SEQ ID NO: 8806 - DNA, 356 bp, Glycine max
  unsure (1)..(356): unsure at all n locations
tgagaatgtcttatccttacnctcggaagcaaagaaaaaaggagagaaggataatntccaatcaaaggaaacaaggagaggaaagggaaatcccaatcaaagagtgcgagaaagcaaaaagataagatagaacattcccaatcaaagaatgcgagaaagataaagagaaggagaagaaggaaggaaagctcctgatcaatgatcgaaagaaaacagaagaaatgtgcagaggggatctctggaccagacaatatctaaacaaatacagaattgtcaccaaatgaacaaaagaaagaaaagganaccataacctataagtggtcttcttcctttgataccaaccaanatcctgtgcg

SEQ ID NO: 8807 - DNA, 469 bp, Glycine max
gtcacctgcggcatgcaagcttatttaacatgccccatatatatttgcaagcgcttactgttaaaaaacaacttatatatatagtttcatgttgtgattgatgaccatgatttgggttacaatctaaaaaaataaatgatcttagaatcaatcatgcataaatataattatgaattaaaattattacatgatatgcacattaacaaaaccatacataatatgattatagtgatcttattcagttcaaggatatgaagaatatatgtgatttaaacaaaacataaaaataaaaccatatgtaaaaagaaaagaaaacttttttgactgcaaaaaaatgatcctcaacacattcagaccgaataagagaaagcactttgtaacatacaataacaaaagaacgtctgcactaccagtaaaaaataactatctattctggttgttataatattaaataatgtatgacataaca

SEQ ID NO: 8808 - DNA, 398 bp, Glycine max
  unsure (1)..(398): unsure at all n locations
aaaattccttcatctgacttagcatcaaattttcctatgttttcttttccattgtttaatacaaaacacttgcaaccaaagacatgaagatgtgagatgtatggtttcctaccattgaacaattcatatggagttttctttaagatgggccttattaaagccctattcatgatgtaacatgcagtattaacggcttcagcccaaaaatattttggaagaggaatatcattcattaaggttctagcaatttcttccgaagacctatttttcctttcaacaactctattttgtagaggggttctaggtgcannaaaattatgtgcaatgccatgctattcacaaaataaatcanattctttattttcaaactcaccctcctgatcactcctaatagatat

SEQ ID NO: 8809 - DNA, 451 bp, Glycine max
  unsure (1)..(451): unsure at all n locations
agcttgtgctcacttccncggccggtaggtgccgtaattgctatttagctatttttcccttaacaatcacaaccacaaccatgtgagtgcgtactttgattgattgaatatgtgggtgtgcagtgaggctgagatatacctgtttggaggtttcattacttcttggaaagttcccagtggtaaggacctcctctttgttcgccccgacgctgttttcaatgggaacaaaccgataagggtagcttcttctcttctctttacttcatatctttaatctttaattactcttttaagtctctccacctatgctgttttcatccactatgcaaaccaattcttttttacgttgtaatttattaattctggatcctccagacactgattcantttatatatttgggcagtggtggtgttccgcattgttttccacagtttggtcctggtccaattc

SEQ ID NO: 8810 - DNA, 236 bp, Glycine max
agctggagttgctgcacatgatgtccaacgttatgtcaaagaataagatcgggctgcacaatgcacaacgcaagataaagtgtcaaatgaagaattgaagctgcaggattcacgatgtcggatacaatgtccaggacatcctgcctgaaaatactggaattgctaaaagcattgaagctgcaagatccacgatgtcggatacaatgttcaggacatcctgcccgaaaatactggag

SEQ ID NO: 8811 - DNA, 287 bp, Glycine max
gagcaaattcaaacgacaataacttttgactcggatgtccgattgtgtcctgtaatatatcgagacactcgtaattggaaacagaagctctgagcaaattcaaacgacaataactttttactcggatgtccgattgaatcccgtaatatatcgagacgctattaattgaaaatagaagctctgagcaaattcagacggcaataacttttaactcgggtgtgcgattgtgtctcgtagtatatcgagacgctcggaattgaaaactgaagctctgagagaaatcaaac

SEQ ID NO: 8812 - DNA, 329 bp, Glycine max
ccttacttgaatcttatgccccaacactatttcttcttgaaccatgaaatggcatttcttccaattgagaactagattggactcttcacatctctttaatactctttcaatatttgataagcacccttcaaaagatggcccaaaaatagagaaatcgtccatgaaaacttcaatgcatttttccaccatatcagaaaaaatagccatcatacacctctgaaatgtagctggggcattgcatagaccaaaaggcatgcactgatatgcgaatacaccaaaagggtaggtgaaagctgtcttctcttgatctttgggatctacaacaatct

SEQ ID NO: 8813 - DNA, 481 bp, Glycine max
  unsure (1)..(481): unsure at all n locations
agtcacctgcaagcatgcaagcttcttaaatatgagagataatgtttatcttcaaatatatagataaaaagataaaattattttaaatcaaacctctcattttttgtttgaaaagatctaaattcatatctctttaacattataattacaaacatccacatccgaataaagaagatcagacacaaatgataaaaaagttcaagacttatttctaaacttgaaaagtaaaaaaatgttttattctttagaattacactcatcataaaattgatagttgatacacaaatattaatgtggatctataaaattttcacattattaaaagaaaatttttgttggtttaagaacgcacgtgcatttggatatacaaattnttttgtatntataatgtttgcagcatattttaaatggagattataattttgtattgaaaggatccgaaacactcttatttaactatcatccttcgcatataattcat

SEQ ID NO: 8814 - DNA, 433 bp, Glycine max
  unsure (1)..(433): unsure at all n locations
agtcacctgcagcatgcaagcttcacttgcctaattnttcttcatcccagctcctaactgcggtggcagtcttcattgcaatgcctagtttgtggatcacagacctttcttccatatctttcctttcaagtgttggcattctcatgtctctactcattttcctgtgtgtagcagccactgcactcttaggacatgtccaatctaatcattccatacctgtcctccacctccataatattccatcagtatctggcctctacgttttcggctatggaggacatattgtcttccctgaattatatacagccatgagagacccctcccaatntacaaaggtacccaacttcatgaaattttataaactgaattatatgcttaatcaaaactntcaataaatataaattgatccggacagcacatcatatttatgttt

SEQ ID NO: 8815 - DNA, 309 bp, Glycine max
agcttggcacttgttgcatttcctcatgtgaacacaacaatcattctccattgtgatccaataatacccagctctcagaacctttcggcccatggtatgcccattgacataggttccagaggatccttcatgaaccttcgctagtatctactcgggctcggctgcattcacacacctgagcaataccatatcatggttccttttatataggacatcctcgatcagaaggaaactggtcaccaacctgcgtaatctcctctcatcattgtcagaggccccaggcgggtattccttgtccttgatgtatcg

SEQ ID NO: 8816 - DNA, 185 bp, Glycine max
gcgaagagggtggaattcctagagcaattcccttatgttatcaaacataaaaagggaaaaggtaatattgtagccgatgctctttctcggcgtcatgcattactttctatgctcgaaacaaaattgattggtcttgaatgtttgaaagcatgtatgaaaatgatgaaacttttggagaaattttt

SEQ ID NO: 8817 - DNA, 408 bp, Glycine max
  unsure (1)..(408): unsure at all n locations
agtcacctgaagctgaagcttctaactntgacaagactgaagctctgataccacttgttgaacaagtggcctcaaatatcttaagaaggaggggggttgaattaagatatcacaaactattccccaattaaaaattctactttgatggtaacccaagacccaagattccttttaaaattaattcctatataataattcaaattaaacttactgaatataaacaatgagcaacaattaacaaaagagtttaatggaagagaaagtgcacacacagtatctatactggttcggcaaagtgcgttgcctacgtccaatgcccaaaaaatacgcttgagagttgcactatctcacaaatcctttacaccttatgatacacacaaggacaacctttcctttgtgctcatatgc

SEQ ID NO: 8818 - DNA, 361 bp, Glycine max
agcttgacaaaaaggaagcaagttgtttaaaacaaaaacgttgtttctacttcaaaaccccttgaactacttcacattgatttatttggtccctctagaattatgagtttaggcggaaattactatggcttggtaattgtggatgattttcaaaataaaaaacgaagcttttgatgcttttccgaaacttgccaaggtgattcaaaatgaaaaaggtctcaacattgtttcaattagaagtgatcatggaggtgaatttcaaaatgagtcttttgaacacttttgtgaagaaaatgtaattcaccataatttttcagccccaagaacacctcagtatgatggtattgtggagaggaaaaat

SEQ ID NO: 8819 - DNA, 325 bp, Glycine max
tttctctacaatcgcatcacgctctctttgagctggtgaagaagaatgcggcatttacctggggtgaataacaagagcaagcctttgctttgctcaaaaaaaagcttactaaggcacctgttctagctcttcctgacttttctaaaacttttgagctataatgtgatgcctttggagtgggagttggagctgtattgctacaaggtgggcaccctattgcttagtttagtgaaaaacttcatagtgccgccaccctcaactaccccacctatgataaagagctttatgccttaataagagccctccaaacttgggaacattacct

SEQ ID NO: 8820 - DNA, 463 bp, Glycine max
actaagctttattaagagatgctttatttacagctaatatttattattaatttattaaaaaacttgttataacctacctatttatttcaaattaataatcaacatatcaatattataataaataataatacgttagacatgtacaaataattaaaacccattttagtaattacattggtcaaaattaattttgattaaatgtattcaatcatcattccattaaacaatcaatttttgaaaaggattgaagagttcaatttccgcccatctgaataaatgaataattgttatcatcatttaccataacgatctcctattacctttattcaagaaaaaaaattaaaaatatttaattataacgagttctagaattctaaatatattcttctaagaaaattctatatatattattataagggcagtgcatataatattaacataacataaattcaccaacacattt

SEQ ID NO: 8821 - DNA, 420 bp, Glycine max
aatgtgaagcatgtattcaagcattacaacctagaatggattttagtacatgtattgaaagagaaattaacttgcttgaattggttcatagtgatatatgtgatagtaatgatgtgctaacacatggtggtaagggatactttattactttcattgatgatttctccaaatattactatgtgtatttagataatcacaaaagtgagttgttttataagttcatagtgtataaaacagaagtagaaaatgaattagaaagaaaaattaaaattttacgctctgatagagatggagaatacacatctttgaatatgagtaatttttgtgaaatgcatggtattattcatgaagtgacacctgcatatgctcctgaatctaatggtattgtggaaaaaaaagaatcataccttgcttgatatg

SEQ ID NO: 8822 - DNA, 370 bp, Glycine max
  unsure (1)..(370): unsure at all n locations
tcactgattgctttggacctttgccattgtccaccaaaaaggccatctttagcccccatgttgtgtgtacctccaagtggcagtgcatgaaccaaactcctatcaaacacatacccaacatatattttagtactgggatgagtttgttacactcttaaaaacaaaggcttctaagtgtgaaagactttntatattgtgatctaattatgtatagtaatatatgataaatntgttgactctaaaaataaattntgatggttgatattttaagaatttttacatttgaccatacatcacaattaagctttaagttntagggataattatatncaatttctttgatgtgtgaataattactcagaatttactt

SEQ ID NO: 8823 - DNA, 329 bp, Glycine max
gggtgataatagatccccttgcctaagtccccctttgggggagaactcagccatggggctaccattcaccaaaaccgaaatagacgcagattttaaacaccctcaatccatttggaactgaaatctgttatttccaacatgtacaacagaaaataccaggagaccgagtgccttctcataatctactttgaatacaaggaatgatttgctgctctttttggcctcttcaatcacctcatttgcaatgagagcacaatgtaatagatgtcttccctcaatgaatgcatattgggtctcatctacgatatatgccatcaccttcttcattc

SEQ ID NO: 8824 - DNA, 401 bp, Glycine max
agcttatagaactatcccaaggaaacaaggcaataggtgctaaatgggtgtttagaaacaagctagacaaggcaagtaaagttgtgagaaacaaggcaaggttagtttccaaaggctactcacaatagaaaggtataaattatacagaaacttatgcccttgttgcttgtttggaggctatatgcattttaccatcatttgttgctcatactaaaatgggactatataaattggatttaaaaagtgcactcctcaattgatttatacaaaaggaagtctatgtagaaaacccccctaggtttgggagtaacacttttccacaacatgtttttaaactcagtaaagctctatatgagctaaagcaagctccttgagcttgctatgaacgtcttcgttcattc

SEQ ID NO: 8825 - DNA, 435 bp, Glycine max
  unsure (1)..(435): unsure at all n locations
agcttngtattttctcacagataggacatgcatgatgtcctttgacactatatcaactcaaatttccatatgctagaaagtcattaatggtacaaaaaaccatagcacgtaaattgaatgtctcttgaagattcccatcccacacatcaaccccgtcttcccacaattttctcaagttttcgatcaatggagtgagatacacatcaatgtgatttcctggttgccttggactggcaatcatcatgcaaagcattatgtacttttgcttgatgcacaaccaatgagggagtttgtaaatcatcagcaaaacaggccatgaactatgattgatggttaagttaccaaaaggattcattccgtcggaagcaagaccaagcctaaggtttattgtgttgtctgcaaaattaagatacaaatgatcaattgtcttccatt

SEQ ID NO: 8826 - DNA, 399 bp, Glycine max
  unsure (1)..(399): unsure at all n locations
agctaacaaaaggcatgcgaagtgggtggaattcctagagcaatttccttatgttatcaaacataaaaaaggaaaaggtgatattgtagccgatgctctttctcggcgtcatgcattactttctatgcttgaaacaaaattgattggtcttgaatgtttgaaaagcatgtatgaaaatgatgaaacttttggagaaatttttaacaattgtgaaaatttttcagaaaatgggttctttagacatgaaggctttcttttcatagaaaacaaattgtgtgtgcctaaatgttctactagaaatttgcttatttgtgaagcacatgaaggaggtttaatggggcattttggggtccaaaacactctaganacattacaagaacattnttattggcctcatat

SEQ ID NO: 8827 - DNA, 328 bp, Glycine max
  unsure (1)..(328): unsure at all n locations
agcttcaaccaagaggggatggtccatttcaagtacttgaaaggataaatgacaatgcgtacgagattgaattgcccggtgagtataatgtgagtactacatttaatgtgtctgacttaactctttttgatgtagatggagaagccgatttgaggacaaatccttttgaagagggagagagtaccaaggaagctcttcaacaagtgttaaccatgctatttgaatttacgcccaagttacaagtggagaagcttcggattgttaattgcaccatgttccaagaagagtagagggtgccacttttgttgagtggttntattagcatttt

SEQ ID NO: 8828 - DNA, 508 bp, Glycine max
  unsure (1)..(508): unsure at all n locations
agtcacctgaggctgcagcttcaagcaccctttgcactgagaatctattggattgcgaacttggtggtttcgtgcttgtttgccacttcggccattgttcgattgataactgtcgatgtagtgaaattggagctaagtttgagagtggatgacatattctcgttggttaatcttccactgtccgccttccttttcctagtagcaatgaaaggatcaacggngattcaagtgattagaatttctgatgtagtgacaacatatcagtccctttacactgacagaactntgagcccttatgcctattcttcgttcttctccaaaacagtgtggctttggatgaaccctttgctgaacaaagggtacaaaacatccctcaagcttgaagatgtgccttctcttcctattgatttcagagcagaaaagatgtcagagcttttccatagcaattggccaaagcctgaggaaaacagcacgcactcggttgtactcaccttgttgagatgcttct

SEQ ID NO: 8829 - DNA, 384 bp, Glycine max
aggcatctcggagaggatcttttctcggtcatatttgcgcaaaatctcttgaactaggaagatgttgtccatcgtctttctgttcttaatgaaagcagtttgagtttccccaataatagtctcaagcactggggctatgcggttagccagaattttagatacaatcttgtataacaaattacagcaagatatgggtctaaaatggttaacctgggaggcctggtcatgcttatgaataagcgcaataatatcatggttgagctgctttataatttttccagctgcaaagatatcatcaccaatgatatgtcaagccttcttgaagaataaaacattgaaaccatctggcccaggagctctattattatccatcacagaaataac

SEQ ID NO: 8830 - DNA, 450 bp, Glycine max
agcttagagtgcagaagaagaagcagcaatcaatttaataatgttctttaaacatgcaaggcaaaattgattgtaataacataaatgagataagggaagagagaatgcaaacacagttttatactggttcggcaaattttgtgcctacgtccaatactcaagcaacccacttgagatttccactatctttgtaaaatcctttacaacttctgaaccacacagggacaacccatcccttgtgttcaggaatccttataactcaagagaccctcaatcccttaatcaatcttactgaatgagaagaaagaaagaagaattatttcttgaagagaaggatattacaatgaagatccatggatgaactcttaatgggattgcaagtgtttgcccacgagttcttgagagagcatttggcaatgaagttctcttggaatctctcttattttcttt

SEQ ID NO: 8831 - DNA, 333 bp, Glycine max
  unsure (1)..(333): unsure at all n locations
agctntacacaaatgccactatactccaagttttaaaaggatatgttaacaaggacacacaagtatattcaccaggaaaacattgttgtggaaggaaattgtagtgttgtgattcaaaagatccttgcacccaagcataaagaccctgtgagtgtaaccattccttgttcaattggagaagtcactatggaaaggcacttattgatctgggagctagtattaccattgtgccactctccatgtgcagaatgttgagagacgtggagatcatgcccactaggatgactttacaactgttgaccgctctatgaccagaccatatggagtaactga

SEQ ID NO: 8832 - DNA, 534 bp, Glycine max
  unsure (1)..(534): unsure at all n locations
agctntaactcaatacaatttcatccaactacaggatctcaatatgtaatagacatctctatagattaaaataattntaaatgtttaatgtgtatccaattaattatatggatgtgtatctcaatatgtggtaaacattagaatgaattttaatataatacataagttatttttatttgtcaaacctatctgtcatataatgaaaaagacaaaaaaaaatgtacaataacaaattaaattttatttattttctataaattctctatatcttttctatatatagaatatagaattcctatatatagaatatagaattcttttattctttaaccttctttagttaataaggttaaagaataaaagacaaaaaaaatagaagcgtccattgtctaatggataggacagaggtcttctaaaccttaaagtataggtcanatcctaatggacgcaaattgtttgatatnattgatatatatgcaactattgcattgaaaaatgatttcattgataatgaccatgcataaaaatgacaca

SEQ ID NO: 8833 - DNA, 318 bp, Glycine max
tgatggcccgagttatgttggggaactgttactaacccggaatgggtttaggcaaagacaacagcggcattgttatacaagaggcctcacatatcttaagaagggggggttgaattaagatattccacactgtttccctaattaaaaaccatttcctttttactcaagttatgaattcccttaatgacaatcttcttaaatattaattcaaatgaagcaactcgaatatgaatattatgcacttataaataaacgagattaagggaagagaaaatgcaaactcagttttatactggttcggccacactccttgtgcct

SEQ ID NO: 8834 - DNA, 366 bp, Glycine max
  unsure (1)..(366): unsure at all n locations
agcttcggtagttcaatttcgagcctctcgatatattatgcgcctgtatctgacatctgngtaaaaaggtatgaccattttagtttatcgggagccttcgtttttcaatttcgagcgtctctatatgtgatgagctcgaatcgacatccgagtgaaagttatgaccatctgaatttctcgagtgctttcgttcttcaatcttgagcgcctcaatatattatgcgcttggatctcgacctccgcgggaaaagtattgaccatttgaatttctcgagagctntcgttgttcaatttataatgcatcggaatcggacattcgtgtgaacagtatgacccattgattttttgagagcttccgacgtttaa

SEQ ID NO: 8835 - DNA, 358 bp, Glycine max
  unsure (1)..(358): unsure at all n locations
agcttcttttttccaccacattntatcctcagaccgatggtcaaacttatcataaggatgcacaagctaaagttgagtatgtgaaaagattgcataagcaagtgaaggctcaaattgcaaagaagaatgaaagctacgccaagcaagccaacaagaacaagaagaaagtggtacttgaaccatgtgattaggtttgggtacacatgaggatggagaggttctctatacaaaggaagttgaaactcaacctagaggagacgaacctttccaagtactagagaggatcaatgacattgcttacaagattgatatttcaagtgagtatggagtacgtctcttatttaatgctgctgacttg

SEQ ID NO: 8836 - DNA, 432 bp, Glycine max
  unsure (1)..(432): unsure at all n locations
atatgaatgtcttagttcatttcttttaaacaatgactntgaaagaggaaaagtggatacaaatttgttctgcaagaactatgactcccaatttatattagttcaaatttatgttgacgacattatatgtggtgttatttttgaacctctttgtgaggatttttctaggctaatgcaaaatgaattcaaatgagtatgatgcgaaagctgaacttcttcttaggactacagataaaacaaaccaacattgtcatatatctgctagaagacggacttgttccctcgactcaatcaccaactgatatatctctggcttcttggtctcccactgataccactacacaatgcaaacatcttgataccctgtcacttcctcaacctataccttgcatgacgnagcaatgatcgagccttactatatctaattcatcc

SEQ ID NO: 8837 - DNA, 331 bp, Glycine max
agcttcttacaagagactaagaaatttctgtctttattttttaagatgaaagatcttgggaagctctctttgtattatgaatcaccatactaagagatcgctttcaaggtattctaaggttgtcacaagagagttatatcaataaggtccttaattgattcgacatgaaagatagtaaactatgagatacccctattgcttaaggagacaaatttagtctcaaacaatgccccaataatgaccttgaaagaatcgagatgcaaaagattccttatgcatcagcaattagaagtctaatatacgctacagttgcactcgtcctgatatacac

SEQ ID NO: 8838 - DNA, 342 bp, Glycine max
  unsure (1)..(342): unsure at all n locations
tggttntcaattacgagtgtcgcgatatcctacgggacacaataggacatccgaatcaaaagttattacgtttgacttttcctagagctcccggtttcaatttctagcgtctcgatatattaaagggctcaatcggacatccgagtcaaaagttattatcggttaactattcttagagctatacgtttgaattacgagcgtctccatatattatggcactcaatcggacatccgagttaaaagttattggcgtttgacttttcttacaactatcgttatcaatttatagcgcctcgatatattacagggctcagatagacatccgagttaagagttattgtc

SEQ ID NO: 8839 - DNA, 294 bp, Glycine max
agctttataagaccgtggaattagccattgttgtgtggcctggatcttctgttggactagtttgacccctttgcttgacaccatgtggcccatgtactccacctgggtttgggcgaaggaacatttcgagagcttaatgaagaactggccctgcaacaaaaccttgaaagccaattccaaatgaagttaatggtcattgaaggagctactataaactagaatgtcgggatgtggacatcaaagcccaagcccatgacataccaccagcctcaggcccatgacttgatggaagcc

SEQ ID NO: 8840 - DNA, 437 bp, Glycine max
  unsure (1)..(437): unsure at all n locations
tctacatcctgtattccattgatcccagcatcttttgcaattgacttgtccccaataatgtaactgaaggaagtgtgtattgcaggtaactaagaaattcaaaagattgacaaaaatctaagaatagtatgcatgcaacttgcaaaacttagaacctgctgaggtcatctgaatttggagggaagtagtaaagcagcctctgaatcaaagaggtagcagctttcctgttgcgtgcaattagaacagcatttggccccgcatcaaatgtataagctacctgcaagtcaaaattattaaatatttaaatagaaatatagagatttatacacatttgtttgtttacatgagcccgtgtaattatcacaactaanaaagatgtatatatacacattattcaaatggnggttataccgaaagttgatgtggtgcacgggcat

SEQ ID NO: 8841 - DNA, 412 bp, Glycine max
gagtatgcagtgaacaatggccctgactttgaagctatgatatgtgaaaaacaacgggataatccttcctatagcttcctctttggtggggaaggtcatggttactaccgttataagctttggttatcaactcgtcccccgggtggtccattcaacccgtcttttccatcatcttccatgcccatgatgcttcctccaaatccaatgatgaatctgtctcctgtaaatgtttctccgatgaaccctgcaggaattggttcttcaccttcgatgctaggtccacctcctttccaacagttctatgatcaacaacaccaccatcaacatcctcagtcttttggacttcctggtcggcctgagtatgatcccgcatccaagtctttcacagggatctctgggccactctcatctg

SEQ ID NO: 8842 - DNA, 300 bp, Glycine max
agctaatgctgtaaacatttattataggccttctcagtagcaaaaccaacaatagcagaataattatgatctttcaagttacagatgcaatgtaagttggaggaatcatccaaatctgagatgggcaagttcttcacaacaacaacaggctgtgcttctctttccagaatgttgtatgtccaagtatgccacatgtttctcctccaatgtagcaacagcagcagcatcaacagtcacaataaagacaacaagcagctgatgcttcttctcagcctttctagaagagtttgtatgcaaatg

SEQ ID NO: 8843 - DNA, 420 bp, Glycine max
  unsure (1)..(420): unsure at all n locations
acactatgaaactaagcttaatggaggaaaagaatgatagagaggtggaaggagcacaaaattntgtgcctcanatgaggtctgagatttgaagtgtaattctaaaatgaacaaatttgaaaaaatgcacacacaatgcctttatatatagccgaagtgtcacacaaaattggagtggaaattgaatttctattcaaatttcacttgaatttngaattgaatttgtggagccaaatttggagccaaaatttcactaattatgattagtgaattttagctatggttcagcccactaatccaaaatcaagtccaagattctccactaagtgcgcttaggtgttatgagacatgtaaaacatgaaggacatgtacaaagtgtgactatatgatgtagcaatgagatgtagcaagcaaatgttc

SEQ ID NO: 8844 - DNA, 420 bp, Glycine max
  unsure (1)..(420): unsure at all n locations
gggctaatctttcctgtaactnttccttgtcataatctgaagtgctattttcaattgctgatctaatctgcttgttaaaattcatcacaagaaacaagtaaaaaacatcaataagtatcagtacatgaaacagaatacaccaacaatggtagaataaaaattaataatagtggaagattcaaacagacctgctcacttctttcttcaattgctttcttatcaccagctccatcaaggatgacagtgtcatccttagaaattgttatctaaaacatacagaaccttattcagttttctaaatcatttaaccttgaaaatagtatgggcatagaatagagaaatttaatgacactttctttaaaaagcttaaacacaagtagntgctccaggagaanagtcagcatcctataccaaaactat

SEQ ID NO: 8845 - DNA, 422 bp, Glycine max
  unsure (1)..(422): unsure at all n locations
ntggagtttccaagtgccaattcgtcttcttctttagtccagtcttcttctggcttcaattcttcagtgggctttccttctgtgtccagcatcttgggatgttcccagcctttgatgacagctttccaggttctgctatccagtgatttgaggaaggccaccattcttgctttccagtattcatagttggttccatctaggattggtggtctgttcactggtcctccttctttctccatgttcatcagaatttatctccctagatctcactctgtgatttcgagtgttggctctgataccaattgaaattctgataccaggggacagatgtcgtaccggatgtcacgacatcacgcttcaaaacatgcagattatatgtgtccgtatgaacagattaaacaagtaaataacacaagagaatt

SEQ ID NO: 8846 - DNA, 281 bp, Glycine max
tagttcctagcttagcccataatgttttccagaagtgactaatgaacttagcatctctatctggcacaatggtcctaggaaaaccatgaagtctcacaactggcctaaaaacgagttttgagatgtgggaagcatcatccacctttgggcatggtataaagtgtgcccatcttgctaacctatccaccaccacaaagatagagtctacacctctttgggttctagggagcccaaggacaaagtccatactaatgtctacccaaggtgcacatggaatgggt

SEQ ID NO: 8847 - DNA, 371 bp, Glycine max
  unsure (1)..(371): unsure at all n locations
tctatctttgttctttattntcttaacattatagtaaaagcctaagaagggtaattcttaattagtaaaggtctagtaataattaatttaacccccccttcttaattattatgaggccacttgatccaacacatcagaggagctattataccctcctgcttggccttctgaagtccatgacccatttgctctgacctttagaaacaaagttgagctagtatcctgaaaaccaccaaaactaaagctcctcaacacccaacaaaatgacctctcctcatttagcccataaactgaagccacacaatcacaatctgacaagcatgcactcccacatnttgacacnatagaaatatcactatattagctattac

SEQ ID NO: 8848 - DNA, 436 bp, Glycine max
tttgacagttgtgacatctcagtttcctcttgtcaaacttccattccttgcttccattggagctatcattttgcttttgtgattaatcacttttctttcctttagaggattcactacttgcattagatccttgatcctggtgtttttgattggtgcatgacttatttcctttccatggtcctttgccttttcctttgtaagtggattgtgcctgaagtgcctgttcttgattggatcttctctcattgatccttatttcatgtgcctcaatagagcgctgcaattcttcaatctccatgatgtctaagttccttgactcttcaattgcaacaaccacatgatcaaatcatggtggcaaagtcctcaagatcttgtctaccacttgttcatcagagatcttgtctttacatgacttcatgacattgaccagttcttg

SEQ ID NO: 8849 - DNA, 321 bp, Glycine max
tctacatttctctccacacccattgcatgtcaaactctaattcttctccttctttggggggactgctggcaccatctttcaatctaaatggccaatgaatctgcattttatacattagagcctctgtgtctgttactacacatatcaaaccacatgcaaaaatagatgccatttaagcataatagaagctcattaccaagttaagatcaacgtaatcaagttggagttcttgaagggtattgttgatagcaggtctaaccctttcagggatcaagtctgtgcacccacctcatgcaataatttacacacacacacacacac

SEQ ID NO: 8850 - DNA, 439 bp, Glycine max
  unsure (1)..(439): unsure at all n locations
cgcttattgngagccatgccaatggtagattgaaaactattgttataagcgaactctatcaacggaagagaactctcccaactccctttttgctctacgacacacgccctcaaaaggtcctccagcgactgaatggtccattcagtttggccatcagtttgagaatggtaggcagaacttagtctatgcttggttcccaatgctctatttaggctctcccaaaatctagaggtaaacctaggatctctattagacactatgctagatggaacaccatgtaatctgacaatctcactaatatacagggaggtcaacttcttcaaggacaatatgatattaataggaataaagtgagcatacttggtcagtctgtcaacaataacccagatagaatctaaacctctgggggttctagatagtcctacaacaaaatccatgg

SEQ ID NO: 8851 - DNA, 324 bp, Glycine max
  unsure (1)..(324): unsure at all n locations
agctttgagaggagtnttgggacttaccgtgtactatagaagattcatgtgcaactatggacaaatagctcgacccctagctgatttattgaagaaggaaaatatcaagtggactattaaaagtattgaggactctacccagttgcagcaggctgtcaccacagcttctgtactatcaatgccaaatctttcaaaaaaatattccatagaatgtgatgcatcgggaaagggagtaggggctgtgttaactcaagataaaaggcctatcgcttaattcagcaatgctttggcagattcaacactcactttattaatttatgaaaa

SEQ ID NO: 8852 - DNA, 426 bp, Glycine max
  unsure (1)..(426): unsure at all n locations
tgctgagggtctccgtcaaggccagtagcttgttntgggtcagcattgcatcttgggctgtgagctccagaaggcttctctttgttggtgtgtatgctcaatcatgaaggatggtgtgatcacaggccgccatgttctctataagctctattgcctcctctggtgtcttcaacttgatttttccccttgcggatgcgtcaaggagttgttttgactgttgtcacaagccatctatgaagatgtttagttgcaccagctcgctgtacccatgtgtaggcatctttctgagtagtccgtgaaaacggtcgagcgcctcacagagtgattcattgtggaattggaggaatgaggatatttccatcttccccttgataagttttgactatgggaagtatttcttcaagaacttttcaacatctttctcct

SEQ ID NO: 8853 - DNA, 323 bp, Glycine max
tccccaggccatggaagttgcctctaatagggaacctgcatcaactggcaggggcaggcacacttccacaccacacccttcaaaatctatcacgcaaatatgggcctctgatgcaccttcaacttggtgaaatttctgcagtggttgtgtcatcctctgacatggccaaggagataatgaagactcatgatcttaattttgtgcagaggccagaactcctttgtcctaaaatcatggcctatgattcaacggatattgcctttgctccatacggtgattactggagacagatgaggaaaatatgtacgctagagcttctcagt

SEQ ID NO: 8854 - DNA, 361 bp, Glycine max
  unsure (1)..(361): unsure at all n locations
tcttggggttggctggctattataggaaattcattgagggattntccaaattggcattgcccctaactaagttgactcgtaagaacgagaagtttgtctggaatgagaagtgtgatcaaagtttccaagagttgaagaggcggttgacgacagctccggtgttaattttacccgaccctaagagaccatttgaagtgtattgcgatgcaagtgggcaaggcctgtggtgtgtgttgatgcaagagggaagagtggtggcttatgcttcacgtcaattacgtcctcatgaagttaactacccgacccatgacttggaactagcagcggtggtctttgccttaaagatttggaggcattattt

SEQ ID NO: 8855 - DNA, 400 bp, Glycine max
ccgcggcatgcaagcttgttgacttgtgtaaagtttttatttgttagagtatgagaaacctttatgaaagataatcttacttgaaccaataagattaccatgagtgataaaactatcattctaaatatttaatgcagtacatacctgatataagtttaaatctattagcctacctatttctataatgattattaaataatttcaataaaacttatttcttttaaaaaaaatccacccttatatcatatttgaatccttaatcttgaaagtaaaataatttcaataaatactcttcttcctcacgtgtctttaagctataaataaataatatttatatactaattattcattcaaagaaaatagtggtataaattggagaaattgcattgaaaattgacac

SEQ ID NO: 8856 - DNA, 450 bp, Glycine max
gacactatataatactaagctgtctgacaacttggcgatgattgatttccaagtctccaacctccacggaattgtatcaatggcgatccccaagtacacacaaggaggagatacacttacacagttaaggaattttgcagatttctctacaacatccctagccactccaaagcctccaaatttactcttctgaaaatccactttcgagcaggatacaagttcaaaagatcccatcatacttttgaagactatcacattataaacactaaattttcccacaacaattatatcatccacatattgcaatagattcatctcttgctctttaacaccccacttttagtcctctatagagaattttagcaaccgcttccctcatcaaaccggttagccccttctttacaatagtgaatagaataggaacacacgagtcttcttgtctaaccttat

SEQ ID NO: 8857 - DNA, 409 bp, Glycine max
  unsure (1)..(409): unsure at all n locations
gttttaagttcttcctcaaaactgtcctaagcatagttcccaatgtcctattaacaactgtcgattgcccatcggtttgtgggtgacaagtggttgaaaataacaatttagtgcccaacttgccccacaaagtcctccaaaaatggcttaggaacttagagtccttatcactaacaatgctccttggtaaaccatggagtctcacaatctccttgaaaaacaaatcagccacatgggaagcatcatcaacttttttacatggaataaaatgagtcattntagaagacctatcaacgaccacaaaaatggagtctctaccactgcttcgttttggcagccctaaaacacaatccatggataaatcaatccaaggatactccggaaatggcaatggaatatacaatccatg

SEQ ID NO: 8858 - DNA, 441 bp, Glycine max
tgtagaacggatggacatgatatatgtcagggtgttgggctggttcagggataaaagggaatgtccaccattatttccatgacacaaatgcaataatgatgatttggaaattttatgcaaaactagtcatgcatgcacctatgtggacacaaatgtccaccattatttccatgaggtattttgctacctaaacatatgtatatttttgtgaggtattttgctatatacatgcgtgtccaaggtatcttgctacctaaacatacatatatatgttttgtgagatatttttgctatatacatgcatatccaaggtatcttgctacctgaacatacacatatatattttgtgaggtatctttgctacatacatgcatatccaaggtatctttctacctaaacatacatatatatattttgtgaagtatttttttggttacatac

SEQ ID NO: 8859 - DNA, 335 bp, Glycine max
  unsure (1)..(335): unsure at all n locations
acccagagncacctgctgcatgcaagctatgctgaaacatttacaatagaccttctcaacctcagtagcaaaatcaaccacagctgaagaatgatgacctctccagcaacagatacaaccctggatggaggaatcaccctaatctcatatggtctagccctcatcaaatacaacagcagcctgctccttccatacataatgctgctggcccaagcagactcgtcatttcttcacctatccaacaacagcaacagtccgcgaaattagcaaacttgttgaggctgctccacaaccttcccttgaagaacttgtgaagcaaatgactattcacaaca

SEQ ID NO: 8860 - DNA, 425 bp, Glycine max
agcttgctgcaccattgacagatttacttaaaaaagaagcattcaagtggacaccagaggcagagacaacatttgttcaattgcagaaagtcatgacttcagctccagtgttagctcttcctaatttccagctgcccttcattctggaaactaatgcttccaacactggtattggagcggtattacatcagaatggccatccaatagcattttttttccaagaaacttgcacctagagtgcaaaagaaatctgactaatttagagagatgttagcaattgttcaagctatagctaagttcagacactacttgctgggacacacaattattatcaaaactgatcaaaaaagcttgagatcattgatggaacaacccctacagacacctgaacaacagcagtggttacacaggtttttgggatatga

SEQ ID NO: 8861 - DNA, 328 bp, Glycine max
actaatataatctcagttgtttaacatcaaaatgatatgtaaatggtttagactcatcttccatgtgatcagagagatatgaaaggcatttaaaaacaagctctagatgcaagtgtgaattggcttctacaaagaaaggaaggatcttctggttaatctcaattcaactacaccctggattcttttttaatacaagctctttcatctttgatctcaccacactgtacttcatcccacttatgtgcagaagcatacatatttgacaagagaatatacgtcgatgaattacacgatccttacaaaatcgttcttgaatttcagttccaat

SEQ ID NO: 8862 - DNA, 394 bp, Glycine max
cacctgatgagtgctcgttgagtgcggttgatgcatgtcttgctgcgaaactcctgctcgtgattcagagtggttgcaatcctataatgaaacaacagtctgctgagctatagaagctgtgtagtttaaattattcagacactatctttatttccaagtgcaagcttaccataaccattcaatgatcatggactacatccatctggtggcgccaacaatttgaaatttgtggtgcaagagtagctaagaagatcagttgcatctcaagaccaccgaactctaataaacgccaagacaatgatcatggggttgaggtgcaagtctctccttgatatataccttatattttgattcccacaatcgatttgaatgaagaataattttaatgtggaca

SEQ ID NO: 8863 - DNA, 406 bp, Glycine max
  unsure (1)..(406): unsure at all n locations
tcaagaaagtcctctccaagagtgactaatgttgctgttcagaaggctgtgagtgcttattttctgtagttttctgttcaactgcttaattcagttgagcaagatttgttaggaaatttattgtcttgttcactgttattgatgacatcttttattctcttctcaggctgctgcattgaagggttctgatcatcgtcgtgccacaaatgtcagtgctagattggatgctcaacaaaagaagttcaaccttccaatcctcccaaccaccacaattggatccttccctcagactgttgaactgaggagggtgcgtcgtgaatacaaggctaacaagtaagatatgccttgagttgataggttggcttgttttcttgaccattttggctnttactgacccctttgattt

SEQ ID NO: 8864 - DNA, 398 bp, Glycine max
tctggtgggacatcttgacttgctttccaatctgacattcaccacagattctgccttcttctattttcagattgggaatgcctctaacagcacctttgtcaatgattttcttcatgcctcttaagtgcagatgtccaaatctttgatgccatattttgacttcatcttctttggaggatagacatgtggaggagtaactggtttcttgaggtgtccataggtaacagttgtcctttgatctgctgcccttcattagaacttcactcttctcatttgtcaccaagcattctgactttgtgaagtttacattgaatccttcatcacacaactgactgatgctgatcaagtttgcagtcagtcccttcaccagcagtactttgttcagactaggaagtcca

SEQ ID NO: 8865 - DNA, 412 bp, Glycine max
  unsure (1)..(412): unsure at all n locations
ntagccttaggttgtccaccatgttgctccctctatatctctaacaagaagaacttaattagttgatcaaaaatgatgtttggacacttgttctgaagccaaaaaataagcgcatcattagaactagaacaagatgggtcttcagaaacaagttggatgaataaggaaaagtagtacacaacaaagcaaggctaatagctcaaggctataataagcaagaaggcatagatttcgttgaaactttttctcctatagttaggcttgaagttataagaatcatgcttgcctttgttgctcacaaaaacattaagctttttcaaatgaatgttaaaagttcctttttaaacagtttcattgaagaggaagtttatgtcaatcaacctcttggtttgaggatcaaactttctcatat

SEQ ID NO: 8866 - DNA, 393 bp, Glycine max
  unsure (1)..(393): unsure at all n locations
ttaaaatttgaatttgaaattctgataccaatgacagatgtcgtaccggatatcaaagacacaccagagattactctctgaacaatagagatcaactctacacattcaggtccaacacttgatgttagggtaacatcaaggtggctcacaaaacactcaagtcccaaaactcacaaaataactcttcaatctcggacttggtagaaaactcgtgcagccttcattgtttatatagcagtgtgcgtatctgggctgcaacaacttgcgctggataagatctatcattctcctgaaaatctgcacttaaagatctaaaagataaagtttgatcttttagttnttatctttaatctttaatccctgaacgaaactattcaagttgtaattcgaact

SEQ ID NO: 8867 - DNA, 403 bp, Glycine max
tcaattctgaatttcgagtgtctcgatatactatgggtcacaatcggacgtctgagtaagaagttattgtcgtttgaatttgcatagagcttttgttttcaattttgagcgtctcgatatattacgagaggtaatcggacctccgagtaaaaagttgttgttgttagaatttgctcaaaacttcttttctgactttcgagcgtctcaatatactacgggacacaatcgcaaatcagagtaaaaagttattgtcatttgattttgctcaaagcttttgttctgaatttcgtgcgtctagatatactacgggacacaatcggacatgcgagtaaaaagttattgtcgttagatattgctcagagcttcaattttgaatttcgagcgtctcgatatattgcgggat

SEQ ID NO: 8868 - DNA, 391 bp, Glycine max
  unsure (1)..(391): unsure at all n locations
ttgacgtttgtgttgaatgcattaaaggtaaacagactaaaagcaagatattaggtgcatatagagttacagacatcttggaattgatacatacagacatttgtgggccatttcctacaccttcatggaatggtcaacaatattttatatcattcatagacgattactctagatatgcatacttgtttcttatacatgaaaagtcgcaatctttggatgtgttcaaaacatttaaagttgaagttgaaaatcaactcaacaaaagaataaagtgtgtcaaatctgaccgtggtggtgaatactatggcatatatgacggttcaggtgaccaacgtctggggccttttgccangtacctagaggaatatggaattgtcccacagtacaccat

SEQ ID NO: 8869 - DNA, 406 bp, Glycine max
tgtccaaaatcgtgaagtaaacctcgggtccctgtctgatacaatactggaaggaattccatgtgaccttactacttctttgatatacaactctactaacttctccattttatatttcatatttaccgggataaaatgagcagatttggtgagtcaatctactatgacccacacagcattgtgtccacgactcatcttgggtaaactagatacaaaatccatagatatactctcccatttccattttggaatttccagtggctttaattctcctgatggtcgctggtgctcagccttggccttttgacatgtcaaacattttgctacatattcagctacatccttcttcatgccatgccaccaaaaacttctcttcaaatcttggtacatcttagtcattcctggg

SEQ ID NO: 8870 - DNA, 173 bp, Glycine max
tcaaccaagaagggatggtccatttcaagtacttgaatggatttatgacaatgcgtacaagattgaattgcccggtgagtataatgtgagtactacatttaatgtgtctgacttaactctttttgatgtaaatggagaagccgatttgaggacacacccttccgaagagggac

SEQ ID NO: 8871 - DNA, 401 bp, Glycine max
tgtagttgctggaaatccttctggaagattagtggatatcactgatgggtggaacacagcttctgttgtgggaacattctcagggcctaagcatcgcttggccacagcagcaactgtgaaggacgggaaggtgtatctgaaccatatggttggaattggatacccaaaaaagaagcatgcaattgttgaggcagttttttaacgcatactttctagaaatctaaacattggggaactgggaatgtggggatcatacatttacaggacgtttagttgaaatttggtgtacctttgcttatttatgtttggttttgttgcattacttggcctcagacctcaatgcttttcccttgaatctcaacctaacataagatgctcgatcgagtaagttaattaccctt

SEQ ID NO: 8872 - DNA, 407 bp, Glycine max
tatcaaaattgaaaatgatggttcctaatctcaagaatcttagagtcttagattgtgagtcttgccaactaggaaaacatgttaggtcatcatttcctcaaactgtacaaagatgtaactctgctttctctaccattcactctgatatttggggaccaagtagggttacatcttttgattttcggtattttgtaaccttcattgatgaatttttcagatgtacttgggtttatttaatgaaagacagatctgaacttttgcctatattcatgttgttctttaatgagattgagaatcaatttggcaaatcaattaagattttcaaaagtgataatgctaaagagtatttctctcatgatctctcttcctttttatcttcaaaaggtattttgcatcagtctacatgt

SEQ ID NO: 8873 - DNA, 409 bp, Glycine max
  unsure (1)..(409): unsure at all n locations
tggaaggtagtcatacctcacaaaatatatatatgtatgtttaggtaggaagataccatagatatgcatgtatgtaaacaaaaaaatacttcacaaaatatatatatatgtatgtttaggtagtgaaaataccttagatatgcatgtatgtaaacaaaaaaatacttcacaaaatatatatatgtatgtttaggtagtgaaaataccttagatatgcatgtatgtaaacaaaaaaatacttcacaaaatatatatatgtatgtttaggtagtgaaaataccttagatatgcatgtatgtaaacaaaaaatatacttcacaaaatatatatatatgtatctttaagtaggaagataccttagatatgcatgtatgtaaacaaaaaaaatacttcacanaatatatatata

SEQ ID NO: 8874 - DNA, 401 bp, Glycine max
  unsure (1)..(401): unsure at all n locations
tgtaggccttggatcttcttcatcaatggagtcttttgcttcttaaagtttgatagcagcgtaatggagaaggagaagggtgattggagatgccacttcaaggagaagatgagtctagaagaagctcaccaccataggaagccatggataagagcttgaaggtaagagaagatgaatggagggagagggagaaagggagcatgaaatttagtgcctctaaagaagtttgaactttgaagtttaattctcaaatgatcaaagttgaaaaaatgcacacacatagcctctatttatagcctaagtgtcacacaaaattggagggaaatttgaatttctattcaaattttactagaatttgaaattgaaattgtggagcccaaanttcactaattatgattagt

SEQ ID NO: 8875 - DNA, 411 bp, Glycine max
  unsure (1)..(411): unsure at all n locations
ntgcttgcatttttcctttgcagttaaggaaataaagcccaatcaatacacatttggtagtgtgttaaatgttattgctgctgctgaggatatatcattgaaccatgggcaacgttgccattctcacttgcaaacttggtttaagcactgatccaattgtttcaagggctctgcttgacatgtatggcaagcggggagacataattgaatctcaaagagtgttcaataagacacttgaacgaacccagtttgcttggacaaccataatattttcctatgcccaccatggagactttgagtaagtgatgagtttgcatacagaaatggaaaggtaaggaatcaatctagactccatcactttcctttttattttggttgcatgatgtagaaagggcatggttgatgtctttg

SEQ ID NO: 8876 - DNA, 411 bp, Glycine max
tcaacatcagactacttccagggtgctggaactgcttcacatggacttgatggggcctatgcaagttgaaagccttggaggaaaaaggtatgcctatgttgttgtggatgatttctccagatttacctgggtcaactttatcagagagaaatcagacacctttgaagtattcaaggagttgagtctaagacttcaaagagaaaaagactgtgtcatcaagagaatcaggagtgaccatggcagagagtttgaaaacagcaggttcactgaattctgcacatctgaaggcatcactcatgagttctctgcagccattacaccacaacaaaatggcatagttgaaaggaaaaacaggactttgcaagaagctgctagggtcatgcttcatgccaaagaacttccctataatct

SEQ ID NO: 8877 - DNA, 405 bp, Glycine max
  unsure (1)..(405): unsure at all n locations
ttgtaaataagcagataacatgaatggctataaaattcataccgccttggcttccttgtactcattcactgccttgtgggaagcataactgaaattcacatcaggtcccaactcggggacaataaagtggctggatcaatgcacataaatcaatcaggtcagtcatggcatcaccagtaattccttcgtttttaattataaaactccttttagaaatttatttatttccttttatatttttttttaatttttaaatatattatttatttattttcactatatatctttacttaattattttttttcgaaacattaataagaaacaattaagtggacagagagataagaaaaaaatgtaattntggcatgatagtataaataattgacagatttaatataattaac

SEQ ID NO: 8878 - DNA, 390 bp, Glycine max
tcttcccacaaggaaagaatacattgagagccaaatgtttctcattttcctttctttgatatattgatcaaattcttcctctgcctctgtgatctttatctctatagtttctttggctttcttctgtgtcaggcatttgggaagaactagtgcatcttctatgaaggctgagccaccctgtgcaatgaatgggcatgtggcatgcattgcgtcaccaacaattttcactgtacctttcttgaatttgttaaagaccaagtccaatggtgccctatacttcaactcagtaaaatgtaagaagctcaacatgcaatttcgtattatctccactatcccatttgggaaacctttcattgattctattaatgactgtctaataagaattgggtc

SEQ ID NO: 8879 - DNA, 515 bp, Glycine max
agcttgtacatattgccaaattgataaaaaaatttttggaattttataaaatctcttacctttctatgggatacatttgttgatatgaacaagacctctaagctttaccttttccacgagatgaacaaccaaatgaaacatgacagtgaagaataaaggaggaaatatcatttccatgtggtataaagtgagaacaacttgattttgtaattagtctaaatccttaactttcaataatttaaccacatatttttttaaagaatgagcataactcaattaatactgttgaaacctcatctgacaatgtagatcacatggctaatggtagcaattgccataccaatatgtgacaattgtgactcttcaacgttccagtcaactttagattttctgagtcgatacaccaagaaatgttgcttgaataaccatctgacacaatgatattctttaaggtgttaaaaatgttctattacctttactatccaaagtaaagatagttggagaatatcttccat

SEQ ID NO: 8880 - DNA, 654 bp, Glycine max
agcttccaatacaatcttgatagtcttcattcagctgacacttcctctcaatgcatattgcaagctgaataacaaagcaaaaaaaacataaattttatcactgtgtacttcataacatataaagaccaaaacatccaagctcactgaaatatttctagtttttcttgtaataacttgtctagaggtataacaatagcaacaacaaaagttttatcccaccaagtgagatcagttacatgaatcgcacaacaccaacttctttcgatgttcttctagtctccctatcctccttttcatggggcaaaaaaccatgcaatatgctctcctcactgattattccttggtatagaggtagctcaatccaaggaaggaattatcctctcacagaggaaatatgctttggatattttggaagagataggcatgattaattgtagacccattgatagtcccatggatccaaatcaaaatttaattggtgaaactaggtgaaccatattcagatccagaaagatatagaagattagttgggaaactcatccatcttactataaccagacctgacatttcctttgcagttgggtcgatagtaagttatgcaatctccttatgttgatcactaaaaggctgttcttcgcattctcaggtatatta

SEQ ID NO: 8881 - DNA, 528 bp, Glycine max
agcttttgatgcaacctcaccctcatggggatggttatggagataaaagtgtgtgtgttattcccatagtgggtcttggaggcatggggaagactacacttgcaaagttggtgttcaatgataagaggattgatgaacttttccaattaaagatgtgggtgtgtgtctctgatgactttgacattaggcagataattattaaaatcatcaactgtgcttcagcttctacctcagctccatcaattgctcttgctcaccatgaaagcattaacaacttatatattgagcagctacaaagtcagcttagacacaagctttctggtctgacgtatttactggtcttggatgacatatggaatgatgatcgtgcaaaatggatagaactaaatgatttaataaaagttggtgcagtgggaagcaaaattttattgacaacacggagtgactcaatttgcttaatggtgggcactgtcccctcttatgttttacaatgcttgtctgtgtagaattctttgtcctattttcatt

SEQ ID NO: 8882 - DNA, 313 bp, Glycine max
ctgagaaagtctttccacacataatacaaaaaggtaactggatagaggatatctttgcctaagacccctcgaaggattgaaagcattactcttctccccattcaatagaacttggaaagatgtgaaaggcatacactcgtaaacaatactaaggaaatggtcatcaaaacccaaatccctcaaagtgtgaatgacaaaatctcactaaatgctatcatatgccttctctagaacaactttgatcgccataaacccttttctccctttagatcttctcgtcttatggaaaacttcttgagccatattaccatta

SEQ ID NO: 8883 - DNA, 412 bp, Glycine max
  unsure (1)..(412): unsure at all n locations
tcagaattcaatttcgcgcgtctcaatagattacgggactcaatcagacatcctattttaacattattgtcgntngaattagctcagagcttcagaattcaatntcgatggtctcgatatattacgggtctcaatcagacatctgagntaaaaaagttattatcgtttgaagttgctgagagcttcaacattcaatttcgagcgtctcgatgtattacgggacttaatcagacatccgagtaaaaagttatcgtcgtttgaattttggtcagagcttcaacattcagtctagagcggttcgatatattaccgggactcaatcagacatccgagtaaaaagttattgtccgttgaaaatcctcagagcttcggtattcaatttcgagcgtcttgatatattaccggactcaat

SEQ ID NO: 8884 - DNA, 450 bp, Glycine max
agctttgagcaaattcgaacgacaatttcttttatcttggatgtctgattgagtcccgtaatatatcgagacgctcgaaattgaatgatgatggtcgttgcaaattgaaacgacaataactatttactctgatgtctgactgagtcccgtaatatatcgagacgctcgaaattgaatcttgatgctctgagcaaattcaaacgacaataactttttacttggatgtctgattgagtcctgtgatatatcgagacgctcgaaatttaatacgaaagctatgagcaaattcaaacgacaataattttttactcggatgtctgattgaatctcgcaatatatcgacacgctctaaattgaatgttgatgctctggtcgtatttaaacgacaataatttttccggcagcattgcacaattatttacaatccctggtcgatattatttatttatg

SEQ ID NO: 8885 - DNA, 595 bp, Glycine max
agcttgcttaagcaaggaagttgcgataggcctatgtccatatccgaatataaaagacccgaggtgcaatagaagaggtattttggtgctattcagacaacaacattattcccaaggctcttagttttgatttattacatgtttgtatgcttgatcgtgagaattgtaatcaagctctgagtagtgaatcttttcatttgtcggggttggataggctaaacttaatttcgtgtaatactcttttttaatatagttattcatatttattactcttcttcttctcttaatgcttgttttagattgatcacatgttatttaatattacgaattgatagtttagttggtagacactcgtttgattcttgaactgagaataatacctaatgggattgattctagacatagttcaattttaattagactcccttaattcttaaacattaatgttagttatttagattgattttctaagacattaggaattaatctaaataacttagacttttcacctaaggcattatggttggaatataactgtgaattatggataaattgcgtgaattactagattgatcaggatttttgtattgaaaaa

SEQ ID NO: 8886 - DNA, 558 bp, Glycine max
agcttgaaggtgtgtagcccaccatcttttctatagtttaatactggtaatgtgtctactatcattgtcatcattttttttcgtcattgaggtgccacttaagctgccaggtctctccacctttgggcgtattctttgaaagatctgtgcccctttttgcacatgttctgttgttgcatcctatccggaaccatatccaaattgtgctaatactgcctaacgaaggcaaacattatgtccttccaagagtggactcgagaaggttccaggttggtgtaccaggtaatagctaccccagtaagattttcttggaaggaatgtatcagcaattcctcatcttttgcgtatgcccccatcttccgataatacatctttagatggttcttggggcaagtagtccccttgtacttgtcaaagttcagttccttgaacttgggagggatgacgatattgggttctagggacaactcttctaggttagcaatggccttaatttttacattcttcaatggccctggacctttcctctagatgatccaactttcctatttctgtcat

SEQ ID NO: 8887 - DNA, 623 bp, Glycine max
agcttgaggttaatctcaaagctatataaacataaccatgtaagagaattaccaagtatgccatacaaggatgatttactttgtgtggcatgtccaaagggaaaacaaatcaaaaactccttttcaagtaaaaacattatttccacctcaacacatctaaacttgttacatcttgatatgtttggtctagctagaacaacatccataagtggaaagaagtatgaacttgtcatagtggacgactactctagatgttgaattagagtgtttgaagatttgaagactagtcttaggatcttttgattttaataattttgcattgccaaacatatttctaaagttatggaatttttattggatgttcttagacttggcatgttgagtgttttaggctttttggttatcaaacatgagaagatataaaaagtttctaagaggcaataagttcaacactgtgtaatagattactgagtttaagtaatcaattacaaagtattagaacaagaaacaaaacttacctctcttgaaatattggcaagttttatcgaaataactgattactaaattttgtaatcaattaccacttattgaataaattaaatgcatctataacttatgagctc

SEQ ID NO: 8888 - DNA, 626 bp, Glycine max
agcttaggtgtaacaaatatccatgctttattttgtttcaaatatccattgaagtaaagtgcaattaggtgtaacagatatccatgcaagaaattgtagtgtggggtacaaaccactgtatatttatcatatgattattaatgtgtactcttctaaattaactaatacagctaggataagtaccaacttggttactggaaatatattatttcgttattttatggagcacttattagtggcttgtacagggtacaacttttattttatatgtcacttgaaattgttatttgcatgtaactttacaaataaaactgaaattggttggataatgtagtgacatgactactgttgaagattatgataaggggagatgacttcccttcaaaatttgactgggttgatgttccatatatgtcttatctgttgactcgctctaaatctggacaaatattactcttcagtaactggagagaaacagggtgaatgatcttatatggttgatttgttctataattgaatctccaatttataattaaaattgagtcaagctctacagcatgattattcatctactcttaaaatatgtaattactggtgaccatacaatcaatattgaattttatttt

SEQ ID NO: 8889 - DNA, 339 bp, Glycine max
  unsure (1)..(339): unsure at all n locations
atgaagctctgataccacttgttagacaagtgggctctgatatcttaagaaggcgggttgaattaagatattacaaactatttccccaataaaaattctatttcactttctattcaagttacaaattcccttaacaatgaattccttaaataatgattcanatagaacaatttgaatataaatataaaaaaataatagataaaagaggttaagggaagagaaagtgaanactcagaattatactggctcggncacacncttgtgcctacgtccagtccccaagcaacccgctggagaagtccactatcttgtaaaatccttctacacgtgctgaacaca

SEQ ID NO: 8890 - DNA, 563 bp, Glycine max
  unsure (1)..(563): unsure at all n locations
agcttgaaggtgtgtaacccaccatcttctcttagtagaacaccagtaacatgtctactatcatttttatcatctccctttttgtcattgggggtgccacttgggctgccagatccctccacctttgggcgtattctttgaaagattcgtgccctttcttgcacatgctctatagttgcatcctatctggagccatatcagaattgtactgatactgcctaacgaaggcaaccattaggtccttccaagaatggactcgggaaggttccaagttagtataccaggtgatagctaccccagtaagactttcttggaagaaatgcatcaacattttctcatcttttgcgtacgcccccatcttccgacaatacatttttaggtgattcttgggacaagtagtccccttgtacttgtcanagtccggcaccttgaacttgggagggatgatgacgttgggtactaggaacaactcttttaggctagcacaggcatagtctttgcccccttcaatggccctgagcctttcctctagatggtccatcctttcctttttccgtatacca

SEQ ID NO: 8891 - DNA, 537 bp, Glycine max
agcttgccgccacggagttttccgactatgctcttgtgttgtggaacaagctacaaaaggagagagcaagaaatgaagagccaatggttgatacatggacggagatgaaaaagatcatgaggaagcgatatgtgccagctagttactcaagggacttgaaattcaagctctaaaaactaacccaaggcaacaagggggttgaggagtatttcaaggaaatggatgtgctcatgattcaagcaaatattgaagaagatgaggaggtaactatggctcgatttcttaatggattgactaatgatatccgggatattgatgagctgcaggagtttgtagaaatggatgatttgcttcacaaagcaatccaagtagaaaaacaattaataaggaggggagtggctaaaaggagttttaccaactttggttcttttaattggaaagacaaaggtaagaaagatggggctgctacttctaatagatccacacctaccccatacaaaattcgtttcaagtgcctaaagggaccctttaaaagga

SEQ ID NO: 8892 - DNA, 231 bp, Glycine max
ctagtatgtcatgcaggatgtgtctgtttttattgatagtgtctgcctctcatcaataagaccagatatcacttgtctcaatctatttgctcataacttagctatcagcttgtacatacatcccatcaaggagaatggtctgtagtcatcaaatgactggcgatgtttagttttgggaattagagctatgaaagaagcataactgcttctaggtagctgtcatgcacatgg

SEQ ID NO: 8893 - DNA, 593 bp, Glycine max
  unsure (1)..(593): unsure at all n locations
aaaaaaaatcaatactaagactaaccatcagcatatttagcattaaactnttcataaatttagtatcttcattcaaccatcaaacgtattagagaaaagaagaatgatattttacctccaccttttccattttcataccggaaaagttagaacttttagataccttaggaatgacatcattagagtcttcaatgtattctccctcttcccaacatatcaagtcatataaaacctcaacttccgcagtgattgttgtatatcaccttggagatcctttgctaattaacaacccctgtaagctcagagggttgcacttaattctaattgagtgacctttataccctgagaatattagtaattggaaggatattttatatcatatctcctctattatattaaaattaagacagatgattaattatatctattattgaacanatctcctctttaaaatattaaagttattgagcattctatgacacctttctttatttaatttatcactattgttttaaagtattaagaatatatatatttagtgagatatctttatttaataaatataatattatgatatatagtattaacattat

SEQ ID NO: 8894 - DNA, 577 bp, Glycine max
agcttaatctcctccaactgcacaaggttcttattatttgaagagtatccttgtggaaccttcacccgaagaagacactgacaaaaacttatcttctcctttttggacaaagtatggcaagctgggggcaagtaaattttcttcccatcagaccttggatgcaactgtgatcgtatgcccatataagctagatcttgacgagtattcaagccatccttcgtcttgccttgaatgttaaggagcgtcccaatcacactgtcacaaacatttttctccatatgcataacatcaatacaatgtctaacgtcaagatcagaccagtacggaagatcaaagaaaatgaacctcttcttccataagcaaatcttacttttatccttcttttgggtctttccaaatacagtattcaggtgttgaacccgctgatataccttctcaccagtcaatggtatcggcacaatatcgtgctcttgacttccattaaaagccttttttagtcgtctgtaaggatgattgggtgttagaaaacggtgatgcctactatagactattattcttccatgttatagttgtatgt

SEQ ID NO: 8895 - DNA, 511 bp, Glycine max
agctttgaccaaaatcaaacgacaacaactttttactcggatgtcggaatgaatactgtattatatcgagacgctcgaaattgacaatatatcgagacgctcgtaattgaaaccaaatgctcgaagcaaattcaaacgacaataactttttactcggatgttcgaatgaatcccataatatatcaagacgctcgtatttgaaaacataagctctaagcatattctaatgataataactttttactcggatgtcggattgagtcccgtaatatatcgagacgcccgtaattgaaaacggatgctcgtagcaaattcaaatgacaatatcgagatgctcgaaattgagcaatggaagctcttgagcaattcaaatggtcataacttttatttcggaggtccgattgaggcgcataatatatcgagacgctcgaaattgaacaatggaagctcttgagcaaatcaaatggtcataacttttcactcggatgtccgattcagggcacataatata

SEQ ID NO: 8896 - DNA, 510 bp, Glycine max
agcttggagtcgctccaacaatttatatacttatctcctacctccttagccaatcttaggtgggctaaaagggtttcatactcaactttattattcgtcatctcaaactcgaaccttagggattgctctatgattacttcacctatgctttctaggatgactccagccctactcccttttttcattggatgaaccatctacgtatagcttccacctctcagattatggttctgtagtggttgtcattttggctatgaagtttgctaggcactacgccttcattggacctattggctcatatttaagcctaaacttggacaacttgatcgatcaggctatcattcgactcgtgagttctggtttcttcataactgttcagatagggtggtcagttcaaaccacaatctaatgactttggtaagaaagatgggcttagtctccctacaattgtgactagagcccaaggctaacttttcattatttgatatcatggctctgcattttttagga

SEQ ID NO: 8897 - DNA, 367 bp, Glycine max
agcttttagaggtatttgactaattagggtttattgtacctgacatattagggattagtgttacttgacaaattagggtttagggttacttgacaaattcgggtttaagggtatttgactaatgagggtttatgtgtagttgattaattagggtttagtgttacttggctagttagggtttgggttatttgaaaaaatagggttgcttgactaattgggtttaggggtatttgacaaataagggtttaaggttacttgacaaattcaggtttaagggtatttgactaatgagggtttgtgggtagttgactaattatagtttattgttatttgataaattggggtttatgacacttttattaatctt

SEQ ID NO: 8898 - DNA, 324 bp, Glycine max
atccttccagccgacccgcaggcatgcaagctttttagcaattcaaatggtcatttcgctacactcggatgtcggattcaagcgcataatatattgagacgctcgaaattgaacaatggaagctcttgagcaattacaatgggcataacttttaactcggagggccgcttcacgcgcataatattttgagacgttctaacttgaacaaaggaatctcttgaacaattcaaattgtcataactttttactcggaggttggattcaggcacataatatctctagacgcttgaaagtgaacaaaggaagctcttgagcaacacaaat

SEQ ID NO: 8899 - DNA, 366 bp, Glycine max
ataaaagctaaaactaggaactaggatgtttgattttgtgacacaaaaaaataaggcgctcgaaaatgaacagcggaagctcccgagaaacacgaatggtcaaaacatttcactcggatgactgattagaggacacaacataacgaagacgcataaaaatgaacagcggaagcttccgagaaaatagaatggacatacacttacacacggaagtccgacacggcgatagaatatatcgagactctcgaaatagaacaatggaagcgcttgagaaaaacgaatggccataacatttaaaacggatgactgaaccgtggacataataaacagagacgctcgaaattgaacagcggaagctcacgagaa

SEQ ID NO: 8900 - DNA, 458 bp, Glycine max
tgcaagcttataagtagctggcccaatttgatctattatctcattgggcccataatatttcttgttaagcttaaaggatcccctttgttggcctataatagaggactgtctctgaggctgaagtcgcaccatgaccaaatctcctatgtcaaaatggacatctctacacttcctgtcaggtgtgtgattcattgccagatgggccttctgaagcttcttctttatttcagcacaaatagattctctatctgataagaactcatccactgcctccactttcgacgagcctgtaatataccatgacaagattggtggtttcctcccaaaagtaattttgaatggtgaaacacctaagcctgagtgttgcgacgtgtttgtagaccattttacctatttaagaagcttgccccaagaagaatgtttcttttggacgacggcatgcatgtattgttcgatca

SEQ ID NO: 8901 - DNA, 380 bp, Glycine max
cctagtaactcagcttgccaagaatcataaatctgcacctgttgcaagaagttgtggtctatagtcttctgcatatcaccatatagatctctatccttctttgcagcaatctggagtcaatgagcaacctgaagcttatgctgccaatatttataatagacctcctcagcagcaaaaccaacaacagcagaataattatgaccttctcagcaacagatacaatccacgttggaggaatcatccaaatctaagatggacaagtcctttacaacaacctcagcctgtcccttctttccagaatgttgctagttcaagcaagccttatgttcctcctacaatgcagcaactacagcagtcacaacatagacaacaagcaactg

SEQ ID NO: 8902 - DNA, 531 bp, Glycine max
agcttcccaagtttttaagttattcctcaattctttttatgcaaagttccaaaagtcctattaacaacttccgtttgcccatcggtttgtgggtgacaagtggttgaaaataacaatttagtgcccaacttgctccacaaagtcctccaaaaatgcaaatcatcaagcctaggtataggatgcctatatttaatggtgatgttattaagggctctactatcagaacacatgcgccatgtcccatcctttttagggaccaaaatcactgggacagcacaaggactcatactatctcttacccaacctttgctaatgagttcatccacttgtctttgaatctctttggtttcttgagaattacttctataggctggcctattgggcaaagaagctcccggaatgagatcaatttgatgctcaattcccctcagaggtggtagtccacttggcacatttggatcctgcaaaagagttttaacactagaaggcacttcaaaatcatcaaaagtgttagtggtcaaatctgatttt

SEQ ID NO: 8903 - DNA, 604 bp, Glycine max
agctttacatgcctcatgacacctaagcacacttattggagaatcttggacttgatcttggattagtgggctgaaccataactgaaattcgctgatcataattagtaaaattttggctccacaaaattcaatttcaaatttatgtgaaatttgaatagaaattcaaatttccctccaattttgtgtgacacttaggctataaatagaggccatgtgtgtgcattttttgaactttgataatttgagaattacacttcaaatttcagacctcatttgaggcacaaaattttgtgctccttctcccttccctcatcttttcctctttcaagctcttatccatggctttctacggtggtgagcttgtgcttgactcatcttcttcttgaagtggcatctccaattatctttcttccatatccattccactgccatgatctttaagaatcaaaggactccattgatgaagaagatccaaggcctaccagctccacatggagctacatcatgtgatatcaagagcattttcatctaggtgatgttcttttgcttcctctatccttttggtcagtcaattcactttaattccttggtcttaatcttattc

SEQ ID NO: 8904 - DNA, 613 bp, Glycine max
agcttgtaggcactttgaacgcaatattctttttattttttatcctccaaatgactattttgtttttgtaccttgcataataggcactcgaagaatggtattcacatcccttagattgaatatttgattaatcacacccacgtttcaaactttcatggtgaagtcatccataatatcttgttacgtttgaagattctttcatctccatttgattataagagattcaatagtgagattttacttcattctcaactagggttcgttccaaatacctatattagtaccatttcccaactttcatttatatcctttctttatgaccattttagaagagaacatacttcaccatgtaaatgatgggttgtgccttactaaagcttccatacactcttcccttaagaaatatttagccttgatgactcttgacagcaaaacatttagcatagaaaagatcctccattattgctttcctaaccatggaaagttgaaagcaaatatatttctaaaacctaaccctaatttctctttataacacataaccctgtccaacaccatccaatttaacccctttcctacctctttttctctaatccccaccaatctgaatttatca

SEQ ID NO: 8905 - DNA, 549 bp, Glycine max
cttatttcttttccatcgattgttttcttttaccattaatagattagcaaatgatagcaagatcacagcaaacaacacattaagaaggaagtgtaaatgagatgcataaatatgaaagatgagtataaatcatagcatagagagcagtgggtcaataatagcaatcacggctaaaacctgcattatttcatgaagggataagttctgcagttcttacattacatcaagccaatgatataacatgacagcataccttgagacctgcaaaaatatatagccagatataattaataaaaagaaaatatagtatgatgaaccttaactaaaaataccatagaagtaagattcaatcaattgagacaaagaaacttctaacaaagaattatgaagcttcaatttttataacccgacatacatggtataaagtacaattaatattaaaatgaacagatacttcaatgataatgaaaagatacttgctgtataatcaaatttgcaacgagcagaaaacaaagaaggtataggaaaaaagtcccgtctttgcttggg

SEQ ID NO: 8906 - DNA, 373 bp, Glycine max
  unsure (1)..(373): unsure at all n locations
aagttttcttgacattgcttgttgcttttaggatggagattgaaagaggttgaacatatacttcgtgatgggtatgatgactgcatgaaacatcatatttgggtgttggttggaaaatctctaatacaggttagtgggtgggatgatgtagttaacatgcatgactttgttcangacatgggcaagcgaatagaccaagattcctcataagatccagggaagcgaacgagattgtggttaacaaaagatataattgaagttttataaagcaactcggtaagtgagaggatggcttcttatcttgattgttttttctatcttatctttacatcatagacaaagctttgtatgataattcggaatttttttaaca

SEQ ID NO: 8907 - DNA, 588 bp, Glycine max
agcttggacttcctgtgttttgggaacctctcttttctcttttgtacccaaacccaatcacctggttcaagcacgactttctttatgcttttgttggcttgccttgcatagctcgcatttttcttttcaatttgaaccttcacttgctcatgcaactttttcacatactcagctatagcctgtgcatccttatgcttaaacatagcaatgttaggcataggcaacaaatcaagaggagtcaaaggattaaatccatacactatctcaaatggtgaacaattatttgtgctatggacagcccgattataagcaaactcaacatgaggcaaacaggcttcccaagatttaagatttttttttaaaacagtcctaagcagtgtgcctaaagtcctattgactacctcagcttgaccatcagtttgtgggtgacaagctgtagaaaacaacatttattaccaatcttaccccacacggtccttcacaagtgactaaggaatttggatccctatcacatgcaatgctccttggtaatccaagaagccgccctatttttttgaaaaactgatcagccacatgacaagcgtcatc

SEQ ID NO: 8908 - DNA, 432 bp, Glycine max
  unsure (1)..(432): unsure at all n locations
cttctatggaatgttccacaagaatatgccaaatgaatattccaagaatatgccaaagaaatattccaagaatatgccaaaggggaggaaaactacacacatctcttcaatagctaagctcacacccatgtcaaaatacacgaaaatacaaaagaaagtccctactacaaagactactcaaaatgccctgaaatacaaggctaaaaccctatactactagaatgaccaaaatacaaagcccaaaagaaggaaaacctattctaatatttacaaataagagtggacccaaccttggcccatgggctcagaaatctaccctgaggttcatgagaatcttagggccttctttagcaactctagctcaatcctctggagtcttctatccaatacccttggnggataggattgcatcatcccctcccccttgaaaag

SEQ ID NO: 8909 - DNA, 392 bp, Glycine max
  unsure (1)..(392): unsure at all n locations
acttgatgccttggtcattctagtaacttatctngccatgaataaaaaatctgcacatgttacaagagtttgtggtctatgttcttctgcagatcatcatacagatctttgtccttctttgcatcaatctggagtcaatgagaaacctgaagcttatgctgcaaacatttataatagacctcctcagcagcaaaaccaacaacagcaaaataattatgacttttcaagcaatagatacaatccagattggaggaatcatccaaatctgaaatggacaagtgtcataccctaatttcgtccggngaccattgtttgatggcatgcaacctttggttgaccgcttcgaggtacttggcaccctttgctgcacaatacttgaagtttcgagacat

SEQ ID NO: 8910 - DNA, 448 bp, Glycine max
  unsure (1)..(448): unsure at all n locations
nggctatctgattatgcagtgcctcctagttgactagaggaacagttgttggtcgcccatgagcacactgcacagaaaattcccattttgtcaaaaatgctgcctttcctctcaatagattcacaaacatgaaaacgtatatcttacttggaaacaaagtgatgtatgttttagctcttcaactataagggaacattctgatggtagcaatgaatccccaaacataattgcaccttcaataaaagagcattatgattaaattaaaggaatactaccaaacataattgcaccttcaataaaagagcattatgattaaattaaaggaatactaccgatgactgcaatatgccctcccaaaataaggaaatctgacaggatcgggctgccaacagatgggggtttcatgcatagtattganggaaaacaaaggtaatatcatatgtttctg

SEQ ID NO: 8911 - DNA, 408 bp, Glycine max
  unsure (1)..(408): unsure at all n locations
agcttgttgtttgcgacgccaacggagactactcaacaccatcggattcatattcatgatcttgatcttgatcctcgtacgctgttgatgaggagcgggttgagtggccagtagttttgaaacggtgtagtgtggggccagtggagtgcactgttgaagaattaccaatggggcttccatccatgattcgtgcactcgactttcctagcgtcactgctcctccctgcttcttcttcgcagccatgtgccatttcttcagagccttgtttgtttgctcgtcaaatattgctgntttcatccttgaacccatctgcgtgtatgtatgtgtgtgtttacagtgatacattgtcgtcaattagaccaattcaaacgtttatagcttgcaaaagtaaatcgtgtaatattaca

SEQ ID NO: 8912 - DNA, 388 bp, Glycine max
attatgcgcttgaatcggacttccgtgtgtaaagttatgaccattggaatttctcgagagcttccaatgttcaatttcgagcgtctcgatatattatgcacctgaatcggacttccgtgtgacaagttatgaccatttgaatttctcgacaccatacggtgttcaatttcgagcgtctcgatatattatgcgcctgaatcggacgtccgtgtgacaagttatgaccatttgattttctcgagagcttccgttgttcaatttcgagcttctcgatatattatgcgcctgaatcggactttcgtgtgacaagttatgaccatttgaatttctcgagagcgttcgatgttcaatttcgagcgtcttgatatattatgcgcctgaatcggac

SEQ ID NO: 8913 - DNA, 339 bp, Glycine max
agcttctagatatattatgcgccggaatcagacttccgtttcaaaagttatggccatatgaatttctcgagagcattcgttgctcaatttcgagcgtctcgatatagtctgcgcgttaatcggacttccgtgtgacaagttatgaccatttgaattactcgagggcttccgttgttcaatttcaagcttctcgatatattatgcgcctgaattagacttccgttacataggtatgaccatatgaattgctcgagagccttcgttgatcaatttcgagcgtcttgatattatatgcgcctgaatcagactttctggtgatatgttatgaccactttaatt

SEQ ID NO: 8914 - DNA, 419 bp, Glycine max
acctgctcatatactagaccttctacattaatgttgctctcaagaggcttgaaggttgcagaaccttggcagaaggaaccaaggcaatcatcaacttgggtctcgaaaaggttcctgtccctggagagtctggctttccatttccgggccttttccctcttcctcaatcacacaaggaagcaggtgaatcctgtcatcactattctttcatcttgattttcttatgagcagatgcataattaagcttagttcaatcatatatatagtcaatatgttagtagttagctttagatttaattactcatttagtccttacagctacacaaactttacctttttagtttttatacttaagaattatccatattggtccctacccatacaatttttaatccggtgatataatttttatccctttt

SEQ ID NO: 8915 - DNA, 355 bp, Glycine max
agcttgtaaggttaaagtctcacgattgtcacgtgctcatgcaacaattgttagccgtggctatacgagacatctttccaaacaaagtcaggttagccataactcgcctgtgctttttcttccatgctatatgtagctaagtcattgatcctgtgaagtttgatgagctggaaaatgaggccgcaattatactgtgccagttggagatgtattttccccctgctttctttgacatcatgattcacttgattgtgcatctagtcagagaaatcaaatgttgtggtccagtttatctacggtggatgtacccggttgagcgatacatgaagatcttaaagggtatacaaaaaatcta

SEQ ID NO: 8916 - DNA, 426 bp, Glycine max
atgatgcaactgaggtaggagctattttcatgcactctctctaatgattatggcatcatatctggcgctaaactgctgagagttggaagccatcttctcaattaaatttctggcttcagcaagagtcatgtttccaaaggctccaccactggcagcatctatcatacttctctccatattactgagttcttcataaaaatattggagaagaagctgctccgaaatctgatggtgagggcaactggcacacagttttttaaatcgctcccagtactcatacaggctctctccactgagttgtctaatacctgagatatctttcctaatggcttgggtcctggaagcagggaaaattttttctaagaatactctcttaaggtcatcccagctcgtgatggacctttgagcaaggtaatacagccagtc

SEQ ID NO: 8917 - DNA, 413 bp, Glycine max
  unsure (1)..(413): unsure at all n locations
agctttgaatgcactattcaatggagttgacaagaacatcttcagactgatcaacacttgcacagtggccaaagatgcatgggagatcctgaaaatcactcatgaaggaacctccaaagtgaagatttccagattgcaactcttggctacaaaattcgaaaatctgaagatgaaggaggaagagtgtattcatgacttccacatgaacattcttgaaattgccaatgcctgcactgccttgggagagaggataacagatgaaaagctggtgagaaagatcctcagatccttgcctaagagatttgacatgaaagtcactgcaatagaggaggcccaagacattngcaacatgagagtagatgaactcattggttctcttcaaacctttgagctatgactctcggatagggctg

SEQ ID NO: 8918 - DNA, 339 bp, Glycine max
agctggttaaaattgacttaaaatcatctctgtgcactagtgatagataccataatttcattttgttccttaacctttgaattgttggtgaattttatctcttcaaattaaagtgacatattttacatccaactttaaaaaacttgtgaattttatccctagttaattatccattaaaagcttgtcataaaaaagttaggagtaaattttaccaaaataaataaaaaacaatgggggtaaaaaaatgaggagtttagaataaaaagtgcaattatgtctaaagtataaaaacaagggattaaatttgcataattcttaaaattcatgggtaaaatcttc

SEQ ID NO: 8919 - DNA, 376 bp, Glycine max
  unsure (1)..(376): unsure at all n locations
ggagaattgactaagaaatcactacgcanagcttcaaactcgaaggtggaggacacatgaacgaaaacgcaattcatgggctcctaaaaagggtggagaatggagaattgcactaagcaatcactacgcatggctccaaactcgaaggtggaggacacatgaaccaaaacgcaattcatggggctgcgaaaaaggggttgagaatggagaattgaactaagcaatcactacgcatggctccatactcgaaggtggaggacgcatgaacgaaaactcaatccatggtgctccgaaaaaggtgagaatggagaatngcactaagaaatcactacgcaaagcttcaaactcgaaggtggaggtcacatgaacgaaaatt

SEQ ID NO: 8920 - DNA, 376 bp, Glycine max
tgagaatggagaattgcactaagcaatcactacgcatatctccaaactcgaaggtggaggacacatgaacgaaaacacaattcatggggctccgaaaaaggggttgagaatggagaattacactaagcaatcactacgcatagctccaaactcgaaggtggaggacacatgaacgataacgcaattcatggggctccgaaaagattgagaatggagaattgcactacgcaatcactacgcatagctccaaacgcgaaggtggaggacacatgaatgaaaacgcaattcatggggctccgaaaagattgagaatggagaattgcactaagcaatcactacgcatagctccaaactcgaaggtggaggacacatgaat

SEQ ID NO: 8921 - DNA, 419 bp, Glycine max
  unsure (1)..(419): unsure at all n locations
gatacaggggtgcccagtgaggctgttaagcgggttgagtagtccatgggagttgaggcgggtcgagaagcaaacatgcctgagtcagacaatatatccaagacatattttcattgagataagtgaatgcctttgttattgcgagcaacttcaaggccgagaaagaactttaaggtgctaaggtccttaatgctgaaagctgtatcaagaaggtttgtgatatgtgtgatggtgtcgagattgttacctgctaggattatatcatcaacgtatacgagaacagcagtgatatcatggttatggaagtggagaaagagggaatgatctgttgtagattgacggaagtcgtgggagatgaggaaagaagagagtcgtgtgaaccattgacgactggcttgtttcanaccatataatgaaca

SEQ ID NO: 8922 - DNA, 429 bp, Glycine max
agcttatggcggcaaagggtaagctatcatgcctcaagcatgttgatgttggtgcttgtgaacattgtatccttggaaagcagaaaaaggtcagtttctcaagggcagggaagactctgaaagctgaaaagctagaattggtgcacacagatgtttgggggccagccccagtgaaatctgttggaaactcacgctattatgtcacctttatcgacgactctaccagaaaggtatgagtttattttcttaaaaataaatctgatgtgttttctgtgtttaaaaggtggaagacagaagttgaaaatcagacaggtctaaaggttaaaagtctgaaatctgacaatggtggggagtatgatagtcaggaagttaaagacttctgttcagaacatgggatcagaatgatcaagacaataccaagaacacctg

SEQ ID NO: 8923 - DNA, 420 bp, Glycine max
agcttaccacctctcccatcatgcaacctccgatttgagagcttccatttgagatcatgtgtgatgcctctaattatgcacttggggttgtttttgtcgtagagagtttatagactatcacacatcattgcttatgtatcacgcactctagatgtagcctaagtcaactacacgaccaccacaaaggagcttttagctattgtttttgcatgagataaattaagatcttatttgctttgctcccatattactgtctatactggccatgcagccttgaggtacctattgaagaagcttgatgctaaattcagattgatcagatggatgcttcttctttaggagtttgatattgagagcagagacaagaatggagcagaaaactcggtggctggtcatttgagcatgattgagggacgtgac

SEQ ID NO: 8924 - DNA, 417 bp, Glycine max
  unsure (1)..(417): unsure at all n locations
tgaacaacggaagctctcgatttaatcgagtgtgtcataaattttcacacagatgtccgattcggggaaataatatatcgagacgcacgaaattgaacaacggaagctctcgagaaanttgaatggtcataacatttcactcggatgttcgatccggggacataatttatcgagacgctcgaaattgaacaaccgaagctctcgacaaattagaatggtcgtaacttttcacgcgaatgttcgattcggggacataactcatctagacgctcgaaattgaacaacggaagctctcgagaaatttgaatggtcataagttttcacacggatgtccgattcgggaacataatatatcgagacgatcgaaattgaacaacggaagctctcgagaaaatcgaatggtcataacgtttcaca

SEQ ID NO: 8925 - DNA, 229 bp, Glycine max
cccatttataactacgatgcgaaacagatttatgtcctatgggtatgaagaactggaatatacatgcatgccctaatgattgcattcattacataaattagatttttgaagatgtcacatgccccacacgcggtgtatcacatttcaaagtgaaagatgataaatgtagtgatgaggcaacctcatgcaacaaccatccaacaaaggtgtgctggtatctttcaattat

SEQ ID NO: 8926 - DNA, 365 bp, Glycine max
tgtagacatgcaagcttcacacaatttatttttcccaaacttgagttttggaagatcaattactaagtctttcctaactagatgattgagatgatgcatgtttatgtgtgcagttctacgatgccacaaccatgaatcatttatcttacttaccaaacagatcaactcatgaaatgatgcatgttcaatgtttaacatatagatattacctattctcttgccaatatggacaacatcacagagcatagcttcactagtaagacaaaaattcttgttgaattcaattttgaagcctttgtcacatagttgactaatgctcaggaggttatgctttagttcatcaacatatagaacattctctattt

SEQ ID NO: 8927 - DNA, 414 bp, Glycine max
cttcatgcttaagtatgtatggcaaaacttcattactgttgatcaagacatacaagtgagcttgtaacaaatgttctacacttggagtgatcacatgcagtcctcttgaacccttaccacccactctgtcatcatgccaagactcaggaaggccaacaggtttagccttctctaagtattttgaacaaaattcaatggcttcttctgcaatgtacctctcaacaatagacgcttctggacgatatagattctttgtatacccttttaagatcttcatgtatcgctcaaccgggtacatccaccgtagataaacaggaccacaacatttgatttctctgaccaaatgcacaatcatgtgaatcatgatgtcaaagaaagcaaggggaaaatacatctccaactggcacagtataa

SEQ ID NO: 8928 - DNA, 361 bp, Glycine max
tagagcacctcctttcttacctcttccttcatcggtggattcaaccgcctctaggtttgtcggactggcttgtagtcttcttccatcattatcctgtgcatgcagtaagcagggttgattcctttgagatccgatatgtgccatccaattgctttcttgtgtttcttcagaatgtctaccaacctgttttcttcttctgttgtgagtgcattactgatcactataggcttatcttcctccaagaacatatacttcagatgattgggcaatatcttcaactctaccttcttcttctcggacgaaacttccttctttagtgtctcaaaatcggcttctccctcaggaatactgtcttgatgat

SEQ ID NO: 8929 - DNA, 404 bp, Glycine max
agcttaacaaagttattcaacatagaaaataagattatgaagtagtaactaaatggtagtaattagttgatttcaaacaaaatgtgaggataaagaaaatattgtagacaaccttccaatgatgcaacaatgcccctgaaattttttgccccaagcttgtgtagatcctcagcaacctagattggatatatgcaaacatttatccctagaaccacaacagcgcccaatgcaatgagaaaaatctatcaacagctgtttcaacaaactctcctgtatgataccctgataaataatatagcaataggtgatcaagaacacacgaaaaccatattcacaagctttcattggtggatattgttttgcatatgtggcacaaaatcctaccactcacacgtcataatcct

SEQ ID NO: 8930 - DNA, 400 bp, Glycine max
tcgctcgaaggcaaactggatgcattggttaacttggtaacccagctggccttgaatcagaaatctgtacctgtcgcaagggtttgtggtttgtgctcctctgctgaccaccatacagacctttgcccttccatgcagcaacctggagcaattgagcagcctgaagcttatgctacaaatatttacaatagacctcctcaacctcagcagcaaaatcaaccacagcagaacaattatgacctctccagcaacagatacaaccctggatggaggaatcaccctaacctcagatggtccatccctcagcaacaacaacaacaacctgctccttcctttcaaaatgttgctggcccaagcagaccatacattcctccaccaatccaacaacagcaacaacccc

SEQ ID NO: 8931 - DNA, 416 bp, Glycine max
  unsure (1)..(416): unsure at all n locations
agctntgaatgctctattcaatgagagttacaagaatatcttcagactgatcaacacttgcacagtggccaaggatgcgtgggagatcctgaaaaccactcatgaaggaacctccaaggtaaagatgtccagactgcaactattggctacaaaattcgaaaatctgaagatgaaggaggaagaatgcattcatgacttccacatgaacattcttgaaattgccaatgcttgcactgccttgggagagaagatgacacatgaaaagctggtgagaaagatcctcagatccttgcctaagagatatgacatgaaagtcactgcaatagaggaggcccaagacatttgcaacatgagagtggatgaactcattggttcccttcatacctttgagctaggactctcggatagggctgaaa

SEQ ID NO: 8932 - DNA, 419 bp, Glycine max
  unsure (1)..(419): unsure at all n locations
cagaccaagcttggaaagattatcaccatcatttagtatacatcgttcataatggtccaccacttgaaagagggcttgcaccagcgtagattttccattccctgtcctgtctactataccaattttcttttgtcctgagaagatacaagtaacatctttgaggaccataggagcagcagggtcattctgtatatgaaggttatgaagttcaacttttccctcctttggccactctggttcaggcctgcaatcttgaatggtagaccttggcaaagtaacgaagatggctcaagaacaaaatacaagaccatattgaagaggaaatngattctgacagacaaccattccaagctgccaaaattgtaaaaggccacctgagaataatcatcaattagagccttaactttgatcaagaatag

SEQ ID NO: 8933 - DNA, 446 bp, Glycine max
acctgtggcatgcaagcttctaaacaaatttattcaagcaaatgaaatttgagaaatccagaacacatcaaaagatgaaacaagaagaatatagggttgtttggataaacaactataaaagggcttattgaataagtatttatcatgtaagcacttgtatagtttttataatcaaaaaagaaataggcttaaactattttcatataagttgtaaggttgttttcataatattttggagaggttactgaaataagctaaaaataacttatgaagataacattagttattttcataagctttctaaaacacttacacaagtgcttatatagttatatcataagataagtccaaataagtagtaaataaggtcttccaagcatacccttaagttattgaatttgagagaattaaattaacaaaataaaatagtcaaaggacaataaaat

SEQ ID NO: 8934 - DNA, 375 bp, Glycine max
gtaccttgtcattatgtgttacatggaatatcactaatatgagattatcgtatggtggctacctagctaagggagaaatttctgagtcaatctgtaatgaagtcaattcaattgtagttcttgttcttttgtcatgtgtctgatccatttatgaagataggcattcctttagctctggcaatatttggcttatgtctggtcttttcagctgcagttggtaaaatgcaagacaaggcaatctctacagctttccatgcagaattgacattgaatgcttcctttaacttcggatcaacaatgttatgaatatctcctctttcaactatgggaataacccattcaaggatgtgaatattttttcaggcgtccttgata

SEQ ID NO: 8935 - DNA, 439 bp, Glycine max
  unsure (1)..(439): unsure at all n locations
tgctaacccatggaagctcctaatatctcccacactttttgtggtgggccattcttggatggccttgattntctcagggtccacttggaccccatttctaccaactacaaaacctaagaaaactatattatctacacaaaaggtacacttctctatatttgcatagagggtgtttttcctaaggactgaaagaacttgtctgagatgtcctaagtgatcatctagcctcctactatacactaaaatatcatcaaaataaacaactacaaatctacctatgaaatcccttaagacatgatgcataagcctcataaaggtgcttggtgcattagtgagcccaaaaggcatcactagccattcatacaaaccaaacttggtcttgagaagcagtttccactcatcaccctttttcatcctgatttggtgataaccactttta

SEQ ID NO: 8936 - DNA, 384 bp, Glycine max
agcttgcacagtttttattaggtattaattgttctgcatatctaacaatcgtggttttaaattgctgttgtcgttgcgatccttgacattgcgtgaaaatgtgtttgtcatgatttggttgcagagaatcgtaaaatctttatgttgcggtcgcaattgtggttatatatggatcatgatttaaaaccatactaacaattttgcgctttgtgtttatcaatcgattaattgatgattgaatgtgaaaattaatagaagtttttggcaatgtagggcaatgagaggctccaacaactcaagaaggggcttatcaaaccaatacgatggtccatgcaaggcgacaaaccccattgacaaatgttggagatgtgaccccaattggga

SEQ ID NO: 8937 - DNA, 413 bp, Glycine max
agcttgttactactattagatagctactaatactattgcaaactgtaattgtttttttaacttaattatattacacttgtttatgtatgtgtttttctcttgacttaaatataattttggtcattttattttactcaatacgtaattttggtctctctattttaaaattaaaatatttgatactcctatttttaaaaatctacaattttggtctctctattttaaaatacaaacattttgtccctatattttaaaaaattcataatcttgattctcatattatagaaaattcacaattttggtttaatatataatttttcctatgtattatttcttttattttttactttgcagttaattaaatcatttcttgatgatatcttaaatgaatatgtagatctacgatttaatta

SEQ ID NO: 8938 - DNA, 292 bp, Glycine max
ttactctgatgtctgattgtgtgccgcaatatatccagacgctctagagtggaataccaaagctctgagcaaattcaaacgacaatatacttttactcggatgtcagattgagtcccgtcatatatctagacgctcgaaatggaatactgaagctctgagcaaattcaaacgacaatgactatttactctgatgtccgaatgagtcccgcaatatatcggaacgcttgaaatggtatgtggaagctctgagcaaaatcaaacgacaataaatttttactcggatgtctgatt

SEQ ID NO: 8939 - DNA, 387 bp, Glycine max
atattacggtactcaatcagacatccgagttataagttattgttgttcgaatttgctcagggcttcggtatgctatttcgaacatcgtccaatactaccggactcaatcggacatccgagtaaaaagatattgttgctcgaatttgctcagagcttctgcattccatttctagcgtttcgatcatttacgggactcaatcttacatccgaataaaaagatattgtagtttgaatatgctcaaagcttcggtattccatttcgagctcctctaagtattacgggactcaatcatacatccgagtaaaaagttattgtcgtttgaatatgctcagagcctttacattcacattcgagcgtgtcgatatattaccggactcaatcagaca

SEQ ID NO: 8940 - DNA, 304 bp, Glycine max
ccaccacacagacctttgcccttctgtgcaacaatctaaagcaattgaacagcctgaagcttatgctgcaaacatctacaatagacctcctcaacctcaacagcaaaatcagccacaacagaataattatgacctctctccagcaacaggtacaatcccggatggaggaatcatcccaatcttagatggtcgaatccttcacaacagcaacaacaacaacaacatacttattttcaaaatgttgttggcccaagtagatcatacattcctccaccaatctagtagcaacaacagcaacagcccc

SEQ ID NO: 8941 - DNA, 387 bp, Glycine max
  unsure (1)..(387): unsure at all n locations
tgagaagctagagcttagctacacacacccatcttataactaagctcacctccgtgagaagctntcttgagaagctagagcttagctacacacccctataatagctaagctcacccccatgataaaaaaacatgaaaatacaaaacaaatcctactacaaagactactcaaaatgccctgaaatacaaggctaaaaccctatactactagaatggccaaaatacaaggcccaaaataagaaaacaacctattctactatttacaaagaagagtggacccaaccttggcccatgggctcaaaaatctaccctaaggttcatgagaatcctaaggccttctttatcaactctagcccaatcctcttggagcctcttgctcatggctctg

SEQ ID NO: 8942 - DNA, 281 bp, Glycine max
  unsure (1)..(281): unsure at all n locations
ctaganattcgaatggtcataagtnttcacacggatgtccgattctggaaaataatatatcgagaccctcgatattgaacaacggaagccttcgagaaattcgaatggttataagtttgcacacggatgttcgattcggggacataatatatcgagacgctcaaaattgaacaacggaagctctttagaaattcgaatggtcattacatttcactcggatgttcgattcggggacataactcaactagacgctcgaaattgaacaacggaagctttcgaca

SEQ ID NO: 8943 - DNA, 352 bp, Glycine max
agcttgcaatagtgttgatgttggatctcttcgcgatccccagccggatgcagatagagtcaatgacccagaatggctcattgttattggggtttgtacacatttgggttgcattccattgccaaatgctggtgactctgggggatggttttgtccatgccatggatcacattatgatatttctggctgaattaggaagggaccagcaccatacaatctggagggtcctacgtacactctcttggaagaaacaagttgatgaatggttgaaaataaaagtggttctgcattcaagtgggatgagttaacaattattatttaaaaatttatttgacaattgttcaatgctctt

SEQ ID NO: 8944 - DNA, 236 bp, Glycine max
aaacgataatatcttattactcgtatgtccgattgagtcccgtagtatatcgagacgctcgaaattcaaaacagaagctcttagaaaaatcaatcgacaataactttttactcggttgtccgattgagtcccgtagtatatcgagacgcttgaaattcataatagatgctctgagcaaaatctaaccataataactttttacacggatgtccgaatgtgacccgagatatatcgag

SEQ ID NO: 8945 - DNA, 373 bp, Glycine max
taacaactagttttacttttcatttgttggtatatactatttttagtactgtgtacttttcattgtcacataggtaaatttattgacttgtatttcattttgtacagttaaacatggaaagagacgcaggaagggtttttaacggtttcaaagaggggagggttgtttttgctcccacttacaagtattcacataattcagactcttatgctggtgagactgtcaagtcaaagaaaaaacgccgaacgccagcatggtatgcaagtcacttgactcttattatataagtcactcaattaaatgactagtgctagctagatggcttttcagtttttaataaagataggtaaataaaaaattgttgacaacactt

SEQ ID NO: 8946 - DNA, 439 bp, Glycine max
tcgcttcttcacatagtccgcctatgctagaccttctttatgtttaaaaacagaaacattaggcataggcaaaagatcaagaggagttagtgggttaaaaccataaacaacttcaaaaggagaacaattagtggtgctatgaacagctctattgtaagcaaattcaacatggggtaaacaagcttcccaagtttttaagatcttcctcaaaactgtcctaagcaaagttcccaaagtcctattaacaacttccgtttgcccatcggtttgtgggtgacaagtggttgaaaataacaatatagtgcccaacttgctccacaaagtcctccaaaaatggcttatgaacttatagtccctatcactaacaatgctccttgtgcaaccatggagtcttacaatcttcttgaataacaaatcaaccacattgggagcatcatca

SEQ ID NO: 8947 - DNA, 343 bp, Glycine max
agcttggatgcaacatcttggtcaaagatattgcatgttaagaccttcttaagttttcgacaggtcatgtaagggaagcgaattaaacgggcaagtcgtgtacccaagacttctcttctctcttctagattcgggtactgtgttcgaacccacttcaacacaaagtcatataccgcatcctctgatgcaacctgaagttcgtcactagacaatattgcttctattccagctagaggcaagcccataacctcttcctggaacctggtcatggtcatatgtgaaacttattagcgttcaaaaggaagaaaacttgttttgagattactaaaatatagaacccaga

SEQ ID NO: 8948 - DNA, 361 bp, Glycine max
  unsure (1)..(361): unsure at all n locations
aatgagaagcaaatgtttcaagatttctcanaagtagttcaagaaattctaaaagttgtaagaattatattaaaaagatattgaaatgcaagtcaaggtcttgcttttatagacccttcatgtctggtcaagaaaaccattagaagagttataactttgagaaaaacttgaaaaccattggaagagttacatctcttgactttntcttcaaaacttgtcactggtaattgattaccaaaaccatgtaatcgattacacaaagcattttatgaaaagatgtgactcttcacaatngaatttgaatttcaacattcagatacactggtaatttgataccaatatagtgtaatcgattacacca

SEQ ID NO: 8949 - DNA, 214 bp, Glycine max
agctttgtgaagctcctgttttagctttacccgattttactcaaccatttgaagttgaatgtgatgctagtggagttggcattggggctgttttgatacaaaacaaaaggcctatagcttatttctcggagaaattgggaggagccagattgaactattgcacctatgacaaagagttctatgccattgtgagagctcttgatcattggaatca

SEQ ID NO: 8950 - DNA, 433 bp, Glycine max
ctaagcttctcaggaagtttctcaacgaagatacctatgctattattacaagcatgtgtaacactagttgtagctttactgaatgagagtcttatgaaacacacttcaaagttcaacttctctccctcttacctccttcaatctcttgctccccccctgatgcaagctccattggagcttgtaggcctaggatcttcttcatcaatggatacctttgcttcttggaagatgaatggcagcggaatggagaatgaagagagagacgagacgcctcttcaaggagaatatgagtctagaacaagctcaccaccataggaggccatggataacagcttggaggaagaatgagatgaatgactggagagggagagaagagcacgaaattatgtgctccagatgagctttgaaatctgaattctaatattcgaatgat

SEQ ID NO: 8951 - DNA, 411 bp, Glycine max
agcttttgacggactataccaagctctaggaaccagggacggagaaagatctatatataggcttgctaagggtagagagaggaagactagagatttggatcacgtaaagtgtgttaaggatgaagaaggcaaagtcttagtgcatgaaaaagatatcaaggaaaggtggaaggtgtatttccacaacttatttaatgatggatatggatatgactctagcagtctagacacaagagaagaggaccggaactataagtattatcgtcggattcagaaacaggaagtaaaggaagcgttgaaaagaatgagtaacggtaaggcggtggggccagacaacatacctattgaagtgtggaaaactcttggagatagaggtcttgagtggctcaccaaactctttaatgaaattat

SEQ ID NO: 8952 - DNA, 397 bp, Glycine max
atgcaagcttctccacttgtaacttgggcctaaattcaaatagcatggataacacttgttgaagaacttccttggccttctttgatctagcccttgccataggtcctccaagtccttctaaaggttccttgtccttattccttgccttatcctcatcactctctccctcttcaaaaggatatgtcctcaaatcggcttcttcatctacatcaaaaagatttacgtcagacacattaaatgtagcactcacattatactcactgggcaattcaatcttgtacgcattgtcatttatcctttcgagtacttgaaatggaccatccactcttggttgaagcttggattttctttgctccgaacacctctcctttctcatgtgaacccaaacccaatctct

SEQ ID NO: 8953 - DNA, 424 bp, Glycine max
  unsure (1)..(424): unsure at all n locations
agctnttgttaatatgggtgttgtacttaataaagccatgactggtttggaaacagagaaggttccttttggtttctttgctcggaatggcaagtatgtggaatgcctgctttctgtgagtaagaaattggacgtagagggcctagttactggggtcttctgcttcttacagctagctagcccagagctccaacaagcattacatattcagcgcctatccgagcaaactgccttgaagagattaaatgcattaagttacatgaaaaggcaaatcatgaatcctttgtgtggaattatattttcccggaaaatgttggagggtactgccttgggaacagagcaganacaacttctacgcactagtgctcagtgccagcagcagcttagtaaaattcttgatgactcagatcttgatagtatcata

SEQ ID NO: 8954 - DNA, 377 bp, Glycine max
agcttgttaatccatggaagctcctaatatctcccacactatttggggtgggtcattcttggatggcctcgattttctcaagttccacttggaacccatttctaccaactacaaaacctaataaaactatattatctacacaaaaggtacacttctctatatttgcatagagggtgtttttcctaaggattgaaagaacttgcctgagatgtcctaagtgatcatctacgctcctactgtacactaaaatatcatcaaaataaacaactacaaatctacctatgaaatcccttaagacataatgcataagcctcataaaggtgcttggtgcattagtgagctcaaaaggcatcactagccattcatacacaacaaac

SEQ ID NO: 8955 - DNA, 454 bp, Glycine max
  unsure (1)..(454): unsure at all n locations
actcagctatgctganatatttacatagacctcctcaacctcagcagcaaaatcaaccacagcagagaaattatgacctttccagcaacagatacaaccctggatggaggaatcaccctaacctctgatggtccagccctcagcaacaacaacagtagcctgctccttccttccaaaatgctgctggcccaagcagaccatacattcctccaccaatccaacaacagcaacaaccccagaaacagccaacagttgaggcccctccacaaccttccctcgaagaacttgtgaggcaaatgactttgcagaacatgcagtttcagcaagagaccagagcctccattcagagcttaaccaatcagatgggacaattagctacccaattgaatcaacaacagtcccagaattctgacaagctgccttctcaagctgtccaaaatcccaaaaatgtcag

SEQ ID NO: 8956 - DNA, 380 bp, Glycine max
agcttctatagaagggtcgttcctaatttctctacaatcgcatcacctctcaatgagctggtgaagaagaatgtggcatttacctgaggtgaaaaacaagagaaagctcttgctttgctcaaagaaaagcttactaaggcacctgttctagctcttcctgacttttctaaaacttttgagctaaaatgtgatgcctctggagtgggagttggagctgtattgttacaaggtgggcaccctattgcttattttagtgaaaaaattcatagtgccacccttaactaccccacctatgataaagagatttatgccttaataagagccctccaaacttgggaacattaccttgtacccaatgaatttgtcattcctagtgatca

SEQ ID NO: 8957 - DNA, 458 bp, Glycine max
tctttgagaaaacttccttgagaagctagagattatctacacacacccctctcataactaagctcacctctttgagaagcttccttaagagattcctaaagaagctagagcttagctacacatacctctctaataggtaagctcacctccttgagatgagaagctagaacttagctacacaccccctataataactaagctcacccccatgacaaaaaacatgaaaatacaaaaaaaagtccttactacaaagactactcaaaatgccccgaaatacaagactaaaaccctatactactagaatggccaaaatacaagcccaaacgaaggaaaaacctattctaatatttacaaagacaagcgggctcatacttagcccatgggctcgaaatctaccctaaggctcatgagaacccttgggccttccctcggatctctagcccaatctacttggagtc

SEQ ID NO: 8958 - DNA, 350 bp, Glycine max
agctttgaaagattggctaagactttgttataacattttcacttaaacaatgaaggaaagctggagttgctgcacatgatgtccaacggtatgtcaaataataagatcgggctgcacactgcacaaggcaagataaagtgtctaatgaagaatagaagctgcacgattcacgatgtcagatataatgtccatgacatcctgcctgataatactggaattgctaaaagcattgaatcagcaggatccacgatggcggatacaatgtccatgacatcctgcccgaaaatactggagttgctaaaagcattgacgttgcaagatgtccgatgaccgatactatgtccaggaca

SEQ ID NO: 8959 - DNA, 423 bp, Glycine max
  unsure (1)..(423): unsure at all n locations
tcacctagnttcatcttccgtacgttgaacagtgatcaatataatacacgtcatcacgtaattacacaactggtcttcagaactgggaattaagttgctagcttttatatgtaggggtgcttataagtggtttttgtaggtggaaatgtaccatcatcaccaacaccaaggaaaaaacattcattcttctttcagaatgccaatcccctctgagaggcacatgttccttcaagcaggaaatggttctggtgattctggactagtgctctcaactgatgctaagcctatattgaaatggacaccagatcttcatgcaagggttatagaagcagtcaaccagttagggggagctgacagtgagtactcacattagcttttggatcatcagatgtggaagaacatagaaattgagttcactaatgc

SEQ ID NO: 8960 - DNA, 394 bp, Glycine max
agcttgagacattctcgcaaaggtttatgctgggtcagaaaggttgaagagagtcaacatgcaaaccttgaagcaacaattcgagctactacagatgaatgagaaagaatgtataacaaaatacctaaatcgtgtgctgggcctgtcaaatcatatgatggcttgtggtgaaaacatgaaggattaagatcttgtagaaaaggttttaagaaccttgagctcaagatctgattatgtggttgctgcaatagaagaatctaaggatttcatagaaatgaaattgaatgagcttcaatgctctcttgaagcacatgagcaaagaatcaaagaaaaggaaacagataggtcatctgaacatgccttactcactcagagtggtagaagatacaaattg

SEQ ID NO: 8961 - DNA, 450 bp, Glycine max
  unsure (1)..(450): unsure at all n locations
tgagacacctanaaagaaattgacaaaaactaatatagcatactgaaagctaaaatgaagttaatcatttagtatcaaccttataatggtaaacaagaataaactttgatacccatcaaaatgctcaaccaagtacatacttcttatactcattgttagaagcaagtattatgtcaaggtgcattgtaaattcttaggttcaaatagttactacttgtgatgtacatgacatattgagttagaaacatcattttaaagaaaatcttatatattcatactgattatagttatgatttataagtttgcatattcaaatacaattttttattaataaaatatattntttatattaagtattttagaataattataatttctctaaaatatttatcgatgataatttagatattaatgttatatcatgtaagatatntaatctctgtaatatac

SEQ ID NO: 8962 - DNA, 363 bp, Glycine max
gtaacagcaattaccttcttttatcttatcattctcttcgtgtggattcaatctcaacagttgcatttcgtgttcctgtgaccttatgtttccattctctgcttaaacatctcaatgctgtatttaccagatcttcatttggaaaaattttccctaaagatgcatgatgatttactatgtgtgtgaacctcttttgcatgtcttatatactttcatttgcattcatcctagataggtcatattcatgagttaatgtgtatattctagatcttttaacatctggtgtgccttcatgtgttacttgtagggtatcccacatatcttttgcactatgacaattcgatagcctaaagtactcataca

SEQ ID NO: 8963 - DNA, 316 bp, Glycine max
ggcattggatagaagactccacgacgattgagtcagagatgcaagagaaggacctatggttctcatgagccttagggtagatttcaggaccatgggctaagtatgagcccacttatctttgtacatattagattaaggtttcattatttttgggccttgtatttagggctctagaatgtaggtagggtaccctagaaatgtaaaatttttcagcccttgtattttagggaacctagactagtttttgtattaggggtagttatataatttcacatgcattaagtgaatatttgatgtgtgtgttgggaaataaatt

SEQ ID NO: 8964 - DNA, 455 bp, Glycine max
tcctgatcatgagggagctaacaaaaattttcatgcaggtggaccttcttctagtagttctgacttgcagcagcctcctatccatcttccattttcacctagagcaattccaaacaaaaaaatggaagaagtggaaaaggagatcctggagactttcaggaaagtagagatgaacatacctctgcttgatgccatcaagcagattccaagatatgccaagtttctaaaggagttgtgcacccacaaaaggaagctcaaaggcaatgaaaggattagcatgggcagaaatgtgtcagcattgataggtaaatctgttcctcacattcctgagaaatgtaaggacctatgtactttctgtataccttgcattattgggaacaacaaatttgagaatgccatactagatctaggagcatcagttaatgtcatgcctctgtccatgtttaattctttat

SEQ ID NO: 8965 - DNA, 448 bp, Glycine max
  unsure (1)..(448): unsure at all n locations
tctntanaaggatatagacttgtgcttaaccagccttgtttagaggcatttgaggagttgaggaggaggcttaccacttctctcatcatgcaaccactagattgngagctttcctttgagttcatgtgtgatgcctcaaactatgcacttggggttatgttgataaattatcacatgtcattgcttatgccttacgcgctntagatgcaacccaagttaactacaccactatctagaaggagctttcaaccattgtttttgctttagataaattcatatcttatttgctttgctcccatattactgtctttactgaccatatagctttgaggtacatgttgaagaagcctgatgctaaacctagattgatcaggtggatgcttcttctttaggagtttcatattgagattaaagacatgagcggtgtagaaaacttgngttgtgatca

SEQ ID NO: 8966 - DNA, 411 bp, Glycine max
  unsure (1)..(411): unsure at all n locations
tgtcgagatggaaggctcccacgtggtgcanaacatgtacgactctcttgatgtgcatgtangggaatgtttttctgtgcttgttacagcggacaaggaaccaaaggattactacatggtggcttccacacgtttcaccaagactgttctaatangtaaaggtatcattcgttacacaaatggtaagggtccttgctcacccgacatncccccggctccagtgggtttgggcttggtctcttaaccaattccataccttccgttggaatctcaccgctagtgcccgcaggcccaaccctcagggttcctacaaatatggtcaaatcaacattactcgtactatcaagctcgttaactcaattagtaagtctaacggaagcttcgttatgcccttaatggtgtctcacatgt

SEQ ID NO: 8967 - DNA, 446 bp, Glycine max
tgtaaggctttgggtgggaaatgatagtgagacttaacttatataccaaccttatgctacaacaattgcagcatgacccactatctacaatgagataacaatttttgtttaaaaccttgcatcttgtatgaaagatgttctctctttgggtttggtttacgtcacaagattgaatcccatggaaccttctcaccattagaagatcaccttcttcataagggtaaacctcttcaatatgctcatcacccttggcttcaccctcacttccacttgaggaaggagaagaggtagcctcctcttggctactatagatgccttgacccctcatcatcatggttttctatgtggggcattaagaagcaatgtggcctttcctaatacatttgaagcacttactgctactagttctatcttgtgaactagcctttggagtgatttcctctata

SEQ ID NO: 8968 - DNA, 394 bp, Glycine max
agcttgcttctacattaaatggacctagtatgacacaactcaaaaacatataaggtttagtcaaacacatttctggaggaagattgtacgggataacaatgattgaccaataagaataaggtaaagatgatgcttgaatatacagattaaatccatctgtgcataaaccgagtcacacatttcatggatcatcaacaaaatctgcatgtacccgatcaaagtgcttccatgcttcaccatcaaatggatggcgtaacatgcaagaagatcttctattctcataacaccatgacatttggcttgcagtttgtattcatgtaaatagtctctgcaaccttggtattataggaaaataaaacatcgcctttactagaaattgatttttgttgcttgt

SEQ ID NO: 8969 - DNA, 401 bp, Glycine max
  unsure (1)..(401): unsure at all n locations
acacggatatctgattgagtcatgtaatatttcgagacgctcgaaattgaattcggaagctctgagcaaattcaaacgacaataacttnttactcggatgtcttattgaatcccataatatatcgacaagctcgaatagaatcttgatgctctgagcaaattcaaacgacaataactttttactcggatgtctgattgagtcctgtaatatatccacacgcttcaaattgaataccggagctctgagcaaaatccaaagagacaaacactttaactcggatgtcggatggagtccgtgaatatatggacacgctcaaaattgaatcccgaagctctgagcaaattcaaacgacaataactttntactcggatgtctgatggaatctccgaatatatccaca

SEQ ID NO: 8970 - DNA, 414 bp, Glycine max
agcttaacaaaaggcatgcgaagtgggtggaattcctagagcaattcccttatgttatcaaacataaaaagggaaaaggtaatattgtagccgatgctctttctcggcgtcatgcattactttctatgcttgaaacaaaattgattggtcttgaatgtttgaaaagcatgtatgaaaatgatgaaacttttggagaaatttttaaaaattgtgaaaaattttcagaaaatggtttctttagacatgaaggctttcttttcaaagaaaacaaattgtgtgtgcctaaatgttctactagaaattttcttgtttgtgaagcacatgaaggaggtttaatggggcattttggggtccaaaagactctagaaacattacaagaacatttttattggcctcatatgaaaaaggatgtgc

SEQ ID NO: 8971 - DNA, 390 bp, Glycine max
agcttccatcaagaaccctagggccttatcttgcatctctggcccaatcttcttggagtcttctatctaatgaccttggggggtaggattgcatcaccatatgcccacctacaagaatgtgggtcaaaattcttcgcgataagaggatttgagaagttgagatagcgatcaaatcggtgataactttctccacaagtttctatagcactatttacgttgcctttcaaatcaattgaccatagatgagtcagacccttctgcgcaacaatatcatcatccaaaaacagcactttgttgagctttggaaagatctatggcaaatagaactggaggtggttcaagatagacaaatactttggatacatattatgatactcagtatacatgaga

SEQ ID NO: 8972 - DNA, 397 bp, Glycine max
agcttgaagatgtgtagcccaccatcttttttaggaaaatactggtaatgtgtctactatcattgtcatcatttctttctccgtcattgaggagccacttaagctgccaggtctctccacctttgggcatattctttagaaagattcgtgccccccttttgcacatgttctgtacttgcatcctatccgaagacattatactgacactgcctaacgaaggcaaccactatgtccttccaagaatggactcgggaaggttccaagttagtgtaccatgtaacagctaccccagtaagactttcttggaacgaatgtatcagcaattcctcatcttttgcgtatgcccacatcttccgataatacatcattagatggctcctggggcaggtagtcccct

SEQ ID NO: 8973 - DNA, 287 bp, Glycine max
caatgatattcttcatgcctcttaagtgcagatgtccaaatctttgatgccatattttgactatatcttctatggagaatatacactgtgtgaggagtaactggctttcttgagcgtgtccataagtaacagttgtcctttgatctgctgcccttcattacgacttcactcttctcatttgtcaccaagcattctgactttgtgaagtttacattgaatacttcatcacacaactgactgatgctgatcaagttcgcagtcagtcccttcaccagcagtactttgtt

SEQ ID NO: 8974 - DNA, 453 bp, Glycine max
  unsure (1)..(453): unsure at all n locations
tcccgccaatggtatntgaggtttaatgatactattgtttccttcggatttaaggaaaatactgttgatcaatgtatatatctgaaggtcaatgggagtaagattatttttccaattatgtgtattgatgatatcttgcttgcaactaacgatcttggtcttcttcatgagactaagaaatttctctctagaaactctgaagtgaaagatatgggtgaggtaagctatgtgatagggatagaaatattctgtaatagatcacaaggattgttaggcttacctcagaaagcatatatcaataaaatactagtgaaattcaagatggaaaggtgtttaacatcacctgttctaatttagaagggagacaaatttagtctcacacaatgtcatagaaatgatatggaacgaaaacaaatggaagctattttgtatgcatcagttgttgttgcatct

SEQ ID NO: 8975 - DNA, 434 bp, Glycine max
  unsure (1)..(434): unsure at all n locations
ggctaacccatggaagctcctaatatctcccacactntntggggtgggccattcttggatggccttgattttctcaggttccacttggaccccatttctaccaactacaaaacctaagaaaactatattatctacacaaaaggtacacttctctatatttgcatagagggtgtttttcctaaggactgaaagaacttgtctgagatgtcctaagtgatcatctaggctcctactatacactaaaatatcatcaaaataaacaactacaaatctacctatgaaatcccttaagacatgatgcataagcctcataaaggtgcttggtgcattagtgagcccaaaaggcatcactagctattcatacaaaccaaacttggtcttgaaagcagttntccactcatcaccctttttcatcctgatttggtgataaccac

SEQ ID NO: 8976 - DNA, 410 bp, Glycine max
  unsure (1)..(410): unsure at all n locations
agcttcaagaaaaagatggcctcagcaaattccttatttccagaagggaattctatcaatagacctccaatctttaatggagagggttaccactactggaaaacccgaatgcaaatttttattgaggcaatagatctaaatatttgggaagccatagaaatagggccttatatacccaccacagtagaaagagttacaatagatggtagttcatcaagtgaaagcataactatagaaaaacctatagatagatggtctgaagaggatagaaaacgagtacaatacaacttaaaagccaaaaacataataacatctgccctgngaatggatgaatatttcagggtttcaaattgtaagagtgctaaggaaatgtgggacactcttcgataacacatgaaggaactacaaat

SEQ ID NO: 8977 - DNA, 439 bp, Glycine max
  unsure (1)..(439): unsure at all n locations
tgtgttntaaagtttacaacttacaagcgcgactatattaatctcttaaaaaatttagttgctaaataaatttcccaaaaacttaaaagggcatcacaataattttacaaacaatttcttaataattaaaataccatcaaattcatccttgatgcaagctccattggagcttgtaggcctaggatcttcttcatcaatggattcctttgcttcttggaagataaatggcagtggaatggagaaggaagagagagaggagacgccacttcaaggagaagatgagtctagaagaagctcaccaccatangaggccatggataagagcttggaggaagaaggagatgaatgaatggagagggagagaagagcacgatattttgtgctcaaaaagagctctgaaatctgaagttaatattcaaatgaatcaaagtgaaaaaaa

SEQ ID NO: 8978 - DNA, 417 bp, Glycine max
agcttgaactaaagattataagatggtactgaaacctatcttagcgattgttgttgggcttattgagtcaatcgccatcgggttgttattgaaccactagtagatgtcaagtcatgcaaacttcatacttgaaatgcccaatcctcaatgtgtaggggtgtattgaagatcccacattgattaggaatatggccaaattaaagtatatatgtcagggaaaccttcaccttacatgctagttttgtgggatttagttaggcttgaatctaaaatctaagatgttattagaacttatcatatcaatgttaagcctattaggccatctaatatcgggttgttatcaaaccacttgtagatgtccaatcccataaacttgggctcaagatatccaatcctacgtccgtgggggtatgttgg

SEQ ID NO: 8979 - DNA, 454 bp, Glycine max
  unsure (1)..(454): unsure at all n locations
tcttacatagtccgcctntgcttgaccttctttatgcttaataacagaaacattaggcataggcaaaagatcaagaggagttagtgggttaaaaccataaacaacttcaaaaggagaacaattagtggtgctatgaacagctctattgtaagcaaattcaacatggggtaaacaagcttcccaagtgtttaagttcttcctcaaaactgtcctaagcaaagttcccaaagtcctattaacaacttccgtttgcccatcggtttgtgggtgacaagtggttgaaaataacaatttagtgcccaacttgctccacaaagtcctccaaaaatggcttangaacttagagtccctatcactaacaatgctccttggcaaaccatggagtctcacaatctccttgaaaaacaaatcagccacatgggaagcatcatcaactntcttacatggaataaaa

SEQ ID NO: 8980 - DNA, 451 bp, Glycine max
ctggtgtggctggcacagcctcacctagactcaatattgaccagctctagggttgggaaagacaggtgggttgaaggttggtagtgaaaaacaggtgagcatcttttaacatagaataatttgctttctatttttttgcctgctcagttccattttaaaattattggttgagccttgaccctagatattattattgcagaggttataacattaacagaatttcaccctacacattgtaatacgttggcatatagcagttcaaagggttcaattcatctagttgacttggaacaatcagcattatgtgattctcatgctaaactgtaagtacattcttttgttgtaatcttgttggttcctgacaaataagtatcccattcctcccataaggctttcagaatttaacaaatgtttaaacagttgacagaatttctggataggtcatctgttt

SEQ ID NO: 8981 - DNA, 407 bp, Glycine max
agcttctgttcctgagaaactggttcccataagacaacagggagtgaagattgctgaaaaccctagccttgcaacaagtcctagggaagtagacacggagatggacaagaaaatccgcagtattgtgagtagcattctgaaagatgcttctgtgcctgatgctgagaaagatgttccaacatcgtccaccccgaatgtttctgtgcctgatgttgagaaagatgttccaacatcttccggtccaaatgctgaagtactctcttcccccagcaaagagagatcaacagaggaagatgatcaagcgacaaaggagacccctgcaccaagggcaccagaaactgttccaggtgacctcattgacctggaagtagtagaaattgatgaagaacccattgccacagttggca

SEQ ID NO: 8982 - DNA, 415 bp, Glycine max
agcttcaaccctttcccaaaactcggcaagggacgcgaaatgttattcccactcagatccaacaatgtcaaagatttcaaactagtccaattactcggtatcgtaccactaatatcattacctcccaaccttatctcaacaagagaatctaacttggcaacagaaggactcaaagtcccactaagattaaacttttccaaaataatcatgtccacctttccgtccccattgcaccttatccccaaccatggcccgtgacaagggtcatttccactccaagaatcaaccaaaatccaaggataccccaaccctccaagaaactccaacaacaccatcacttcaaaagcacacataaccccggcctttgcctcacaaaattcattgttctcataactcactttactcgctgcaaatt

SEQ ID NO: 8983 - DNA, 420 bp, Glycine max
  unsure (1)..(420): unsure at all n locations
agcttatcaataattaaataatcttatcacatgagtaataaatatacatgtgttagtcaacattaatgaaatacatacacaatcaaagtttgaaattggtcatagattaaaatcactggatttttaaatatgagagataaaatatttcaattaaaaaataagagactaaaattacatattntagaaaatagagaaacaaaaattacattttaaccttttaaaaatcacaatctactaaatatctaatcaactatctgtaatggataataataattaatagctaaaaatgtaaactttacattatttggttaaaataaatcaattttttaacagtaaataatctctaacgcaaatgttaagaaaaaattacatatataagatatttatganaattcacaaataatgttcacatgtgcatga

SEQ ID NO: 8984 - DNA, 449 bp, Glycine max
  unsure (1)..(449): unsure at all n locations
ataccacctgtcatttgcatctgcatctctgtggatcagataatggaacttcatcttcagtcagctaaacccctgagtccatagggatccccttcttcgagtacataacctcaatccctaaaaagtacttcaaggcccccaagtctctactctgaaactgagtttgaagaatactcttcaagttgtcagtacctttattatcacttcttgtaatcacaatatcatcaacatacaccacaagtaagatgctgccaaggttagtatttctataaaatacagtatgatcactttgactcagcttcaatccatatgcaatgaccacaccactaaatctcccagaccaagatctangtgattgcatcaagccatataacaacttccttaagcggcataccatgccaaactgccncatagcaacaaacacaggtgattggtatatatacacctct

SEQ ID NO: 8985 - DNA, 364 bp, Glycine max
taaaccatatatattggagacacgcctatacgggttttgaaagcagtactgtcagcccatattgcatcatccatcttgcttgacacaatccttccgagtggaggccataattatctccacgaacttctttagttccctgttggagacaatcagcattgaccgattagcttgggggtgatattttgaggctactttgtgtgtgacatgacaatggcctaacaccttttgcaaataactgttgcaaaagtgagagcctcatcactgattacgctactttgtgtgtgacatgataatggcctaccaccttctacatatgactattgacaaagtgagagccctatcattgaatatgacccttggcacc

SEQ ID NO: 8986 - DNA, 374 bp, Glycine max
gagcccttacaactttattcttaacatctatggaaatcttcttattgcttatttgtcgtctataaaattatggagactgcatctgctattcctaatacgtgtgtgtatttgactagatgaaaccaaaaggaagttgctatattggcgaaaacgtttccacattatcagtggcattacttgaggacatctttatcttcatcaagactctatgttaaggattattcacagagatctaaaaactagcaatattttactagatgccaatttggatcccaatatatcaaactttggcctggctcgatcattcttccgagatcatgtggctggaacatagttagcttctatctaattatgactctttgatattgctgtat

SEQ ID NO: 8987 - DNA, 432 bp, Glycine max
  unsure (1)..(432): unsure at all n locations
ctgtagggaattcaaacgacaataactntntactcggatgtccgattgaatcgggtaatatatcgagacgctcaataatgagactagaagctctgagcaaatttaaatgacaataactntatacacggatgtccggttgagtcccgtaatatatcgagacgctccaaattgaaaacggaagactctagaaaattcaaacgacaataactttttactcggatgcgcgacagagtgtcgtaatttatcgagagatgctccaaattgaaaacggaagctcgtatcaaattcaaacgacaataactntttactcggatgtctgattgagtcccgtaatatatcgagacgctcaaaatttagatccaaagctctgagaaaattgaattgacaataactttatacacggatgctcggtagagtcctgttatatatcga

SEQ ID NO: 8988 - DNA, 419 bp, Glycine max
agcttctagtctcaattgtgagcgtctcgatatattacccgattcaatcggacatccgagtaaaaagttattgtcgtttgaattccctacgagcttcccttttcaatttggagcgtcttgatctattacaggactcaaccggacatccgtgtaaaaagttattgtcaattcaattttctcagagcttcggatctaaattttgagcgtctcgatatattacgggactctatcagacatccgggtaaaaagttaatgtcgtttgaatttgatacgagcttccgtattcaatttggagcatctctcgataaattacaacactctgtcgggcatccaagtaaaaacttattgtcgtgtgaattttctaagagtttccgttttcaatgtggagcgtctcgatatattacgggactcaaccgaac

SEQ ID NO: 8989 - DNA, 384 bp, Glycine max
cgaatcggacatccgtgtgaaaagttatgaccatgtgaatttctcaagagcttccgctggtcaagttcgatcctctcgacatattatgcacccgaatcggacatctgtgtgaaaagtcatgatcatatgaatctctcgagagtttccgatgttaaatttcgagcgtatcgatatatgataaccctgaatcggacctcagtctgaaaagttatgaccatttgaatttgacgagagctttcgctgatcaacttcgagtgtcactgtatgtgatgcgccaaaattggacatccgagttaaatgttatgaccattagaatttctcaagagctatccttgttgaattgtgagcgtttctatatgagatttgcctgaatcggacatccgt

SEQ ID NO: 8990 - DNA, 420 bp, Glycine max
agcttcagtagtagcaccaaaaattatgtcatcaacataaatttacacaagcaacaacttattgtttgatatcttgataaacaatgttttaacaacttgacctgttacaaaagattgtctaattaggaaattgctcaatctttcataccaagatcttggtacttgttttaaaccatacagtgcctttttcaacttataaacatgattaggatgttcgaagtctaaagtccttttcaactagatgattaagattatgcatgtttacatgtgcagttgtatgatgccatagccaagaatcattaatcttacttaccaagtaaggctaatgaaatgatgcatgttcaatattcaacatataaatattacctattcttttacctatgtgaacaacctcactagtttttgcttcataaatgaaac

SEQ ID NO: 8991 - DNA, 410 bp, Glycine max
agcttgagacattcattcataggggactgttaagagatgggatgttcacattcaaggttggatgatgaagaggcagttcggctttgtaaagacagaaagaagtttatcagacaagctgttgaacaaagaactcaatttgccacgggacacatagcatacatagaatctcttaaaagggtgtcagctgcacttcgcaattacattgaaggcgatgagcctcgcgagttctcattagacacagtcatcaccccacctttcacgcctgtgaagaggaaaactggctcatgattcattcccatatcagcaaaaccctttgctacaacaggagcaattgagtttgggatcggaccacactctactttgaaagtgaattaccttaggcctggtggtaacccaacaatttcagttga

SEQ ID NO: 8992 - DNA, 444 bp, Glycine max
  unsure (1)..(444): unsure at all n locations
tactttaagtatatctagaatttccttcttggcaattcttttatattgcttgatggcagattcccattcttgtatactttctccaaccaagtgggaacctattacttccaacgcccatggaagaccagaagcataagttactacgcgatgcaagacctccacgtaagttggatcagctntttcttttttaaaagcttgccatgtaagcaactgaagagcatggttctcatccaattccttcatttcatatgttttattaacttcatgagatgctagcaattgtttgtcccgagttgtgatgatgattttgctgccgcgaccaaaccaatcaggtcttccagcaattgcttgcaattggtcgtgtgtgtcaacatcatctataatcaagagaaccttctttcccttgagcctacactgtatgaatgaaattcctgttgcttactt

SEQ ID NO: 8993 - DNA, 415 bp, Glycine max
agcttgcccaaaataaacagttttgccactagagagcaagtataattggtcaaatagctcaaacacttcactgcttggctgatgaatagaggctatcacggttcttccatcccttgccaaggcacgtagtgtctgcgtcacaaagaaagctgaagcactgccacaaaagacaaaaatccaaaaaaaatcaagacatatgttcagcaaaaagagatgttcctactttacaaatatgaacaactggggacataacaaacattctccaacaaaaatactattatttatagaatattgtaatctccctttagaaggtgcacacaaattgatgttgtgactatgtagaacaacaaaaagacgaagacataacttccaaattcattttatgaaatcgtatttggttgtacaatttttttat

SEQ ID NO: 8994 - DNA, 418 bp, Glycine max
agcttgtttcaatccatagatggacttattaagcttgcagactaagtgctcaccaacactagataagaatccctcaggttgtttcatgtaaacctcttcttctagatcaccattcaggaacgccattttcacatccatttgatgcaactcaagatcaaaatgagctactaatgccaaaattactcgaagagagtctttcttagatacaggggaaaaggtctctctgtaatcgattccttctctttgagtgaatcctttagcaacaagtcttgccttatgtctctcaatgttgccttctaagtctttctttgtttcgaagacccatctgcatccgatggcttttacaccaacagacaactcaacgagatcccaaacttggttagatgccatagaatccatctcatccctcatagcattg

SEQ ID NO: 8995 - DNA, 449 bp, Glycine max
tatgagatatccatgaagcttgcacaccatatcaatgaataactgagctaccttatgtgctctgaaatgggtagaaagcatgccgaaatgggactcccttgagaatcgatccacaactaataaaaccacagtagctccttggaagttaggcaaccctgtaatgaaatccaaggccacgtcctcccacagaatagatagagggggaattggttgaagaatccttgaatgttatttagggatatactttgtaagttgacaatcagaacaccttagtgatgtagcttctatggagcttgtaagccttggatcttcttcatcaatgaagtcatttgcttcttgaagtttgatggtagcggaatggagaaggagaaatatgattggagacgccacttcaagaagaagatgagtctagaagaagctcaccaccataggaagccatggataagagc

SEQ ID NO: 8996 - DNA, 435 bp, Glycine max
  unsure (1)..(435): unsure at all n locations
taacaagtggaatcagaggaaagtctctatggcaggcagaattactttaattaattctgttttgacagccttgcctttattttatctgtctttcttcaaagctccttcagcagtgttagtgaggctgacttcaatccaaaggaattttttgtggggaggaggtgctgaagggaaaaagatcgcttggatggcttgggatcatatatgtactcctagaaatcaaggaggtttgggtatcaaagctatcaaggatcttaatagagcccttcttattaaatggaagtggctgatgttccaccaatcagaccaattgtggtgcagaatcctcatctcanaatacaaaggatggagagggttggaagagaattcccacaggcagtctcattccttttggtggtcggaattgaaggctgttttactccatagcagcatgga

SEQ ID NO: 8997 - DNA, 341 bp, Glycine max
agcttgtaatcgattacacagtaaggaatttttcaaaataactcccaagagtcacaactgttcaggaagtttttgaatggccatcaaaggcctttaaagacttgggatacgaaattccttagaggttttctgaataacattttcttatcctctcaaaaccaaattgtcttatcattctcaaaatattccttggtcaaaacacttgcaaattcaataaggaatcttgatcgatcttcaattgtaatatccttctcttaaagagagaaaattcttcttcttcttattcaaacagatctgtataagagaccgaaagtctcttcagttgtaaaggatatttaaca

SEQ ID NO: 8998 - DNA, 427 bp, Glycine max
taacataaggcatgcgaagagggtggaattcctatagcaattcccttatgttatcaaacataaaaagggaaaaggtaatattgtagccgatgctctttctcggcgtcatgcattactttctatgcttgaaacaaaattgattggtcttgaatgtttgaaaagcatgtatgaaaatgatgaaacttttggagaaatttttaaaaattgtgaaaaattttcagaagatggtttctttagacatgaaggctttcttttcaaagaaaacaaattgtgtgtgcctaaatgttctactagaaatttgcttgtttgtgaagcacttgaaggaggtttaatggggcattttggggtccaaaagactctagaaacattacaagaacatttttattggcctcgtatgaaaaaggatgtgcagaaatcttgtaacatt

SEQ ID NO: 8999 - DNA, 384 bp, Glycine max
  unsure (1)..(384): unsure at all n locations
ctngagcaattcacatggtaataacttttcactcggatatccgattcaggcacataatatatcgagacgctcgacactgaaaatccgaagctattgagcaattcaaatggtcataactattaactctgaggtccgattgacgtgcataatatatcgatacgctcgaaattgaataatggaagctctatgatcaattcagatggtcataactattcactcggatgttccaataccgtgcataatatatcgagacgctcgaaattgaacaacggaagctcttgatcaatacaaatggtcataactttatactcggatgtcggacttatgcgcataatatatgcatactctctatatgtacaacggaacctcttgatcaattcaaat

SEQ ID NO: 9000 - DNA, 289 bp, Glycine max
  unsure (1)..(289): unsure at all n locations
agctttgatgtaacatttggagaggttaatgtaacaacgagatgatgcgctccatgagaggttggatcaaatggagaatatagaccatatgaattgctcaagagcttccattgttcagttgcgagcgactagatatataatgcgcctcaatcggacctccgagttaaaagttatgaccatttgaaatgctcagagcttccattgttcacatttgagcgcttcgatatattatgcacctgaatcggatctgcgagtgacgacttatgaccatntgaattgctcaagagct

SEQ ID NO: 9001 - DNA, 399 bp, Glycine max
agcttttgagcaattcattatggtcatatttagtcactgggaggtccgattcatgcacataatttatcgagacgctctaaattgaacaacggaagctctcagaaaatttaaatgctcataacttttaactcggaggtccgattcaggcggataatatatcgagacgctccaaattgaacaatggaagctgttgagcaattcaaatggtcataaatagtcactcggaggtccgattcaggcacataatatatcgagacgctcgaaattgaacaacggaagctctcaagaaattcaaatggtcataacttttaactcggaggtccgattcaggcgcataatatatcgagacgatcgaaattgaacaacggaatatctcaagcaattcaaatggtcataact

SEQ ID NO: 9002 - DNA, 399 bp, Glycine max
agcttcggtattcaatttcgagcgtctctatatattaagagacttaatcagacatccgagtaaaaagttattgtcgtttgaatttgctgagagcttcagcattcaatttcgagtgtttcgatatattctgggactcaatcggacatccgagtaaaaagatattgtcgtttgaatttgctcagagcttcagtattcaatttcaagcgtgtcgatatattacgcgactcaatcaaacatccgagttaaaagttattgtcgtttgaatttgctcagagcatcaacattcaatttcgagcgtgtcgatatattatggggctcaatcagacatccgagttaaaagttattgtcgtttgaatttgctcagagcctcagcattcaattttcagcgtctcgatatat

SEQ ID NO: 9003 - DNA, 386 bp, Glycine max
  unsure (1)..(386): unsure at all n locations
agctntaacactcaactttcatggaatagtcgtttaaagataacagagaaagtaaagcttcaaggtaataataagataaagataaaatccagaacccctcacttgcccttctgttaactccaaaagttgtggcaacaactcttcatccctcattctctcaattcgtttcgatattgaatcaacagaatatatagccactgttaagcgtgaatgcagatccttcacaactgaccgggtcttgtcaatcacatgagtgccttgatctttagcaaattgatgcctaagctggtgacattttcggccatagtccttccttatggattcactagcctacagatagccgaacaggaggtcaaaatgatcgatgattgataacacaaaatttg

SEQ ID NO: 9004 - DNA, 406 bp, Glycine max
acagctgattaactacaaccaatattggtgatttatctaagcaactaaaagaagaactatcgtggggatgctctatatgcaaccgttgatggatagtttgaggacttgagaggaggagacactgccttgctttcttgacccccaagctctctgtcaagcaacttagctgcccttggatctgttagtagtgtcttctggaaggactgtgagaagccagttgcaatgatagtcacatgaatctccccattgtagcgatcatcaacaacggcaccaaatataatattggcagaagggtcggctaaacttgtcaccacctacagcagttatgaagttttgaaaacaggatacaaatgttcacaacaaattcataagatcaaaagaatgctgaaatgttccttctgacaat

SEQ ID NO: 9005 - DNA, 444 bp, Glycine max
  unsure (1)..(444): unsure at all n locations
cgtgacctatgaaactcagcttcntgagagaacttccttgagaagctagagattatctacacacacccctctcataactaagctcacctctntgagaagcttccttaagagattcctaaagaagctagagcttagctacacatacctctctaataggtaagctcacctccttgagatgagaagctagaacttagctacacaccccctataataactaagctcacccccatgacaaaaaacatgaaaatacaaaaaaaagtccttactacaaagactactcaaaatgccccgaaatacaagactaaaaccctatactactagaatggccaaaatacaagcccaaacgaaggaaaaacctattctaatatttacaaagacaagcgggctcatacttagcccatgggctcgaaatctaccctaaggctcatgagaacccttgggcct

SEQ ID NO: 9006 - DNA, 412 bp, Glycine max
  unsure (1)..(412): unsure at all n locations
agctntaaaagattggctaagattntgttaaaacataagcacttagacaatgaaggaaagctggagttgctgcacatgatgtccaacgttatgtcaaagaataagatcgggctgcacaatgcacaaggcaagataaagtgtcaaatgaagaattgaagctgcaggattcacgatgtcggatataatgtccaggacatcctgcctgaaaatactggaattgctaaaagcattgaagctgcaggatccacgatgtcggatacaatgtccaggacatcctgcccgaaaatactggagttgctaaaagcattgaagttgcaggatccacgatgtcggatacgatgtccaggacatcttgcccgaaaatactggacatataaatctgttatatctttaacagattattgtgcagtta

SEQ ID NO: 9007 - DNA, 439 bp, Glycine max
gtgacactatcaatctcagctttgcaagctggaatcatttatcctatctccgacagccaatgggtgagtcccatccaggtagtcctgaagaaaaccggcctcactgtgataaaaaatgagaaagaggagctgattcctactcgggtgcagaacagttggagagtttgcatcgactataggaggctgaaccaggttaccaaaaaggaccattttcccttgccattcattgaccagatgcttgaacgcctggcaggtaaatctcactactatttccttagactttttctaaacaacattgtctgatcctctcaaaaccaaattgtcttatcactctcaaaatattccttggccaaaacacttgcaaattaaataaggaatcttgatcgatcttcaattgtaatatccttctcttaaagagagaaaaatcttctttttctta

SEQ ID NO: 9008 - DNA, 406 bp, Glycine max
  unsure (1)..(406): unsure at all n locations
tctaaactntatacaagaatgaagctctgataccacttgttggacaagtggccttagatatcttaagaaggggggggggttgaattaagatattacaaactatttccccaattaaaaattctatttaactttctattcaagttataaattcccttaataatgaatttcttaaataatgattcaaatagaacaatctgaatgtgaatataaaacaataataaataaaggagttcaagggaagagaaagtgcaaactcagatttatactggttcggccacacccttgtgcctacgtccagtccccaatcagcccgcttgagagttccactatcttgtaaattccttttacaagttctaaacacacaaggacaatccttcctttgtgtttagaattctttcacaacaag

SEQ ID NO: 9009 - DNA, 411 bp, Glycine max
cgttacaaatataatcaacacgagatcccttgagagatttagtgaataagtccgcgatcattggagcggacaaaatcggtggtgacttttcctgagagcactttctctctcacaaagtgacaatcgatctctatgtgcttagtccgttcatggaataccagattagatgcaatgtaaagagcagcttgattgtcacaaataaacttagtgtcctaagtgtctccaaattgtaactgttggagaagttgcctaagcccaataatctcacatgtaactactgccatagcacggtattcagcttcggcactggatctggctactacattttgttttttgcttctccatgagatcaaatttcctccaataaaaacacaataaccaataatggaccttctgtctgacaatgagcct

SEQ ID NO: 9010 - DNA, 409 bp, Glycine max
tatgtaaaagcacttataagagaaggaaataagaagataaaaaatgaaataaacttttcataagctacaattagcttatgcataagttaaaaatcatatttttaaaaaaattatatgaaagaacttttacaaattatcttgtgcataagttgatttaatatttatttacgagaaaaaaaaaatcctatcttcaagtctcaagcatcacaaacggcatgataagtctcaatgagaatatttattaatttaaaaaataggcatttgattatgcctatctgaattgaaatttgattatatacaaattgaatgtagatacatatatatgaaatagttagaagtgtcatattcacacaataagtgaatgaaacaagatagattgatttctttgaccattacaggggaatcatgt

SEQ ID NO: 9011 - DNA, 415 bp, Glycine max
agcttagagatcttcaaaaactcttatccaagattcatgtatgaattccacgctttcggtatgtatgctcataaaaagctttcatgctcatcaatcataagagatataatgtgcatattttgcattgtaatgctttccttttactttcatctttatcatatatctgtatgttatgttctttttcttgttagtgatgctactaaagtgaaaaatggtgccataatctgttttagatatttgccaaacaaaagcaacagacagatgtggagattggagaaagagataaactcaaagatatcaaagctcataaaacaacgccaggaggaaactcatgagcatgatctattacaaatgatacttgagggcgcaaagaattgcgagggcagtgatggcctattatcacactccatctcat

SEQ ID NO: 9012 - DNA, 414 bp, Glycine max
tcacatgttttctcttattctcaaaggtgaagtaaaataatggttgaagcgtgcacaaactgacttggttgccacatgggccttgtgttgacaagccttattggatagattcttccctccctcaaggactaaagagttaagaaactagatcaccaacttccaacaagaagatggtgagtcaatatatgaggcgtgggagtgatacaagggttacttgtaagaatgccctcaacatgggttaagcaaatcattgacgattcaattcttctttgaaggactgaaccaccaaagcgtgtcaaccttagactccagagttggcaaatcattcatgagcaagccaatcaatgaatgcaagactatccttgaggttgtagctttaaaatatggtcaatgggaaaagaaaagtgataatcg

SEQ ID NO: 9013 - DNA, 400 bp, Glycine max
agcttgttagaaaaatgtaggtaaaaatattattgagcagataatgagggctggaagaattaccgaatacggtgttgatggggttcatggcgacctggttcttagtggcatcttcgatgagtctttcggtattgatgaaggcgacataaaagggtgtggtacggttgccctgatcgttggtgatgatttcaacgcagtcgtgctgccagactccaacgtaggagagaacctgtggattttagagaaaatgagtttagaaacctagggcgattcaaatcaagttcaaaacgtgttcaaacttgtgagaaacctatgagaaccactttgaatctatgagaatgacagagatgcaaagtgaatgagagctacaacggtgttgaaggagaatgaagtgtgcaac

SEQ ID NO: 9014 - DNA, 389 bp, Glycine max
agcttcatgcttaactatgtatggcaaaacttcattattgttgttcaagacatacaagtgagcttgtaacaaatcttctacacttggagtgatcacctgcagtcctcttgaacccttaccacccactctgtcatcatgccgacactcaggaagcccaataggtttagccttctctaagtattctgaaaaaaattcaatggcttcttctgcaatgtacctctcaacaatagatgcttctggacgatatagattctttgtataccctattaagatcttcatgtatcgctcaaccgggtacatccaccgtagataaacaggaccacaacatttgatgtctctgaccagatgcacaatcaagtgaatcatgatgtcaaagaaagcaaggggaa

SEQ ID NO: 9015 - DNA, 399 bp, Glycine max
  unsure (1)..(399): unsure at all n locations
agctnttcctctagttgctctattaggatttccaagcgttagagtgaaagagaagggattgaaccctcattttactatctctgtgcgagggaaatttctctctctatagacatcatatagaaaatcccaacggtggaggtgtgctaacatgaactacaaacctggcctataaatatcacaatgatccaatggttaacgagtacaagagcgtagttttacttaaacaagtttgggtgtatgcgagaaaaagaaagctacgatgcgaatgacatttctctcacctcagacatttttttcgcatattccaacggtaaggatgtcccaaaattagttctagacttggttttcaaatttgacgatgatctaatggtgaacgagtttgggattgtcattttactg

SEQ ID NO: 9016 - DNA, 418 bp, Glycine max
tctttgagaaaacttccttgagaagctagagcttagctacacacacttttctataataactaagctcacctccttgagaagcttccttaagaagattcctaaagaagctagagcttagctacacatacctctctaatagctaagctcacctccttgagatgagaagctaggacttagctacacaccccctataatagctaagctcacccccatgacaaaaaacatgagaatacaaaaaaaagtccttactacaaagactactcaaaataccccgaaatacaaggctaaaaccctatactactagaatggccaaaatacaaggcccaaacgaaggaaaaacctattctaatatttacaaagataagcgggctcatacttagcccatgggctcgaaatctaccctaaggctcatgagaac

SEQ ID NO: 9017 - DNA, 417 bp, Glycine max
  unsure (1)..(417): unsure at all n locations
agcttagcaaatggacctgngtgttgcctagtttcatcatatcttccataatactcatcacctctatcatatctaataattttcacatttatgtctaattgcccttttatttcattgtagtaaatttctaaggcatccattgcctaagaaatctcgggcagtaagtagacataaccgtaacgtgaataatcatcaataatggtgataaagtatctttcctttctgaaagaactaacatcaaaaggtccacaaatatcagtatgcacaatttcaagaagttgagtgcttcttgtagctcctttctttgtatgttttgcttgttttcccttaatacaacccacacaaatatttagatccgtaaaatctagataaggaagaatttcattctttattaatcttttcatcctttctctagaa

SEQ ID NO: 9018 - DNA, 426 bp, Glycine max
ggaccacgatcagttggaggctcatgtcagacgcccccagggtgactagcactctgctcatacattactctgagtgcacctgatcagtagttctgttggcccggtcaatagaactttcagagttcaatatcagtataaacccctagccccataaagacacaattcatggaagacattctggtagaatttgttgggaatgaccaaaccaccacagactggtggaacctttatgttgacggcgcgtccaacatgaagggaagtagggtatgaatcatcctcgaaggacttgataatgtaaccctagagcaggccatcaagctcaacttcaaagcctcaaacaatcaggctaagtacgaggggctcattgcaagtctaaaactagcaagagaagtcggggccaagaagctatgatgctacatagactcg

SEQ ID NO: 9019 - DNA, 405 bp, Glycine max
  unsure (1)..(405): unsure at all n locations
agctnttaactcaatttaagctgaggattcttattcaatgattattgttaattgcttttggtcccaaatctttgaggttgttttttccaataaacgttggttatatttctctttatgttatttgtaaagttgataattaacaatgatgaaattagtacattagttttttttaaatccaataaaaccatcttatttacctacttttattagtttgtgtaattatgttaaaaatgctttgtaataaaaaagaccagatgaagtagtaaatataaatacatttttaagcaaaaattcaaaccttagtttgtttttatcgtaatattcgaaaattaaccgtacattagattcaactctcctaggttacaattagtttttttttggcatttttgtggcctagattttttt

SEQ ID NO: 9020 - DNA, 390 bp, Glycine max
ctcagctatgctgcaacatttataatagaccctctcagtagctaaaccaacaacaatataataattatgatctttcaagcaacagatataatccaggttggaagaatcatccaaatctgagatgggcaagtcttccacaacaacaacagcctgtccctcctttccagaatgctgctggttcaagcaggccatatgttcctcctccaatgcagcagcaacaacaacaacaaagacaacaagcagctgaggccccttctcaaccttccttagaggagttagtgaggcaaatgatcatccagaatatgcaattttagtaagagacaagagcctccattcagactctgacaaattagatagggcagatggctacttagttgaaccaagctcagt

SEQ ID NO: 9021 - DNA, 329 bp, Glycine max
tgctaacccatggaagctcctaatatctcccacactttctggggtgggccattcttggatggcctcgattttctcacgtgccactcggaccccatatctaccaactacaaaacctaagaaaactatcttatctacacaaaaggtccacttctctatatttgcatagagggtgtttttcctaaggactgaaagaacttgtctgagatgtcctaagcgatcatatgggctcctactatacacttatatatcatcaaaataaacagctacatatctacctatgaaatccctttagacatgatgcgtaagcctcataaacgtgcttggtgcat

SEQ ID NO: 9022 - DNA, 397 bp, Glycine max
agcttcaagagaaagatggcctcagcatattccttatttccagaagggaattctatcaatagacctccaatctttaatggagagggttaccactactggaaaacccgaatgcaaatttttattgaggcaatacatctaaatatttgggaagccatagaaatagggccttatatacccaccacagtagaaagagttacaatagatggtggttcatcaagtgaaagcataactatagaaaaacctagagatagatggtctgaagaggatagaaaacgagtaccatacaacttaaaagccaaaaacataataacatctgccctgcgaatggatgaatatttcacggtttcaaattgtgagagtgctaaggaaatgtgggacactcttcgattaacacatg

SEQ ID NO: 9023 - DNA, 285 bp, Glycine max
agaatcggacctcagtgttaaaagttatgaccatatggatatctcgagagctatcgcgggacagcttccagcatctagacgtaagatgcgccataatctgacttccgtgtgaaaagatatgaccatatgaatatctcgagagctttcgctgtagaacttcgagcgtctaaatatatggtaagccagaatcgagactccggggtgaaagttatgaccagttggatttgaccattgcgatcttggttcaactcccagcgtctagtcatatgctgtccccgaatctaa

SEQ ID NO: 9024 - DNA, 410 bp, Glycine max
tctagacaatgcatcagaagggatatttccctacctggtttatattgtatggagaaatcataaccaaggaatttgtgtaaccattggtgttgttccagagtctgcaatgtttgctccaacaactccttaaggcttttctgatcagttctaataatgaacttatggcctaacaaataatgcctgaatttggccatggctgtgatagcatagaattccctagtataagtagattgcttctgcattctaggggacaacttcttaaagaaataagcaataggatgttgagattgactcaataatgctccaatacccgaaccagaagcatcagtctcaagtacaaatggttctctaaaattaggaattactaacattggagttgaagtcatagctttcttgagttgcaaaaatgc

SEQ ID NO: 9025 - DNA, 417 bp, Glycine max
agcttgttcagttcatcaaacaatctctcttttcttagtttgaagagtaacaggttgaagggtccatttccactttcaatccctagtgtcatcaccctaactgaaattgacatgtcatgcaatcaaatatcagggagattgcaagatttaactgatttgagtagcttggaacaactagatttaagggaaaacaggttagactctaaactacctgcaatgccaaaagggttgataagtcttttcctcagcagaaactctttctcaggtgaaattcccgagcactatggtcaactagataggcttcagaagcttgatgtttccttcaattcactcacaggcactgctcctgctgaacttttttctttgcctaacattagttacttgaatttggcatccaacatgttgaatggaccactc

SEQ ID NO: 9026 - DNA, 416 bp, Glycine max
  unsure (1)..(416): unsure at all n locations
gtgtataggcaagaacccnctctgttaattaaaggagttgacatttcttcaaggatggaagagataaatcagttgagtagagaaagggatgaattattgtaggagttgaggagtaacctacttaaggctcaggatcagatgagataatatgcaaataaccatagaagagaactgatatttcatgagggagattgggtttttttgaaattgcaaccttatagaatgaggtccttagcaaggaagccaaatgagaaactgagtccaagattttatggaccctacaaggtgatacagaaaataggggaggttgcttataggttggaacttccagaatgaaagcaagatacatccggttttccatgtatctntgctcaaaaaggcagttcaacccacttgtttccctcagacattaccta

SEQ ID NO: 9027 - DNA, 385 bp, Glycine max
agcttagcaaccaatttcaccatcaagtattatgatcatctttgggcttcaagtacaaagtgtaatcaatatccaacttctaaggcttcgaggatagggaaaataacttacaatttgtagcatcatcctcattcattcccagaaataaagcagtgtctttaatgcttatcgtagaataagcagagagaagcagctgaaacatctcctttgtgtaaagttctggaaaaagtttattggtattaaaatttttgctgaactaaacatctttgaataaaataaaggtgcacaagacttgtgaactcaagctatatggagaagcaatccaaaaccaagaatcatatttaataaaccaattgcagaagttaccatggaagtagtacattac

SEQ ID NO: 9028 - DNA, 425 bp, Glycine max
  unsure (1)..(425): unsure at all n locations
ctattgngccataaaatntctgaactntgatgaagccgcatctagagaccaaaggatgatacaactattggagttggaagaaatgagattgattgcatatgaatcttcaaggttgtattaagagaaggttaaaacttaccatgataaaaagttgctaaagaagaattttcaaccaggacaacaggtgctactattcaattcaaggctgaaattgttccctgcgaagatcaaatctaaatggtccgaaccatttaccatcaacaaagtcagaccatatggagcagtagagctttgtgatcctcaatccaaggatccagacagaacttgggtagtgaatggacaaaggttaaagttgtaccatggtggaactattgaaagattaaccactgttctatccttccaagaataacaatgaactatgcgtc

SEQ ID NO: 9029 - DNA, 414 bp, Glycine max
  unsure (1)..(414): unsure at all n locations
agcttgaagganaactggatgcattggttaacttggtaacccagctggccttgaatcagaaatctgtacctgtcgcaagggtttgtggtttgtgctcctctgctgaccaccatacagacctttgccctaccatgtagcaacctggagcaattgagcagcccgaagcttatgctgcaaacatttacaatagacctcctcaacctcagcagcaaaatcaaccacagcagaacaattatgacctctccagcaacaaatacaaccctggatggaggaatcaccctaatctcagatggtctagccctcaacagcaacaacagcagcctgctccttccttccaaaatgctgctggcccaagcagaccatacattcctccaccaatccaacaacaacaacagccccagaaacagccaacag

SEQ ID NO: 9030 - DNA, 419 bp, Glycine max
  unsure (1)..(419): unsure at all n locations
ntgagcaaattcaaacgacaattactttntactcggatgtctgaatgaatcccgtaatatatcgagatgctcgaaattgaaaacagaagctcatagcaattgcaaaccacaataactattaactcggatgtccgattaagtcccgtaatatatcgagacgctcgaaattcaaaacagaagctctgagcaaattcaaacgacaattactttttactcggatgtcggaatgaatcccgtaatatatcgagatgctcgaaattgaaaacagaagctcatagcaattgcaaaccacaataactattaactcggatgtccgattaagtcccgtaatatatcgagacgctcaaaattgaaaacataagctctgaggaaattcaaacgacaattactttntactcggatgtctgaatgaatcccgt

SEQ ID NO: 9031 - DNA, 398 bp, Glycine max
agcttgagcaaattcatacgataataacttttaactcggatgtccaaatgaaacccataatatatcgagatgctcgaaattgaaaaccgaagctcgtagcaaatgcaaaccacaataactttttactccgacattcgactgagtcccttattatatcgagacgcttgaaattgaaaacagaagctcgtagcaaatgcaaaccacaagaacttttaactccaaaattcgattgagtcccgtaatatatcgagatgctcaaaattgaaaacagaagctctgagcaaattcaaacgacgaataaatttttctcggatgtccgattgtgtcccgtattatatcgagacgctcgtaattgaaaacggaagctcgtagcaaactcaaacaacaataaattttta

SEQ ID NO: 9032 - DNA, 401 bp, Glycine max
  unsure (1)..(401): unsure at all n locations
cttgagcaattcanatggtaataacttttcactcggatatccgattcaggcacataatatatcgagacgctcgaaattgaacatcggaagctcttgagcaattcaaatggtcataacttctaactcggaggtccgattgaggtgcataatatatcgagacgctcgaaattgaagaatggaagctcttgagcaattcaaatggtcataacttttcactcggaggtccgattcaggcgcataatatatcgagacgctcgaaattgaacaatggaagctcatgagcaattcaaatggtcataacttttcactcggaggtcggattcaggcgcataatatatcgagacgctcgaaattgaacaatggaagctcttgagcaattcaaatggtcataacttttcact

SEQ ID NO: 9033 - DNA, 383 bp, Glycine max
  unsure (1)..(383): unsure at all n locations
agctntgatgtaacatttggagaggttatatgaaacaacgagatgatgcgctccatgagaggttggatcaaatggagaatagagaccatatgaattgctcaagagcttccattgttcaatttcgagcgtctagatatataatgcgcctcaatcggacctccgagttaaaagttatgaccatttgaaatgctcaagagcttccattgttcaatttcgagcgtcacgatatattatgcacctgaatcggacctgcgagtgacaacttatgaccatttgaattgctcaagagcttccattgttcaattttgagcgtcacgatatattatgcacctgaatcggacctgcgagtgacaacttatgaccatttgaattgctcaagagct

SEQ ID NO: 9034 - DNA, 397 bp, Glycine max
tttccacctttcattagcatctgcatctctgtggatcagagaatggaacttcatcttcagtcagctaaacccctgagtccatagggatccccttcttcgagtacataacctcaatccctaagaagtacttcaaggcccccaagtctttagtctgaaactgagtttgaagaaaactcttcaagttgtcagtacctttattatcacttcttgtaatcacaatatcatcaacatacaccacaagtaagatgctgccaaggttagtatttttataaaatacagtatgatcactttgactcagcttcaatccaaatgcaaggaccacaccactaaatcttccaaaccaagatctaagtgattgcatcaagccatataacaactttcttaagcgggataccat

SEQ ID NO: 9035 - DNA, 410 bp, Glycine max
tgtaattgattacatcatttgtgtaaccgattaccatatagaaaaattcaaatttcaagtctgaatgtcataactcttaataaactaatcgtgtaatcaattaccacatttatgtaatcgattactagtaaggaattttcaaaaataactcccaagagtcacaactgttcaagaagtttttgaatgaccatcaaaggcctataaataggtgatttgggacacgaaattgctcagagtttttctgaacaacattgtcttatcctctcaaaaccaaattgtcttatcactctcaaaatattccttggccaaaatacttgcaaattcaataaggaatcttgatcaatcttcaattgtaatattcttctcttaaagagagaaaactcttcttcttattcaaagagatctattta

SEQ ID NO: 9036 - DNA, 316 bp, Glycine max
agcttatcccatgcttctttggccgtctttgcattagatatcttctcaaatgtatcttcatccaccgattgataaatgagaaagagagctttcttgtctctctttcttgactccttcaacgtctcctttacaccttgacttagcgaggcttcatcttgctcctcgaagccattctctacgatatcccacacatcttgagctcctagtagcgccttcatcttgttactccaattatcatagttgttctttgtgagcatcggcatttggaaaggaaaacctccattcgccatcttttgaggatcttgaagctctgata

SEQ ID NO: 9037 - DNA, 460 bp, Glycine max
ctctgcagggcatgcacagcttgttataaaaaaaagcgtctttctaactctatatttgctatatctttacacgtcaatgcttattgaatcagtttgatatagtgctcgagttagctgatataagtaatgtgcctttatattaagactatttacacccaacaatacccgttgtattattacatagacgagatgtatataaataaatacaacatgatatacgattttcctgattactcacctttgcttggcatactgaactttggcactagactgaacttagacataatgatacacgtttcgaatacaagtcataattgatattctgataatataatgatttacttggaacagtcatatcaaaaggctttacaagtggatccttcttacaaagcatctgctgagtgcctagccattgttttaacggatattggtaccaacataaagcttgctggaaacactc

SEQ ID NO: 9038 - DNA, 400 bp, Glycine max
  unsure (1)..(400): unsure at all n locations
agcttgttacatatagtttcaacctgatgtcctttaaagacttagtaaaaatatcagccaagtgctacgagatctatctttatgtgtttagtatgttcatggaagactaaattagatgcaatgtgaagagagcaacttgattttcacaaataagcttagtgtcttgagtgtctccaaactttaattgttggagaagttgcctaagccatgtaatttcgcatgcaacttctgtcatggtatagtattcaacttcagcgctggatctcgcaactatattntgcttcttgcttctccatgagatcaaattccctccaagcagaacacaatagcctgaggtagaactcctgtccaatcagcactatgagtaacaaacaatttgacattgtcttcgtcttcatat

SEQ ID NO: 9039 - DNA, 404 bp, Glycine max
tgtcaaagccttgtatggattgaaataagctataagagcttggtatgaaagactaagtttattcttactctagatagttactctagagaaatagtggacacttcactattcagaaaggcttagaaaaaggatctgctgattatacatatatatgtgaatgacatcattttttatgtaacctctgaaaggatgagcaaggagttttctgagctaatgaaaagagaatgtaaaatgagcttgatgggtaagttgaagttctttataggacttcaaatcattcaaaaagattatggaattttcatgcataaagagaaatacatcaaggacctattgaaaaggttcataatggatgaagcgacacaaatggctaccggtgcatccttccactatcattgactatgatg

SEQ ID NO: 9040 - DNA, 429 bp, Glycine max
  unsure (1)..(429): unsure at all n locations
cttgatttcctntgtttcggaaacctctcttttctcatgtgcacccaaacccaatctccgggttcgaagacaaccttctttctccctttgttggcttgtttagcatagcttttatttttcctctcaatttgatctttgactctctcatgaagcttcttcacatagtccgcctttgcttgaccttctttatgcttaaaaacagaaacattatgcataggcaaaagatcaagaggagttagtgggttaaaaccataaacaacttcaaaaggagaacaattagtggtgctatgaacagctctattgtaagcaaattcaacatggggtaaacaagcttcccaagtttttaagttattcctcaaaactgtcctaagcaaagtgtcaaaagtcctattaacaacttccgcttgcccatcggtttgtgggtgacaa

SEQ ID NO: 9041 - DNA, 415 bp, Glycine max
agcttagacgcagaacaagacaggttatacggagaagaataaagtgcgggcaaaataggtcacgcctgatataatttaaaatgtaagtccaacatcgattttcaataaaaaaaaaaaaacctatgttaacaaaatgatgttaacgttaacatcggttttcttcaagaaaccgatgttaacttatcatacgttaacatcggttttcagaaaaccaatgttaacctcggttttcttcaaaaccgatgttaaagaacttacgttaacatctgttcttctaaaaccaatgttaactaattaatgttaacatcgattttccaagaaccgatgttaacgtcactttgttaacatcggattttcaaaaaatcgatgttaaaggatacacattatttacaattatgccaccgcatttatcata

SEQ ID NO: 9042 - DNA, 412 bp, Glycine max
agcttctgttcctgagaaactggttcccataagacaacagggagtgaagattgctgaaaaccctagccttgcaacaagtcctagggaagtagacacggagatggacaagaaaatccgcagtattgtgagtagcattctgaaagatgcttctgtgcctgatgctgagaaagatgttccaacatcgtccaccccgaatgtttctgtgcctgatgttgagaaagatgttccaacatcttccggtccaaatgctgaagtactctcttcccccagcaaagagagatcaacagaggaagatgatcaagcgacaaaggagacccctgcaccaagggcaccagaaactgttccaggtgacctcattgacctggaagtagtagaatctgatgaagaacccattgccaacaggttggcacct

SEQ ID NO: 9043 - DNA, 397 bp, Glycine max
  unsure (1)..(397): unsure at all n locations
agctttgagattaacctcaagctagcatgtccaagcttcttatgccataccagtgatgctccttgacaaagagtaaacacaataccttttgactgtacaaatcaccgagtttaatctccttgtctcttagcagaaaagagtgaagagttatccttgttatggaaaatacatatatccttgtaaaaggtgacattgtatccactatcacataattgacttatgcttagcagattgtgcttcaatcctttaacaagtaaaacattatctttaagaggataaggagaaatgcatactttacctaccccagttatcagtccttttttattccctctgaaaatgatcaccccactagatatagggcttaaggattggagcatagactnttcgcctgtcatgt

SEQ ID NO: 9044 - DNA, 400 bp, Glycine max
ttcactcggaggcccgattcaagcgcataatatatctagacgctcgaaattgaacaacggaagctatcgagaaattcaaatggtcaatacttcgaactcggaggtcctattaaggtgcataatatatctagacgctcaaaattttacaatggaagctctttggctatacaaatggtcataacttttcactcgaaggtccgattaaggcgcataatatatcgagacgctcaaaattgaacaatggaagctcttgagcaattcaaatggtcataacttgtcactcggaggtccgattcaggtgcataatatatcgtgacgctcgaaattgaacaatggaagctctcgagcaattcaaatggtcataacttgtcactcggaggtcggattcacgcgcataata

SEQ ID NO: 9045 - DNA, 386 bp, Glycine max
  unsure (1)..(386): unsure at all n locations
agctntgatgtaacatttggagaggttaatgaaacaacgagatgatgcgctccatgagaggttggatcaaatggagaatagagaccatatgaattgctcaagagcttccattgttcaatttcgagcgtctagatatataatgcgcctcaatcggacctccgagttaaaagttatgaccatttgaaatgctcaagagcttccattgttcaatttcgagcgtcacgatatattatgcacctgaatcggacctgcgagtgacaacttatgaccatttgaattgctcaagagcttccattgttcaattttgagcgtcacgatatattatgcacctgaatcggacctgcgagtgacaacttatgaccatttgaattgctcaagagcttcca

SEQ ID NO: 9046 - DNA, 417 bp, Glycine max
  unsure (1)..(417): unsure at all n locations
tgaaagaaaattagtaattaacataagtaaagctagtaattaagtagagataattaaggttgacttatggtgatctagattttatagaattagaaaagggataattaagtcatattagtttaaagtggagggcattttcataaatgacaatataactagtttaaaatagaatttttagtttaattagttggtgattaattaaagtgtttagttacatgatgtagaataattaaaataagttagagttgtaacaccatgaaaaattacaactcatactgacagaggaagtgtngtgtcatctatacatgtatgaatttaattccaatagtatatgttttttatcatagaantttgtgttatatataagtgacaccctctaccgaaacatacatataaaaataaaaataaaattattaa

SEQ ID NO: 9047 - DNA, 449 bp, Glycine max
  unsure (1)..(449): unsure at all n locations
atccttacagtcacctgcggcatgcaagcnttggcatgtactcaacgaagtacttgtgtgcctctaaaataaaaggaataataatatatcagttagcagttacataggcaatngtaggaatccaacattccttgcaacatcaaagtttgcattgcaacaataaaaaaaaataaacaactgaaacaccttcaacctggatctgggttnttatctggatggtattgaatagaaagtcgcctatactttttctttatttcagactctgccgctccaggctctaatcctagaatattaaacggatcaaaaatttccatctgcattaaaattaaaagaaaaatttcagaacgtgcaccagtggaagtctcagccaattagtaaaatgttaaacacaaatacaagatccctcaatactaatttcaaatctcaagaagtggaatagctgaattcat

SEQ ID NO: 9048 - DNA, 285 bp, Glycine max
  unsure (1)..(285): unsure at all n locations
accatacaaaccttntgccttccatgtagcaacctggagcaattgagcagcctgaagcttatgctgcaaatatttacaatagacctnctcaacctcagcagcaaaatcaaccacagcagaacaattatgacctctccagcaacagatacaaccctggatggaggaatcaccctcacctcagatggtncagccctcagcaacaacaacagcagcctgctccttcctttcaaaatgctgcttggccaagcagaccatacattcctncaccaatccaacaacagcaac

SEQ ID NO: 9049 - DNA, 189 bp, Glycine max
tatattatgcgcctgaattggaactccgtgtcataagttatgatcattttcattttctcgagagctgtcgtgcttcaatttcaagcttctcgatatattatgcacctgaatcagactttcgtttgacaagttatgaccatcttgatttctcgagagctttcgcggttcaatttcaagcgtctcgatata

SEQ ID NO: 9050 - DNA, 436 bp, Glycine max
  unsure (1)..(436): unsure at all n locations
atcctctcagtcacctgcggcatgcaagctntgatggtgtcgagaagaaatcacatgtttgtcatcatcaaaaagggggttaatgtgaatgtatgtatacatgattntgatgatgtcaaaaaagaatctaacaaggctgcttcaaatgataagcatttgcttcaagaataattcaagattgcttcaacaaacaaagccttgtttcaagattcactaaagaccaagccttgccttataacanagtgatttcaagacatgcaaggctctggttatcgattaccaggaagtgtaatcgattaccagaagacggggttgagaaatagctgttgaaaaagggtnntgaatttgaatttcaacatgtaatcgattaccatatgtctggtatcgattaccacgcacgaaactttggaaactcanattcaaaagtcataaccct

SEQ ID NO: 9051 - DNA, 293 bp, Glycine max
ctttttactcggatgtctgattgagttccgtcatatatcgagacgctcgaaattgaatgttgaagctctgagccaattcaggcgacaatatctttttactcggatgtctgattgagtcccttaatatatcgagacgctcgaaattgaatggtgaacctctgagccaattcaaacgaacattaactttttctcggatgtctgattgagtcctgtcatatatcgagacgctcgaaattgaatgttgaagctctgagccaattcaaacgaacaataacttttactcggatgtctga

SEQ ID NO: 9052 - DNA, 357 bp, Glycine max
tgctagcatgcaagcttaagccataactaatagtgcctgccaagtatatgagactccattgtattgctgtccaatgctgttcagcgcgatctgacataaattgacagacctttgtggccaagaaactaacttcagatctggtgatggttgcatactgcaaagcacccacaacacatctgtatatagtgggatcagaacaagactcacaccctgatctggttaacatgcatccaccaaccattggagaggagatggacatagcttcatccatctcggttgtagacaacaaatctctcgtatacttgcactgatgtagaataagagcacattacgctgatgtctgacttcaatacccat

SEQ ID NO: 9053 - DNA, 409 bp, Glycine max
  unsure (1)..(409): unsure at all n locations
gcttctttcgtagttctttacacatataanatagtgacaatcttgtcttctcgaacagtgtttcaaagtcggctgctatatgccgctatccatgattgataatagggagaaccacactgcaaaaggtagttgttgtagttgaagttagagagccctagcacctatacacatcataccaaaattccatattttcaaatatcgggttgagtttcataccttgcagttggattctaaaatttcaccattatttgcatccctagcgcccatgtgggcactggctgtgcactaattcccttactagtcttggatcaactctgcaattctactgatgtcccactcatgccgcttgtttgcaactaagagatatattgaaaagatttgacaccaattgagaagaacatctagagaa

SEQ ID NO: 9054 - DNA, 293 bp, Glycine max
tcggacctcagtgtgaaaagttatggccattatattatctctagagctaccgctgttcattttcgagcgtctctatatgtgatgcgccttaatctaacttccgtgtgaaaagctatgaccattagaatttctcaagagctttctttgttcaattttgagcgtctcgatatgtgattcgcctgaatcggacatccgggttaaatcgtatgaccatttgaatttctcaagagcttccgctgatgaattcgaggctctcgacatattatgcgccccaatcggacatccgtgggaaa

SEQ ID NO: 9055 - DNA, 387 bp, Glycine max
agcttggagaaattcaaatggtcataacttttcacacggatctccaattcatacgcatcgcatatcgagacgcttgaaattgaacagcggaagctcttgagaaatttaaatggtcataacttttaactcggatgtctgattcaggcgattcacatatagagacgctcgaaaatcaacaacggaagttgttgagaaattcaaatggtcataacttttcacactaaggtccgattcaggcttataatatatcgagatgctcaaaattgaacaacggaagctctgcagaaattcaaatggtcataacttttcacacggatgtccaattcaggcttatagtatatcgagacgctcaaaattgaacaacagaagcttttcagaaattcaaat

SEQ ID NO: 9056 - DNA, 290 bp, Glycine max
tctagcattgttatgtccacgaatcggccatctgtgttttaagttatgaccagtcgaatttgttgagagcttgcattgttcaattgggagcatctcgataaattattttcccaaatcggacatccgtgtgaaaatttatgaccattctaatttatcgagagcttccgtggtttaatttcgagcatctcgatatattatgtccccgaatcgaacatctaagtgaaatgttatggccattcgaatttctcgatagcttccgttgttcaatttcgagcggctagatgagttat

SEQ ID NO: 9057 - DNA, 389 bp, Glycine max
  unsure (1)..(389): unsure at all n locations
agcttcttatccaaggctcatcttggtggtgaagctccttcttccatggcttattccctagtggatggcgcctcctctcacctcttctcctttgtcttccgctgcatttccatggtggaaaatcaccattaaaggacctcattgaagctcaaagatccagcctccatagaagccccacaagcaagcttccatcaataacttttcacacggatatgcgattcgcggacataacgcgtctagactctcaaaattgaacaacggaagtcctcgataattcgaataatcataacatttcactcggatgtctgattcgaggacataanatatcgagacgctcgaaattgaacaacggaagcactcgagaaaattgaattgtcataacttttcac

SEQ ID NO: 9058 - DNA, 369 bp, Glycine max
aacatttgcatttctcgagagcttccgttgttcatatttgaccttctcgatatcttatgcgccttaatcggacatctgagtgaaaagttatgaccatttaaatttctcgagagcttccgttgttcaattttgagcatctcgatatgttaggctcctgaatcgaacatccgagtgaaaagttatgaccatttgaattacttaagagcttaggttgttctatttcgagcgtgacaatatattatgcgcctgaatcggacatctgagtgaaaagttatgaccatttgaatttctcgagaggttccgttgatccatattgagcgtctggatatattatgcaccagaatcggacaaccgagtgaaatattatga

SEQ ID NO: 9059 - DNA, 361 bp, Glycine max
agctttggagaaccaagccaatcagaatgctatacgaaatatagatgggaatagaggtaacaatggcggtaatgacggaccgaggcagaaccgggttgagggagtaaagctcaatgttcctcccttcaaaggtagaagtgatccagatgcctacctggactgggaaatgaagactaagcacttatttgcctgcaatgactacactgatgggcagaaagtcaagctagcagcagctgaattctccgactatgcccttgtttggtggcataaataccaaagagaaatgttgagagaggaacgacgagaggtagatacatggactgagatgaaaagggtgatgagaaaaaggtatgtgcccact

SEQ ID NO: 9060 - DNA, 402 bp, Glycine max
accgatatcatataatattatgaagatgggtgaagaacaacacatagttgtcagagaagaagtggacaaactcctcaatgccaacgttatcagagaagttagatattccacctggctcgccgatgtcatcatagtaaaaaaggctaacgacaaatagcaaatatgcattgactatactgatatgagtagggcgtgccctaaagatgcataccctttgcccaacgttgacaggctagttgatggagcatttggattctaggtgctaagcttcctagatgcttactccgaatacaactagattaggatgcatgctctagatgaggagaaaatgacattcttcactgagatgcaacttttgctaaagggcatgccctttgcctaaaaaatgcagtgctacatact

SEQ ID NO: 9061 - DNA, 443 bp, Glycine max
  unsure (1)..(443): unsure at all n locations
agcttgtccagctagccgctccaaaatctgctccatgaacgatagagggaaatgatcattccttgtggtgtcattaagtttgtgatagtctatacacattctccactcagtgaatgcccgtgtaagggtgagatcattcttttcattatggatcaccatcatactacttttcttgggcaccacttggactggactcacccaagcactgtcaaagatcggaaagataagtcctgcttcaagcaacttgaggacttccttttgcacttcctccttcatggatgggttgagtctcctctgcggntgtctcaccggtctataatcaacttccataatgaatttttgcacacaataagatgggctaatcccttcaagatcaaagatgtgccatcttattgttgccttatacnttttgatgaccttcactaactatgcttcctctactg

SEQ ID NO: 9062 - DNA, 448 bp, Glycine max
agcttcatgatgatgaatcatgtagttttgatgatgacaaaaagcccaaaagaatgattcaagaaaagacatcaagaagaatcaagattcaagagaagatgaattcaagattcaagagaagaaatcaagaagcaacaagtcaagacttaacaagggaagtattgaaaaggatttttctaaaaccaaacatagcacaattttgttttacaaaagagttttctcaaatttttctaagttaccagagtatttactctctggtaatcgattaccagtttcctgtaattgattaccaatgataaaatttgatttcaaaaagtttttaactaaatttgcaacgttccaaatgatttttaaatggtgtatttgattacaatatattggtaatcgattacgagtgtatctgaacattgaaattcaaattcaattgtgaagagtcacatcttttcat

SEQ ID NO: 9063 - DNA, 432 bp, Glycine max
  unsure (1)..(432): unsure at all n locations
agcttgccatctgtccccaagctaaaaccattatcacagaagaagaggaagatggnggaataacgacgcanaatggtcagagaggaagtggacaagctcctcaaagccaatttcattagagaagtcaggtactctacctagctcaccaacgtcgtcatggtaaaaaagttcaatgacaaatgacggatgtacaatgattacaccaatcccaacagggcatgacccaaggatgaatatcctttactcagcatcgacaagctagtcgatgaagcatctgggttccaagtactaagcttcctggatgcctactttggatacaatcaaattcgaatgcacaccccagacgaagagaagacgacattcctcactaaagatgtcaacatttgttacagggtcatgccctntggccaaaaatgcangcgctatatacca

SEQ ID NO: 9064 - DNA, 434 bp, Glycine max
  unsure (1)..(434): unsure at all n locations
agcttgtgcattcaataccctgatgaggatgtcccatatgttcttaaaactagactgatacacttgttgtccaagtttcatggttttgcaggtgaagaccctcataagcatctaaaagaattccatattgtctgctccaccatgaaacctccagacgtccaagaaggtcacatctttctgaaagcctttcctcattctttagagggagtggcaaaggactggctatattaccttgctctaaggtccatcacgagctgggatgacctcaaaagagtattcttagaataaattttccctgcctccaggaccacgaccatcagaaaggatatttcaggcattaggcaacttagtggagagagcttatatgaatactgngagagatttaaaaaactatgcgccagttgccctcaccaccagatttctgagcagcttct

SEQ ID NO: 9065 - DNA, 453 bp, Glycine max
  unsure (1)..(453): unsure at all n locations
agctntttattaatatatcagttntttccctatgcaaatttaaaatatgtttttcaatcaatggttttataaagattttgtttatattaaccagtgttaatattaagttgcctttctattctaagaagcttttacttttataagtgagttgtatcttgactatcttatagttttatgtagtatttttttttcaaaaattctgtttataccagttgaacgagttattattaagatttgtccatttacattgaattaataacaaaaaaatttatcatttttttatttatttcaatacttactagtaaaattttaaaaccataaaaattaaacctaaccaaatcacaaaagaataatttagtttgatttgaatttcataattcattttaaattaaccactatactggcacttaattntttttatttggattagagntatttaaagcataaatcaca

SEQ ID NO: 9066 - DNA, 410 bp, Glycine max
tcttggccaaaattgtaagataatataaaattttataattaataattcatgaaatctatgctttcataaatttccctactttatttcataagaaaatgttcaccccatgttagattaaataacatattaaaaaacttacatgttagtaagcaagagagtttctatgtatattaagagtataataacaataaattaagaaaaataagctaactttaataagttaaccattaatgtagtttaggtaaattgttcattcttgatttaataaaaaatgtttattccaagagtttgattttatacattatatatataatataatttatatattaataacatatatgacatcaacacgatggtgaattttaaaattattataacaacgaattaaagaaatttaactccactctaat

SEQ ID NO: 9067 - DNA, 439 bp, Glycine max
  unsure (1)..(439): unsure at all n locations
agctntgagggatttcaaatgacaataactttatactcggatgtccgattgagttccgtaatatatcgagacgctccagattgaaaatagaagctctaagcaaattcaaacgacaataactttttactcggatgtccgattgagtctcgtaatttattgtgatgctcctaattgaaaacgaaagtttgtagcaaattcaaaggataataaatttttactcgaatgtccgattgagtggcgtaatatatcgagacgcttgaaattgagaacagaagatctaagcaatttcaaacgacaataaatttatagtcgggatgttcgactgagttctgtaattatcgagatgctccggattgaaaacggaagctcgtagcaaattcaaatgacaataactttntattcggatgaacgacagagtcccgtcatatatcgagatact

SEQ ID NO: 9068 - DNA, 372 bp, Glycine max
agatgaggatcatcccacacttcggaatgtgcatcatggaaaaacttctttcgatgatgccacacacggtcatcatggataatcccagctttcttagaagaagcaatgtctacaaaccaagaccgctcactaacagatagtagggattcatctggaaactcatcacatatctctttctccccatgagtaacatcctcattaactaacctagacaaggggtcagcaaccaaattctcacatcccttcttatctttgatttcaatgtcgaactcctagagcagcagcacccatcttatcagcttgtgcttggcatcaacctttgtcagtaagtatttaatcgtcgcatgatctgtgagaatgatgaccttggag

SEQ ID NO: 9069 - DNA, 388 bp, Glycine max
  unsure (1)..(388): unsure at all n locations
ntatacaccttcgagtggttntcctctattcgggtgaatatagtgtctcttctaatgctcttttagaaatgaaatgtgaaatgtcttaatctcattattggttatgagaaattctatctttgtgctttcattcctgtttcgtcatattatttttgaaagactgtgtgttgctgtaccatcgatttggggtttgatttctttgccaagcatgctcgcagtataactagagtgttcataaatttcaatgtcttcagtgttgtagacctcaaagacttcagtggcttctatattttacgcgacttcaatgtctcttgtcttgtatatctcagagacttcaatgtcttcagtcttcatatgttcaagactctaatgtctttaatcctttaca

SEQ ID NO: 9070 - DNA, 419 bp, Glycine max
  unsure (1)..(419): unsure at all n locations
agcttggcctttatgttgctcaccatgttgttccccctatctctaacaatctctcccttnttggctttgatgatgccaaacttgaatatgacattgagtgcatttggagggtctgagtgatgtaagctccattggagctngtaagcctaggatcttcttcatcaatagattcctttgcttcttggaagatgaagggcagtggaatggagaaggaagagagagagtagatgccacttcaaggagaagatgagtctagaagaagctcaccaccataggaggccatggataagagcttggaggaagaaggagatgaatgaagggagacggagagaagagcacgaaattntgtgctctaaaagatctctgaaatatgaagtttaatattcaaatgatncaaattaaacaaatgcacacacatg

SEQ ID NO: 9071 - DNA, 356 bp, Glycine max
tagggttaaagtctcacgattgtcacgtgctcatgcttcaattgttagccgtggctatacgagacatcttgccaaacaaagtcaggttcacgataactcgcctgtgctttttcttccatgctatatgtagcaaagtcattgatccaataatgtttgatgagttggaaaatgaggccacaattatactgtgccagttggaaatgtattttccccctgctttctttgacatcatgattcacttgattgtgcatctggtcagagaaatcaaatgttgtggtcctttatatctacggtggatgtacccggttgagcgatacatgaagatcttaaaagggtatacaaagaatctatatcgt

SEQ ID NO: 9072 - DNA, 445 bp, Glycine max
  unsure (1)..(445): unsure at all n locations
agctnggttggatggaatggatcattcctattcccatgtttggttaagtcaagagacccaaggtgttcatcaatggcgaagttcaagaatcttgctttgatcgtgttgaccagaaagaagtgaggttgtcatgattggataattcatatctctttggtctacaaaagataagttttgttgataaattgtttcaagtgccttttgaattggaatggaaccatgtggaggttacatatgaaagtgcgttatatatccttcttaatttcttttggcatgactatacaacttctttaattatagaagccattaatggctaatgaatttcctcaagtgatggtggggcaaagttgcgcattgcttactangtacccaaacataccctatgttatatttgcaattgaggcatatatgcacgtaagttaaatatacaataaatgttttatgt

SEQ ID NO: 9073 - DNA, 451 bp, Glycine max
  unsure (1)..(451): unsure at all n locations
agcttgtgcttaatcattgtaatatacccatggttaataaaactatgtttgaactctatgcagcttgttgtgttggtaagtcacatatcccaaactgtatattctgctccccttgagctcatatacagtgatttgtgggaactctctcatgtttcatcttcaaatgacttctcttactatataagctttgttgatgcctactaggttcacttggatctattttcttaaaaataaatcagaaacttttcctatttttcagcagtttaaaaccatggctgaacttcaatttgatactaaaataaagagtgttcatacagattgnggagggttcattttcaaactcatggaattattcataaactgatttgccctcacacacaccaacaaaatggctgtgtggagagaaaacacaggcatatagttgagttaggtctcaccctactcaaacaag

SEQ ID NO: 9074 - DNA, 368 bp, Glycine max
  unsure (1)..(368): unsure at all n locations
agctttcactgacgcatatgtagaacttgtacctgctttgtctgatctgaatgttcttgttgagacctactttgctgacatccctgctgaggcgtacaagaccctcacatctctgaatggcgtcactgcatatgggtttgatttggtccgtggaacccatactcttgatttgatcaagggtggatttcccagtggaaaatacctctttgctggagtggttgatggaaggaacatctgggccaatgaccttgctgcttctctcactacattgcanggtcttgagggcattgtgggcaaaggtattttattaaacatgcatttcatagcaaatnttgggagactattacctataatatagctatctgatg

SEQ ID NO: 9075 - DNA, 431 bp, Glycine max
  unsure (1)..(431): unsure at all n locations
agcttgttgcaaatgcaaactgcaataacattntactcggatgttcgattgagtcacgtaatacatcgagacactcgaaattgagaatatatgctctaagcaaattcaaacgacaataagtttttactcggatgtccgattgagtcccgtaatatatcgagacactcgaaattgagaatagaagctttgagcaaattcaaacgacaataacattttacttggatgcccgattgagtcccgtaatatattgagacgctccacattgaaaacggaagctcgtgacaataattttttactcggatttccgattgagtcccgtaatatatcgagacgctcaaaattgaaaacggaagctcgtactaaaagcaaacgacaataactttntactcgaatgtccgatggagtcccgttatatatcaagatgctcgaaa

SEQ ID NO: 9076 - DNA, 447 bp, Glycine max
  unsure (1)..(447): unsure at all n locations
agcttgaagtagttgtttgacaagtggcatcaataacttaagaggggggtgaattaagtttcaaaatttcccactaacaaacttttaacccccttctaaatgataggctcaaaatgcagaagaagaaacaatcaatttaataatgttctttaaacatacaagacaaaattgattgcaataacataaatgagataagggaagagagaaatgcaaactcgattatactggtttggccacttcccgtgcctacgtccagtcctcaagcaacccacttgagattttccacaatctcggtaaatcctttacagactntgaacacaccttangatccctcacccttgagttcaaagattctccaagagacaaccagtctcttgattacaattctcacaatccaagagacaaccagtctcttgatacaactgactttctgagatgaacagaaag

SEQ ID NO: 9077 - DNA, 429 bp, Glycine max
  unsure (1)..(429): unsure at all n locations
agctntgatggtgtcgagaagaaatcacatgtttgtcatcatcaaaaagggggagaatgtgaatgtatgtatacatgattttgatgatgtcaaagaagaatctaacaaggctacttcaaatgataagcatttgcttcaagaataattcaagattgcttcaacaaacaaagccttgtttcaagattcactaaagaccaagccttgccttaaaacaaagtgctttcaagacatgcaaggctctggtaatcgattaccaggaagtgtaatcgattacccgaagcagggttgagaaatagctgttgaaaaagggttttgaattgaattntcaacatgtaatcgattaccatatgtctgtaatcgattaccagcaacgaaactttggaaattcaaattcaaaagtcataacccttcaaattataactgtgtaat

SEQ ID NO: 9078 - DNA, 392 bp, Glycine max
  unsure (1)..(392): unsure at all n locations
cttatctcccaaacagttntgccagctaccaaacgtccttttccctgatgacttccctgaataccccacaaagtttcagttcataagctaccttgaaagctatgccaagcacttcagcatagccccacagttcaatgaaacagtgcagtctgcaaagtacgatgagacctttggcctgtggaggatcaagaccatcaggaagatcaagaaattaggaggactctcttcaggtggttgtgctgagtgtgaggttgagtacatttgcaggtcgcttgtggtcgccaccggggaaaactcggagaaagtggtgcctgagtttgaagggttgggagagnttggtggccatgttatgcatgcctgtgattataaatctggggaaggttatggtggac

SEQ ID NO: 9079 - DNA, 421 bp, Glycine max
  unsure (1)..(421): unsure at all n locations
agctntatacaagaatgaatctctgatactacttgttggacaagtggcctcagatatcttaagaaggggggggggttgaattaagatattacacactatttccccaattaaaattctatttcactttctattcaagttacaaattcccttaataatgaacttcttaaatattgattcaaatagaacaatttgaatataaagatgaaacaataataaataaaggagtttaagggaagagaaagtgcaaactcagatttatactggttcggtcacacccttgtgcttacatccagtccccaagcaacccgcttgaaagttccactatcttgtaaaatccttttacaagttctaaacacacaaggacaatccttcctttgtgttagtattctttacaacaagaaccctcggtctcttatccctt

SEQ ID NO: 9080 - DNA, 353 bp, Glycine max
  unsure (1)..(353): unsure at all n locations
agcttccgttttcaatttgttagcatctatctataaatngcgacactctgtcgggcatccgagtaaaaagttattgttgtttgaattttctaagagtttccgttttgtatttgaagcgtctcgatatattacgggactcaaccggacatccgtgtataaagttatggtcattacaatttgctcagagcttgtagtctcaattttgagcgtctcgatatattacccgatttaatcggacatccgagtaaaaagttactgtcgtttgaatttgatacctgcttctgttttcaatttggagcatctcgatatattacgagacctcttcgaacatccgagtaaaaagttattcatcg

SEQ ID NO: 9081 - DNA, 428 bp, Glycine max
  unsure (1)..(428): unsure at all n locations
agcttgtagggttaaagtctcacgattgtcacgtgctcatgcaacaattgttagtcgtggctatatgagacatcttgccaaacaaagtcaggttcaccataactcgcctgtgctttttcttccatgctatatgtagcaaagtgattgatccagtaatgtttgatgagttggaaaatgaggccgcaattatactgtgccagttggagatgtattttccccctgctttctttgacatcatgattcacttgattgtgcatctggtcagagaaatcaaatgttgtggtcctatttatctacggtggatgtacccggttgagcgatacatgaagatcttaaaagggtatacaaagaatctatatcgtccggaagcatctattngtgagaggtacattgcagaagaagccattgaattttgttcagaatactta

SEQ ID NO: 9082 - DNA, 438 bp, Glycine max
  unsure (1)..(438): unsure at all n locations
atccactttaaacaccaagcacaatttctttagcctcttatcctcctcaacaacctcattagcaatcaagactccatgcaacaactgtctacccttaacaaatgctgactgtctttcatcaacaaggtgattcaataccttactaagcctattagataggactttagcaataattttgtagacacaacctatgagggatatgggtctgaaatcacttatatgtcgaggatccttgagcttacggataagagcaatgaatgatgaattgaggcccttaggaaaagcagcattcacatgaaattctgccaaaaaccttaagaactcaagtttcagctcattccataaatgcttaataaatatgaaattaaacccatctgaccctgngcttttgtcattgccacaagcccacactgcagaagatatctcctcctctttaaa

SEQ ID NO: 9083 - DNA, 441 bp, Glycine max
  unsure (1)..(441): unsure at all n locations
agcttcaagttgcttggatagcaacttgttttggaccaacaaagcgtcctgtgatgaaagctccaacaggcttcttttggttgggatgtgtgctctatctcgcaagattgcatggtcactagcagtcatattctcaatcaattccatggcttcttcaggggtcttcaattttatttttccccctgtagaagcatctaaaagttgctaggattgtggccttaacccgtcaatgaaaatatggagctggattggttttgaaaatccatgagtaggcgtctttcttagtaacccacgaaatctttccaaagcctcactcaaggactcgtctagaaattgatgaaaggatgagatgacagctnttccttcagcagtcttggactctgggaagtatntcttcaagaatntttcaaccacttcatcccaagacttaagactattatc

SEQ ID NO: 9084 - DNA, 450 bp, Glycine max
  unsure (1)..(450): unsure at all n locations
agcttgtaagggcttgggtggaaaatgatagtgagactcaacttggatatcaaccttgtgctacaacaattgcaacaagacccactatccacaatgagagaacaatttttgtttaaaaccttacatcttgtatgaaagatgttctctctttgagttagggttaggttacaagattgactcccaaggagccttctcaccattagaagattaccttcttcataggtgtaaacctcattaatatgctcatcacccttggcttcacccttacttccatttgaggagggagaagaagtagcctcctcttggctactatagatgtcttgactcctcatgatcgtggttttctttgtggggcattgagaagcaatgtggcctttcccaatacatttgaagcacttgatgttactagttctatcttgtgaactagcctttggagtganttcctctatg

SEQ ID NO: 9085 - DNA, 409 bp, Glycine max
cactctaagcaccgggcgcataactctttagccttctatccggctcatcttccgcattcgtatacaaaactccgtgcaacaactgtctacccttaacacatgctgactgcctttcattaacacgtgattcgctacctgactaagcctattacataggactttatcaactcttaggtagacacaacctatgagggatatgggtctgaaatcacttatatgacgaggatccacgagcttatggataagagcattgaatgatgaattgaggcccttaagaaaagcagcattcacatgaaattctgccataaaccttacaaactcaagtttcagctcattccatagctgctgactaaatatgaaagtaaacccatctgaccctgtgcttttgtcattgccacaagcccacact

SEQ ID NO: 9086 - DNA, 430 bp, Glycine max
  unsure (1)..(430): unsure at all n locations
ggtnntttttcaatatatgtttttatgtcactaggtctttgaatgacattagatgctttgatgtttgtgatgcaatcctactccgcaagggcattggatagaagactccaagaagattgggccggagatgcaagagaaggccctagggttttcatgagccttagggtagatttcgggcccatgggctaagtatgagcccgcttatctttgtacatattagattaaggtttcattatttttgggccttgtatttagggctccataatataggtaaggtaccttagaaatgtaggatttttcagcccttgtattttagggcacctagactagtgtttgtattaggggtagatttgtaatttcacatgcattgagcgaatatttgatgtgtgtggctagaaataaaattaattgaattgagagaagtgttgga

SEQ ID NO: 9087 - DNA, 454 bp, Glycine max
ctttccttgagaggatgttcaccatgttgctcatgttgttgcccttatctctaacacctagctcatatcatctaagagtctattaatagtggaacttggaagccattttattttggaagagttaacagagtggaagtttcacaccttttctttgtcgatgatattattttagtggctaaagcctccactaagcaagcaaatgagattaaaagagttatgaatttgttctactctgcttcgggtcaataaataattttggataattctagtcttttcatctctaagaatgtgtataggtaaagggcaggagccattgctaataagctaaatgtcccttttgtggacaagttagaatcttatttgggctatcccattcttaataaaaggaaaacaacatctattataagctctctagatggaagtctagaaccttattgctagctggaacgattac

SEQ ID NO: 9088 - DNA, 224 bp, Glycine max
  unsure (1)..(224): unsure at all n locations
agagcttacgttggtcaatgccgagcttctcgatatgcgattcgcctgaatcagacatacatgtgataagctatactactcgaaattgtcaagagcttgcgatgttcaattttgaacatctcgatatgttactcgcctgaatcggacattcgtctgacaacatattccaatagagtttctcatatgcttgccttggatgaanggcgccgtcttatatgttatgt

SEQ ID NO: 9089 - DNA, 444 bp, Glycine max
agcttataatatattgatatgctcgaaatttaacattgtaagctctcgagaaattcaaatggtcataacttttcacacggatgtccgattcgggcaaatcacatatcgagacgctcataactaaacaacggaagctatagagaaattctaatggtcaaaacttttcacacggatgtccgattcaggcgaattacatatcgagacgctcaaaattgaacaacagaagctctcgagaaattcaaatggtcataacatttaactcgaatgtccaatttaggcgcatcacatatagtgacactcgaaattgaacaacggaagctctcgtgaaattcaaatggtcataacttttcacactgaggtccgattcaggcttataatatatcgatatgctcgaaattaaacatcggaaactctcgcaaaatcaaatggcataacttttacacg

SEQ ID NO: 9090 - DNA, 392 bp, Glycine max
  unsure (1)..(392): unsure at all n locations
agctntgcgtgaccgagcaccctaccctgctaatcatgttgttggccatctcagtgggagctttgcttttatagttnttgacaaatctacttctaccctctttgtggcatctgtaagtaatcataatcctacctaccaaatgtcatgatccaccaccatataagctntcatttatttctcattttttgcatgtattgttcttgacaggatcaatatggtaaggtacctctgtattggggaataactgctgatggctacgtagcatttgctgatgatgcagaattgcttaatggtgcttgtggcaagtcacttgcttctttccctcaaggtgggttaacttctattatgttaatgtgnttattatattacataatatgtgctgcaggttatgt

SEQ ID NO: 9091 - DNA, 451 bp, Glycine max
  unsure (1)..(451): unsure at all n locations
agcttccttcgggagcaagtgttacacccctccaatagctaagctcacccctccaaaatacatgaaaatacaaaaaaaagtccctaccacaaagactacttaaaatgtcttgaaatacaaggctaaaaccctatactactagggtacccctaacttgtagggtaggttgcccttaatttgtagggtaccttacaaacttaaaatgaccaaaatacaaggcccaaaagaaagacaatatattctaatatttacaaagaaaagtgggtttatacttagcccatgggcccaaaatctaccttaaggctcatgagaaccctanggccttctcctacatctctagctcaatcttcctagagtcttctatccaacgcccttngggggtaggattgcatcaagttggacataagccaccgcatgtgctatactgagactcaagaaaatcagttatgat

SEQ ID NO: 9092 - DNA, 458 bp, Glycine max
  unsure (1)..(458): unsure at all n locations
agcttgtaatcgattacacacatattgtaatcgattaccagagcatattttcagaanatattctccacagtcacatctttttatttggttcttgaatggctatcaaaggcctatatatatgtgacttgagacacgaatttgccaagagtttttcagaacaaaaaggttttatcctgttaaaaagcaaaatcgttttatcctcttacaaattccttggccaaaacacttgtgattcaataaggaattatttgagtgctcaaattgttcaatctatctcttttaagagagatttcttcttctcttcttctttattctgaaaaaggattaagagaccgagggtctcttgttgtgaaaggattctaaacacaaaggaaggatngtccttgtgtgtttagaacttgtaaaaggaaattacaagatagtggaactctcaagcgggtttcttggngactggacgt

SEQ ID NO: 9093 - DNA, 448 bp, Glycine max
  unsure (1)..(448): unsure at all n locations
agctggccagtttaagatgttagtagtaatattaactnttaagagttcatgttaacaatcttgctaaaacgtatctttaatgatgtgttactactaatttataagttttatattttatatagcaatgattaacacagttgaagttattaatttgaagtcaataaataattaatcagcatggtaaaatacagaattgatcatgaaggttaataatatgacgtgtactaatgattgtgtgtcgaaattttccatatgatgtgtgctagtgattgtgtgttggaacttttcatgtgtattaagggtctcagttaataataaacaaaattaatttcttgtataacagatattgtgaaagtttttttaagaagtctttcttatatatacgaataagaaagaacctaattaatatatctattaattgtgtcagagctccctaatagtagtagta

SEQ ID NO: 9094 - DNA, 388 bp, Glycine max
gctatcctgtgacacttaaatctccgctttttcagtcgtctgtaagatgattgagtgttataaattatgcaagcctactgtatactatttgtttcccatgttttagctgatagggcttgagtgtgcttcacagatggggcatgcatgatgacccttaacattggaaccgttggaacccccctatgctggaaactcattcatggtacaatgaagccttgcacacatttcatacgtctgcttgcgaaacgcatcgaacactacaacccgctagtgccacaattgtcttatatctgtcgccaatggacttagattaacatcaatttcatttgctagctgtcttgagcccgatatcatcatatacaacatcatgtattttcgctttatgcac

SEQ ID NO: 9095 - DNA, 343 bp, Glycine max
  unsure (1)..(343): unsure at all n locations
agctntgagcaaattgaaatgataataactttatacacggatgtccggttgagtcccgtaatacatcgagacgctccaagttgaaaacggagactcttaaaaaattcatacgacaatatctttttactcggatgcccgacagatcgtcgtaatttatcgagagatgctccaaattgaaaacagaagctcgtatcaaattcaaacgacaataagcttttactcggatgcccgacagattgtcgtaatatatcgagagatgctccaaattgaaaacagaagctcgtatcagatacaaacgacaataactctgtactcggatgtctgattgagtcccataatattt

SEQ ID NO: 9096 - DNA, 316 bp, Glycine max
taacaattatgacctctccgacaacagattcaactctggatggaggaatcaccataacctcagatgggacagacccttaacaacagcgacaggagcctgctcctttcttccaaaacgcgagctggcccaagcagaccatacattggtacaccaagtctacatccgcacctaccccataaacaggcaacaggtgacgccccttcacaacctaccctcgaagaagttgagaagcaaatgactatgctgaacatgcagtttatgaagagaccagagccttcattcacagcctaaccaatcatatgggacaattggctat

SEQ ID NO: 9097 - DNA, 433 bp, Glycine max
  unsure (1)..(433): unsure at all n locations
ttctntctactctatatgcctctaaaatgaatgacatgatttggatgaagtgaatatatatttctttagagacaaaacatgtgtagttagtgagaatatgtacctaattaaaaatttatatgaaatataaattgaaggattgtgcttaccataatgtgttacatatgcacatatttgtttgatctaccttgtttatatttttaattataacatagaatcttctattaattgttataattgaattgtttgcatgcaatagttcttctctttgagttttgtgtgaaatcatatttctagatattgaattgtgcaatgtgcaaatatgtttaaatctatagatgatatatgtatgttgctttaatgatcattgaattacataaatgtaaatatggttgtgcatcccgtcataaatgagtatgttatactttttatt

SEQ ID NO: 9098 - DNA, 268 bp, Glycine max
tctcgatatattatgcacatgagatcggaccttcgagtgataagatatggccatttgaatattgcgagagcttccgctgctcaatttcgcgcgtctcgatatattatactcctgaatcggacctcctagtgaaaggtgcagaccatctgaacttctcgagagctcacgttgctcaatggtgagcgcctagatatatgatgcgcctgactcagagcttcgaggggcacgtgatgaccatccgaatttcacgggaggtgggagcgctcaa

SEQ ID NO: 9099 - DNA, 432 bp, Glycine max
  unsure (1)..(432): unsure at all n locations
agcttatgttgcanacatttataatagaccttatcagcaggataaccaacaatagcagaataattatgatctttcaagcaacagatataatccaggttggagaaatcatccaaatctgagatgggcaagtcctccacaacaacaacagcctgtccctcctttccagaatgctgctggtccaagcaagccatatgttcctcctctaataccgcagcagcaacaacatcaatcacaacaaatacaacaagcaactaaggctcctcctcaaccttccttagaagagttagtgaggaaaatgaccatctagaatatgcaatttcagcaagagacaagagcctccattcaaagtttgacaaatcagatggggcagatggctactcagttgaaccaagctcagtcccaaaattctaaaaaatggccttcacaaactct

SEQ ID NO: 9100 - DNA, 427 bp, Glycine max
  unsure (1)..(427): unsure at all n locations
ngactctaccggagatactttcacaaacatgagagtnttggcattaccccctagtgaatcactcatcaacatagttagcttgtgatttctgtaaggtatgtgttgaccaccagaagacaaagcactaataacatctcctagtgctgataatgatttgttgatactttgagcttctttaagttgactacctgaagagcccgacntgtttactctntctgagccagcaagatccacaaaacttaactgtatgacaaatgacatatccagcataaaaaagttaaaaaaactgcaatgcctcgaggtcataaaatacttgtgtttcacattgccacaaaatataggaagaatatggtatattaacattcatactgatattcaaaggtaaaattgaagtaatgtacaccaataccttttcccttgcagttga

SEQ ID NO: 9101 - DNA, 350 bp, Glycine max
tggatttccttgtagtttgaaatctatcgttcctaagatggagcccaacccaatcaccctcattaagaactagcttgtttcttcctctattgcctttagctgaatacacctttgtttgggtctctatttggttcttaactctctcatgaaacttcttcacaaactctgacctagattccccttctttatgtataaaagaagtgtccagtgggaggggaatgaggtcaaacggtgttaggggattaaacccatagacaacctcaaaaggggactacatgaggaagatactcatcccaagacttatggttgcctttcagaagagctcttaaaaaagtggataaagacctatt

SEQ ID NO: 9102 - DNA, 369 bp, Glycine max
  unsure (1)..(369): unsure at all n locations
tgtgcattcaatatcctgatgagggtgttccatatgttctcaagactagactaatacatttgctgcccaagtttcatggtcttgcaggtgaagaaccttataagcatcttaaggagttccatattatttgtttcaccatgaagccccctgatgtccaagaagatcatatctttttaaaggcttttcctcattctctggagggagtggaaaaagattggctatactaccttgctctcaggtctattttcagctgggatgaccttaaaagggtgttcntggagaaattcttccctgcatctaggaccactgccatcagaaaagacatttcaggcatcaagaaacttggtggagaaagcttgtatgagtact

SEQ ID NO: 9103 - DNA, 427 bp, Glycine max
ggaaaacttcacttgttaccatttaaaccctcttcctctcatgctaaagaacctttagatttgattcatagtgatgtatggggtccagccccaatcttgtctccatctaatttcaagtactacgttcactttattgatgatttcagcagattcacttggatttttcccttgaaacaaaaatcagaaacaataacggcttttattcaattcaaaaacatggttgaaaatcagttcaacaggaaaataaaagttcttcaatgtgatggtggaggtgagtataaacctgtccagaaaatagccatagagtcaggaatccaatttagaatgtcttgcccatatacctcccaacagaatggtagagcagaaagaaaacatagacatgtagctgaactagggctcacactactagcacaggcaaaaatgcctt

SEQ ID NO: 9104 - DNA, 406 bp, Glycine max
  unsure (1)..(406): unsure at all n locations
ntntattttcagtagatggagatgaatctatggtcacctcatggaatcctctaagaacaatagcatcatttcttgcactaaattgttgggagttggaagccatcttctcaatcaaattcctagcttcagcaggggtcatatcaccaagagatccaccactggcagcatcaatcatactcctctccatgttgctaagtccctcatagaaatattaaagaaggagttgctcggaaatctggtggtgagggcagcttgcacacaatttgttgaatctttcccagtactcatacaagctttctccactaagttgcctgatgcctgaaatgtcttttctgatggctgtggtcctagatgcagggaaaaatttctccaagaacaccctattaaggtcatctcagttgaaaat

SEQ ID NO: 9105 - DNA, 280 bp, Glycine max
tcctctccaaaaacactaccctcgagaaaatcctatttgatccatgatcgcgcgtgcaatcttttggtttgataggaaatcatgtgcaaaataaagtcagggtacaactatggtttggaattggggtaaaacacttacctgtgtgagtttttatacaccatgagtgattttattcccaatttcgatttgacccgacgtttcccctgaatgttcatttaaaagctaaacgttgacatcctacctttcattttcggttacaaggaaaactatttttggcata

SEQ ID NO: 9106 - DNA, 455 bp, Glycine max
  unsure (1)..(455): unsure at all n locations
agctngccctttcattcaatttagactaaccaataataaattgtttttgtctccatctttttttcgttnttgcattaacattggttatcctccgcctaacattgttgcattacccaaacccacatgtaagcaccattaatctgcctcttcaatgctccacaccaccaaaaacatgacaacatcactactcctttaccatacgaccaatacctataaacctagatctgacacccaaaactcaacacattcctccaaccaccctcaccaaaaaccccattggcacacaaaccaccatcaccttagcatcgtgacacaccaccattatagccctgccaacccatgattcaccataaccganaactaccaccaccaccatctccttctaaatcattaacctcgattcanaacatgtttcgattacccacanagcacggttctagaagcanaccataacg

SEQ ID NO: 9107 - DNA, 427 bp, Glycine max
  unsure (1)..(427): unsure at all n locations
ttcttgagaggcttctttgagaagctaacactntaactactaacaccctnttaataactaaactcacatccttgaaaataattacggataaaataacataacaaatataatcaaacatcaaacataattactaataatatatagatatatatcaaggtgttacaactctcccaccctttntgaaatttcgtcctcaaaatttacctgactcaaacaaggatggatgagcttctcgtatctgactctctaattcccacgtggcatcttctcctgatgcacctccccagatcaccttgaccaacagaatctttttccctcttaggtgttttgttcacctatcctcaatcctcaaaggcaatgtttcatatgtcaaattctccttcacttgtacatcatccaattcaatcacatgggatggatcacggat

SEQ ID NO: 9108 - DNA, 448 bp, Glycine max
  unsure (1)..(448): unsure at all n locations
agctgttaatgcattatagtatagttttctcatatattagaaatattaaatatctaatttcatatttgtcggttaattgatcgactaattttattataattaaacactctcaattaatttataagttttcagttagctttcaactnttcaatagtttataaatttttaactatcttataagttttcaagctagattataaactaattttatcaaacatattcaaaataagctactttgaagtaatttgtggaaaataaattactaaaataagttcatgtaccaaataatcttaattttcttataagaacttacaagctcatcagaagtctcaagagtgtatttaacaagacatttcagttagttattaatttatttactaactaanaaaaacttatttaaatgtttagtacaataattgagtgtcaaataagaagtctcataactttg

SEQ ID NO: 9109 - DNA, 458 bp, Glycine max
agctttctccactaagttgcctgatgcctgaaatgtcttttctgatggcagtggtcctagatgcagggaagattttctccaagaacaccctcttaaggtcatcccagctgataacggacctgtgagcaaggtagtatagccaatcttttgtcactccctccagagaatgaggaaaagcctttagaaagatatgatcttcttggacatcagggggcttcatggtggaacaaaaaatatggaactccttaagatgcttatgaggatcttcacctgcaagaccatgaaactctggcagcaaatgtattagtccagtcttgagaacatatgaaacaccctcatcaggatattgaatgcacaagctttcataagtgaaatcaggtgtagccattctcctaagagtcctcttacgaaggtggaggtgagccatgttctcagtatgaaaattagtagcggaatgt

SEQ ID NO: 9110 - DNA, 319 bp, Glycine max
gcttgtaatcgattacacatatactgtaatcgattaccagagcagaattttagaaaatattctcaacagtcacatctttttatgtggttcttgaatggctatcaaaggcctatatatatgtgacttgagacacgaatttgctaagagtttttcagaacaaaaaggtcttatcctcttaaaaagaaaaatcgttttatcctcttacaaattccttggccaaaacacttgtgattcaataaggaattatttgagtggctcaaatgttcaatctatctctttcaagagagaattcttctttttttcttcttcattctgaaaa

SEQ ID NO: 9111 - DNA, 433 bp, Glycine max
  unsure (1)..(433): unsure at all n locations
tccatcatcacgataccgtgttctattggtgaggttgatgtaggcaaagctcttagacttgggagctagtatcaatttaatgcctctctccatgtgctggcgactttgagagatagagataatgcccacacgcatgaccctccagttagctgaccgctccatcacaaggccatatggagtcattgaagatgttttggtgaaggttaaaccccttatatttccagatgatttcattgtcatagatatagaagaagatgctgacattcctctcattcttggctgcccattcatgtctactgcaagttgcgtggtagacatggggaagaagatgctgcagatgggcataaaagaccagaagatcagctntgatttgttccatgaggacaaagacccacctagccaaaatgtctgtcttaaagtgcatgtgatggag

SEQ ID NO: 9112 - DNA, 404 bp, Glycine max
  unsure (1)..(404): unsure at all n locations
ttgtccgcaaaagttacttaaaaccgttttgaggtccaacgccttanacggttctctntgcttttatcggttaacatggaccgttcaaaagcataaaatcaacacataactttactgcttttgcaaaaactacttaagtttgatttcctcatcgcaattgaggatacgtaggagcaaaagccccgcttttgtcgaccaccccaagagatcgttaatggtccaatgccttaacgtttctctcctttcaaaaaccaagagatcgtttatggtccaatagcttaatgtttctctccttttcaaaaccaagagatcgtttatggtccaatagcttaatgtttctctcctttcaaaaccaagagatcgttaatggtccaacgccttaatgtttctctccttttcaaaaa

SEQ ID NO: 9113 - DNA, 401 bp, Glycine max
tgcaatcatttggtataaaattcacccagtcttgtggctctacacaagggtgtctgcaaccttctaaaatagtatctccttcatcctattaaaatcaaaatgacaatgttaaatgctattcggaaaaagatccctccaaccaaaacaagggataaacagagaacgaaggtaaatgcgagaagaaaagaatgtagtaattgtgaaaacaacaaattaagtaccaatgaagtgatgtcacgccttgtgtagggagtatgacaactagaagccaaatcagcaaatctcaactatagattcctatccatgtacattctttaacataaattcatggatagtggcgttctactaaatgttgtcatgacaagagtatattcattagacatcaaaatggacgttatagt

SEQ ID NO: 9114 - DNA, 473 bp, Glycine max
  unsure (1)..(473): unsure at all n locations
agcttgtcagtttattcccaaaaacctgcctagtcgaagaatatggctttcaattgaatgacaatagtctctaaatcaattcattggcgtatcagttcactcacttgaattacaacatgatagatacttaactgataaataatatatatgtgatatgagtaattaattaaaactatatatatataggacaaagatatattattgattaaatttttaaaaaacaaaatattgttagtgattatttttttaaatgaatatatgtaacataattagaattgacagtaaactgtatggtaaaaaacacagttataatattaagaaaaaaatttaatcaaatctcctattntaaatataactatgcttattataataaaatattaaaataacataattgtatgtggatgtcctaatacaactgtcactaatcctttntaaaagaaactttatactcannattgataaagtttatcaat

SEQ ID NO: 9115 - DNA, 309 bp, Glycine max
  unsure (1)..(309): unsure at all n locations
tgtaatcgattacacaaatactgtaatcgattaccagatgagtttttcagaaaatattctcaacagtcacatctttttatttggttcttgaatggctatcanaggcctatatatatgtgacttgagacacngaatttacaagagtttttcagaacaaaaaggtcttatcctcttaaaaagaaaaatcgttttatcctcttaaaaattccttggccaaaacacttgtgattcaataaggaattatttgagtgttcaaattgttcaatctatctctttcaagagagattacttcttttcttcttctttatt

SEQ ID NO: 9116 - DNA, 431 bp, Glycine max
  unsure (1)..(431): unsure at all n locations
tcaagcttgccgttgaacacagttgagatccgtttggatcaccgggcagtgcactcgcattggtacaaccttgagaggtttggctttggtgtgttggagggtgacaagaggaatgagacaaaattctcaagtaggattcacctaagggtgtgtcttgagggtgcttatcatgtgcttgatgagtccacaatgtatattagtgacacaaggcctactgctagacaactttggaaacaaccaattgggattcttgaagtggggatattgagtgcccaagggctccaatctatgaagaaaaacaatgctaaagggtcaacagatgcttattgtgtggccaagtatggtcagaaatgggtgagaactangactatcactgagaagcttaatccaaaatggaatgagcaatatacatgggaagtgtatgatccttg

SEQ ID NO: 9117 - DNA, 408 bp, Glycine max
tagactaagttcattctaccattctcagattgatggccaaactgaatggaccattttgtcgctggaggaccctttgagggtgtgtgtcttagagcaaaaggggagttggagagttttcttctattgctagagttcacttataataatagttttcaatctaccattgacatgactccctatgaagctttgtatgatagaaggtgtaggacacccctatgttggttggagcccggagaagacctcaccttaggacttgaagttgtacaacaaaccaccgagaaggtaaagttgatccaagaaaggatgaggagtgctcagagtaggcataaaagttatcaggataaaaggagaaaatgatgcaatcctacccccaagggtattggatagaagactccaagaagattggac

SEQ ID NO: 9118 - DNA, 474 bp, Glycine max
  unsure (1)..(474): unsure at all n locations
agctnggtagctngagaatgngccacacagatactcctaccaagagctcaagaaaacaacaaaagggttcaaggacaaagagctacttggacaagggtggattggtagtgtttacaaaggaacattgccaaattccaatacccaagttgctgttaaaaagaatttcacatgactccaaacaaggccttaggaaanttgtgtcagaaatagccagcataggcccgcttcaccactggaatttggttcggttgcttgggtggtgtctccgccgtggtgacctcctccttgtgtatgatttcatggaaaatgggagcttagataagcacttgtttgatgagccagaaacaatcttaagttgggagcaaaggtttaaggtcatcaaggatgttgcttcagcccttttgtatcttcacgagggctatgagccggtggtgatacatagagatgtgaaggctaacaatgtgcttctagatg

SEQ ID NO: 9119 - DNA, 460 bp, Glycine max
  unsure (1)..(460): unsure at all n locations
agcaagaatatcagaatactcatgtcaatacttgataaacttgctcaacgtctttaaagtcatcactttaataaccggatcatcactcacaacatattcatgcagaaaacattcaatttcccatacttgcataaagtagcgattagatgttggataagataagcccaaaatcaaattagtcatgacataaaaggggcttcaaaaactcacattntttcagcctttccatttatcatttgatggacattgaacatagtttctatcacaaatagccaaacaaccaaaagcacattggtacttaattgcactttcaagcataacataggtggaattccattaagtggctacatccattctcaaacccaccttagtaccaataccactcacttgaagaacacactctntgaatgcaatctttcttgcctccaatggctttcacatatttatactatttcttata

SEQ ID NO: 9120 - DNA, 429 bp, Glycine max
  unsure (1)..(429): unsure at all n locations
atgaatattntattnttttttatgataatactaattntagttntacttnctttataattttaattnttctttgtgtttcttcaatatattaatatatcagagttgaaaatttaatcaatatgaatctatgattataaaactttaggaaaattaattaaaggggtgacattttgtaataacatatcatatttttttatttgtaggaatcaaagacaatgtcaaggggtttacaacaacttacacacccttagtcaaccaactgagctagacccccttggcacatgtcacattntaatttgaataaaaaatgagacataaaacaaatagaacttcaatttatttataaaanaatatattacaaaactntaattntttttaataattntgggcctttnttagttgtgggcccaatactatcgcacctctgga

SEQ ID NO: 9121 - DNA, 410 bp, Glycine max
taacaaaaggcatgcgaagtgggtggaattcctagagcaattcccttatgttatcaaacataaaaagggaaaaggtaatattgtagccgatgctctttctcagcgtcatgcattactttctatgcttgaaacaaaattgattggtcttgaatgtttgaaaagaatgtatgaaaatgatgaaacatttggagaaatttttaaaaattgtgaaaatgtttcagaaaatggtttctttagacatgaaggctttcttttcaaagaaaacaaattgtgtgtacctaaatgttctactagaaatttgcttgtttgtgaagcacatgaaggaggtttaatggggcattatggggtccaaaagactctagagacattagaagaacattcttattggcctcatatgaaaaaagatgtgc

SEQ ID NO: 9122 - DNA, 371 bp, Glycine max
  unsure (1)..(371): unsure at all n locations
agctntcaatgttcttaagcaaaagctaactaatgcccccatacttgcgttgccaaactttcaaaaatcttttgaaattgagtgtgatgcttcaaatgttgggattggggctgtgttgatgcaagaaggtcatccaattgcttattttagtgaaaagttaagtggtcctacccttaactattcaacttatgataaggatttgtatgccttagtacgggctttgaaaacgtggcaacactacctttatcccaaggaatttatcattcttagtgaccatgagtccctcaaatatatcaaggggcaaggcaagcttaacaaaaggcatgcgagtgggtggaattcctagagcaattcccttatgttatcaaaca

SEQ ID NO: 9123 - DNA, 404 bp, Glycine max
  unsure (1)..(404): unsure at all n locations
tctggtgggacatcttgacttgctttccaatctgacattcaccacagattctgccttcttctattttcagatnggggatgcctntaacagcacctttgtcaatgattttcttcatgcctcttaagtgcagatgtccaaatctttgatgccatattctgacttcatcttctttggaggatagacatgtggaggagtagctggtttcttggggtgtccataggtaacaattgtcctttgatctgctgcccttcattagaacttcactcttctcatttgtcaccaagcattctgactttgtgaagtttacattgaacccttcatcacacagctgactgatgctgatcaagtttgcagtcagtcccttcaccagcagtactttgttcagactangaagtccatcatga

SEQ ID NO: 9124 - DNA, 429 bp, Glycine max
agcttcaccttcctctcaggttcaagcttgttttcaacctcaaagttcttctccaaagccttcacttgatccacacttagacgacgcttcttctcagattgataccccggttcttcaacacacccttcctcgtcgagtccgtccaacatcgattggaactccctaccatacatgtgttggctgttcctcggactatgttcctctaaaccaatacaaatcagacataatcgttagtataaataaccaacctaaaacatggatcttggatctgtgtctgaatttaaaaaaacaaagcaaaacaaaaatcaatattatagaagtgtgatttaattaattaattaagcacctgttgatggacaaattgtcatgagggcactggaagaatctgagctgctaagtctcttcatgagtgggaaagatgtgatctta

SEQ ID NO: 9125 - DNA, 440 bp, Glycine max
agcttgtcaacttatatatcagtgaagtgattaatttacataggatacccactagtagacactcgttttacttctagattttgggtaagcttgcaagaagccctaggtaaaaagttgaagcttagttcagcttatcaccctcaaacagatggtcaaactgagagaaccattcagtctttataagaccttatgagagcttgtgtaataggacaaaagggtatttgggatgagtatttacctctagtggagtttacccacaacaatacttttcatgctagtatacatatggctccatttgaagccttatatgggaggaagtgtagaacaccattatgttggtatgagactggtgagtctcttttgatagtgttgagtttggttgcatccaagtcacattggactgtaccaaacaaagttaaatcctgaggttttgatgtaac

SEQ ID NO: 9126 - DNA, 418 bp, Glycine max
  unsure (1)..(418): unsure at all n locations
taagaaacagttagaggagctcttagggaaacaatttatgaggcctagtgcatcaccctgnggagcgacagtgttgttagttaagatgggaccatgaggctatgtgtagactattatcagctgaacaaggtgacgattaataataggtaccctttgcctatgatagatgacatgatggaccaaatagtgggggcttgtgtgttcagtaagatagatctcaggtcaggtaccaccatattagagtgaagtctaaggatattccgaagacttcctttaggacccattacgaccattatgagtacttggttatgccttttggtgtgaccaacacccatggtgtgttcctggactagttgaataggatctttcatccctacctagatagttntctagtggtcttcatagatgataccttggt

SEQ ID NO: 9127 - DNA, 363 bp, Glycine max
  unsure (1)..(363): unsure at all n locations
agcntttgacatgactggtctangaaagatgagattctttcttggcattgaagttttgaagaaatcataacggattctcttgtgtcaaagaaaatatgccactgatatctggaagaagtttgcaatgtctaagagcatacttgtgaaaagtccaattgtttcaggctttaaaattattaaagatgctgatggcgcagctgtggatgacacttatttcaagcaaattggtggaagtttaatgtatcttacagctacaaggtcagatataatgtatagtgtgagcttaattagcagatatatgccaaaaccaacatagttgcatttacaagctgctaaaagaatataatgtatttaaaggaactc

SEQ ID NO: 9128 - DNA, 440 bp, Glycine max
  unsure (1)..(440): unsure at all n locations
atactaagcttatggatttctcataagcttaatatcagaaagggacccaatattcatgagtcaattctagcacgagcttttcaagttgtatgggactaagctgcgtatgagcactgcttaccatcctcaaagtgatggacaaactaaagtgcttgattgagttttggaacaatatttgtgggtgttagtgcatcataagccatcctaatgggataagtttttgtatcttgctgaatggtgctacaaccccactactcatttagccactaatttaacctcgtatgaaattgtttatggtaagcctcctcctagtatttccaattatcaagctggaacctttgccgtggaagcaattgaattttttctgactttgcgccaagaaacctttcacctacttaggaagaagcttgaaaaggcctangaacatatganaaagaatg

SEQ ID NO: 9129 - DNA, 480 bp, Glycine max
  unsure (1)..(480): unsure at all n locations
agcttatacggcctaggatgtggttntgtgactaaattcaatttaaacacaagtcttgcacttgccacattggtacaactccctccatcaatgatcaccatgcaaactttgtcattgatcaaacatctagtgtggaaatttttttctctttgactntcctccatagacttcaattgatggccaagtaaccgtctaatcatcaacaattctccctccagtgttttctccacttcctcttcatcatcctcactctcttctcccttttcaacttcggactcactaatatactctccatctctaagaatcatggctttcttgttagggcactcatatgcataatgtcccaagccttggtgtaacatcccattttttcgtatataaaattntagagaataatgatgttttataattaaataaataaagaacaatagttataataaaataatggtttgagagaaaataagaagagtattttattat

SEQ ID NO: 9130 - DNA, 472 bp, Glycine max
  unsure (1)..(472): unsure at all n locations
agcttcaacatcagaccacttccagggtgctggaactacttcgcatggacttgatggngcctatgcaagttgaaagccttggaggaaagaggtatgcctatgttgttgtggatgatttctccagatttacctgngtcaactttatcagagagaaatcagacacctttgaagtattcaaagagttgagtctaagacttcaaagagaaaaagactgtgtcatcaagagaattaggagtgaccatggcagagagtttgaaaacagcaagtttactgaattctgcacatctgaaggcatcactcatgagttctctgcagccatcacaccacaacaaaatggcatagttgaaaggaaaaacaggactttgcaagaagctgctagggtcatgcttcatgccaaagaacttccctataatntctgggctgaagccatgaacacagcatgctatatccacaacagagtcacacttagaag

SEQ ID NO: 9131 - DNA, 402 bp, Glycine max
  unsure (1)..(402): unsure at all n locations
ntgagcaaattcaaacgaagataactntatattcggatgtgcgattgagtcccggaatatatcgagaggctccaaattgaaaacggaagctcatatcaaattcaaaggacaataactntttactcggatgtccaatagagtcccgtaatatatcgaaacactccagattgaaaatggaagctcgtatcaaattcaaacgacaataactttttactcagatctccaatagagtcccgtaatatatcacgacgctccaaattgaaattggaagctcgtatcaaattcaaacgacatttacttttaacttggatgtccgattgagtcccgtaatatatcgcgacgctccaaattgaaagcagaagctctaagcatattcaaacaacaataacttnttattcggat

SEQ ID NO: 9132 - DNA, 411 bp, Glycine max
  unsure (1)..(411): unsure at all n locations
agctntgagccaattcaaacgacaataactntntactcggatgtctgattgagtcccgtaatatatcgagaccctcgaaattgactgttgaagctctgagccatatcgagacactcgaaattgaatgttgaagctctaagccaattcaaacgacaataactattttctcggatgtcctattgagtcccgtaatatatccagacgctcgaaattgaatgttgaagctctgacccaattcaaacgacaataactttttactcggatgtctgattgagtcctttaatataacgagacgctcgaaattgaatgtcgaagctctgagccaattcagacgacaataactttttactcggatgtttgattgagtcccgtaatatatctagaccctcgaaattgaatgttgaacctctg

SEQ ID NO: 9133 - DNA, 422 bp, Glycine max
tcaagaattatggcctcatcaaactacttgtttcccgagggaaattctataaatagacctcccatctttaatggagtgggttaccactattggaaaaattggaaaacccgcatgcaaatatttatagaggcaatagatttaaatatttgggaagccatagaacaaggaccttatgttccctctatagtggccggttgtgcaacaatagaaaaacctagagcagattggattgaggaagaaagaagattagtacaatataatttaaaggccataaatattattacatctgccctaggaatagatgaatactttagggtttcaaattgtaaaagtgctaaggatatgtgggataccctacaagtaacacatgaaggcacaacaaatgttaaaagatctacgataaacacattaactcgtgaata

SEQ ID NO: 9134 - DNA, 350 bp, Glycine max
  unsure (1)..(350): unsure at all n locations
tctaaactntgtacaagaatgaagctctgataccacttgttagacaagtggcctcagatatcttaagaaggggggggttgaattaagatattccaaactgtttcccctaattaaaaatctatttcactttttactcaagttatgaattcccttaatgacaatcttcttaaatattaattcaaacgaagcaacttgaatatgaatttaaagccataataaataaaggagattaacggaagagaaaatgcacactcagttttatactggtgcggccacacccttgtgcctacttcagttcccagcaacccgctgagagtccactatcttgtaaattctttacaagtctaaca

SEQ ID NO: 9135 - DNA, 372 bp, Glycine max
  unsure (1)..(372): unsure at all n locations
agcttctcgatatattatgcacatgaatcggacctccgagtgacaagttatggccatttgaattnttcgagagcttccgctgctcaatttcgagcgtctcgatatattatactcctgaatcggacctccgagtgaaaagttaagaccatttgaatttctcgagagcttccgttggtcaattttgagcgtctcgatatattatgcgcctgagtcggacctccgagtggcaagttatgaacatatgaatttctcgagagcttccgttgctcaatttcgagcgtgtagatatattatactcctgaatcggacctccgagtgaaaagttatgaccatttgaatctctctagagcttgcgttgttcaatttcgagcg

SEQ ID NO: 9136 - DNA, 419 bp, Glycine max
  unsure (1)..(419): unsure at all n locations
tggtaacctattggaggctcccaacacacttccaatgaaagacctttttgttacaaaacttgaacgcaatgaaggtaagtaaattgccaattacaaaattacaaaacggtcctcaattttggtggttgttctctctttggtgatttactcaatttggagtgattcttagtccaatagctcttaagttggttggccccttgcttcttgactcaaattcctcaagggatggcaccaatcctcctttctaattccctatatggcaactcacaaacaaggagacaaagagacaagcaataaccaaagaccaaaaaaaatgaaatgaaagctaaaccaatagagttttaacaagacaaattttcaaggattattcaacaattaaagcaatgaaaagcacataanagcaagctaggactcaaaga

SEQ ID NO: 9137 - DNA, 450 bp, Glycine max
  unsure (1)..(450): unsure at all n locations
gcctgatgcctgatatgttttttctgatggcagtggtcctagatgcagggaagaatttctccaagaacaccctcttaaggtcatcccagctgaaaatggacctgngagcaaggtagtacaaccaatcttttgctactccctccagagaatgaggaaaagcctttagaaagatatgatcttcctggacatcaaggggcttcgtggtggaacaaacaatatagaactccttaagatgtttataaggatcttcacctacaagaccatgaaacttgggcagcaaatgtattagtccagtcttgttaacatatggaacaccctcatcaggatattgaatgcacaagctttcataagtgaaatcaggtgcagccatctccctaagagtcctctcacgaggtggaggttgagccatgttctcagcaaaatcagaatattcagaatcgcccctcaaca

SEQ ID NO: 9138 - DNA, 405 bp, Glycine max
  unsure (1)..(405): unsure at all n locations
agctngaaggcaaactggatgcattggttaacttggtaacccagctggccttgaatcagaaatctgtacctgtcgcaagggtttgtggtttgtgctcctctgctgaccaccatacagacctttgcccttccatgcagcaacctggagcaattgagcagcctgaagcttatgctgcaaatatttacaatagacctcctcaacctcagcagcaaaatcaaccacggtagagcaattatgacctctccagcaacagatacaaccctggatggaggaatcaccctaacctcagatggtccagccctcagcaacaacagcagcagcctgctccttccttccaaaatgctactggcccaagcagaccatacattcctncaccaatccaacaacagcaacaacctcagaaac

SEQ ID NO: 9139 - DNA, 427 bp, Glycine max
  unsure (1)..(427): unsure at all n locations
tgtcagttgtgtcatgtgtattttttttaaagctatacactagtgaaatagtgatgactgatgagtcataatattctgtgatacaaatgtatataagtgcatatacaatatgcatatcataacttaaagaaaaaaataatatacatacatatatgtttaagaactaatatcacatttacactttatttgggctgattattagttntatttattttttaaataaaactagtttttagtttctaatttgaggattttttatttctggttttaaaagtttaatgtcaatcttacaattttcttaaaaaagataaaaaaaaaacatgtagggctctttacatgaagttgtgataaaaggatccagagcaagagtataataaaatagaatataaaatattttagtggcttttgtgagttaaactcatattgg

SEQ ID NO: 9140 - DNA, 372 bp, Glycine max
  unsure (1)..(372): unsure at all n locations
agcttgtctgcaataccatagggttattagttntaaaagcattctctgtttaagaaaagataagaagggtgattcaattgttcatgccttggttactgaataacttccgttgtgcttagcaattcttttgtggtggcatcccatgctctaatgtcacaacccaatcataaaggagcctacatatatgtatataccaaaaaaaatgtacttagtatgcanaatatnattttcctcaagcaattctttatatggaaatgtctaagcaacatgtgttaannattttggtacaagttaccttagctaatgcccatatgctgaaatgagcgcgatattcttcntgtgtcatgcctccatttccaacttctagcatgt

SEQ ID NO: 9141 - DNA, 286 bp, Glycine max
tattgggcattaaagtttttgaacttcgattcaaatgcatctagtgaacacaggaagctccaactccatgaattggaggaattgtggtttcaagcttatgagaattccaagctttataagcaaagagtaaaaatttatcatgacaaaaagttgtcaaaaagaaattttcagcttggtcaacacgtattgttatttaattatagattaagattgtttccaggtaatctgaaatccaagtggttcggaccattcatcatcaaagaagttatgccacatggagcagtga

SEQ ID NO: 9142 - DNA, 381 bp, Glycine max
tggaatatttcaagcaagagtttggagtgcacattgaagttacaaagatgtggagagccatgaaagaagcaaagcaattagtggaagggaatgagaggaaacaatatgccaaagtatttgattatgcacatgaattgttgaggagcaatcctggatcaacagttaagatcaacacagtgccaagtccagaaggtccaccacaatttcagaggctatatatttgtcttgctggctgtaagaaggggtttgttgctggatgtagaccattcataggtctagatggatgtttcctaaagagtgcatttggaggaaacttgctctctgctgttgggcttgatggcaataaccacatctatgttattgcttatgctgttgtggaca

SEQ ID NO: 9143 - DNA, 397 bp, Glycine max
  unsure (1)..(397): unsure at all n locations
agctngaaggcaaactggatgcgttggtcaacttggtaacccagctggccttgaatcagaaatctgtacctgtcgcaagggtttgtggtttgtgctcctctgctgaccaccatacagacctttgcccttccatgcagcaacctggagcaattgagcagcctgaagcttatgctgcaaatatttacaatagacctcctcaacctcagcagcaaaatcaaccatcgcagagcaattatgacctttccagcaatagatacaaccctggatggtggaatcaccctaacctcagatggtccagccctcagcaacaacaacagcagcctgcttcttcctttcgaaatgctgctggcccaagcagaccatacattncctcacnncatccacaacagcaacaacc

SEQ ID NO: 9144 - DNA, 293 bp, Glycine max
  unsure (1)..(293): unsure at all n locations
tctatagaaggttcgttcctaatttctctacaattgcatctcctctcaatgagctggtgaaaaagaacgtggcatttacctggggtgagaaacaagagcaagcctctgctttgctcttagaaaagcttacctaagcacctgttctagctcttcctgacttttctaaaacctttgagctagaatgtgatgcctctggagtgggaggtggagctgtattgntacaaggtgggcaccctattgcttattttagtgaaaaacttcatagtgccaccctcaactaccccacctatgat

SEQ ID NO: 9145 - DNA, 435 bp, Glycine max
  unsure (1)..(435): unsure at all n locations
agcttgtaatcgattacacacatactgtaatcgattaccagaggagattttcagaanatattctcaacaacaacatcttttcatttggttcttgaatggccatcaaaggcctatatatatctgacatgagacacgaatttgctaagagtttttcagaacaacaagtatttattctctcaaaaagaaaaatcgttttatcctcttaagaattccttgtccaattcaattgcaattgattaaggaatcatttgagtgctcatattgtaaaatctatctctttcaagagagattcattcttcttctctttctaattcactaagggattaagagaccgagggtctcttgttgtaaaagaattctaaacacanaggaaggattgtccttgtgtgtttagaacttgtaaaagggatttacaagatagtggaactctcaagc

SEQ ID NO: 9146 - DNA, 429 bp, Glycine max
  unsure (1)..(429): unsure at all n locations
tcttagtctcagatgatgcagctaagtttgtagctatctcatgcactcctctaatgactatggcatcatttctggcgctaaactgctgagagttggaagccatcttctcaattaaatttctagcttcagcaggagtcatgtctccaagggctccaccactggcagcatctatcatacttctctccatattactgagtccttcataaaaatattggagaagaagttgctctgaaatctgatggtgagggcaactcgcgcatagttttttaaatcgctcccagtactcatacagactctctccactaagttgtctaatacctgagatatccttcctgatgactgtggtcttggaagcagggaaaatnttttctaagaatactctcttaaggtcatcccagcttgtgatggaccttggagcaaggtaataca

SEQ ID NO: 9147 - DNA, 285 bp, Glycine max
  unsure (1)..(285): unsure at all n locations
agcttagccaataaatgatattctccaaagtaaagtagtaatagggtattaacaagtgatatattacccaattcttcataaccaagttactaatgttggattaaaataaatgcttgaacattggctagaaagaagacgagaatgatacttggtaagcacacgaccaccaatgctaaatgcagactcattaatgatagttggtattggaatgcttaacacatcacatgccaacctacaaagatatggatagcagtcttggcggtccttccaatagctcanaacatc

SEQ ID NO: 9148 - DNA, 370 bp, Glycine max
agctttgagcaaatttatacgacaatatctttctagtcggatgtcttattgagtcctgtaatatatagagacgctcaaaattgaatgacgaagctatgagcaaattccaacgacaataactttttactcggacgtctgattgagtcccgtaatatatcgagacactcgtaattgaatattgaagctctgagccaattccaacgacaataactttttactcggatgtctaattgagtcccgtaatatatcgagacgctcgaaagtgaatgttgaagctttgagccaattcaaacaacaataacgttttactcggatgtctgattgagtcctgttatatatcgagacgctcgagattgatgttgaagctctg

SEQ ID NO: 9149 - DNA, 293 bp, Glycine max
  unsure (1)..(293): unsure at all n locations
tctagtctcaattntgaacgtctcgatatattaccctattcaatcggacatccaagtaaaaagttattgtcgtttgaatttcctacgagcttccgttttcaatttggagcgtctcgatatattacaggactcaaccggacatccgtgtataaagttattgtcaattcaattttctcagagcttcggatctaaatatggagcgtctcgatatattacgggactcaatcagacatccaagttaaaagttattgtcgtttgaatatgatacgagcttccnattctaatttggagcc

SEQ ID NO: 9150 - DNA, 403 bp, Glycine max
tttggaaggatcaagaagtgccttatgaatcctcccgtgcttatgccaccagtacctgaaaggcctctcattttgtacatgacaatcttggacgagtcaatggggtgtatggtggggcaacatgacgaatccgggaagaaagagcgcgttgtttactacctaagtaagaagttcacgacctgtgaaatgaattactccttgctctaaagaacgtgttgtgctttatgatgggcatcccatcgcctaatgcagtgcatgctgagccatactacctggttgatatccaagatggacccggttaagttcatctctgaaaagccagctctcacgggacgaatcgccctgtggcaagacctgctatccgagtttgatatagtttacgtcatccaaaatgcgatataat

SEQ ID NO: 9151 - DNA, 360 bp, Glycine max
  unsure (1)..(360): unsure at all n locations
agcttcttaantcttatgatnnngagttacctcgtgcactcttctaatgactatagcatcatttctggtgctaaattgttgggagttggaagccatcttctcaattaaattcctggcttcagaaggggtcatgtctccaagggctccaccattggcagcatctatcatacttctctccatgttactgagtccttcataaaaatattggagaagaagctgctcagaaatctagtggtgagggcaactcgcgcgtaattttttaaatctctcccagtattcatataggctctctccactgagttgcctgatgcctaaaatatcctttctgatggtcgtggtcctgcaagcagggaaattttt

SEQ ID NO: 9152 - DNA, 425 bp, Glycine max
cgaaggtgtcgaaatcctacccctccaaattgtttttttattgataatttctcccaattgaaccaatggattccattctcttgattgttgttgctttcccaccaattattttctttagttcctcttgaagtgtagaagaaagaagaaaaacacccatgcaatatgatgatatagactgtgctagtgactttaaaaaaatttctttacctgctttagagatgaacttccttgaggaacccaaagatagctcttttccttctccctatgaccgatggtagccccagatattttcctattccaatggttgttgtcactcttaaaaaggatgagatgaattgcctattgttttgagatgtattggagctgaatagaatttttgattcctagaaattaattaattgtccaaatgtcatctcttacatgtc

SEQ ID NO: 9153 - DNA, 272 bp, Glycine max
aatctaagctgatctttagtgtgtatctgtatcttttttccttttgaactattcagtttgaatgcgaactttaattatcttttaattcgttcctaaagattgatcgccaaatctgttgctaactgcacaataatctgttcaagatataacagatttatgtgttcagtttttccggcacgatgtcctggacattgtttccgacatccgggatcctgcataatctgttaaagatataacagatgtatgtgtccagtattgtcgggcaggatgtc

SEQ ID NO: 9154 - DNA, 336 bp, Glycine max
agcttgaagacttgtacatcaccaaatctctggtaaattgtctctaccttatgcaagcatgtattcatttaagatgcaagaaaataaaacggtagaagaatagttagatgtctttaataaatcgattcttgatcttgaaaacattgatgttactattgaggatgaagatcacgcattagtgttattgtgtgttctacctaagacctttgctcatttcaaagaaacacttctctatggaagagattctctcactcttgttgaagtccaatcagccttgaactctaaggaattaaatgaaagaaatgaacaaaggccttctgtacatggggagggact

SEQ ID NO: 9155 - DNA, 341 bp, Glycine max
tcatgcaaacggcttaaaataaaagtattaccttcttatatttaaactttgccaattgatttttcccacttgtaatgcaatggtgcaagggagttctttcatgatagtcacacatgtttacatcagcaccaaattggagcaacaactcaaccatcagtgcactgccagaatgacatgccatatgtaattatgaccatccacggaaacacctatctgtctcagtagtctcttcaactctcagacaggcttcaggatcatgctgatgccctttggcatcatcagcatggtgagactcatcataatactttgcgtttatcagatttgatgttgatgtgacaata

SEQ ID NO: 9156 - DNA, 426 bp, Glycine max
taacattacaataaacgcataaaaaaagaaagcaagttttaattataataaacataataataagtataatattgattaataagcataatttgtcagttactctgaaatttctattgtgacaacattaggtagtggcaaaattaagttgaatctcattttttttaaggattaacttaatgattgtgtatttttttgtttgagtctcattttttggataagctactgtgacattagaaatttcagagcaataaatagattatgctcattaatcaatattattcttattattatgtttgttctaacttaggcttgttttttttaagtgtttattgtaatgttatgcttacaatgattaaaaaaagggagaagatgaagattaaattatatttttggtaaatagtcattttcatccttgaatgtatagag

SEQ ID NO: 9157 - DNA, 306 bp, Glycine max
  unsure (1)..(306): unsure at all n locations
tagaatattgcagcaatattatattccatcagttcgttaactatcacgcttagntggagtctgcaaagccccaatcattcaacactttgctgaaacaatttctggtactacaactattagaagctttgatcagcagtcaagatttcaggaaacaaatatgaaactgactgatggatattctcggccaatgttcaatattgctggtgccgtggaatggttgtgtttccgtttggatatgttgtcttctatcacatttgccttttccttaatattcttaatatctattccacacggattcatagatcc

SEQ ID NO: 9158 - DNA, 419 bp, Glycine max
  unsure (1)..(419): unsure at all n locations
ntcaggttttccactacgattggttcagtaccattgttgaacacaaacaagtgcgcttggttcatcactgctagctcaggatagacccgggacaaaatgtttgtcttccctcctgctccaaaactctccacaactgagtgatcaatcttccattcatttgaaaaaacaaagaatattaaataattatacattagtattttggagctcataaatgctatatattgttgttgaaatcctgatccatttgtggataaattagttagctttcattttttagaaaattagttaatttgttagtagtctgttgctgaaaaacagaaaatagtgtgttaagttgtaattctcagtttcatcttttcagccctttcacaatgatgtattaatacaattgatcattcaataagataagctgaatgagt

SEQ ID NO: 9159 - DNA, 407 bp, Glycine max
  unsure (1)..(407): unsure at all n locations
tccaaccatatgatcataaganagggaactagcagggcaattctcctgtggatccaaaaccatgactttaatggccatctgagaagcagcttgacatatcattcgaccaagttgccctcctcccagaaccccaacaaccacttcagttagtccatgaacaggtgactcatcattcctgcacacaccaataccaaattttgggcttttcatgagattttcaggttcagacacttctaatgaccagaaattttacatttatcttcctaagttgaagaaagctgagaaaagggtcaaaacccctacaactagaaaacaagcgccaaaaataaaaatgcaaaaaataaccttagagaaactgcatcatcctgtgttgttgcttgacaagcaagatggggttggtcacactg

SEQ ID NO: 9160 - DNA, 424 bp, Glycine max
cttggcatctaagatatggccatttgaatatgctatgtgctgaaattgctacactccaaagatacggtgcaggggctgcctaaaactggagagcttgagttgtgtgaaggttgcatttatgggaagcaatcaagaggatcatttccaacaggcaaagcatggagagcaagtgagtgccttgaacttcttcatgcagacttatgtggcccaatgaaaatagtctcactcgatggaagtaagtatttcttgctcatcacagatgattacagtagaatgagctgggtttatcttcttaaagcttagtctgaagcatttgaaagctttaagattttcaaggctatggttgaaaaacagtctggcttgtatgttatagctttgagaatagacagaggtggtgaattcttgtcaaatgaattcattactt

SEQ ID NO: 9161 - DNA, 266 bp, Glycine max
gtgagcaaatttaaacgacaataactttttactcggatgtccgattgagtcccgtaatatatcgagacgctcgtaattgaaaacagaagctctgagcaaattcaaacgacaataacttttgactcagatgtccgattgtgtcccgtagtacatcgagacgctcgtaattgaaaacggaagctctaagaaaatccaaccaccattaccttttacctcgagggcgggttgaggccctcaaaatatttagacccctcaaattggaaacc

SEQ ID NO: 9162 - DNA, 253 bp, Glycine max
ctcatctgtattgtcttcgtgcgattactttttctctctctatgaatattatctcgcaaattccaacgatgaaggtgtgaggaatagaatctcaaaccacatatcaaaatttcatgaaagtccaatggttaacgaaattgggatcatagttttactgggacggttttggatttttgccgaaaaagaaaatgttatgatgcgaattgtatgtcttcaagctccgatatcgtttcataatttccctacggtggga

SEQ ID NO: 9163 - DNA, 370 bp, Glycine max
  unsure (1)..(370): unsure at all n locations
agcttaagctccttcaactgcacaaggctcttaatatttgaagagtatccttgtggaaccttcacccgacgaagacactgacaaaaacttatcttctccttcttggacaaagtatggcaggctgggggcaagtaaattttcttcccatcagaccttggatgcaactgtgatcttatacccatatcagctagatcttgacgggtattcaagccatccttcgtcttgccttgaattttaaggagcgtcccaatcacactgtcacaaaaatttttctccacatgcataacatcaatacaatgtctaacgtcaagatcacaccagtatggaagatcaaagaanatggacctcttcttccatatgcaactctgac

SEQ ID NO: 9164 - DNA, 307 bp, Glycine max
agcttatcacccacatcgccaattgattaatagcttttaatgggagtcaggaaaatgaaagtgcgccgaaaccattaactggaaaaaaagtttatgcttggatcaaaggtatcctaactatttttgggtagaacccaaagaaagcatcatctgagactaacatatagaaaaaaaggtcaatgttctttgatctttcgtactggtccgatcttgatgttagacattgtataaacatgatgcatgcggagaaaaatgtttgtgatagtttaattggcacccttcttacattaaaggcaagacaaaggat

SEQ ID NO: 9165 - DNA, 415 bp, Glycine max
tgcaaacagatttcgcaagggtcaccctaccagcatttaaaatagttctagctttccacgtacttaaccgttgatggacttcgtccatgataagttggaatgttcctcgtgatacctttttatgaaaaataggtaccctaaggtattttccaaggtcatcagtacactgattacccatttcctcgcttgattacccatctcctcgctcgattgattcctatgtgacactcaaacatttttagagaaatgcatacgagatttctctaagctaatcttctgaccagaactcttgcaaaataaatttaaaatattatgaatcaagtggacttattctagagaagctcccgcaaacaaaagcaagtcatctgcataggtcaagtgcgatcaggaacaaaactagactacaacaatatta

SEQ ID NO: 9166 - DNA, 323 bp, Glycine max
  unsure (1)..(323): unsure at all n locations
agcttcggattgtaagtattggattggatagctcgtgcttccaagctacanaataaattgaacccaaatatgatactcctcgttttttatataaaattcaattacttaatttatcanattcaaaaaaaaattaattgatatcaataaatttattttacatttataactttnttttaaattttccttatcaataatatttcatctcttctaatagtttattaatatattttgtttcttattttaatgagagatgtttttagtataaaaataattaatacaaaaaatattataaattgagttttataaaaaaaaataaacatcaa

SEQ ID NO: 9167 - DNA, 339 bp, Glycine max
agcttctgcgagcaggcatgaacgtgtttcgcttcaacttctcccatgggtcccacgagtaccaccaggaaaccttgaacaacttccgggcggcattgagaacaccggtattctctgcgccgtcatgctcgacaccaaggcacgatacgaccaccagattcgattttcatattccatattctcccctttttgttcgatttggatttattttatttatttatattctcatcgccgattttgttttgatttacttttaaatcttgtgttttaattgctaatgtttatgattggattaggttatgtataagccggtgctattattattattatctaattcta

SEQ ID NO: 9168 - DNA, 418 bp, Glycine max
tggagttggagcattgattatgctgttgtgatgttattggttcatttgcttgacagatcaaagtgtctttagttatgatcttcttctgggtatctgttaagagtctatgaagctgtaccaaatttcctagtagcttttagtttgtttaattcagctgaagggttgtttattgttgtactgttgcttcttggtacgccttgtaccttgatacttttcttattaatgaaaagtattttgctttgttaaaaaaaattaacaatgttttaaacgagcatataaaattaaaaataaatgtttatttaattactcaataagtattttgatttgattttcttaatttatcatttaaataaaagatatttcaactttttatttaaataattaaatctctttgaatgatattaaatacaattaatta

SEQ ID NO: 9169 - DNA, 290 bp, Glycine max
agcttcaaccaaggggtgatggaccatttaagtgcttgaaagaatcaatgacaatgcttacaaagttgagctgcccggtgagtataatgttagttccaccttcaatgtctctgatttatctctttttgatgcagatggagaatccgatttgaggacaaatccttctcaagagggagagaatgatgagggcatgaccaagagcaagggcaaggatccacttgaaggacttggaggacctattgatgaggacatgaccaaaagcaagggccaggatccacttgaaggacttg

SEQ ID NO: 9170 - DNA, 423 bp, Glycine max
  unsure (1)..(423): unsure at all n locations
tgtttcanaccatagatggatttatttagtttgcaatctcatagactttgagtcacttaatacaaagttttctggttgcatcatatgaattgtttcttcaatgtcaccatttagaaaaacagtcttaacatccatctgatgtagctctaaatcacagtgagctaccagtgtcattattgttctaaaagaatcctttgaagatactggagaaaaaggtttctttatagtcaatgccttctttttgggtaaatcctttagtgactagacgagccttatatctctcgacatttccctttgaatcccttttgcttttaaatatctatttgcaaccaataggtttcacacttttaggcaatttgaggagatcccaaacgtcattgtcttgcatagatttcatctcatccttcatggcattgatccagt

SEQ ID NO: 9171 - DNA, 398 bp, Glycine max
  unsure (1)..(398): unsure at all n locations
tntggaaggatcaagaagtgccttatgaatcctcccttgcttatgccaccagtacctgaaaggcctctcattttgtacatgacaatcttggacgagtcaatggggtgtatggtggggcaacatgacgaatccgggaagaaagagcgcgttgtttactacctaagtaagaagttcacgacctgtgaaatgaattactccttgctcgaaagaacgtgttgtgctttagtatgggcatcccatcgcctaatgcagtacatgctgagccatactacctggttgatatccaagatggacccggttaagtacatctttgaaaagccagctctcacgggacgaatcgccccgtggcaattcctgctatctgagtttgatatagtctacgttaccctaaatgcgat

SEQ ID NO: 9172 - DNA, 240 bp, Glycine max
agcttcagcaaagggatcacaggtcattacgggtaaattggcgaagcggttttatggaccttttcaaattgaggaacgcattgggtctgttgcttatcgtctcaggttaccggcagaagctcgcatacaccctgttttccactgttcattataaaaaccattcaaagggtcactggaatcccgtccacaagtttactggccgaacacaattatccagcatcaacccttgatcatgccttt

SEQ ID NO: 9173 - DNA, 345 bp, Glycine max
  unsure (1)..(345): unsure at all n locations
nttcactcggagatctgattcaggcgcataatatattttgacgcttgaaaatgaacaacggaagctctcgagaaattccaatgctcattacctttaactcggaggtctgatttaggcgcctaatatatcaagacgctcgaaattgagcaacggatgctctctagaaatttaaatggtcataacttttcactcagaggtttgattcatgtgcatgatatatcgagacgctcgaaatttaacaatggaagctcttgagaaattcaaatggtcataaccttaaactcggaggtgtcatttaggcgcgtattatatcgagactctcgaattatatcaatggaagctctt

SEQ ID NO: 9174 - DNA, 342 bp, Glycine max
ctttgttcaaggactaaaaacttagttaatcctttcttttctccttagtctgatcctggtttggttgctggtgcacttgctactgtcatgggttcatgcttatgttttatatcctttttctaggaaatggaccatctgaagatggcagtggcaaagatagcttcacaccaaccaaacatcttgttggtggagaaatcattctcacgatatgcacaggaatatcttcttgcaaaggacatatctctggttctcaatgtcaagagaccatctttggagcgtgtagcacgttgcacaggcactcatatagttccttcaatagatcatctttcttcacaaaagttg

SEQ ID NO: 9175 - DNA, 302 bp, Glycine max
  unsure (1)..(302): unsure at all n locations
agcttgctcgtcttgctgatatttatcatgcagactnttctgatgatgaccgaggaacaattagggatcaacttgaaacttatgtgctttaagggaagaagaaatgcttctttttccacttgtgaaaatgttcaaagtttggctatgaagatggttcaaactgagaaacattnggtatttccattggtttataaacttattgagctagctttgatattgccggtgtcgacagcatccgttgaaagagctttttcagcaatgaagattatcaagtctaaattgcgcaataagatcaacgatgt

SEQ ID NO: 9176 - DNA, 306 bp, Glycine max
agcttgctatcccctctcttataaggatttatatttcctcatccgattctgatgatgatgtcgaactacatgtctcgacatctaagagggccaagaaatctggaagaaagtgcctggaaatgttcctgatgcaccattggacaacatctctttccactccattggcaatgttgaaaagtggaaatatgtgtatcaacgcatacttgcggttgaaagagaactgtgaagagatgccttggattgcaaggagatcatggacctcatcaaggctgctggactgctgaagactgtcagcaagttgggaga

SEQ ID NO: 9177 - DNA, 356 bp, Glycine max
agcttggtatattttgctccgcaaatattatgttgagactagcacttggctagaaggaatttacaaaatgaaagaaaaatgggctagttgctatatgaaagatgcttatagtataagaatgcaaagtactcaacttagtgaaagtttcaatgctagtgtgaaagattatgttagatcaagcttggatataatgcaaattttcaaacattttgagcgagctgtggatggcaagcaatacaatgaattagaggctgaatacaatagcaggaaaaaacttcatcggctaaggatagaacactcaccattattaaagcaggttaggcaactctacactccaaaaatattaaatttgttcc

SEQ ID NO: 9178 - DNA, 334 bp, Glycine max
tccgttattcaatttctagcgtctcgatatattattttaccgaatcagacatccgagtgaaatgttatgaccattcgaattcgtcgagagcttcttttgttcaatttcgagcgtctagatgagttatgtcaccgaatcggacatctgtatgaagagttatgaccattccaatttctcgacagcttccgttgttcaatttcaagcgtctcgatatattatgtccccgaatctgacttccttgtgaaaagattggaccattcaaatttctcgacagcttccgttgttcaatttctagcgtctcgatatagttatgtccccgaatcggacatttgtg

SEQ ID NO: 9179 - DNA, 340 bp, Glycine max
agcttcatgcagataagattttattgcttttagccacaaattttattataaatagcaacagttctctgatgcaatatacatgattatttaacttggtctaatgataaattgtattaattatgtctctaaagtatgaaaataaagctcattcagtagccaatccacagctccacacaagttcatgacaaccctttcaaagcttcaacttgatagcagtttgaacatccttatcacctcggccactgaagttaaccacaaccttggcttccttaggaagggttggacacactttctctagatatgccaatgcatgaaatgtttccagagctggaattatgcc

SEQ ID NO: 9180 - DNA, 495 bp, Glycine max
agcttgcttctacagccatagccaagatgcatcaatgtagcaaactttaagacattttgcaacatcattttggatattcaacaagaacatcctatttcttggcattggtaccttggtgattagattgtttctcccatctccgatggaaatactggaatctttcaagtgaatatcatagacttttttgagtaattttccgaaactcaaaatatagttcttcatatttaggacgtagtatacatttgatatgaatttatgtcttccatccttcaaacgaatcaagatcttaccttttccttttacaggaatcttggaattatcaccaaatgagacattgacacttattgattcatcaagatctatgaacatgctttttttttcttcacatatggttgcttgcaccagtgtcaaggtaccatgtgttttcttggctaccttcattacctccacgtgctaggagcactgtttcaaacttctcatctttttgctccacat

SEQ ID NO: 9181 - DNA, 674 bp, Glycine max
  unsure (1)..(674): unsure at all n locations
cttgctaccgcctgaacaattagacactgactcacatagcataatctgataacacatcagacacatcttttaatatttgtatttatttacatctaatcaaaattattaggagtcttgatttgttttaagacatagatgtatttttgatttaacaccatttctatacctctaaaacttctacacattgatttgtttgatccaactagaacaacctttgttagtgttaaaagatatggacttcttgttgatgatgattacactagatggacatgagttatgttcttaactcacaatgatgagtcactaaagatcttctataacttttgtaaacatgttcaaaatgaaaaaaggagtatgtattacttcaatggaaagtgaccatgaatgagagtttgaaaataaaatttttcataggtgttgtaatgagaatggaattttccccaacttgtctacaccatgaacactacaacaagatgatgtagttgagaaaaagaacatgtcattgaaagaaatgactagaaccatattaaatgattactaatctcttcaacactnttgggatgaggcagngaatattgcttgttatatttgcatccaataggaacttcatccaaaggacttattgtccaatggaaattatgtccatttgcattgcatttttgtgctttcatatg

SEQ ID NO: 9182 - DNA, 603 bp, Glycine max
agcttgctaacccatggaagttcctaatatcttccacactttttggggtgggccattcttggatggccttgattttctcagggtccacttggacctcatttctaccaactacaaaccctaagaaaactatattatctacactaaaagtacacttctctatatttgcatagagggtgtttttcctaagaactgaaagaacttgcctgttgtttagccttccatagtcatcacaaatagaagaacaaaaaaaattgcacaagagagagaagaacagagttgaagagatgaatacatacaaagaacaagtaagagaaaaagagagagaagagtttgatctaaaacttgcactagaagtttctaaaaatgggttttttttacaaaaatgactttaactaactaactaactaactaactctgaaaatatactaagtagaaaaatatatactctaactaagaagaagtaatgggtgggccctaattaagcccacttaatctctccaataagctaattacagaatgcaacgtcccaaaattcgcagcccaaaatccaagtgcagaggctctaactttcaagctcaaaatgaccctcaaaacagcataatt

SEQ ID NO: 9183 - DNA, 641 bp, Glycine max
  unsure (1)..(641): unsure at all n locations
ncaacaacaggtgctcggtgacgttctaatagtctcatataagagttttttctgattgcttttctaagaacacccacaatagactatcctttatctgaagttatccttttgattgatcattcttaccacaaaaacaaacatacaccccaatgcataagaacccccacgtaatagtacaaaaagtaaacgaacacaaccttacctccgcaagatgaataatgcatatgtatcttgattagtatcaatttataatagctttgtgtgtgtgttgatatatattaactattataaaatcaatatatttatcttaaaattattacattattaatgcataacctatttttttatattaaataatagaatagatactttttttataggaatagaatatatatactaataagttattagtatgagaataccatacacaatctctttaagcaaagtctgtgaataaaaaaacataattaaataaaaattccattacaaatgatcaaccaagttctctctgataaaaactaatcaacagtgagtactccctacaaataatatgactatcaaaaaaaataaaataacaaccgactgtactatgtttcaagactaaattcgttaactactctgttatggaattttataattca

SEQ ID NO: 9184 - DNA, 480 bp, Glycine max
agcttggagtggtgaaccacctgattatttttgttttatagtgtttggatcactggcctttgctcatgttaaacaaggaaagttggatgcaagggctgtaaagtgtgtgctcattggctatcctgaaggagttaaagggtacaagctatggaaattggaacctggtgagacaagatgcatcatcagcagggatgtaacctttgatgagagcagaatggcattgctaattaaggagcagaaagataacaacttaagtagtgagaataccaattttgaggtggagcattctgagaagctggagataatgaagagctggttactaagcatgacttgcccaattatcaattggctagagatagagaaaaaagggtgataaagccttcaaagaagtatggtcatgttgatattatatgctatgccctgagtgttgatgaagagattcaaaattcacaaaccatagacctggagggaagtaattga

SEQ ID NO: 9185 - DNA, 499 bp, Glycine max
agcttgtacagcgctaggcaatcaattcatgatatttcgaataagatttgagggtggaggatagacaaacagtgcttggcaatcaattcgtggggctacggataagattttagggtggaggaagcatgaatagcgctaggtgtcataccctaatttcgtccggggacctttgcttgatgacatgcgacctttgtttggtccctgtaaggtgcttggcacccatcattaggcaatttgtgaaattccaggacatgccgaaaaacaaaagaaaatattgatgcacaatccgtaaggttccgtgacacaccgaaaatcaaatggaagcatcgttgcataattagtgaggttccgtaacattccgtaagtcaaaaaggggatgattatgtaatccgcaaggttctgtaacattacggaaagaaaacaagtatccgtaccaaaattcgaagtttccgtaactttacgaaaaaaaagagtcacaaaaaaaaaagcagagggggtg

SEQ ID NO: 9186 - DNA, 496 bp, Glycine max
agcttgctatcccctccaagaaaaggaaagaattttcctcatccgattctgatgatgatgtcgaactagatgtctcgacatctaagagggccaagaaatctggaagaaaggtgcctggaaatgttcctgatgcaccattggacaacatctctttccactccattggcaatgttgaaaagtggaaatatgtgtatcaacgcagacttgcggttgaaagagaactgggaagagatgccttggattgcaaggagatcatggacctcatcaaggctgctggactgctgaagactgtcagcaagttgggagattgctatgaaggcttagtcagggaattcattgtcaacattccttctgacataactaacagaaaaagtgatgattatcaaagagtgtttgtcagaggaaaatgtgttagattctcccctgctgtgatcaacaaatatctgggcagacctactgatggagtgatagatattgatgtttttgagcatcaaat

SEQ ID NO: 9187 - DNA, 640 bp, Glycine max
gcaagcttattgataattagccatacaaatatgaatctcaatagcacagaagcacttcttgtgctttttgcatttgtcttcttggcatggggcaatgcacaaaatacccttgtgccagcaataataacatttggtgactcggctgtggatgttgggaacaatgattatctgcctacccttttcaaggctaactaccctccttatggaagggactttatcaaccatcaacccactgggaggttctgcaatgggaaactagctactgatattactggtgaggaaatatcatcaaaattgcaacttacttagcatggatagaaatagtgcacatatattattttcattcttgttgaaataatgtttccttttgcagctgaaacactgggttttaagagttatgcacctgcgtaccttaaccctcaggcatcatggaataatctttttattgcagcaaactatgcttcagctgcctctggttatgatgaaaaggctgctattctgaatgtaaagttggaataaacagtgcacacacatgcaaactcatcttggagaactaatcattattttaactgtgtttttttgcagcatgcgattccattggtcccacagttaaaatattacaaggaatactgaggcaagc

SEQ ID NO: 9188 - DNA, 492 bp, Glycine max
gcaagcttatcctgtggccgccaaagccttctgtttttctgttatagcctattataatcgagtagatgggccttgttctatggtaatcgattacagggagtagtaatcgattaccagatcctaaaatatggtatttcaagtgaaataatcacgaaaatcaattatttgtcacccgcaaaactacacatttattataaataatcaaaatagacaatcgtgaacaatcatcataaacaatcaaaatagacaatcatcataaataatcatgaacaataattagcaaacacaagcacttcactcaacaaaaaattaatcaatcatgaaagataactatcaaacacaatcatttttcttaatcaaaggaaacaatcatcataaacaagcataattaacagccattaaagccaatttattataaacaatcaaaattgttacgaatctaagttatttatgtctatgagtcctagtgctcttctaatatcaaagaaattt

SEQ ID NO: 9189 - DNA, 529 bp, Glycine max
tgaacccatctttgtataggtgaaccctcttaactctattttccaaaattctagttcaattgcatttaacacaaggacatatgatcccccatcattgtgtgataacaattttgttgactagctttgcaaacaaattcttcaacccccttaacaaaagactctttcaaacaacttctaccactataacatctatcgtacatccaacaatgattcaaaagaatatagctcatattttgtatatttaagaagaaaaaatatgaacattcatgaatcacatacataatcttaaagtgatctctattattagtcgcaacaattatgatcatgttttaggtgaaaaaaatcacatacatatggtttttgtctttctaaatgaacaaagcatggaatgtaaataatataaccacaatcacaaatatacttaacacatttagaatacaaaatttcgaacaactaaaataaaaaaaccacaactaacttgaacaatggaatgtacaacgatcacgtaatacaatctcacctataaact

SEQ ID NO: 9190 - DNA, 382 bp, Glycine max
  unsure (1)..(382): unsure at all n locations
gcaagcttngacagcgctaggcaatgaatgcatgagactccttttaagattcgagggcggaggatagacaaacagtgcttggcaatcaattcgtggggctacggataagattttagggtggaggaagcatgaatagcgctaggtgtcataccctaatttcgtccggggacctttgcttgatgacatgcgacctttgtttggtccctgtaaggtgcttggcacccatcattaagcaatttgtgaaattccaggacatgccgaaaaacaaaaaaaaatattgatgcacaatccgtaaggttccgtgacacaccgaaaatcaaatggaagcatcgttgcataattagtgaggttccgtaacattccgtaagtcacaaaggggatg

SEQ ID NO: 9191 - DNA, 564 bp, Glycine max
  unsure (1)..(564): unsure at all n locations
agcttcactactagaaaatgaacttttaacattttctattttttactttcaacatcggtttttaaccgatgttgaaaccaccgacgttaatattatcaacgttaacatcggttttcaaaaaaccgatgttaacttgcactacacgacatcggttatttacaaaaactaatgtcatataataagaaatataaaaaaaaaagcaaaaactaaaaaaacaacatcgtttttggttaaaaccgatgttgaattatgtattttaaagtgttttctacattggtttttttagaaccgatgcagaaagtgtctttacaacatcgattttaggccaaaaccgatgtaaaaagtgtctttaagacacactttttatatcggttatggcctaaaaccaatgttgcttttaaggaactttctacatcggntttagaacaaccgatgttgttttttgcaataaaaaaatgatattttatttgtttttacaatgaaccaaccaaaacctttcatgattttctccaaagagaattctttattcattagttaagcatagaaaaagatagaattgtgagt

SEQ ID NO: 9192 - DNA, 590 bp, Glycine max
  unsure (1)..(590): unsure at all n locations
ttgagccaactcaaacgataataactttttactcggatgtttgattgagtcccgtaacatatcgagacgctcgaaattgaatggtgaacctctgagccaattcaaacgacaatatactttttcacggatgtctgattgagtcccgtaacatattgagacgctcgaaattgaatgttgaacctctgagcaaattcaaatgacaataactttttactcggatgtctgattgagtcccgtaacatatcgagacgctcgaaattgaatgttgaagctctgagccaatacaaacgaccataactttttactcggatgtctgattgagtcccgtaacatatcgagacgcttgaaattgaaagttgaagctctgagccaattcaaacgaccataactttttactcggatgtctgattgagtcccgtaacatatcgagacgctcgaaattgaatgttgaagctctgagccaatacaaacgaccataactttnttctcggatgtctgattgagtcccctaacatatcgagacgctcgaaaatgaatggtgaagctctgagccaactcaaacgacaataactttttactcggatgtctga

SEQ ID NO: 9193 - DNA, 528 bp, Glycine max
agcttcaacattcaatttcgaccgtctttatatgttaagggactcaatcagacatccgagaaaaaagttattgtcgtttgagttggctcaaagcttcaacattcaatttcgaccgtctcgatatgttaagggactcaatcagacatccgagtaaaaagttatggtcctttgtattggctcagagcttcaacattcaatttcgagcgtctcgatatgttacgggactcaatcagatattcgagaaaaaagttatcgtcgtttgagttggctcagagcttcaacattcaatttcgagcgtctcgatatgttacgggactcaatcagacatccgagtaaaaagttatggtcctttgtattggctcagagcttcaacattcaatttcgagcgtctcgatatgttacgggactcaatcagacatccgagaagaaagatatcggcgtttgagttggctcagagattcaacattcaatttcgagcgtctcgatatattacgggactcaatcagacatccgagtcaaaagttattg

SEQ ID NO: 9194 - DNA, 560 bp, Glycine max
agcttcttattttcagtagatgaagatgattctgtggccacatcaaggactcctctaaggacaatagcatcatttcttgcactgaattgttgggagttggaagccatcttctcaatcagattcctagcctcaacaagagtcatatcactaagagctccaccactggcagcatcaatcatactcctctccatgttgctaagtccctcatagaaatattgcggaaggagttgctccgaaatctggtagtgaggacagctttcacacaatttcttgaatctttcccagtactcatacaagatctctccactaagtttcctgatgcctgaaatgtcttttctgatggcagtggtcctagatgcagggaagaatttatccaagaacaccttcttaaggtcatcccagctggtaatggacttgtgagcaaggtagtacagccaatccttcgccactccctctagagaatgaggaaaagcctttagaaagatatgatcttcttggacatcaaaggatttcatggtggaacagacaatatggaactccttaagatgcttatgaggatc

SEQ ID NO: 9195 - DNA, 629 bp, Glycine max
ttacatggagctatatcatgtggtatcaagagcattttcatctaggtgatgttcttttgattcctctatctttttgtttggtcaattcactttaattccttgttcttcatcttcttctccatgtatctcctcaattttcttgtagtttggtgttgtttagtgtagatcaaaaaaaataaaccgattaaatcttagatctacacttgctcttgcatttctatggttcaaattttatagataaactcttgaatcatgtttttgtgttgattttaggttctatcattttttagtcataatattcttgttttgaacctttagatctcaattttcttgcaaaatattgattagaaaagaaaacaaaaaaatccaagtgtaaatcacttcattcatgttgtcttagagtcatgtttagtcataataattgtcacattatgttctaagtttgaattcaattttgattttgttgattgaattataaatacatttgttcatgtattcttgcaattcttaccctatcatttaaatttgagtctaattcatgcatggtatttagttcataacatgttctaaatcaattcctagaagtagtcttgttgttgaacttttttttggtttctaaagttcctata

SEQ ID NO: 9196 - DNA, 605 bp, Glycine max
tgccccacccgttatcactgagcattctacatttgactaatcttatagtaccaagattctctagaaatccaatgcgatttggcaattccctgatatttccattgaccatgttcagtgtagtaagaaatgctaggtctccagtagattctagtaaatattcaagatttatgcaattcattatctcaattttcctcaataatttcggctctccaatctcatttggcaaatttgtgatggttgttccatctaactgaattcaatgttttaattgaattttccaatttgctgatccaactgataactccctcaggtaatataaagaaccaatgatagaagggagttctttaattgtggtgctatttaaaaaaagttgtgcccatgatatgagattgcctatagaatcaagaattacaatgagagattcacaccacatcaaattgagtctcttaaagggtattcaatgatcccattaagacagttaattcttgcaatgaacatagatgtcctgtagaactaggtacccctctcacatattggcaactttctaaaacaaagagcttcaagttttgtgatgcgaaaaaaatgactgtgggcactctactgct

SEQ ID NO: 9197 - DNA, 628 bp, Glycine max
  unsure (1)..(628): unsure at all n locations
caatagaccccctcaacctctttttcttaatcaaccatcgcagagcaattatgacctttccagcaatagatacaaccctggatggtggaatcaccctaacctcagatggtccagccctcagcaacaacaacagcagcctgctccttccttccgaaatgctgctggcccaagcagaccatacattcctccaccaatccaacaacagcaacaaccccagaaacaaccaacagttgaggcccctccacaaccttccctcaaagaacttgtgaggcaaatgactatgcagaacatgcaatttcagcaagagaccagagcctccattcagagcttaaccaatcagatgggacaattagctacccaattgaatcaacaacagtcccagaattctgacaagctgccttctcaagctgtccaaaatcccaaaaatgtcagtgccatttcattgaggtcgggaaagcagtgtcaaggacctcaacccgtagcaccttcctcatctgcaaatgaacctgccaaacttcactctattccagaanaaggtgatgacaaaaatctacctaacgatttctgtgcaggtgaatcttcttccacagggtaattctgatttgcagaagcagcacattcccccctc

SEQ ID NO: 9198 - DNA, 540 bp, Glycine max
tgccagctttgccagttagcaccccaattcttttttatggattcccaatcattcattcgggaccctttaacccaaactcgggaaatctctccagctccacctatgttgcttataagcaccaattcgaaatacactctcccattgatggtaaatctgatgcctccacttcttttgcacccaactctgcataatataaatgttactagctagcctaattgtttttaaaccacatgtatcctttacgagaaacaaaaaaaaaggtttatgacatatggcaattgacataacataaagatacttacttgctgtacaaaattggtacaatgccagctttgtacttggctattgtctgaaaggcaggttgagacatgtcaaagtgtggtctaggaggattacaccagccaccattgtcattatggagcgcgaagtttggtaggcacacaattgtggcatgtacaacaatggaagtgcccctgatgcaccattgtagcacttgccttgcgtcacaaactatcctatagcaaccaccacatgaatttc

SEQ ID NO: 9199 - DNA, 298 bp, Glycine max
acatactgaatcgataccatagttattttcaaaaatattcctaacagtcccatctttttgtgtggctcttgaatggctatcaaaaggcctatatatatgtgacttgagacacccaattttacaagagtttttcagaacaaaaaagccttatgctcttacaaagaaaaataattttatccctcttacaaattccttggccaaaactcttgtgattcataaggaatcatttgagtgctcaaattggttaatctatctttttatagagagatttcttcttctcttcttcttcattctgaaa

SEQ ID NO: 9200 - DNA, 604 bp, Glycine max
agcttaagctccttcaactgcacaaggctcttaatatttgaagagtatccttgtggaaccttcacccaacgaagacactgacaaaaacttatcttctcctttttggacaaagtatggcaagctgggggcaagtaaattttcttcccatcagaccttggatgcaactgtgattgaatccccatatcagctagatcttgacgggtattcaagccatccttcgtcttgccttgaatgttaaggagcgtcccaatgacactatcccatacatttttctccacatgcataacatcaatacaatgtctaacgtctagatcagatcagtacggaagatcaaagaaaatgaacctcttcttccatatgcaattggtacttttatccttcttttgggtcttccaaatacagtattgaggtgttgaacccgctcatatacctgttcaccagtcaatggtattggcgcaacattgtgctcttgactttcattaaaagctcttttcagtcgtctggaaggatgattggggtgtataaaacgaccatgcctaatatacactatttttcttccatgttttagttggatgtagcttgtgttttcttcacagatggggca

SEQ ID NO: 9201 - DNA, 459 bp, Glycine max
cgaaattgaacaacggaagctcttgagaaattcaaatggtcataacttttaactcggagttcaattcatgcgcatcacatatagagacgcttaaaaatgaacaacggaagctctccagaagttaaaatggtcataagttttcacactgatgtccgattcaggcttatattatatcgagacgctcaaaattgaacaacgaaagctcttgagaaattcaaatggtcataactttttacactgagggccgattcaggcttataatatatcaagtcgctcgaaattaaacatcggaagctctcgagaaattcaaatggtcataacttttcacacggatgtccgattcgggcgcatattatgtcgagaggctcgaaactcaacaaccgaagctatcgagaaattcaaatggtcataacttttcacaccgatgtccgattcaggcgcataatatgtcgagatgct

SEQ ID NO: 9202 - DNA, 422 bp, Glycine max
gctttcagcaaattcaaacgacaataacttttttcctctgatgtttgattgagacccgtaatatatcgagacgatcgaaattgaattctgaagctctgaactaattcaaacgaaaattatgatttgctcggatggctgattgagtccctgtatacatcgagacgctcgaaattgaatggtgaagctctcagctaattcaaacgacaataactttttactcggatgtctgaatgagtccccgtatacatcgagacgctcaaaattgaatgttgaagctctcagcagattcaaacgaccataacttttttcctcggatgtctgattgagacccgtaatatatcgagacgatcgaaattgaatcctgaagctttgagctaattcaaacgacaatactgatttgctcggatgtctgattgagcccc

SEQ ID NO: 9203 - DNA, 305 bp, Glycine max
ttataccttgatggggtggggcattattttgttcttgttcatagaaacatcaaacgtatcaattgctacctgcagttcattagtgcctgcaacaaccctcatggtgtaaaagtaggcgccaaaaacaaatgctatcaaaccctgaacgactaccaaattctttggcttaagaggaaggcttctatacaccataattctagccgtcttgatcaataggggaagaagggctagcacattctttaacatttacagttaccctctgtggaggcaagggctttaagcacaatatataatgagatcccttt

SEQ ID NO: 9204 - DNA, 575 bp, Glycine max
agctttagacctttgatggcatgttggcatcacctttattcttgttcttgtcaacttcaaacttatcaattgctacctgcagttcattagtgcctccaacaaccctcatggtgtaaaagtaggcaccaaagacaaaagctatcaaacccccaacaactaccaaattctttgccttaggtggaaggctcctatatcccaaaattctagccatcttgatcaataggggaagaagggttagcacaatttcacacaattacaattaccctttgttgatgcaagtgcaaaaagcacaaaagataaaaagataaataattctaaattgtgataatgaggagagtgaaagaaagtaaaaggtagacatttccacaaacagaataagggcaaggcagccccaacacaattgaaagaggagtaaaatgaaacgtagagaggtggtcaaattatttcatcaaacaaaaacagttttgatgggtattactcatattgctacaaagaaaacctttcaattaagtttctatgatgaaccagacagcattcacaaaatcaaaatttttagaaatgatgacttaatatga

SEQ ID NO: 9205 - DNA, 521 bp, Glycine max
agcttgaggataaagacttcccaagctatttatcttctctctcaaagaggctctctacttggatggttaggaatgaaggctcctacccttatttatactactccatctccacaatgaatggtggagattacttgtatcctaggatgaagattaattctctagaatgctccacacattctaggagtctctacactcttttattccctttcatactcttccataaggttccagcccacacatctccagaatattccagaggtttccacatccttccataagcttctagagagttctacactactctagagttctccaggatgttctagaaaattctacacttttctagagagctctacaattttctagaacctctccgatttgttatttaatttgatatttatttatttatttgagatgtttctttgctatcttaagtattgttttcaattgaacttatttaacaaatacataattttaattcaattacgtctatatgatacttttttatattttatttacca

SEQ ID NO: 9206 - DNA, 486 bp, Glycine max
  unsure (1)..(486): unsure at all n locations
ccctattttggcaatacctgatttttctaagggttgtatcttggaaactgatgcatcaggaattggactgggagcaatattattgcagaaagagaaacccttagcttttttggagcaaggctctctcaaactcgagtcagtgtatgagagggaattgatggcggtggtgttagcagtgaaaaaatggaggcactatctgttgggtaagaaatttataattagaactgatcaaaggagtttgaagttcttaaatgagcagaggcttatgagtgaggaacagttcaagtgggctactaaattgattggttatgattttgatattcagtataggccaggaaaggagaataaagtggctgatgcactatccacgcagttntcattttcagcaatttcaatggtgcaagaggaggaatacgctgattgggaggaagaaatacaagcaaaccctccattatatgaaatatatcaagggattctgactaaaac

SEQ ID NO: 9207 - DNA, 571 bp, Glycine max
agctttgatggtgtcgagaagaaatcacatgttttgtttcatcaaaaagggggagaatgtgaatgtatgtatacatgattttgatgatgtcaaaagaggaatcaaacaaagttgcttcaaaagataagcatggcttcaagattaatacaagattgcttcaacaaacaaagccttgcttcaagattaactcaagatcaagccttgccttaaagcaaagtgctttcaagacattcaaggctttggtaatcgattaccggaagatagggttgagaaatagttgttgaaaagagttttgaatttgaattttcaacatgtaatcgattaccatatgtctgtaatcgattaccagcaacgaaactcttgaaattcaaattcaaaagtcatgacccttcaaattataactgtgtaatcgattacacaaacattgtaatcgattaccagtgaagagtttttagaaaatatgccaacagtcaaatcttttctttggatttgtgaatggtcatcaaaggctataaataggtgacttgggaccaattttatgagagagttttgattgatcaaaatgtcttat

SEQ ID NO: 9208 - DNA, 567 bp, Glycine max
agcttaatcttcaaataaagcactattaatttttattattaatgatgaaaagaaatataatactagctatcattcttacttcttatctagcatgcatgctcatgttggccaccaccctcagcttcccatgcatgggactggcatccaatttcaaggaaattatcttattggatctttttatgtggttcccactggaagatacaatctagccttattttcatccacttgaattaaaaaaaagaagaagatcggtgtattaattaaatcaataaaaagattggtatcccactttttttagctttattttacattaactttgatatttagtaggtgaggtagaaaagattaaaggaaaaatgagtttttgatggttttaattggtgagagaaaattaccaatgaaacagattttgtttatttttagaaaaaatagaaaagctcacttatctttgttaaatcatgattctcagaataaacataataaaattatgtataattaaacattatttatatcaatgaggtcccctcactggttttggtcaaaccaattagtatcctatgcttttaa

SEQ ID NO: 9209 - DNA, 474 bp, Glycine max
tgcaaaacagatttcgcaagggtcaccctaccagcatataaaagagttctagctttccacgtacttaaccgttgatggacttcgtccatgataagttggaatgttcctcgtgatacctttttatgaaaaataggtaccctaaggtattttccaaggtcatcagtacactgattacccatttcctcgcttgattacccatctcctcgctcgattgattcctatgtgacactcaaacatttttagagaaatgcatacgagatttctctaagctaatcttctgaccagaactcttgcaaaataaatttaaaatattatgaatcaagtggacttattctagagaagcttccgcatacaaaagcaagtcatctgcaaaggtcaagtgcgatcaggaacaaaactagactacaacaatattatctccactttgttgatcaggaacaaaactatgttgacaaggcttaatccaatgagtca

SEQ ID NO: 9210 - DNA, 342 bp, Glycine max
ttttcggagaaacatgaatgtttttgtttagggctgttcatgtgtcctccattatcgagtttgtagctatgttccatgattgcctaagtgagcatcctcaaggcaatcctccattctcacccttttttggagccacatgaatgctattgcttaaagctgttcatgtgtccttcattttcgcgtttggagctgtgttccatgattgcctaaacgaggaccctcaaggcaatcctctattgtcacccttttccggagccacatgaatgtaattgcttaaggctgctcatgtgtcctacattttcaaggtgggagctgtgtaccatgattgcctaagagaagacc

SEQ ID NO: 9211 - DNA, 395 bp, Glycine max
  unsure (1)..(395): unsure at all n locations
atagcatcatttcttgccctgaattggtgggagttggaagccatcttctcaatcaaatttctaacctcaacaggggtcatatcaccaagggcttcaccactaatgaaggccgcttgcacacaatttcttgaatcttttcccgtacctatacaaactttcttcactaagttgcctgatgcctgaaatgtcttttctgatggcagtggacctagatgcacggaagaatttctccaagaacaccctcttaaggtcatcccagctaaaaatggacctgngagcaaggtagtatagccaatcttttgccactccctccagagaatgaggaaaagccttttaaaagacatgatcctctttgacgtcaggaggcttcatggggggacaaacaatatggaact

SEQ ID NO: 9212 - DNA, 499 bp, Glycine max
agcttgctaacatctacattaataatatgattcttaatgtgaacctcccgaggttcaataggaagaacagacaagggccttcagatcaagaggaaggaaaatcccaagagagaggatgatgcaatcctaccccgcaagggcattgaatagaagactccaagtagattggaccagagatgtaagagaaggccctaggattctcatgagccttagggtagattttgggcccatgggctaagtataagcccacttatctttgtacatattagattaaggtttcattattttggaccttttatttagggttccataatgtaggtagagtaccctagaaatgtaggatttttcagcccttgtattttacggtacctagactaatttttgtattaggggtagttttataatttcacatgcattaagtgaatatttgatgtgtgtgttggaaaataaattgaattgaattgggagaagcctaattcaattaaagtttagaggggga

SEQ ID NO: 9213 - DNA, 467 bp, Glycine max
caattacgagcgtctcgatatcctacgggacacttttctgacatctgagtcaaaagttattgttgtttgaatttgctcagagcttcagttttcaattacgagcgtctccatatattacgggactcaatcgaacatccgagttaaaagttattgtagtttgacttttcttagagcttccgttttcaatttcaagcgtctcgatatattacagggctcaataggacatccgagttaaaagttattgtcgtttgacttttcttagagcttccgttttcaatttcaagcgtctcgatatattacagggcgcaatcggacatccaagttaaaagttattgtcgtttgacttttcttagagctttcgttttcaattacgagcgtctcgatatcctatgggacacaatcggacatccgattcagaagttattgtcgtttgaattggctcaaagcttctattttcaattaccagc

SEQ ID NO: 9214 - DNA, 490 bp, Glycine max
agctttgaggaaattcaaacgacaataacttttttttcttatgtccgattgtgtcccggagtatctcgagacgctagaaattcaaaacagaagctattagaaaaatcaaacgacgataactttttacacggatgtcccattgagtcccataatatatcgagacactcgaaattgaaaacagaagcacttagcaaattcaaacgagaataagttttgactcggatgtccgattgtgtcccgtagtatatggagacgctcgaattgaaaacagaaactgtgagcaatttcaaacgacaataactttatactcggatgtccgattgagtcgcgtaatatatcgagtcgctcgtaaatgaaaaaagaagctttgaggaatatcaaacgacaataacttttgactcggatgtccgattgtgtcccgtagtatttcgagaagctctaaattcaaaacagaggctttatgaaaaatttatggcgatatcttttttca

SEQ ID NO: 9215 - DNA, 309 bp, Glycine max
agcttccactcttgggagatgaagctgcctttttattcatgggtggggttgaaacggagggcataggccaagatgtggaacttagagccgatggactcatggcagtcatgtcaagtccactagctgaatatgattgtgctgatggcatagacgagccagtggaagcatatacagggcgcaactcttgaggtttgtgggcagagaatctgacttttataacgcagccactctcatcgttgcaaatgcttgtacggtagtgggcaggatagcaatctggacttaaaaacaccatgagcattctcacaggaa

SEQ ID NO: 9216 - DNA, 368 bp, Glycine max
agcttgttctggatatgactagctcttatttctatgatgttaaaaaagaatgtgagaaacatttgcaaaagccttgctttattgccattggatctcctttccttaggactgtcttaaagatacatattgaacctgagctactgcataaggattctgtccttaaagtggaaagcagacaagatcttattttctataagggtgggaaactagttcttagtaatagtgctctggctaaattcatcagtggttacaagaaatatgggaggattggtgaactttcaaaacttttacttagtattcaaggggaactaaattcagtggcagggtccagtttgtgttctgatgtaattggtgcttgtattcagtta

SEQ ID NO: 9217 - DNA, 408 bp, Glycine max
agcttgtgtgtggtccaaaggatcatcttttttttcttcaaactcagcttccatgactcattataataatacttggcaagctcaagatttggatgcttatggtagaagaagtctgagatgggtgcaaaaatattacatgatttatagctactgcaaagattacaagcgatttcctcagggtcgacctcgtgaatgcaggctttctagattctcttagtgcgggataagtaaatttaaaattaatttgatgattttttcatttgtgtgtatttaaaattccactcgaatacggctgaatttgagcaagatcaatttgattttacttttgcttgcttgaaccgataatttcatctcttgttatttacctatttctcctactctttctaaacaatgtaaaattattaaaac

SEQ ID NO: 9218 - DNA, 242 bp, Glycine max
  unsure (1)..(242): unsure at all n locations
agctttggagtttccaagtgccaattcgtttttttctgtagtccagtcttcttctggcttcaattcatcagtgggctctccttctgtgtccagcatcttgggatgttcccagcctttgatgacagctttccaggttctgctatccagcgatttgaggaaggccaccattcttgctttccagtattcatagttgcttccatcaagaattggtggtctgatccctgatnntacttctttctcca

SEQ ID NO: 9219 - DNA, 483 bp, Glycine max
tggaactaaactttttttctctaccacttgctatccacaaactgatgggcaaacagaggtagtgaataagtctttatccacccttttaaggctcttctgaaaggcaaccataagtcttgggatgactatcttcctcatgtagaatctgcctacaacagggggggttcattgaaccaccaagcattccccttttgaagttgtctatgggttcaatcccctaacatcgctagacctcattcccctcccactggacacttcttttatacataaagaaggggaatcttggtgagagtttgtaaagaagttgcatgagagggttaagaaccacatagagaaccaaacaaacgtgttttcaactaaaggcaacagaggaagaaaaaaactatttcttaatgagggtgactgggtttggctccatcttacgaaggatagattccctactaaaaggaaatccaagcttagccctagaggggatggaccttt

SEQ ID NO: 9220 - DNA, 630 bp, Glycine max
agcttgagtcttataaatgaaaattcatggttgtattataaaatctcactaaaagtgtataaaatgttaataaaaagtattattaaataagaagtaactattatataatataaaatacattaaaagtttattaactataaatactgtgtccatctttatatataggaccctttcaactaatttcaacccttaaataattagttaatttagtcaatggtattaaatttatcaataatttgtgttgtttttccaaaattaaccttattattttaaaattaattatgtcctcttttcacttaattgtttctcatctagttactactctaggttcttctcgaatcctaataataaagaaaataagtttatctcattgtactcatccccttctaaaatggctgacgtttaagattttttcacacaaaataagaacaacaataaataagttagggatcaaaataattctactaaaatatatttcatctcattgctttaatttatgaggtgataaatggtggtagttgaaaaattgtaggacaggcattaaattcatgtatttattaagggctaaattgaaataaaaattttgatatctcaattaaaaataatagcattaatctatttaattttttg

SEQ ID NO: 9221 - DNA, 594 bp, Glycine max
ttggctttgaggacttgctccaatggctcatcatgtcttctattgaacctttcttcataggcttgaagagaacccatcaattggtctacagtcattgagtctaaatccttagactcttcaatagcacaaaccacataatcaaatttagcgattaaggagcgaatgatcttttccaccacacgaacatcttccatattttctccataacacttcatttggctcacaatagccaacaccttgttgccaaaatctgagatagattcggattccttcatatgtaatgattcaaactctctacgtagagtttgtaggcgcaccttttttaccttatcaacaccttcaagggaggttttcaaaatctcccatgcttctttggatgtgggtacatttgacaccaacactactagaagatgcatgatctacatcggtcacaatcaatgttctacaacggtgcatgaccgtttttgattataatgatgttgaaacttaaaaatttcaacatcagtccataagcgaacgttgtagtaagctgttttttttctacatcggggctatactaatgactgatgtagaaacattggttctgctttttga

SEQ ID NO: 9222 - DNA, 590 bp, Glycine max
  unsure (1)..(590): unsure at all n locations
cccatcaattgggctacagtcattgaggctaaatccttagactctttcatagcaccaaccacataatcaaatttagcgattaagggacgaatgatctttttcaccacacgaacatctttcatattttctccataacacttcatttggctcacaatagccaacaccttggtgccaaaatctgagatagattcggattccttcatatgtaatgattcaaactctctacgtagagtttgtaagcgcaccttttttaccttatcaacaccttcaagggaggttttcaaaatctcccatgcttctttggatgtggntacanttgacaccaacactactagaagatgcatgatctacatcggtcaccaatcatgttctacaacggtgcatgaccgtttttgattataatgatgttgaaacttaaaaatttcaacatcagtccataagcgaacggtgtaggaagctgttttttttctaaatcggcgctatactaatgactgatgtaaaaacattggttctgccttttgagggccgattttctacatccgttttaaattaagcaacgatgtggactcttattttctacctcggtttaa

SEQ ID NO: 9223 - DNA, 192 bp, Glycine max
aaatgttttctgatgcaccattgaacaacatttctttccacttcattggcgatgttgaaaagtggaaatatgtgtatcaacgcatacttgcgggtgaaaaagaactgggaagagatgccctggattgcaaggagatcatggacctcatcaaggcggctggactgctgaagactgtcaacaaattgggagata

SEQ ID NO: 9224 - DNA, 429 bp, Glycine max
tctgggggacatcttgacttgctttccaatctgacattcaccacagattctgccttcttctattttcagattgggaatgcctctaacagcacctttgtcaatgattttcttcatgcctcttaagtgcagatgtctaaatctttgatgccatattttgacttcatcttctttggagaatagacatgtggaggagtacctggtttcttgaggtgtccataggtagcagttgtcctttgatctgctgcccttcattagaacttcactcttctcatttgtcaccaagcattctgactttgtgaagtttacattgaatccttcatcacacagctgactgatgctgatcaagtttgcagtcagtcccttcaccagcagtactttgtccagactaggaagtccatcatggactagctttcccattccagtgatctt

SEQ ID NO: 9225 - DNA, 244 bp, Glycine max
  unsure (1)..(244): unsure at all n locations
ttttcaattacgagcgccttgatatattacgggagtcaatcagacatccgagtcaaaagttattgtcgtttgacttttcttagagcatccgcgttcaatttcgagcgtctcgatatattgcatggctcaatcggacattcgagttaaaagttattctcgtttgatttttctcagagcttncgttttccattacaagcgtctcgatatcctatggcacacaatccgacattcgagtcataagtta

SEQ ID NO: 9226 - DNA, 400 bp, Glycine max
  unsure (1)..(400): unsure at all n locations
acttgatgccttggtcaatctagtaactcttcttgccgtaaataaaaaatctgcaccttttactgttgcaagagtctgtggtctatgttcttctgctgatcaccatacagatctctgtccttctttgcagcaatctggagtcaatgaacaacttgaagcctatgctgcaaacatttataatagaccttcgcagtagcaaaaccaacaacaacagaataattatgatctttcaaacaatagatacaatccaggttggaggaatcatccaaatctgagatgggcaaatcctccacaacaacaacagcctgtcccttccttccagaatgttgctggtccaagcagaccatatgttcatcctncaatacagcagcnacaacaacaacaaagacaacaagtaact

SEQ ID NO: 9227 - DNA, 438 bp, Glycine max
  unsure (1)..(438): unsure at all n locations
tggaccaggaattattggatgggttggatgttgaatttttgttgttcctggcgcggagatgatggtactgcgggtgaaccacaagctgaaatttcttttggtgaggtagccatggaaaagcagagacgttggaatgatttcgtaaatctcagaaagctattgggaaatgctggagaaaacacgaatgccaagcagatataaatttgaataaagaatgtagaggggcgtgtgaagcaacggtcgaatttgctttgtagtgaacgtgctattaatgttaagtgattcgtttgggcacgttcagattgcagtagctgctataattcctctagcagacaaatgcccagcttgcctctcagttnttcacactgatgtgcattcaaagcctttgtgaaaatatctgctatttgttcctcagtgtcaacatgcttcagtgtgatc

SEQ ID NO: 9228 - DNA, 429 bp, Glycine max
tcaaaggcttagacaatggagtataagtgtttaagaatttttaaaacaaatggaactactccttttaagagctggacttatggaggaggaaagaacaagcatagctaggttccttagtgggcttaatatggaagtgagggacaaggttgaactccttccatatatggacctagatgagctagtccaactttgtataagagtggagcaacaacttaaaagaaagtcttctttaaaatcttaaggctttcactcttatccaaggaaggaccaagcccaaggaattttggaggctgcaccttgaaaacccaaggaagataagggtaagaccatagagaaatccacccctaagactagttcccaagaaaggactagcaacataaaatgtttcatatgtcttggcagaagtcacattgtctcttaatgccccac

SEQ ID NO: 9229 - DNA, 398 bp, Glycine max
ttgtaagacttaattcacccactctcttaagttattaaggtctcttgtccaacacactcaacccccaaacacttttgtgctgaagcaataaacactacttgttatttacaaaacagaatttatataagaccaatcttaaagaagactccctatgaattatggaagggacataagcccaacatttcttatttccacccatttggatgtcagtgtttcattctaaacaccaaagataaccttggaaagtttgactccaaatgtgattctggaatcttacttggatactttgaatcatccaagggatataaagtgtataactctagaaccttgactatggaagagtccattcatgtgagaattaatgacaacaaacctgacactacaatgtcggagctaga

SEQ ID NO: 9230 - DNA, 442 bp, Glycine max
  unsure (1)..(442): unsure at all n locations
tcagctaagagaaggtatctcctttctgaagaaactattggtgttagcgttttgacttctgcagngntggatatcattcacacttaaccattaattcagagtattattatatcatgattcttgactttctgtaatttgttgcacactactgctatttatattatgtgtctgcgctcttgagactaaggaatgttcactatagaattaataaatttaagttttatacaatcaaaacaattattttaaaatattctaacatctaaaatatcgttagttacaaatcttttacatcttttataaatttaagaattatcatttgagtttgctggtagaaaaattagtgaacatgtatataagtagaattctataaattcaatactatagcattcttaaagtggaatattctctacatgattaaaagctagtattcaccaatttatat

SEQ ID NO: 9231 - DNA, 446 bp, Glycine max
  unsure (1)..(446): unsure at all n locations
ntntggcaaaggaagaagaagaattatgagtaggaatgtatttttaaataatcgtaaaggttgtaaaggttaaaaggtttctcaaaagttgttcaagaagttgtttgaatgcaagtcaaggtcttgcttttatagactcttcatgtctggtccagaaaaccattggaagagttataaccttgagaaaatcttgagaaaaccattggaagagttacatctcttgaccttttattcaaaacttgtcactggtaatcgattaccataaccatctaatcgattacacaatgcattttatgaaaagatgtgactcttcacaattgaatttgaatttcaacgttcagatacactagtaaccgattaccaatatattgtaatcgattacaccatttaaaaattatttggaacattgcaaanttagtttaaagctttttgaatcacattttatc

SEQ ID NO: 9232 - DNA, 437 bp, Glycine max
  unsure (1)..(437): unsure at all n locations
taaatgcatgtgaaggagaaataaaagaagtggataacttattattattatacgtactatgatttgtgccttgatttcctgtgtagtcaacatcgggttattgttggcatctttgagtgagataaggatatcaaggaaatcctctccatgaattttggacccttcatcccattctttgattcgctgctcaatgatgggatcatgatacttgcccacagtttctatggccttcttcaccttgccctcatgaccatctaagtcaagtcccctcaagcaagggacatagtcagaaactctaaagtcataaatgtatntaagcattgtgaaaatggcatcaagatgttccacttcctcactaccaggccctccatccttcttaccctccccanagtacctcctactannagtcaatttcttcatcacattgcaacaatagt

SEQ ID NO: 9233 - DNA, 441 bp, Glycine max
  unsure (1)..(441): unsure at all n locations
ctcaagctntgaatgctctattcaatggagttgacaagaatatcttcttactgatcaacacatgcacagtggccaaagatgcatgggagatcctgaaaaccactcatgaaggaacctccaaagggaagatgtccagattgcaactattggctacaaaattcgaaaatctgaagatgaaggaggaagaatgtattcatgacttccacatgaacattcttgaaattgccaatgcttgcactgccttgggagagaggatgacagatgaaaagctggtaagaaagatcctcagatccttgcctaagagatttgacatgaaagtcactgcaatagaggaggcccaagacatttgcaacatgagagtagatgaactcattggttcccttcaaacctttgagctaggactctcggatagggctgaaaagaagagcaagaatctggctt

SEQ ID NO: 9234 - DNA, 396 bp, Glycine max
tgatggtgtcgagaagaaacacttgtgtgtcatcatttttaagggggagaatgtgaatgtatgtatacatgattttgatgatgtcaaagaagaatctaacaaggctgcttcaatcgataaacatttgcttcaagaataattcaagaatgcttcaacaaacaaagccttgtttgaagattcactaaagaccaagccttgccttaaaacaaagtgctttcaagacatgcaaggctctggtaatcgattaccaggaagtgtaatcgattaccagaagacagggttgagaaatagctgttgaaaaaggttctgaatttgaattctcaacatgtaatcgattaccgtatgtctgtaatcgattaccagcaacgaaactttgaaattcaattccaaagtcat

SEQ ID NO: 9235 - DNA, 390 bp, Glycine max
  unsure (1)..(390): unsure at all n locations
ntccctctttgaacaaatacccctcagccatatagaattcatcttgggcctttttcccaaaactctcgtaagtgggagagaaatgttcatctaaagcatacaagtccctaatattatcaaatcctaaaatttgagctcctagggagctaaacaatgtgtgtctcctagagagggcattagctaccacatttgtttttccctttttgtatttgataacatatggaaattgctttaggtactctacccattttgcatgcctcttgtttaacttgctttgccctctaatgtacttaagtgattgatgatcactatgaatgacaaattccttggaaacaaggtaatgttcccaagtttggagggctcttattaaggcataaagttctttatcat

SEQ ID NO: 9236 - DNA, 424 bp, Glycine max
ctttgaaaatacagggcatctttgccttatatagtcataggacaaaacataaaaaataacagaataaacttccatatggatttaggtcacaacccaacaattcaccaccttgaactaacatccatataggacacaaactgctccctctaagcacacaagaacttaaccccaacaatcaacattgagcaagcttaagcattgatcaaacatgctctttggaactggctttgtgaaaatatcagcaggattgtgcagagtgctgatcttatgaactttgattcttctttctgaccgaatgaagtgatatctaacatctatatgcttggttctatcatgatgaacctgatccttggccaagcatatagcactaaggctgtcacagtagatgttagcatattcttgattaattccgagatcatttatc

SEQ ID NO: 9237 - DNA, 434 bp, Glycine max
  unsure (1)..(434): unsure at all n locations
agcttagctacacatacctctctaatagctaagcttttctccttgagatgataagctagagcttagctacacaccccctataatagctaagctcacccccatgacaaaaaaacatgaaaatacaaaaaaaaagtccttactacaaagactactcaaaatgccctgaaatacaaggctaaaaccctatactactagaatggccaaaatacaaggcccggatgaaggaaatacttattctaatatttacaaagataagcgggctcatacttagcccatgggctcgaaatctaccctaaggctcatgagaaccctanggccttcccttggatctctagccctagcgctgttcgcctatcctccaccctcaactcttattcagagacccatgaattgattgcctaccgctgtttatgtgtccctcaccatcgagtctg

SEQ ID NO: 9238 - DNA, 412 bp, Glycine max
ctaagcttacacttgataatggagaacacatgaacagcgctaggtaatgacattcattgtactccgaacaaaggtggagtatggaggattgccttgagggtccgcacttaggcaatcatgaaactcagctccaaactcgaaagtggaggacacatgaacagccctaaacaagaacattcatgtggctccggaacaggatgagaatggaggattgccttgagggtcctctcttaggcaatcatggaacacagctccagactcgaaaatggaggaaacatgaacatccctaagcaataacattcatgtggctccggaaaaggatgagaatggaggaatgccttgagggtcctctcttatgcaatcatggaactcagctccagactcaaaagtggaggacacatgaacagcccta

SEQ ID NO: 9239 - DNA, 433 bp, Glycine max
  unsure (1)..(433): unsure at all n locations
ntactgaagaaagcaatatgtcgtctctgctgcattattacagcacctatacctctaccagccgcatcacactcaacttcaaaaggtaaatcaaaatttggaataattagcacagggggagaagtcatgatcctcttcatctcctcaaaggccttgacagcttctattccccaagaaaaaatgtctttcttagtcaattcggtgagaggttttgctattttaccataatcttggataaaatttctataataccctgtgaggcccaaaaaaccacgtacccccttcacattctntggtgtgggccatgcaagaatacagttcaccttttcagggtccattgccacaccttctccagaaatgatatggccaagataatcaatntgagcacacccaaacctacactttgcttgatttgcacanaacaatgctcaac

SEQ ID NO: 9240 - DNA, 452 bp, Glycine max
  unsure (1)..(452): unsure at all n locations
tcatgatgatgaatcaagttgattcaagtagttttgatgatgacaaaaagcctaagataagtttgatttcgagattcaagagaagatgaattcaagattcaagagaagaaatcaagaagacttcacaaggtaagtattgaaaagatttttcaaaaaacaaacatagcacaattttgtttttcaaaagagtttttctcaaaattttctaagttaccaaagtttttactctctggtaatcgattaccaattacctgtaatcgattaccagtggcaaagtttgatttcaaaagcttttaactgaatttgcaacattctaattgattttttaaatggtgtaatcgattacaatatattagtaatcgattacatggtggtggtaatcgattaccagtgacaagttttgaataanaatcaagagatgtaactcttccaatgggttataaggttttctc

SEQ ID NO: 9241 - DNA, 317 bp, Glycine max
ggcatccattgcacgcttcttgtctcataaaaaatataatataagctatgttatcatggtagcatagatgcatttagtgttaaccaatgaaataccttttttgttgcttgacaaattaggttgaacttgaaaaccagcttaagttggcaatgttggtaacttcaatgcaatagtggtataaagcaacttataattttctctgtttattctgtgttggtaatcagaatgcaccagattgttctttcttcttgcttcatacgtgtgcccacaacccaactggtgttgacaccactgaggagcaatggagagaaatatca

SEQ ID NO: 9242 - DNA, 335 bp, Glycine max
acaacccttcctttgtgttcagattgctttacaacaagagacccttggtctcttaatcccttttcagaaataagatgaagagaagaagaaatctctcttgaaagagatagattgaacaatggagcactcaaattattccttattgaattgcaagtgtattggccaacgaatttttaagaggataagacaattttggttttgagaagataagacctttttgttcttaaaaactctaagcaaatttgtgttccaaggcacatattaatagacccttgatggccattcaaaaaccatttgaacagatgtgactcttggaaattaatttttgaaaatct

SEQ ID NO: 9243 - DNA, 361 bp, Glycine max
  unsure (1)..(361): unsure at all n locations
tcaagaattatggcctcatcaaactacttgtttcccgagggaaattctataaatagacctcctatctttaatggagtgggttaccattactggaaaacccgcatgcaaatctttatagagacaatagatttaaatatttgggaagccatagaacaaggaccttatgttccctctataatagccggaagtgcaacaatagaaaaacctagagcagactggactcacgaagaaagaagaatagtacaatataatttaaaggcgaaaaatattattacatctgccctaggaatagatgaatactctagggtttcaaattgtanaagtgctaaggatatgtgggatacactacaagtaacacatg

SEQ ID NO: 9244 - DNA, 377 bp, Glycine max
agcttaagctccttcaactgcacaaggctcttaatatttgaagagtatccttgtggaaccttcacccgacaaagacactgacgaaaacttatcttctcctttttggaaaaagtatgacaagctgggtgcaagtaaattttattcccatcagaccttggatgcaactgtgatcgtatccccatatcagctagatcttgacgggtattcaagccatccttcgtctcaccttgaatcttaaggagtgtcccaatcacactatcacatacatttttctccacatgcataacatcaatacaatgtctaacgtctagatcagaccagtacggaagatcaaagaaaatggacctcttctttcatatgcaactggtacttttatc

SEQ ID NO: 9245 - DNA, 259 bp, Glycine max
  unsure (1)..(259): unsure at all n locations
tctcgatatattatgcgcctgaatcagacttccgtttcaatagttatgaccatatgaatntctccactgtattccgtgtgacaagttatgaccatttgaatttctcgatagcattcgatgttcaatttcgagcgtctcgatatattatgcgcctgaatcggacttccgtgtgacaagttatgaccatttgaatatgtcgagagcatccgatgttagatttcgagcgtctcgatatattatgcgcctgaatcagacatcc

SEQ ID NO: 9246 - DNA, 416 bp, Glycine max
agcttctcgatatattatgtgcctgaatcggacttccgtttgaaaaattattaccatttgaatttctcgagagctttggctgttcagtttcgagtgtctcgatatattatgcgcctgaatcggacttttgtgtgacaagttatgaacatttgaatttctcgagacctttcggttctcaattaagatcgtctcgatatgtgatgcgccagaatcggacttccgtgtgacaagttatgaccattggaatttatcgagaccttccgatcttcaatttcgagggtctcgatatattatgtgcctgaatcggactttcgtgggacaagttatgaacattggaatttctcgagaccattcgttgttcaatttcgagcgtctcgatatattatgcgcctgaatcggacttccgtagacaggta

SEQ ID NO: 9247 - DNA, 442 bp, Glycine max
ggagctcggggtctttctgaagttcctcagctgacttgtagtagaatgagacatattcttccacccaagacttgatagcatcccatatctctagcccatcagaagcataaggatagtcctcgatcaaaagtctaactccatggggagcagatggatccttaacagcaactcctctgaattaaaagcacccaaataacattgattagcacaagagttatatcaagcctgaagccctttttcttcttatgtcattgatgactctttatatgatgcattcatgtgttcccccattgtatgcactttgtgatttcttttgtctttttaatttactgtcaaacacaaaactagagctgaatcggaacaagaaactatttccaacacaaaagacttgagctgaatccaaacaacaaaaacaatatggcttgaaataaaaaaaataaaa

SEQ ID NO: 9248 - DNA, 349 bp, Glycine max
  unsure (1)..(349): unsure at all n locations
agcttcctcatggcnttcttgagaaactttctcaagaggcttctttgagaagctaacgctntaactactaacacccttctaataactaaactcacctccttgaaaataattacagataaaataacacaacaaatataatcaaacatcaaacataattactaataatatatagatatatatatcagggtgttacaactctcctacctttttaaaaatttcgtcctcaaaatttaccttactcaaacaaggatggatgagcttctcgcatttgactctctagttcccacgtggcatcttctcctgatgcacctccctagatcaccttgaccaacggaatctctttccctct

SEQ ID NO: 9249 - DNA, 321 bp, Glycine max
  unsure (1)..(321): unsure at all n locations
taggccatagatacaagagaatgccctaggattctcatgagccttagggtaaattntgggcccacagactaagtatgagcccacttatctttgtacatattagattaaagtttcattattttttgtccttgtatttaaggctccattgtgtagggagggtaccctattaatgtagaatttttcagcccttgtattttatggcacctacactaatatttgtattaagggtagttttgtaatttcacatgaattaagtgcactattttatgtgtgtgttgggagataaatttaattgaattgggaaaagcccaatccaatcca

SEQ ID NO: 9250 - DNA, 400 bp, Glycine max
  unsure (1)..(400): unsure at all n locations
gcccgcttgttgtccctgtacacggttccggtaatggtggcattgacggcaccggtggtcatgctcacttggctgccaccataagtggtgacattaagttgcagccttttagagtcatcaccggcttgggtctgaacggggttggtgagagtgtcgaagttggagattgagaggaaggaagaaagagtgtgaaattgtaaaagttcaaccttttgcctgtcgttgagtgagttgaggaatcctgcttttagctttgagaaggcagaatcaggtggggagaaaatggtcaatcccccagaacctgacgtgaggagttgagagttgagttggttgatcaactgggtcgtcttcagaagccgaatcagaacaganaatctcttggccttactcacgatttgag

SEQ ID NO: 9251 - DNA, 340 bp, Glycine max
agcttcacttgaaattaagtatttaattatatggttcttgatttaatcactattttctctccccctttggcatcaacaaaaagccaaactacgtaagaaatataaaacatacataaatgactaatcatacaagagaatataaaataattaaacaagataatttaactattcatcaaacttagaaaggtaagaaatataaaaatcatacataaatgacatacaaaataatagaaaacaatcaaacaagataacttaaccattcatcaatcttagaaagataatacttaatagaatgtcatataatccagaaagttattcatattaaccaaataaaactact

SEQ ID NO: 9252 - DNA, 323 bp, Glycine max
  unsure (1)..(323): unsure at all n locations
agctnggacttcctgtgttttgggaacctctccttcctcaggtgtacccaaacccaatcacctggttcaagcacgactttctttctgcttttgttggcttgccttgcatagctcgcatttttcttttcaatttgaaccttcacttgctcatgcaacttcttcacatactcagctatagcctgtgcatccttatgcttaaacatagcaatgttaggcataggcaacaaatcaagaggagtcaaaggattaaatccatacactatctcaaatggtgaacaattagttgtgctatggacagcccgattataagcaaactcaacatg

SEQ ID NO: 9253 - DNA, 377 bp, Glycine max
agcttgaatttccttttagtatggaatctatccttcctaagctggagccaaaccctgtcaccctcattaagaactagctcttttctttctctattgcctttagttgaatacacctttgtttggttctttatttagttcttaaccctctcatgcaacttctttacaaactctgacctagattccccttctttatgtataaaagaagtgcctagtgggattaaacccatagacaaccttaaaaggggactgcttggtggttctatgaacccccttgttgtaggaaaattctacatgaggaagatactcatcccaagacttatggttgcctttcagaagatcccttaaaagggtggataaagacctattcactacctcta

SEQ ID NO: 9254 - DNA, 438 bp, Glycine max
  unsure (1)..(438): unsure at all n locations
agcttatcccatgcctccttagcagatgttgcataagaaatcttctcgaatgcatcattttttaatgcttgatagatgaggaagagagctttattgtctctctttcttgagtcctttaatgtctccttttgtacttgggatagtgaagtctcatcttgtgactccttttagcatttttcaaccatttcccaaacatcatgtgctccaagaagggccttcattttgatgctccaattgtcataggtgctcccctttagaagtggaacttgaaaggataccgcttcattgcttgccataactatataggaatttcttatcagaacctaagctctgataccactntgttggaaagaataaggttataggaagtatttaagagacatggaggaggggagaatatctgaaagagagctagttttatgacttgagaaatgtttt

SEQ ID NO: 9255 - DNA, 309 bp, Glycine max
  unsure (1)..(309): unsure at all n locations
ngaaggcaaactggatgcattggttaactnggtaacccaactggccttgaatcaaaaatctgtacctgttgcaagggtttgtggtttgtgctcctctgctgaccaccatacagacctttgcccttccatgcagcaacctggagcaattgagcagcctgaagcttatgctacaaatatttacaatagacctcctcaacatcagcagcaaaatcaaccacagcagaacaattatgagctctccagcaacagatacaatcctggatggaggaatcaccctaacctcagatggtccagccctcagcaacaaca

SEQ ID NO: 9256 - DNA, 433 bp, Glycine max
  unsure (1)..(433): unsure at all n locations
ntatacaccttgtgcagttatcctctattcggttggacctattgtttcttctaatgttcttttagaaacaaaatgcaattgtcttaaatctcatttttggttatgggaaattccatctgcatgctttcattccccataagtcgcattgtttttttttaaaaatgtgtgttcttctgatcggtttatgggtttgtttctttactaagcgtgttcacattttagtgagagatttcaagactacaatgtcttttgttttacatttcaagacttcaatgtcttttgtctttatattttcaagacttcgatgtcctctatctttacatttcaagacttcaatgtctttttgtctgtacattttcaagacttcaatgtcttctgtctttacatttcaagacatcaatgtgttctgtctttacattctagagacttcaat

SEQ ID NO: 9257 - DNA, 337 bp, Glycine max
  unsure (1)..(337): unsure at all n locations
tttttgtaataggattaaatactctgtatcccttttggtttggagaatatccaacaaaaatgtacttttctgcccttgggtccagtttagaccgagatatggagggtgtatgcataaaaacaatacaaccaaacacttttaaaggcatttcagtatgtaatcgacatgctggaaaaattgttttgaaagtgtccaaaggtatgcggtaatttaacacacgagtgggcattctatatataangtaggttgctgttaggacggcatccccccacaaatattttggaacattactctcaaacatgatggcacaggctacttcaaggagatgtttattttt

SEQ ID NO: 9258 - DNA, 362 bp, Glycine max
  unsure (1)..(362): unsure at all n locations
tatcacgatacanagctgttgaagagagacttcaaaccaggacaacatgtattactttttaattcaagattgaaattatttcctggtaagttgaaatccaaatggtctgaacctttcatcatcaggaaagttcggccttatggtgcaatagagttgtatgatccacaatttcaggaccttgactgaacatggttggtgaatggccaaagattgaaactgtaccatggtggagagtttgaaaaggcaaacaccatcttaaatttgatataacccattgaggtatatgcgtcaggctaatgacgttaaaagagcgcttcctgtgaggcaacccaactctgatttctttcattttgtttttcatg

SEQ ID NO: 9259 - DNA, 438 bp, Glycine max
agctttcaactttcctattgaattagctataaacctttgcgtgaaattgatcttcccaatccgactttgaagctccttcctattctgaggtggccttgcttccaacaatgctttagctttatttttatctacctcaattcctctttgatggacaaggaaacccaaaaattttcctactaatactccaaaagcacatttctcatgattcattttaagcgtatgaaacctcatccttaacaaagaatcttttagatcgcccaagggctcctcaaaatcgattgactttgcaaccacatcattaatgtaaacctccaccaatttaccaaccaattcatggaaaatagcattcatagcccattgataaatggctcctatgttctttaaaccaaatgacattaccaaccattcatagatcccaagcgtttgtggacatcgaaa

SEQ ID NO: 9260 - DNA, 331 bp, Glycine max
  unsure (1)..(331): unsure at all n locations
atggtcataactnttctcacggatgtccgattcaggcttataatatatcgatacgctcgaaattaaacatcggaaactctcgcgaaattcaaatggtcataacttttcacacggatatcggattcgggtacataatatgtctagaagctcgaaattgaacaacggaagtgcttgagaattcaaatggtcataacttttcaccggatgtgcaattctggcgcataatatgttgagaggctcacaattgaacaacggaagctctcgagaaatataaatggggataactcttcacacggatgtgcgattcaggcgaatcacatatagagacact

SEQ ID NO: 9261 - DNA, 412 bp, Glycine max
  unsure (1)..(412): unsure at all n locations
agctntgagcaaattcaaacgaaaataacttttaactcagatgtctgatcgagtcccacaatgcatcgagaggcacgaaatataatacagaagctgtgagcaaattctatcgacaataactttgtaccctgatgtccaattgagtcgcgttatattcgagacgctcgaaattgaatacagaagctgtgagctaattctaacgacaataatattttactcggatgcccgactgagtcacgtaatatatcgaggcgctcgaaatagaatacagaatctgtgagcaaattctatcgaccataactttctacttggatgtccaattgagtcacgttatatctcgagacgctctaaattgaatacagaagtcttgtgcaaatctaacgacaatatttttactccgatgtctaatgag

SEQ ID NO: 9262 - DNA, 317 bp, Glycine max
tcaacattcaatatcgagcgtttcgatatattacaggactaaatcagacatccgagtaaaaagttattgtagtttgaagttgttcagagctaaggcattcaagtccgagcgtcttgatatactatgggactcaatcagacatccgagtaaaaagttattgccgtttgaatttgctcaaagcttcggtcttcaatttcgagcgattcaatatattgcgggactcaatcgaacatacgagtaaaaacgtattggcggttaaatttgctcagagcttcggtattcaatttcgagcgtctggatatattacgggtctcaat

SEQ ID NO: 9263 - DNA, 402 bp, Glycine max
  unsure (1)..(402): unsure at all n locations
agcttctactctnttggatgcttaaaaataactnttatccaacaaatttcagttgatgtcttaaacatgatgaaatttggttaaaagcttaaaaaataaagccaaaatggctaaagtttaactgttccaaactttattatcattttgtgtccaaaaaactttattattattttaatcagaataaatggttagaatgtgtttatttcaaggattaaaattttatcccagaaaatattttgtgaaacaaacgttccattgttattgttttcattatttataatatttttttgcaataattattactttaatctcttataacaaatatttattgatatcaatgatgcacttttatattataacttgctaacttgacgtgatcaaacagatatatagattataaaa

SEQ ID NO: 9264 - DNA, 401 bp, Glycine max
  unsure (1)..(401): unsure at all n locations
cagcttgagcaaattcaaacaacaataacttttgaatcggatgtccgattctgtcccgtaggatatcgagacactcgtaattntaaacggaagctctgagaaaaatcaaacgacaataacttttaactcggatgtccgactgagccctgtaatatagcgagacgctcgaaattgaaaacggaagctctatgaaaagtcaaacgacaataacttttgactcgaatgtccgattgtgtcccgtaggatatcgagacactggtaatttaaaacggaagctctgagaaaaattaaacgacaataacatttacctcggatgtccgattgagccctgtaatatatggagacgctcgaaattgagaacgggagatcttgaaaagtcaaacgacaataacttttaactc

SEQ ID NO: 9265 - DNA, 398 bp, Glycine max
agcttccgttttcaattacgagcgtctcgatatcctacgggacacaatcggacatccgagtcaaaagttattgtcgtttgaatttgctcacagcttcagttttcaattaccagagtcttgatatattacgggactcaatcagacatctgaattgaaaggtattgtcatttgacttttcatagagctaccgatttcaatttcgagcgtctcgatatattaaagggctcaatcggacatccgagttaaaagttattgtcgtttgattattctaagagacttaggtttcaattacgagcgtctcgatattatacgcgacacaatcggacatccgagtcaaaagtattgtcgtttgatatgcgcagagctttaattttaaatacgagcgtctcgatatatta

SEQ ID NO: 9266 - DNA, 331 bp, Glycine max
gcttaacatcagaccactttcgggtgctggaactacttcacatggacttgatggggcctatgcaagttgaaagccttggaggaaagaggtatgcctatgttgttgtggatgatttctccagatttacctgtgtcaactttatcagagagaaatcagacacctttgaagtattcaaagagttgagtctaagacttcaaagagaaaaagactgtgtcatcaagagaatcaggagtgatcatggcagagagtttgaaaacagcaagtttactgatttctgcacatctgaaggcatcactcatgagttctctgcagccattacaccccaacaaaa

SEQ ID NO: 9267 - DNA, 421 bp, Glycine max
  unsure (1)..(421): unsure at all n locations
agcttcttagtttcagatgatgcagctgagtttgtagctacctcatgcactcctctaatgactataacatcatttctggcgctaaactgctgggagttggaagccatcttctcaattaaatttctggcttcagcaggagtcatgtctccaagggctccaccactggcagcatctatcatacttctctccatattactgagtccttcataaaaatattggagaagcaactgctctgaaatctgatggtgagggaaactgacacatagttttttaaatctctcccagtattcatacaggatctctccactgagttgtctaatacctgagatatccttcctgatggctatggtcttggaagcaggngaaatnttttctaagaatactctcttcaagtcatcccagctcgtgatggaccttggag

SEQ ID NO: 9268 - DNA, 427 bp, Glycine max
agcttaagagagtccatcctttgtgatacacaaagtacttatgagagattagaacttaattgtaaattcactcattaagtgttataattaatatataattctatatcaaacttttgtttgtgaaaaccaatagtgactgatgcaatcctaccccgtagagaaggccttagggttctcatgagtcttagggtagatttcggtcccatgggctaagtttgagtccgcttatctttgtacatattagattaaggtttcattatttttgggccttgtatttagggctccataaaataggtaaggtaccctagaaatgtaggatttttcagctcttctattttagggcacatagactagtttttgtattaagggtagttttgtaatttcacatgcattaagtgaatattcgatgtgtgtgggtggaaataaa

SEQ ID NO: 9269 - DNA, 427 bp, Glycine max
  unsure (1)..(427): unsure at all n locations
cctccataagaaaattctttgtcttctccgcatcataaaagtntgattctctagttacacgctctacctcctataattgtccagttttagcagcggcctcaatgtacttgaagtgaatatcaggatcctcactttacaagacagaacaaaaaaaattacagtaattgaaaaaaaaaaagtcaagcagaccaactagtgaactgaggtcatgttcactctccaataaaaaagaaatacctggagctcaagtatgcacccaagaaaaagtatagtccttcataggatttgaattgctcaaagagtttaatgcatgcatcaacacccaactgctcagaatattccttagcagtctgcaaaccatgtactagtaagaatttcttatagatgaattgcggaattcaaaaaataaaatagaacatgactctta

SEQ ID NO: 9270 - DNA, 356 bp, Glycine max
  unsure (1)..(356): unsure at all n locations
agcttatgaccatnttaatttctcgggagtntccattgttcaataaccaatgtctcgatatattatgcacctgaatcggaaatccaagtgaaaagttatgaccattttaatttctcgagggatttcgttgttcaattttcagtgtctccatatatggtgtgcctgaatcggacctccgtgtgataacttatgaccatttgaatttcttgagagatttcgttgttcaatttcaagcgtctcgataaatgatgcgcctgaatcggacatccaagtgaaaagttctgaccatttgaatttctcgtcggctacctgtgtcaaattcgagcatctcgcatgtgatggcctgaatcgacctc

SEQ ID NO: 9271 - DNA, 284 bp, Glycine max
  unsure (1)..(284): unsure at all n locations
tctagaggctnggattatctaccccattttcgatagtacttgggtaagcccaatccaggtggtaccaaagaaagggggcatgacaatcattcagaatgaaaagaatgacctaatcccaacaaggactttcactgactggagaatatgcatcgattaccacaagctcaacgaagccacgaggaaagaccactttctttttcctttcatggaccaaatgttggataggcttgcgggacgggcttattactacttcttgtatggatactttggatataatcaaatta

SEQ ID NO: 9272 - DNA, 395 bp, Glycine max
  unsure (1)..(395): unsure at all n locations
ntatacgccttgtgcggttttcctctattcgattagacccagtgtttcttctaatgctcctttagaaatgaaatgcaagtgtcttaaatctcatttttggtcatgagaaattctatttgtatgctttcattcctccttcatcgcatttttttatataaaaaaatgtgtgattgatctgatcggtttgggggtttgtttctttaccaagcgtgttcgcattttagtattttagtgaaaacttttagagacttcaatgtcttcagtctttacattttcaagacttcaatgtctccagtctttacatttcaagacttcaatgtcttcagtctttacatttcaagacttcaatgccttctgtcttttacatttcaagacttcaatgtcttcagtcttta

SEQ ID NO: 9273 - DNA, 418 bp, Glycine max
agcttgtttgttagaaagacccaacgctttttacctatttgatgcaatcctaccccgcaagggcattgggtagaagactccaagtcgattgggctagagatccaagggaaggtcctagggttctcatgagccttagggtagatttcgagcccatgggctaagtatgagcccgcttatctttgtaaatattagaataggtttttccttcctctgggccttgtattttggccattctagtagtataatgttttagccttgtattttggggcattttgagtagtctttgtagtaaggactttttttttgtattttcatgttttttgtcatggaggtgagcttagctattatagggggtgtgtagctaagctctatcttctcatctcaaggaggtgagcttatctattagagaggtatgtgt

SEQ ID NO: 9274 - DNA, 380 bp, Glycine max
  unsure (1)..(380): unsure at all n locations
caaactggganaagaagtagccacaaacaaaaacatagctgaagaagagagtgattgtccaatcacaacatcaagtagacgtcgtctttatcctcccggaaggatcatgcatattattcctattgcacattcgtctgaaaatcctaattcaaaccacaatggttgtgatgagaaacatgtttccctatatgaaacgcctagagagctctatggaaagctcagactntcaagaaggatgatacttgatcataagtcaaacaagtatctgaaggtgttacaacaattaatcaatcaactagagaaagagagcttcatatatcatggaggatgagccaaggaatagcggatgaaanaataatnggtactaatttgatcatgga

SEQ ID NO: 9275 - DNA, 255 bp, Glycine max
  unsure (1)..(255): unsure at all n locations
agcttgtgctattccaagttgattaatcatacctttaagccagattgcttccttcactccttcagctatggccatgtattctgcttcagttgttgtaagagcaacaactgattgttgatttgctttccaactgattgttgtaccaaacanagtaaacacatatcctattaaggacttccttgtgtctacatttcctgcaaaatctgcatctacatagcctgtgactgctggctcgtgtgctgtcttcttgtacct

SEQ ID NO: 9276 - DNA, 373 bp, Glycine max
  unsure (1)..(373): unsure at all n locations
tctaactgaggcagccaacanaataaatgcaagataaagttctttcctgaagagacgaattttcttcgtcttcccagttttttttgacaattctagtttgcttagttcctcaatgcctgaatctgaggatgatctatgaagactattagatcgcattagaggctcagcttctttctcaaaggcaaccaaatcagtctcagacgatcttcccaacttttttgtaaccacccactcgtaagaacttccaaagcgaagtaatccagatatcatggcattaaatttagttaccgacatagtgttctcaaatagaaggtaaggaactataaacggaaatgaccgtggagctggtagaacacttatgagggacatgatt

SEQ ID NO: 9277 - DNA, 398 bp, Glycine max
  unsure (1)..(398): unsure at all n locations
agcttgtccataaaaataggtttttgaagttcatcatttcaatttctcattaagtaaaatggatcattttcaaggtccaacgccttaaaatgatcacctcttaagtaaaaaaaagagtcgcttgataagcaagaactacgtaggtctgatttcctcatcgcaattgaggatacgtangagcaaaagccccgcttttgtcgaccaccccaagagatcgttaatggtccaatgccttaacgtttctctcctttcaaaaacaagagatcgttaatggcccaacgccttaacgtttctcccctttcaaaatcaaaagaccgtgtaatgngtcaacaccttaaatgaccctttgttcaataaaaacatattttgcgaaaaagataaaacacctaaccaacact

SEQ ID NO: 9278 - DNA, 374 bp, Glycine max
agcttgtgtcacactctcaactgccgaagctaaatatattgccgcatgaagatgttgtgctcaaagtctctagatgaagcaacaactacaagactttagagtaaaccttgatcacattcctctaaaatgggacaacacacgtgttatcaatctaaccaaaaaccctgtcatgcattttatgactaagcacatagaaattaggcatattaaatgcatcaagcatagaataacattctgtttgtacaagtatgtgattcacattgctattcatatcattttttttgtttagtttgtgtcttacttattgatttatgtgcatactcattagtttgtttgaatatcacatgtttttcttagtaatttcgtgatttctc

SEQ ID NO: 9279 - DNA, 383 bp, Glycine max
agcttgaaggaaaacttgatgccttggtcattctattaacccagcttgccatgaataaaaaatctacacctgttgcaagagtttgtggtctatattattctacagatcaccattcagatctttgtccttttttgcagcaatttggagtcaatgagcaacttgaagcttatgctgcaaacatttataatagacctcaatagtagtgaaaccaacaacagcaaaataattatgaccttttaagcaatagatacaatccaggctggaggaatcatccaaatctaagatggacaagtcctccacaacaacaatagcctatctctccttttcagaatgctgctggtctaagcaagccatatgttcctcctccaatacaacaacagtag

SEQ ID NO: 9280 - DNA, 325 bp, Glycine max
tcatgcttaacatgtatggcaaaactttattattgttgttcaagacatacaagtgagcttgttacaaatcttctacacttggagtgatcacctgcagtcctcttgaacccttaccacccactctgtcatcatgccgacactcaagaagcccaataggtttagccttctctaagtattctgaaaaaaattcaatggcttcttctgcaatgtacctctcaacaatagatgcttctggacgatatagattctttgtatacccttttaagatcttcatgtatcgctcaaccgggtacattcaccgttgataaacacgaacacaacattt

SEQ ID NO: 9281 - DNA, 382 bp, Glycine max
agcttatgttcataactatggtatggttttctaatcttgaaacttacaaaacagttatgaataagtatgcagccatgcaggtacataatgaaacagtatcgatagcaatcactgcaaagggaagttgattgtaattaccctttagaagttttatcatgagtccaccagtggccagtgttgaagacgagaatatctgcatctttatattgagatgaagatttaccaaccaaatcgagacgaagtgtttccttctttgtcccattcttatcagtcatttccccttcttgaaccaagaatggagacacaaaaagctccacggagaagtgataatcctattgagataccaaaccagctctgtgaggtaaagaataataaatcaaag

SEQ ID NO: 9282 - DNA, 362 bp, Glycine max
cttgagcaattcaatggtcataactatacactcagtttttcgattcaggcgcataatatctcgagacgctcgaaattggacaatggaagctcttgagcaattcaaatggtcataactttcaactgggaggtgcgaatcatgcgcattatatattgacatgctcgaaattgaacaacggaagctcttgagaaattcaaatggtcataactttacactcggatgtccgattcaggcgcataatatttcgagacgctcgaatatgaacaatggaagctcttgagcaagtcaaatggtcataacttttaacttggatgtgcgattcatgcgcttaatatatcgagacgctcgaaattgtacaatgg

SEQ ID NO: 9283 - DNA, 371 bp, Glycine max
agcttcatgagagagtcaaagatcaaatttataggaaaagtaaaagctatgctaaacaagccaacaaagggagaaagaaagttgtcttctaacccggagattgggtttgggtgcacatgagaaaagaaaggtttccggaacagaggaaatcaaagcttcaaccaaggggagatggaccatttcaagtgcttgacagaatcaatgacaatgcttacaaagttgagctgcccggtgagtataatgttagttccaccttcaatgtctctgatttacctctttttgatgcagatggagaatccgatttgaggacaaatccttctcaagagggagagaatgatgaggacatgaccaatagcaagggcaaggatcca

SEQ ID NO: 9284 - DNA, 355 bp, Glycine max
agcttctcggtatattatgcacctgaatattacctccgggtgacaagttatgaccatttgaatttctcgagagcttccgttgttcaatttcgagcgtctcgatatcttatgcgcttgaatcggacctccgagtgaaaagttaagaccatttgaattgctcaatagcttccactattcaatttctagcgtctcgatatattatacgcctgaatcggacctccgagtgaaaagttgtgaccatttgaatttctcgagagcttccgttgttcaacttagagcgtctcgatattttatgcgcgttaatcagacctccgagttaaaagttatgaccatttgaatatctcgagagctttcg

SEQ ID NO: 9285 - DNA, 394 bp, Glycine max
  unsure (1)..(394): unsure at all n locations
tcttcttcaataaaccgtttaaaaaggcactcttatcatccttttgaaaaagcttaatgtttttgtgagcaacaaaggctaaaatgattcttataacttcaagtctagcaacatgaacaaaggtttcagagaaatctataactttntgttgattatatcctcaagctactaacctagctttgttgcatactacttttccttgttcatccaacttgtttctgaagattcatcttgttccaatggtgctcttngtttctggcattggaacaaatgtccagacatcatttttgttaaactgattcagtttttcttccattgtgattatttagtcatnttctatcaaagctttgtctatagttttaggtttgatttcaaacacatggtctttgaatga

SEQ ID NO: 9286 - DNA, 379 bp, Glycine max
  unsure (1)..(379): unsure at all n locations
gctttatagctnggttagttnctatggaggtgtgtaatgatttatctcctaggttgcacctcttaatgaaattgttaagaaaaatgtgggctttaaatgggggcgggcggggagagggacaataacatgcatttgctccactcaaagaaaaattgactcgtgcacctattcttgcattgcctaattatgcaaaatcttttgaaatcgaatgtgatgcatctaatgtggggatataggttggtttgattcaagatggacattccattgcttattttaaggaaatgataaatgggggttgtcttagttattcacatatgataatgagttgatgccttggttatagccttacaacttggcaacatttcttttcccaagagtt

SEQ ID NO: 9287 - DNA, 339 bp, Glycine max
  unsure (1)..(339): unsure at all n locations
tctatagaaggtcgttcctaatttctctacaattgcatcacctctcaatgagctggtgaagaagaatgtggcatttacctgnggtgaaaaacaagagcaagcctttgctttgctcaaagaaaagcttactaaggcacctgttctagctcttcctgacttttctaaaacttttgagctagaatgtgatacctctggagtgggagttggagctgtattgttacaaggtgggcaccctattgcttattttagtgaaaaacttcatagtgccaccctcaactaccccacctatgataaagagctttatgccttaataagagccctccaaacttgggaacatta

SEQ ID NO: 9288 - DNA, 313 bp, Glycine max
tacttggatgacctccaatttgtggactcttccatttattgtccatatggttttcttgaggatgatcttgtcaaggtgaataaatttatttttctggccaactttgtagtgatggacatggaaaaggactccaaagtgccacttaatttggaagacccttctagaacaccactaagattttggttaatgtgcatgatggtcaaacaaagcttagtgtcatttgatgaagagatcacattcaatgtgtttgagactatgaatcacctattagatgagaaatcttatcttctgatggatgttcttgatgatgctt

SEQ ID NO: 9289 - DNA, 369 bp, Glycine max
agctttgagcaaattctaaggacaataactttttactcggatgctcgattgagtcccgtaatatatcgagaggctcaaagttgaaagccgaagctcctagccaattcaaatgacaataactttcaactcggatgtccaattgagtcccgtaatatatcgagacacgcgaaattgtaaatagaagctctagtcaaattttaacgacaataactttttactcgaatgcccgatagagtcccgtaatatatcgagaggctcaaaattgaaaacagagtctcctagcaaattcaaaccacaataagttttgactcgtatgtccgattgagtgccgtaatatatcgagacgctcaaaatataaaattaaagctt

SEQ ID NO: 9290 - DNA, 378 bp, Glycine max
  unsure (1)..(378): unsure at all n locations
agcttccttaagaagattcttaaagtttttagagcttagctaaacacacctctctaatagctaagctcacctccttgagatgagaagctagagcttatctacacaccccctataatagctaactcatccccatgacaaaatacatgaaaataaaaaaaattctctactacaaagactactcaaaatgtctcgaaatacaaggctaaaaccttatactactagaatgaccaaaatacaaggcccaaacgaagcaaaaacctattctaatatttacaaagataagcgggctcatacttagcccatgggctcgaaatctatcataaggctcatgagaaccctanggccttcccttggatctctggtccaatctacttggat

SEQ ID NO: 9291 - DNA, 342 bp, Glycine max
agcttttaaaccttgagttttatgaatattattttattggaagtattcctcctgagctaggaaatttatttctgttggagactctgagggtctatcacaataatttgaattccaccattccatcttccattttccactagaaatcgctaacacatttaggactctcagagaatatattggaaggaacaatattctctgagattggatctctgaattccttacaggctctaaccctgcattcaaatgctttaactgggaagatcccttcatcaataacaaacttgacaaacttgacctatctgttaatgagccagaatattcttttaggtgaacttgctccaa

SEQ ID NO: 9292 - DNA, 396 bp, Glycine max
  unsure (1)..(396): unsure at all n locations
tctcacaattctncccaatcttctgggaataaccctacttaactgattaaaagacagattcacccctctaagcctccctacaaaaccgggaacagaaccattcaattcattaccagccaaatcaaaacctccaatctctcaagagacccaattgaactaggtatctctccaacaatcctattaaaccccagattcaaaaccctcaaattcttcaagccatcgactctcaagggaagatagccactaatcaaattcccttcttaatcgagaacctcgaggttctccatgccccaaatcgctttcgggatttcactctccaacgcgttgaaggggagagacaaaaccctaagctccgtgagctcggcgatcaaactcagagaagaaacattttcgaag

SEQ ID NO: 9293 - DNA, 407 bp, Glycine max
ggatccttgagtcacctgcggcatgcaagcttgaaaaacataagtagtttcagccttagttttaataggaaatatccaagtatatctggaaaaggcatcaataaaggatacataatacttgaaaacagaatagtaagttaaatgagatggtccccacagatctgtaaaaaaaagttctaggggagagtaaacagaagtagaagaatgagatggtagcctgtgagacattcccaagcaacaagaagcacaaaagtctgaaaaaaatttattatatgaagaaatattacactggttgaagactagcttcattacatgactattgggatggcctaacctagcatgccaaagactaacagtgctaggaggagaaataacagaactggaagctacactagaatttttattaa

SEQ ID NO: 9294 - DNA, 369 bp, Glycine max
agcttgtaatcgattacacacatactgtaatcgattaccagaggagattttcagaaaatattctcaacagtcacatcttttcatttggttcttgaatggtcatcaaaggcctatatatatgtgacttgagacacgaatttgctaagagtttttctgaacaacaagtgtttattctctcaaaaagcaaaatcgttttatcctcttaagaattccttggccaattcaattgcaattcattaaggaatcatttgagtgctcagattgtaaaatctatctcttcaagagagattcattcttcttctctttctaattcactaagggattaagagaccgagggtctcttgttgtaaaagaattctaaacacaaag

SEQ ID NO: 9295 - DNA, 362 bp, Glycine max
ctttcagcaaattcaaacgacaatacttttttcctcatatgtctgattgagacccgtaatatatcgagacgatcgaaattgaattctgaagctctgagctaattcaaacgacaataatgatttgctcggatgtctgattgagtcccgtaatacatcgagacgctcgaaattgaatgttgaagctctcagcaaattcaaacgacaataactttttactcggatgtctgattgagtcccgtaaaacatcgagacgctcgaaattgaatgttgaagctctcagcaaattcaaacgacaataacatttttcctcagatgtctgattgagacccgtaatatatcgagacgatcgaaattgaattttg

SEQ ID NO: 9296 - DNA, 396 bp, Glycine max
tcaacattcaactctagcgtctcgttatattatatgactcaattagacatccgattaataatatattgtcgttggaatttgctcagagcttcaacattcaatttcgagcgtgttgatatattacgggactcaatcagacatccgagtaaaaagttattgtcgcttgaatttgctcaaagcttcaacattcaacttcgagcgtctcgttatattataggactcaattagacatccgagtaaatagttattgtcggttgaatttgctcagagcttcaacattcaatttcgagcgtctccatatattacaggactcaatcagacatccgagtaaaacgttattggtggttgaatttgctcagagcttcaaaaatcacttttcgagcgtcttgatatatt

SEQ ID NO: 9297 - DNA, 364 bp, Glycine max
  unsure (1)..(364): unsure at all n locations
agcttcttatctttaaacaaagcaggggtcttcctattcaacatttaaatacagtaaggaaccaatcatacctttgtactccctttntggagaatcattacctttctcatcctcatcatctttctggattattagaagccctaggaagaactttagctcacccatcgtactcatttcaaattcatctttcattaggttaaaaatcttcttacacatcctttctaaggttgcaccaattattatgtcatttgcatagatctgaacaattagaaggtttcctttctatgcctttctaaatagtgtagtgttcactattcctttatgtcatctacatagatttgaacaatcaaaaggttttctttct

SEQ ID NO: 9298 - DNA, 349 bp, Glycine max
agctttgagctaattcaaacgacaataatgttttgttctgatgtctgattgagacccgtaatacatcgagacgctcgaaattgaatgttgaagctctcagcaaattcaaacgacaataactttttactcggatgtctgattgagtcccataatacatcgagacgctcgaaattgaatgttgaagctctcagcaaattcaaacgacaataacttttttactcatatgtctgattgagtcccgtaatatatcgagacgatcgaaattgaattctgaagctctaagctaattcaaacgacaataactttttgctcggatgtctgatggagtcccgtaatctattgagacgct

SEQ ID NO: 9299 - DNA, 380 bp, Glycine max
  unsure (1)..(380): unsure at all n locations
agcttcaaccaaggggagatggaccatttcaagtgtttgaaagaatcaatgacaatgcttacaaagttgagctgcccaatgagtataatgttagttccaccttcaatgtctctaatttatctctttttgatgcagatggagaatccgatttgaggacaaatccttctcaagaaggagagaatgatgaggacatgaccaanagcaagggcaaggatccacttgaaggacttggagggcctgtgacaagggctagagcaaggaaagccaaggaagctcttcgacaagtgttgtccatactatntgaatacaagcccaagtttcaaggagaaaagtccaaggttgtgagttgtatcatggcccaaaaggtggaggactaactg

SEQ ID NO: 9300 - DNA, 344 bp, Glycine max
  unsure (1)..(344): unsure at all n locations
ntngagaaattcaaatggtcaaactcttctcacggatgtccgattcatgcttataatatatcgatacgctcgaaattaaacatcggaaactctcgcgaaattcaaatggtcataacttttcacacggatatcggattcgggtacataatatgtctagaagctcgaaattgaacaacggaagtgcttgaaaattcaaatggtcataacttttcaccggatgtgctattcgggcgcatattatgtcgagaggctcacaatttaacaacgggagctcttgagaaatataaatgggcataactcttcacacggatgtgcgattcccgcgaataacatattgagacact

SEQ ID NO: 9301 - DNA, 350 bp, Glycine max
gacacctgaaactaagctttcatatgatggtggtagagagctaacagaatcatgtcaacatcttcatcctctatcttaacatctatatctcttaattccatcaaaatagaattcaattcatcaagatgatctttaagagatgtaccttctttcatgtgtaaaccaaatagactccttttcaagaagagtttgttgcagattgacttagtcatatacaacttttccaacttgagccataattcacttgcagtttcttcatttgcaacttcatataaaacttcatcagacaaggaaagcaggattagtgagtgagccttttcttcttgttctgcaagttcttcaatctttta

SEQ ID NO: 9302 - DNA, 342 bp, Glycine max
agcttatgaccattttaatttctcgggtttttccattgttcaataaccaatgtctcgatatattatgcacctgaatcggaaatccaagtgaaaagttatgaccatttgaatttctcgagggattttgttgttcaattttcagtgtctccatatatggtgtgcctgaatcggacctccgtgtgataacttatgaccatttgaatttcttgagagatttcgttgttcaatttcaagcgtctcgataaatgatgcgcctgaatcggacatccaagtgaaaagttatgaccatttgaatttctcgtcagcttccgttgttcaatttcgagcatctcgacatgtgat

SEQ ID NO: 9303 - DNA, 369 bp, Glycine max
  unsure (1)..(369): unsure at all n locations
agcttgaactngacttgttntataacttatttatttntctaactatgaatttagtgtttaataaaggaatttaatactagataataatcttcaaatagaaaaatatgtgttaagcatgtggtataatattatggaatccatataattttaatttttctataatacatatagtttgggctattagagttattcatgaactatatggatgtcgagcttgtaaaatttgatcttaatctacttaaataatcaagctcaatcttaaatttgagtttgtttatctacttaaacaaataaacttggtcaaacatttagtgaatcaaactcaaatgttcacaaataatttgatccatttacatctctaattgtccc

SEQ ID NO: 9304 - DNA, 366 bp, Glycine max
  unsure (1)..(366): unsure at all n locations
agcttggcctgctcggngtcctcgtccttaccactgccttcaccgtcctttggcttggtcttgggccttgaggccacagtcgcgtccctgttggaggccggactatggccaccatcatccagcacgacccaaatctcctcgcatagttttcgacattgtcttcctacacatcctgcttcatgtattctatcatttgctccttgaaattgctatacatctttttcttcctccaccgatggcatgtacgagaatcaaaattttgaactagggaaagggagaaaccttcgaggtgcatcacgatcgtgtgtgttggggaaagagggaggagaaggtgtggtcaatttcaaaatcctagttgttattgga

SEQ ID NO: 9305 - DNA, 378 bp, Glycine max
agcttcaaggatgaggaccattcttggttctcaaacatggaaaactttaaggccacaagacaaccactggaaggtatgaaattccactacagaaaaaggttcttccgagaaaccaccaagtatgtttgggatgaccctactctttttcgtattggtattgaaaatttgttaaggcaatgtgtaacaaaaggagaacaagcaagcatactttggcattgccacaactcattatatggagaccacttcaacgcacaaagaacaactgcaaagatccttcaagccaaattctattggcctacactctgccaggtgctcataaccatgcactatcatgcgatagttgtgaattagccaacaacatatctagacatgaaatgc

SEQ ID NO: 9306 - DNA, 396 bp, Glycine max
  unsure (1)..(396): unsure at all n locations
aaactcaagcttataccaaagtccaaaacattaatatatttcccctttttcaatttatgaaactacttattaaattattataattattttttggttttttatcgtaagaattaaagataatattaagatatttataacacttatgcaccatgttgaaccaactaaattatacctcatttctaattatttttgtttgatatcaattttttaatcttaaactatattttaattcttaaattgattattaaatatatcatatttataaaacaaatctccatacattgagtcaaattcttaaataataaaattttatctttcaatatattagtttctcaacctcaactaagataacatggtcacctantttttcttatataatataaaaaataattaata

SEQ ID NO: 9307 - DNA, 344 bp, Glycine max
  unsure (1)..(344): unsure at all n locations
taagcatttngtccatgagtattgcatatacaggtttcgcttcatataacattaaacacaaatattttaattactgtcattctgtcaatctatcaagtgtgacttgtgcagccaaaggaaattactacatagaatccccaccccgttaccccccaaaatgtgaacatgataatggttacctggcagaaagtggtgaaaaaaaccctggagtcctttcatttgaagcaataaacaaagttctttcaggtgggacccactttgctatcctacaaagcataaactctggccgagtgtctctatcaaagtgagggtgcaagctcctcactacaccaaatctatctttc

SEQ ID NO: 9308 - DNA, 271 bp, Glycine max
agcttctgtccctgagaatctggttcctataagacaacagggagtgaagattgctgaaaaccctaaccttgcaacaagttctagggaagtatacacggagatggacaagacaattcgcggtattgtgagtagcattttgaaagaagcttctgtgcctgatgctgagaaagatgttccaacatcttccaccccgaatgtttctgtgcctgatgttgagaaagatgttccaacatcttccggcccaaatgctgaagcactccctttacccatg

SEQ ID NO: 9309 - DNA, 294 bp, Glycine max
agcttgaatttccttttagtatggaatctatcctttctaagctggagccaaaccctgtcaccctcattaagaactagctcttttctttctctattgcctttagttgaatacacctttgtttggttctttatttagttcttaaccctctcatgcaacttctttacaaactctgacctagattccccttctttatgtataaaagaagtgcctagtgggattaaacccatagacaaccttaaaaggggactgcttggtggttctatgaacccccttgttgtaggaaaattctacatg

SEQ ID NO: 9310 - DNA, 373 bp, Glycine max
  unsure (1)..(373): unsure at all n locations
agctnttagaaaatgtcgatgctgagttatactatttttcttccatgtttcaattgtacatagcttatgtcttcttcacacatagtgcatgcaagatgaaccttaacactgtatccactcaaatttccgtatgctggaaagtcattgatgatacaaaacaactttgcacgcaacttgaatgtctcatttcgatacctgatgtagctccatgtggagcttgtangccttggatcttcttcatcaatggagtattttgcttcttgaagatcaatggcatctgaatggagaaggaggaaaggtgattcgagatgccacttcaaaaagaagatgagtcaagaacaagctcaccaccataggaagccatggataagag

SEQ ID NO: 9311 - DNA, 375 bp, Glycine max
agctttgcatatcctttgataaaccttctatagtaaccagtgaggcctaagaaacctcttagctgcttgatattgagtggtgtaggccactctagaactgcctgcaccttagtagcatccatagcaactccttcacctggaactatatgtcccaagtactctatctccaatacaccaaaagagcatttagacaacttagcaaacaaaacattttctttcaatactttgaatacaacctctagatgggataagtgttcatgccatgtggaactatataccaatatatcatcaaaaaacactaacacatatttccttaaagcatgttggaaaatatggttcatcaaacactgaaaagaagtcggagcattggttaaa

SEQ ID NO: 9312 - DNA, 273 bp, Glycine max
agcttgacacagaccatacgaagattttgtgagtttatcaaaccatgttgtcattcttgacaagataaccaagaggcatgtccatgtatactccctcaatcaaatcactattgagaaacacattatttaaatcaagctgaaacatgttccaatttctgtgaggtgcaatggaaagaaacactctcattgccgtatgcttggcaacaagtgagaaagcgtccaaaaaatcgatctctgcttgttgtttgttgcgtgtacccttttgcaacaaga

SEQ ID NO: 9313 - DNA, 383 bp, Glycine max
agcttagaggaaaaccattcgcattgttgtattttattttcccgtagaaacccaaaactatctcggtaaaactatgatcccagtttcgttaaccgttggattttcacgaagtttggatatgtttttcgaaattcaattgcgcacacttccaccgttgggatttgtgagataatattagtggagggagaaaaaggaatcgcatgaagacagtacaagtggaggtttcaatctcttctccgtctctctgacgtttgggaattctatcggagcagtcggaggaataactgaaggaatctcaaggaaccactagagatgttactatcactagctgaagacacgtgagtccgctcagagataagggatgagtttatcgcaattggggg

SEQ ID NO: 9314 - DNA, 342 bp, Glycine max
agcttgtgctattccaaattgaataatcatacctttaagccacattgcttccttcactccttcagctatggacatgtattctgcttcagtagttgaaagagcaacaactgattgttgaattgctttacaactgattgctgtaccaaacaaacgacacacatatcctattaaggacttccttgtgtctacatttcctgcaaaatctgcatctacatagcctgtgactgctgcctcgtgtgctgtctttttgtaccttatactagctttcaaagatccatttagataccttagtgtccacttcacagcttcccaatgtgcgctgccaggatatgccatgaatct

SEQ ID NO: 9315 - DNA, 325 bp, Glycine max
agcttgtagcatattgaaaccgcaatatatcgagaagctcgaaattgaaagaagaaactttgagcaaattcaaatgacaataaattttaactcggatgtctgattgagtcccttaatatttcgagacgctcgaaattgaaaaaaaaagctcaaagcaaattcaaacgataataactttttacttcgatgtccgattgagacccataatatatcgagacactcgaaattgaaaccaaaagctctaagcaaattcaactgacaataacttttcattcagatgtctgattgagtcccgtaatatatcgagacacacgaaattgaaaac

SEQ ID NO: 9316 - DNA, 381 bp, Glycine max
  unsure (1)..(381): unsure at all n locations
ntgatgcaacaatggagaggttaatgaaacaactttatgatgcgctccatgagaggttggatcaaatggagaatagagatcataataaagaagaaaggaggagaagagggaatgatggtgttcctagacaaaaccgaattgatggtattaaactcaacattcccccctttaaaggaaagaatgatccggaggcctacttggagtgggagatgaaaatagagcatgttttctcatgcaacaaatatgagagggaccaaaagatgaagcttgccgccatggagttttccgactatgctcttgtgtggtggaacaagcttcaaaaggagagagctagaaatgaagagcctttggttgatacatggacagagatgaaaaagatca

SEQ ID NO: 9317 - DNA, 376 bp, Glycine max
agcttcaagaaaaagatggcctcagcatactccttatttccagaagggaattctatcaataggcctccaatctttaatggagagggttaccattactggaaaacccgaatgcaaatttttattgaggcaataaacctaaatatttgggaagccatagaaatagggccttatatacccaccacagtagaaagaattacaatagatggcagttcatcaagtgaaagtataactatagaaaaacctagagatagatggtctgaagaggatagaaaacgagtaatatacaatttaaaagccaaaaacataataacatctgccctgcgaatggatgaatatttcagggtttcaaattgtaagagtgctaacgaaatgtggg

SEQ ID NO: 9318 - DNA, 422 bp, Glycine max
tcgaatttctcaagagtttccgttgttcaatttttattgtgtagatgagttatgtccccgaatcggacatctgtgtgaaaacttatgaccattcgattttctcgagagcttccgttgttcaatttcgagcgtctcgatgtattatgtccccgaatcggacatctgtgtgaaaacttatgaccattcgaatttctcgagagcttccgttgttcaatttcgagcgtctcgatgtattatgtccccgaatcggacattcgagtgaaaagttatgaccattcgaatttttcgagagcttccggtgttcaatttcgagcgtctcgatatattatgtccccgaatcggacatacgtgtgaaaacgtttgaccattccaatttttcgagagctttcgttgttcaatttcgagcgtgtcgatatgttatg

SEQ ID NO: 9319 - DNA, 571 bp, Glycine max
  unsure (1)..(571): unsure at all n locations
agcttcatgggagagtcaaagatcaaattgttaggaaaaataaaagctatgctaaacaagccaacaaaggaagaaagaaggttgtcttcgaacccggagattgggtttgggtgcacatgagaaaagaaaggtttccggaacagaggaaatcaaagcttcaacaatggggagatggaccatttcaagtgcttgaaagaatcaatgacaatgcttacaaagttgagctgcccggtgagtataatgttagttccaccttcaatgtctttgatttacctctttttgatgcagatgtagaatccgatttgaggacaaatccttctcaagagggagagaatgatgaggacatgaccaagagcaagggcaaggatccacttgaaggacttggaggacctatgacaagggctagagcaaggaaagccaaggaagctcttcaacaagtgctgtccatactatttgaatacaagcccaagtttcaaggagaaaagtccaaggttgtgagttgtatcatggcccanatggaggaggactaaatgacaccactttgtctcaatttttagagtgtttagtttgc

SEQ ID NO: 9320 - DNA, 556 bp, Glycine max
tgttcatcgattcaaaggcatccccaacaacaacacggactattttcacattcttccaatccaaaatacttccttgccaccctcaaaacctccctatcactatccacacccatgacctcaaaacccaattgatttctcaaaaaggtcatcaaagccccacctccaaccccaaggcacaaagccttcggcctaaaccccatccgaatccgcccctccacatattcactattcaacacaagaccagccaccataggccccaagtaagggtgcaccaaaaccttaagatcaggcacaaaccccacatcaccaccaatgcacacaccatcacaatctctctcaagaataatacaaatttcagtttgaatcaaattaggcattctcttaaacctcaacctcctcctaaactccctcccatgatcactctcattttcaattcaacatcctcaaacaacatttcaccaacatgacacccaacacattcatgaaccaccacactagaaaccaaactatcctcataactcacaaggggtatctcacgaatgccccttttgaaaaa

SEQ ID NO: 9321 - DNA, 562 bp, Glycine max
  unsure (1)..(562): unsure at all n locations
agcttcgccatcgaagacgttgttgatgtcagcaacgacgttgaaatgtatgctttttaggtcaggctgtaacggcaacgacgtagtaatatataatttcaacgacggtgcttacgtaagcaccatctttgaagttatatattactacgtcgttgcatccgcaaccaccgccgttgaattcatgttcaactacgtcgttatcgtaagcattgacgtagacaattttttttttactattaaaaatgttgattattatattacaaattaaaaataaacataattaatataagctcaaaatttataaattattattgtcaactaattaatatgataagtaaatataatttttgtgctataaattatggttttacttaatttaatattatataaataagcaacataatgataaatcattatcaaccagtatttcaaatgtaaccttatgagataaataaataacantaattaaacataatatantaccaataataaataaggtaaatctactaacactactacaaaagtgggattcacatcggtgtgttaacatgggtgtaaaaaa

SEQ ID NO: 9322 - DNA, 524 bp, Glycine max
gcatgcaagctttttacaatcgatatgggtgttattctttgagaaatatttgatgcctagtgtagactatcttctttccatgcttaagttgcacaaagcttgtttgattttcacaaattgagcatgcacaatgccctttaacactttatccactcaaattcccaaatgctgaaaagtcattaatggtacaaaataccattgcatgcaacttgaaggtctgttaacggtacccatcaaacacgtcaaccctgtcctcccacaactttcttaagtcttcaatcaaaggacttagataaacatcgatatcatttcctagttgttttggacccaaaatcatcatagacaacttaatgtattttcgcttcatgcacaaccaaggtggcaggttgtaaatcattagcaaaataggccatgaattgtagttagtgcttaagttactaaaggattcattccattggaagaaagtccaagcctaaggtttcttgcctactttccaaattgggaaacacaccattaattgtctt

SEQ ID NO: 9323 - DNA, 485 bp, Glycine max
  unsure (1)..(485): unsure at all n locations
atgcaagcttnacttagattacttttgttgttgtggtacacacataacaaatatagagagaggctagtagataagaccactctagaataatcaatattagagagcaattgcctaagattattcactatatgcttgctcctcacttttgcacgtccttaaacataatatattgatatatcaaaaatactattataataaataacaagaatatcttaatataggtaaaaaaaatactgtcatgaaatcacatatataaatatttgaaaaaatacaaggtgttttcattttgtgaaatcatcatttatataaacatatacattacatataaaacttgtattatattcttactgtatacaacaagtttgaaataacgtgatgaaaatacatatgatcataaaatgtatactatataaaatagaataaagcttgtatagcacacatatttcactatatgcgaaataaaagcgaagcttaatatgtacttc

SEQ ID NO: 9324 - DNA, 455 bp, Glycine max
agcttctccaaaaaaaatagtatcttctgcatattggagaatattaataggcactttattcttccccaccagaaagctttggaagcaattttttctgattgcttccctcatcaaacctgtcaaaccttcagcaaccaggtcaaaaaggagtggggacaaagggtccccttgtctcaagcctctttgaggcttaagctctgaggttgggcttccattaacaaggactgacacataagctgaagtaatgcaccccttgatccagctaatccatctctcattaaagcccattcttctcaacatatagaagaggaactgccatgacacagagtcataggccttttcaaagtcaactttaaagaccatacaagacctgttggtcctccttgcctcctccactacctcattaacaaccaaagccccatacaacagctttctatcctttacaaaggctgact

SEQ ID NO: 9325 - DNA, 506 bp, Glycine max
cgttcagttgtagatccaaaacttgaagtgatgatgagttttattgtattgtggaatggttcctgtcaacttgttgtgagacaagttcagaatctgaattgcacttgcattgcaaattgaggaagagaagtcaccggtgattgagttaaaactaagatcaaggtaaaggagttgttggttccacgagaattggtccaatgattgtgtcaatcggttatgagataggtccaatccatgtaaccacgggctcgtttctttcaaccaatttggcactctacctttaagtgtgttattggacaaatggagtgattccaaaaatgggacttttcccgataattttggaaattcagttaaacccatagaagataagtccaaactcaataaatgggataaactataattgacattggattctaaattcagtgataactgatcattccgtggaaggtgaaggtctcccaaatattgaagcttggagaaacgatgaaatttgacagatccactta

SEQ ID NO: 9326 - DNA, 469 bp, Glycine max
  unsure (1)..(469): unsure at all n locations
agcttctaaaattggtgtgtccaaacctttanagtaattctaacactcttcattagattcaacagttttcaaacatcgaattccagtacccttcatgttgatttgaaaaatactttttttgccaaatgagcctttagaatcaacctatgagaagaatcaaatatttccattgagtcatgtttcataatcaatgaaaagcctttcttaattagttttccaatactcaataaattgcatttctttcttggtacatatagtacattttctataagtgttgattttccattcttccctttaagcacaatattgcctataccttttgcactcaatgttctatcatctggaaattgaactttgcttgttcttgtggtatcaagatcactcaaccattctttgtggtttgtcatatggtttgagcattcaatttcaaggaaccaatacttagactgtgcaagattctcacaggtgg

SEQ ID NO: 9327 - DNA, 252 bp, Glycine max
ttgaggaaattcaaacgacaataacttttgactcggtggtttgtttgtgtcctgaaatatatcgagacgctcgtaattggaaacagaagctctgagcaaattcgaacgacaataaatttttactcggatgtccgaatggatcccgtggtataacgtgacgctgttaattgaaaatagaagctctgagcttattcaaacggctataacttttaactcgggtgtccgaacgagtctcgtagtatattgagacgc

SEQ ID NO: 9328 - DNA, 406 bp, Glycine max
agcttctgttttcaatttcgagcgtttcgttattttacggggctctatccgacatccgagttaaaagttattgtcgtttgattattctaagagcttcccttttcaattacgagaatctcgatatattacgggacacaatcggacacccgagtgaaaagttattgtcgcttgaattttctcagagcttctattttcaattacgagcgtctcgatatattacgggactcaatcggacattcgagtaaaaagttattgtcgtttgaattttctcagagcttctgttttcaattacgagcgtcctgatatattacgggactcaatcggacatccgaggcaaaagttattgtcggttgaatatgctctgagcttctgttttcaattacgagcgtctcgatatattacggga

SEQ ID NO: 9329 - DNA, 414 bp, Glycine max
  unsure (1)..(414): unsure at all n locations
agcttataatatatcgatacgctctaaatatttatcgacaacncncgggaaaggcagagagtcataacaatncacacggacgcccgacncgggcgcanaananggcgagaggagcgaaagcgaacaacggaagcccnggagaaacccaacggggagaacccaacacacggagggccgaaccaggcgggagacagaacgagacacacaaaagggaacagcggaagcccccgagaaacacaaaggggcataacacncaacccgaaagaccaagnnaggcgcatcacatatagtgacactcgaaattgaacaacggaagctctcgtgaaattcaaatggtcataacttttcacactgaggtccgattcaagtgtataatgcatcgatacactcggaagtaaacatcggaagcactcg

SEQ ID NO: 9330 - DNA, 499 bp, Glycine max
gcttcggttgctcattgacttcaaattgctgcagagaaggacatacatctgtatggtgatctgcagaagaacatagaccacagagtcttgcaacaggtgcagatttctgattcatggcaagctgagttactaggttgaccaaggcatcaagttttccctcaagatttttattttcagtagatgaagatgaatccattgccacctcatggactcctctaaggacaatagggatgcaatcctaccccgcaaaggcattggatagaagactccaagtagattgggccagagatccaagggaaggccctagggttctcatgagccttaggatagatttttgagcccatgggtcaaggtatgatccactcttctttgtaaaaattagaataggtttttccttcttttgggccttgtattttgacaattctagtagtatagggttttagccttgtatttcagggcattttgagtagtctttgtagtaaagacttcttttgtattt

SEQ ID NO: 9331 - DNA, 431 bp, Glycine max
agcttgtaatcgattacacagtaaggaatttttcaaaataactcccaagagtcacaactgttcaggaagtttttgaatggccatcaaaggcctttaaagacttgggatacgaaattccttagaggttttctgaataacattttcttatcctctcaaaaccaaattgtcttatcattctcaaaatattccttggtcaaaacacttgcaaattcaataaggaatcttgatcgatcttcaattgtaatatccttctcttaaagagagaaaattcttcttcttcttattcaaacagatctgtataagagaccgagagtctcttcagttgtaaggatatttgaacacaaggaaagggtgtccctgtgtggttcaaagtttgtaaaaagctttctacaagatagtggaaatctcaagcgggttgcttatggactgga

SEQ ID NO: 9332 - DNA, 500 bp, Glycine max
  unsure (1)..(500): unsure at all n locations
agcttgatgattgcctatgggcatttggtttcttccttcaaaacacccattggcatctccttgtttcaaatggtgtatggaaaagcttgtcacctaccagtggagttagaaataaaagctcattagaccatgaagttcctcaactttgactttacaacatccaaagagaagaggaaggtacaactacaggaacttgaagagattctcctcaatgcatatgaatcatccaagctctacaaagaaagaaccaagagataccatgacaaaaagatcctccatagagtattcaggcccgaacaacaagtattgctctacaactcaggattaaagttatttcatggaaaattaaaatatagatggagtggtccctatactgtcaaagacgttaagccttatggagctatagagatagaggatgtgacaccttctacccctcacatatatatntataaaggaataaaaatttcaatattaattaaaaggttttttaaaacattttt

SEQ ID NO: 9333 - DNA, 298 bp, Glycine max
  unsure (1)..(298): unsure at all n locations
tccattttcagttgcgaccatctcgagatattanttgatttatccggacatccatgtataaagttattgtcaatgtgaatatactcagggcttcagatcttaattttgagcgtctcgatatattacaggactcattcagacatccgagtgaaaagttattgactgttgaatttgatgctagctccctgctgcaattgggagcatctatcgcataattatgacactttgtcgggcaatccgagacaaagctatagtcggtagaatgatataagagcattcgtctacaatatggagcgtc

SEQ ID NO: 9334 - DNA, 448 bp, Glycine max
ttttactctcaatatattatatatcacttattactattctcttttataggtgttaaaatggaattgaattcaacttgaaattataatttacactctaattctttacacaattatattaaatttactattacaactacaattttaaattgaaattcctactcccattttaaatatttctaaaaaccagttttggtgaaatagtaaagtgactatttgcaacatagtcacatagtgctttatttaattctatctttgatctcatcaagaccctagaggcctagtgttggcacttaaaaaattattatgaatagctgatgcaaatgcgaagaagctaaaagttaatatattcaaatttatttttgaattatataattgtatcattatttaaagattatgatctaaagaaaacaggggtcatctgaagacagtgaacgattctcttataatg

SEQ ID NO: 9335 - DNA, 534 bp, Glycine max
agcttgcttctacaatctcccccattttgttgatgactacttctaaaatcaagaaacacacacacacacacacacacacacactttttctagtcgatgactcacataaatttccattctccccctttgttttttgaatttatgcttgtcttaaaattaagttgattactcatgtgagtccttgatttaatccctatttctctccccctttggcatcaacaaaaagccaaaatgcgtaacaagtttgaagcatacaaatacaactaagcatgcatacaacattcatggaagaatataaaccaaatcatgaagcaagaaccataaatagatcaaatatataaaaaccacattgtcaaataacataattaatatttgttcaaacataccatgcaaataaagaaatagtaaattgttcaaatatcataataatatagccaaatacacggttggaaatcaaattactaataatattaaaataatagaaaactaagatgatggtggcggcggtggtggtagatcaaagcttgaatgaata

SEQ ID NO: 9336 - DNA, 392 bp, Glycine max
  unsure (1)..(392): unsure at all n locations
ctgggcgtaccccaagggaccatcaggaaattacttgtgtgngtagccatgagggtgggctcatgggccacgtttgggatagacaagacccttgtcttactcgaagaaaagttctattggccccatatgaagaaagaggtccataagcattgcactatgtgtgtggcttgtttacaagccaagtctagggtgatgcctcatgggctatacacacccttacccattctatctgcaccttgggtagacattagtatggactttgtccttgggctgcctagaacccaaggaggtggagactctatctttgtagaggaggatatgtggagcaagatggcacactgtataccatgccacaaggaggatgatgcttcccatatctcaaaacatttttt

SEQ ID NO: 9337 - DNA, 442 bp, Glycine max
  unsure (1)..(442): unsure at all n locations
agctttccacattgaattcagcacctaatgttatantatatgggaattgggtatcttaacataagagatttccgatggactttaatcctaatcccacagccgacctttttacgagatctctacttaaccctttggttaaatgatcggccaaattatgctgagttctcacaaactccactgatatcacaccatgcatgattaactcccgaaccatgttgtgtctaacacccaagtgtctagacttcccattatacacttgactatatgccttagccaaagttgcctgactatcacacctgatagacatgggaggtataggtttgggccacaatggaatctcatagattagatttcttagccactcagcttctttaccagctgctgctaaagctacaaattcagattccattgctgaatatggatgcaggtctggttcttggat

SEQ ID NO: 9338 - DNA, 478 bp, Glycine max
tctaaactttatacaagaatgaagctctgataccacttgttgtacagtggcctcagatatcttaagaaggggggggttgaattaagatattacaaattattttcccaattaaaaattctatttaactttctattcaagttatatattcccttaataatgattttcttaaataatgattcaaaagaacaatttgaatatgaatataaaacaataataaataaaggagtttaagggaagagaaaatgcaaactcagatttatactggttcagcaacacccttgtgcctacgtccagtccccaagcaacccgcttgagagttccactatcttgtcaattccttttacaagttctaaacacacaaggacaatccttcctttgtgtttagaatcctttcacaacaagagaccatcggcctcttaatcccttttcagaataaagaagaagagaagaagaaatctctcttgaaagagatagattg

SEQ ID NO: 9339 - DNA, 571 bp, Glycine max
  unsure (1)..(571): unsure at all n locations
tgaatgttcagcaacaatccctgtcaacctatgagaaggttttactagctgtggtgtttgctgtacaaaagtggagcattacttattactcaagacgtttgtaatcaaaactgatcacagaagtctcaagtatattcttgaccagagactttccacaactttccaacaaaaatggtaggtaaaacttatgcagtttgatttcattattgaatataagcagggaagtaaaaaccaagctgctgatgcactttcaagagttgaatgtgctactatttccactcaccaacccgattctgatctactagagagaatcaaatcaaaacatcttggcaaggtgatgatgccttacaaaaactgattgttgaagttacgaaagatccttcttcacataaggatttctcttggttaggtggagaactaaggaggaaaggtgatgcaatcctaccccgcaagggcattggatagaagactccaagtagatggtgctagagatccaagggaaggccctagggttctcatgagccttanggtagattgagcccatgggctaagtatgagcccgcttatcttt

SEQ ID NO: 9340 - DNA, 617 bp, Glycine max
agcttccaacttccaagagcacatttattatctctcagatacatatctcacgtacaggcgtatcatcgatgtgaatctattcctaaattaactaactagtaaggtgatacgagtaatttttgttgccttttgtttctttctagttctaacacaacttctatcatgtcaaatttacgtagtattgattcacagtgtatttagaaacagtagaaaaagaagcactcatgtttaaaatgtaaaaattatagttgattattagcttcttaaaattatatttagatgtgaagccaaacatatactaaaaaaaatgtagatttgctttatattttagtgagacccacattcagatttttctaatttttttatccataaaaatcaatgatggatatcattagactaaaaagttgattaatattttcttaaaaaataaaaatttgaaacaatatttgagaaagaactagaactatagtccttaaagtaataaagtatattttttttttatcactacacctaagtacttattaaaatatttgggcaaaataccatattaatatagggtgtaagcgaaaatagtttaaatttaattttgttaaattaatttaatatatggataatta

SEQ ID NO: 9341 - DNA, 523 bp, Glycine max
agcttgataacccttcttgaagagtatattgatttctttgcgtggtcgcatcaagacatgcccggtctgtattctgacattatgcagcataagttgcctttgaatcctgggtcttctccggctaagcaaaagctacgaagaatgaaacccgatatgtctttaaaaattaaagaagaagtaaggaagcagtttgatgcaggattcttagctgtggcacggtacccggagtgggtggccaacattgtcccagtcccgaaaaaggacggcaaggttcgaatgtgtgtacactaccgggacttgaaccgagccagtcctaaagacaattttcccctgccacacattgatatattcgtagataatatatccaaagtcacccttttctcatttatggatggcttctcggggtataatcaaataaagatggcccccgaagatgtagagaagaccactctcgtcaccctatggcggacattgtgctatagagtgatggcccttgggctgaaaaatgttggggcacctaatc

SEQ ID NO: 9342 - DNA, 482 bp, Glycine max
acctctctaatagctagctcacctcctttttatgagaagctagagcttagctacacaccccctataatagctaagctcacccccatgacaaaaaacatgaaaataccaaaaaaaagtccttactacaaagactactcaaaatgcctcgaaatacaaggctaaaaccctatactactagaatagccaaaatacaaggcccaaacgaaggaaatacctattctaatatttacaaagataagcgggctcatacttagcccatgggctcgaaatctaccctaaggctcatgagaaccctagggccttcccttggatctctagccaatctacttggagtcttctacccaatgcccttgcggggtaggattgcatcacctcctctcatggggtagccaagttgtcttatggtgaggacatgattataattaatacaaacccttgttcacatcaagggaacatttggaaatccttcgcatgaggataga

SEQ ID NO: 9343 - DNA, 383 bp, Glycine max
  unsure (1)..(383): unsure at all n locations
tgcaagcttgcacattactgctttatagaagattgcttgtaggtaagccgcggnaccatgacatgatgcggtacatagagtgtaacgagtatccacaaggggcttctggcaacgacaagaggatgttgcagaggttggaaactagtttctttctaagtgggggtatcatgatgtagctccattggagcttgttggccttggatcttcttcatcaatggagtcctttgcttcttgaattttaatggcagcaaaatggacaagaagaagagttgagaggagacaccacttcaaggagaagatgagtctagaataagctcaccatcatacgaaggcatggataagagcttcaaggtacgagatgatgaatggaggaacagggagag

SEQ ID NO: 9344 - DNA, 699 bp, Glycine max
ttgcatctgacaaagatgatagcaaattccatttcaggattttgttttcactttaatggtggtgtagtaagttggaaaagttccaagcaagctacgataacatattcaactactgaagcataatatatagtgacaagtgaagccggtaaagaagctgtttggatgaaaaggttcatatttgaacttggtgtggttccttcaatagaagagtcggtcccattattgtgcgacaataatggggctattgctcaagcaaaggaaccaagatcacaccaaaagtccaaacatattttgcgaaagtatcacttgattagagagataaaagaacgtggtgacgttaagattgaaaaggtagatggaaaggagaatgtagcagatctcttcatcaaggcgcttggcataaaagagtttgacaagcacaaatgggagttatgattgaagttcatgaatgattggctctaggaaagtgggagatttgtgggaataaatttgtatgcctatgatccaagtcatcatgtgatcaattctaattttaataataaagtattattttattttcatggtcatatttcactatatgattaaatggtgcatttgataatgtccttggataaacatatagacttggtattataatagaaattatgataatgagaaacaagtttgttcttaatttaatctaaaccgttcttgatcata

SEQ ID NO: 9345 - DNA, 606 bp, Glycine max
  unsure (1)..(606): unsure at all n locations
gcatttaacacacttgtagtgtaatactttagtactttaacacacttctaatgtgttccaagcggttactaggatatcaacaaagtacacaattacaaatttttcaataaattaaattatctgaaaacacggttcatgagtctcatgaaagtgctaagcatattgattaagtcaaatcacattactaaccactcataatccaaatactgttttgtaaaacagtttgtttctatttctatacaagctaaacttcttaagcactttaacacatttctagtgtaatacttaaacacttcaacacacttctaatgtgtctcaggtgattatcaagatatcatcaaaatacacaacggtgagtttttcaataaattacctcaaaacatgattcatgagtctcatganagtgctaaatatattggttaaatcaaatcacattactaatcacgcgtaatccaaatactgtcttgtaaaacagtttttcactcatcactttctctaattcaaatttggtggtagtcacaaaagtgatgcatcaaatcgataaatacttatactcttacgggttgaaagttgaaagtttaatcaaatgttaactttttttttgga

SEQ ID NO: 9346 - DNA, 560 bp, Glycine max
  unsure (1)..(560): unsure at all n locations
agcttggntatcgccttcttcactttattagtatcaccgggctgagtcttctctgtggctgtcttactggattagctccatcctctaaatttattcgatgcatacatgtggatgggctaataccaggaatgtccgccagggtccagcctatagccttcttatgcttcttgagcactgacaacaacttctcctcttgctcatcagcaagggaggcagatataatcactggaaaactcttgctatcatccaagtaagcgtattttaaatttgatggcagaggcttcaattctggtgtggtcggctggacagtggtagaaggagatggtttctcagccttgacctcataaagaaagtcagaggtatgtgtacttcctgaaacatggttagtcctatctgactctataaatcaatctcaagaggtaaaacaccaccaccaggcatgcaatcaatatcactctcagattcactctcaacatcaaattcagacatatgatcaagttccattttcagactcaatgcattgaagagtgagaggcatgcagattataataaagatcagt

SEQ ID NO: 9347 - DNA, 599 bp, Glycine max
tctacccaatggaatttatgaaccgacatttgaaagttaattgttctgtaactaccaagagatggggtttctttctttatgcaatggcattttattgtggagaattcacacgtgctagtaatgaatgacaccatgtattttgagaaacagataaattctgacttacatattctcttatgttgctaaattgcaactgttttattgatttgtcgaactaaatttgagtcatatggtagaagtattgaaaaagttgcactacctcagttttatccttgataagaaatatccatgtcacatgagagcaatcatcaatgtaagaattaaaccataaataaaggcgggtccccacacactgcaatggacaagagggaaagtctcaacacctttattattactacttggaaaatttgtacctgataatggtccggagagagcaagaaaatgatgactaactgcctattatgcaatgttgaggggagggttgcatgaaagcttgtggaaggcgagattataatcctagggacccttacatttttgtttgtgcattttgtataaagattatatgcccatatattgtttgagatggggcttaatacttg

SEQ ID NO: 9348 - DNA, 428 bp, Glycine max
  unsure (1)..(428): unsure at all n locations
ctacaacattcaacttcgagcatctcgatatattacgagtcnttantagacatccgagtaaaaagttattgtcgtttgaattggctcagagcttcaacattcaatttcgagcgtctcgatatattacgggactcaatcagacatccgactaaaaagttgttgtcgtttgaattcactcagaggttcaacattcaatttcgagcgtctcgatatatgacgggactcaatcagacatccgagtaaaaagttattgtcgtttgaatttgctcagagcatcaacattgaatttcgagcgtctcgatatgtgacgggactgaattagacatctgagtaaaaagttattgtcgtttgaatttgctcagagcatcaacattcaatttcgagcgtctcgatatatgacgggactcaatcatacatcccagtaaaaa

SEQ ID NO: 9349 - DNA, 356 bp, Glycine max
  unsure (1)..(356): unsure at all n locations
agctttgagccaattaagacgacaatatctttttactcggatgactganngagncccgncatatatcgagacgctcgaaattgactgttgatgctctgagcaaattcaaacgacaataatattttactcggatgtttgattgagtcccgtaatatatcgagacgctcgaaattgaatgttgatgctctgagcaaattcaaacgacaataactttttactcggatgtctgattcagacccgtcacatattgagacgctcgaaaatgaatgttgaagctctcggccacttcaaacgacaacaacattttactcggatgtctgattgagtcccgtaacatatagagacgctcgaaattg

SEQ ID NO: 9350 - DNA, 506 bp, Glycine max
  unsure (1)..(506): unsure at all n locations
gaccgcggctgcagctatttgatgtcaccgaaaaagttggtatgtgncgggcgaaaaactncactaggtgtggtcagacaaaacagtcctagctaaaattatcaatagattatatgtttaaactattaaaaattgaacaatattgtttagttaatagtttaaaattagattgtgtttgttttctatgaagcctaatattgaagtttcatctatttaaaatataaaattgaaattttgcatatggagaaaattgaattgccttatccaaacaaagaatttaaaattgaagaaatttgaattgatttatccaaacaaagcatttgaaaaatgaaggaaattaaaatcaaagcaattcaaattctaagcatttgaaatttcctaaaactttaaaattcctgatccaaacacaaggtaaaagtattgccaaatgtcaaaatcttattgagtaggaggatttacgtgattatggaggatataacaactctcttccaaattttaattaagct

SEQ ID NO: 9351 - DNA, 511 bp, Glycine max
  unsure (1)..(511): unsure at all n locations
gccgatacagtagagctgaccgcatgcaatctacaagttgcatagcgcctttgaatttcgtgatttgccaacaaanccttaactcgcctctgctataatccttcgaatttgaacccggagttaagtgctatctgatacccgttgttggggaaccgaagcgggataaacatcaaagagatttacaccaatgggccatgagcaatcatataagtaaacttgacaccacaccttaacccaaaaccttaaggctcaagtttatgagttttttcttcacttatatggtgttcaaccttctcattcctacacaatgtgagacttcacctcacacttgtactccaacataccgacatatgcattcttataccaataacttgcactttagttaagtgtgccctcctaactaaaataattaccaacttaaaataggcacaactctgtaataataaattcagcttaaatattatttaaaacatcataaccagcacaacgaacaacaaattgaaattacggt

SEQ ID NO: 9352 - DNA, 380 bp, Glycine max
gctgcttgaaattgaacaacggatgctatccagaaactcaaagggttattacttatcacacggaggtccgagtgaggcgcataatatatcgagatgctcgaaattaaactacgaatactctctagaaattcaaatggtcgtaacttgtcacacggaagttcgattcaggcgcattatatatcgagacgctcgaaattgaaaatcggaagctgtcgagaaattcaaatggtcgtaacttttcaaacggaagtccgatttaggcgcataatatatcgagaaggttgaaattgaacgacgactgctctcgagaaatttaaaatggtcataactgttcaaacggaagtccgattcaggcgcttaatatatcgacacgcttgaag

SEQ ID NO: 9353 - DNA, 484 bp, Glycine max
  unsure (1)..(484): unsure at all n locations
agcttgtcgtcacggagatanccgactttgcttttgngnggnggaacaagccacgaaaggagagagcaagaaangaagagccaatggnngacacatggacagagatgaaaaagatcatgaggaagcggtatgtgccggctagttactcaagggacttgaaattcaagctccaaaaactaacccaaggcaacaagggggttgaggagtatttcaaggaaatggatgtgctcatgattcaagcaaatattgaagaagatgaggaggtaactatggctcgatttcttaatggtttgactaatgatatccgtgatattgttgagctgcaggagtttgttgaaatggatgatttgcttcccaaagcaatccaagtggagcaacaattaaaaaggaagggagtggctaagaagaagtttaccaactttggttcttctagttggaaagaaaaggtaagaaagatggggctgctacttctagaattccacac

SEQ ID NO: 9354 - DNA, 509 bp, Glycine max
cgacactataaatctcagctcttatccaggctcatcttggtggtgaagctcctttttcttggcttattccctagtggatggcgcctcccttctcctcttctcctttgccttccgctgcatctccatggtgaaaaatcaccattgaaggacctcattgaagctcaaagatccagcctccatagaagctccacaagcaagcttccatcagttatgaccatttgaatttttcgagagcttccgttgttcaatttcgagcgtcacgatatattatgaccccgaatcggacatccgtgtgaaaagttatgaccatttgaatgtctcgagagcctccgttgttcaatatagagcgcctcgatatattatgcgcctaaatcgcacatccgactcaaaggttatgaccatttgaatatctcgagggcatccaaattttaatttcgaaggtctcgatatattatgtctcaaaataggacatctatttgaaaacatacgcccctttaaatgtatcgaga

SEQ ID NO: 9355 - DNA, 459 bp, Glycine max
  unsure (1)..(459): unsure at all n locations
agcttgaaatataacaatggaagcttcgtgnattttcaaatggncctatcttctcaaacggatgtttgatttggacacataatatatcgagacgctagaaattgaacgattgaacctctcgagaaattcaattggtcataacgtttcacacggatgtccgattcgggcgcattatatatcgtgacgttcgaaattgaacaatggaacctcttgagatatttaaatggtcataactattcacacgaatgtccgattcagggacttaatatatcgagacgttcgaaattcaagaacggaacctctcgtgaaattcatatggtaataacttttcacatggatgtccgattcaggcggataatatattgtgacgctcgaaatataacaacggaacctttcgagaaattcaaatggtcctatcttctcgaatgtacaattctgggacataatatatcgagacgc

SEQ ID NO: 9356 - DNA, 284 bp, Glycine max
agcttgtagggttaaagtctcacgaatttcacgtgctgatgcaacaattgttagccgtggctatacgagacatcttgccaaacaaagtcaggttagcgataactcgcctgtgctttttcttccatgctatatgtagcaaagtcattgattcagtcaagtttgatgagttggaaaatgaggccacaattatactgtgccagttggagatgtattttccccctgctttctttgacatcatgattcacttgattatgcatctggtcagagaaatcaaatgttgtggt

SEQ ID NO: 9357 - DNA, 585 bp, Glycine max
tcaaccaaggggagatggaccatttcaagtgcttgtattatttataacaatgcttacaaaggtgagctgcccggtgagtataatgttagttccaccttcaatgtctctgatttatctctttttgatgcagatggagaattcgatttgaggacaaatccttctcaagagggagagaatgatgaggacatgttcaagagcaagggcaaggatccacttgaaggacttgtaggacctatgacaagggctagagcaaggaaagccaaggaagctctccaacaagtgctgtgcatactatttgaatacaagcccaagtttcaaggagaaaagtccaaggttgtgagttgtatcatggcccaaatggaggaggactaaatgacaccactttgtctcacttttagagtgattagtttgtctaaataatggcccaatccttgtaaagatggctaaccaaaaatatgttttgggttaatcaactaaaagggctttaattatgtttagttcaaagtgtaataagggcccaattggcaacctatgcatcagcctttttggagaccaaatggtggctgacttgttggatgttggggg

SEQ ID NO: 9358 - DNA, 586 bp, Glycine max
tcctagaatcaagatcaagattcaagaatcaagagattatttaatcaagataagtatgaaaaagttttttcaaaaactgagtagcacatggatttttctcaaaatctgtttaccaaagagtttttactctctggtaatcgattaccagattattgtaatcgattaccagtagcaaaatggttttcaaaaagctttcgactgaatttacaacgttccaattgatttcaaaaagttgtaatcgattacaatgttttggtaatcgattaccagtatgcttgaacgttgaaattcaaattcaattgtgaagagtcacattctttcacaaaaaaagctttgtgtaatcgattacactgatttggtaatcgattaccagtgaaagtttctgaacaaatcaaaagatgtaacccttcaaatagttttttgactcttttaaattggttttaagtttgtctaaaagtcataactcttctaatggttctcttgaccagacatgaaaaatctataaaagcaaggctttgttttgcatttcacatctatcccatcaatcaatctatacattttatcttttccaaatcattctttacac

SEQ ID NO: 9359 - DNA, 566 bp, Glycine max
ctccgcttgaaactgttaagaaggttcgctttcaaacctatgttgttgttcaacataaacttcctcttagattaagccatttagaaatgtgttttttacatccatttgatatagcttcatattgctataagcttcaaatgaaagtaagatgtgtattgcctctaaatgagctacaggtgcataagtttctttgtagtctattccttcttgttgtgagtattctttagcaactaaccttgctttgtttttcacaacctttcaattttcattcagtttggtttgaaagactcatttctctccaatagctttctttctttttggaaattcgactgactttcaaacatcattcctctgaaactgatcaagctacttttgcattgctttaacccaattgtcatcctgcattacatcatcaatgtgtttgggtttcattttagaaatcaatgcaataggtccttatgttctgagtgatgatcttgtttgaacatgatcaactatatcaccaataatttgacttttttggaggatttcttctcatgatgcatccagtgggttctcttacctct

SEQ ID NO: 9360 - DNA, 534 bp, Glycine max
tgccttgccccttgatatatttgagggactcatggtttttattaatgacaaattccttgggataaaggtagtgttgccatgttttcaaagcacgtactaaggcatacaactccttatcataagttgaatagttaagggtaggaccacttaacttttcactaaaataagcaattggatggccttcttgcatcaacacagccccaatcccaacatttgaagcatcacactcaatttcaaaagatttttgaaagtttggcaatgcaagtatgggggcattagttagcttttgcttaagaacattgaaagcttcttcttgtttctctccccatttgaaaccaacatttttcttgagcacttcattgagaggtgctgccaatgtgctaaaatccttcacaaatcgtctataaaaacttgctaagccatgaaaactcctcacctcggtcacagacttaggtgtaggccattcttgaataacactaaacctcttctcatccacttgcactccttttgaactcccaacaaaccctgaaacac

SEQ ID NO: 9361 - DNA, 371 bp, Glycine max
agcttaagctccttcaactgttaaggtgcttaatatttgaagagtatccttgcggaaccttcacccgacgaatacactgacaaaaacttatcttctcctttttggacaaagtatggcaagctaggggcaagtaaattttcttcccatcagacattggatgcaactgtgatcgtatccccatataagctagatcttgacgggtattcaagccatccttcgtcttgccttgaatgttaaggagcgtcccaatcacactgacacaaacatttttctacacatgcataacatcactaccatgtctaacgtctagatcaaaccagcacagaagaactacgaatatggacctcttcttccatatgcaagacttactt

SEQ ID NO: 9362 - DNA, 202 bp, Glycine max
cagcctatgccgcaaacaacttctactttttttctcaaactcaatagaaaaaacggccgccacaaaacgcttatgacctctccaacaacaggtacaaccccgggtagaggaaacatcccaaccttaaatgggtgagttcttcccaatagccacaacgaccccaggcctatttttataatgctgatggcccaagcagaccata

SEQ ID NO: 9363 - DNA, 449 bp, Glycine max
  unsure (1)..(449): unsure at all n locations
ngccttgcccctcgatattattgagggactcatggttactattaatgacaaattccttgggataaaggtagtgttgccatgttttcaaagcacgtactaaggcatacaactccttatcataagttgaatagttaagggtaggaccacttaacttttcactaaaataagcaattggatggccttcttgcatcaacacagccccaatcccaacatttgaagcatcacactcaatttcaaaagatttttgaaagtttggcaatgcaagtatgggggcattagttagcttttgcttaagaacattgaaagcttcttcttgtttctctccccatttgaaaccaacatttttcttgagcacttcattgagaggtgctgccaatgtgctaaaatccttcacaaatcgtctataaaaacttgctaagccatgaaaactcctcacctcggtcacagac

SEQ ID NO: 9364 - DNA, 295 bp, Glycine max
aaattattcaatcctaccccgcaagggcattggctagaagactccaagtagattgggctataaatccaaggaaaggccctaaggttctcatgagccttaaggtagatttcgagcccatgggctaagtatgagcccgcttatctttgtaaatattaaaataagttattccttcgtctaggccttgtattttggccattctagtagtataaggttttaaccttgtatttcggggcattttgaactgtgtttgaaataaagactctttttttgtattttcatgttttttgtcatgggg

SEQ ID NO: 9365 - DNA, 352 bp, Glycine max
  unsure (1)..(352): unsure at all n locations
tgggctttcactatgtgttgaaatgagtgagccaaacttgaattgagttgaacacataaggcttgagtttgactaattatctctaataggcttaactttggcatacataacagtctagcttggcgagtctaattaaaagcttgcttaaagacgtctttgatcaattaattattttaaaatctagtgaaatactaactaaaaaaaagaaacttattaaatttaatatgagtaatgtacaaatccaaaaataattgataaacaaaatcatattgaattcaagtcgtttaaataccaagaatataataaaaatgaaanaaagagagcatattattaaaaaatacttacaaagaca

SEQ ID NO: 9366 - DNA, 445 bp, Glycine max
  unsure (1)..(445): unsure at all n locations
ngacccttatgagtaagcttggccaaaggtaaagctatcttacaaaaaccttctatgaacctacgatagtaacctgttaaaccaaggaaactcctaatctcaaacacttacttaggactcttccaacttatcacttcctctaccttaaaaggatctactgatatccctcccttggatataacgtggcctagaaagctcacctcttctagccaaaaactcacatttggacaacttagcatacaattcgttgtccttgacaatttgcaacacaacccttagatgctcctcatgttcctccctagtcttggaatacaccaagatatcatccatgaagaccaccacaaaactatctaggtagggatgaaagatcctattcatgtagttcatgaacacactgacgatgttggtcacaccaaaaggcataaccaagtactcataatggtcg

SEQ ID NO: 9367 - DNA, 389 bp, Glycine max
ggcttctgcacaagggtcaatggtacttagacacatgatgctctacacacatgactggtcacaaagactggttcgtgtgtctagatgaaagaatgaaaagcaaagtgagatttgtaaatgacagcactatgcttgctgaaggaattggaaatgtcctgattcataggaaagatggtagagaaacttgcatagaggatgtactttatgttccaagcataagcagcaatcttctaagccttggtcagttacttcagaaaggctttaagataactatgaaggacatgatgatgctggtatatgacaaaaccagaaatctaatgataaaaacaccattgaccgaaaatagaactttcaaggttggaacgcaagcacttgagcatgaatgtctt

SEQ ID NO: 9368 - DNA, 389 bp, Glycine max
tcctccacatgagtttattgcccgaaggcttgaaattattcagatatcctcattttctgttttagaaggtgctgggagaaccctcaaaggtagggatcttatcaaagtgaggaatgttgtactcccaaaaattggtttcctcgaaacactataaaggggtctcttgagtagtgatgtatctttatggtaaaacataatcaattaatttttcatggtgaaggtaaaaacaaaaaatagttgcttctacttttttatggtatcacctaattttatgcgatagaattgattcttatgtgtcatccaaacatgatagtagctcttttacatttgggatgtataatagggtttgtagttagaggttatttaagaatggatgttgtgttcatatg

SEQ ID NO: 9369 - DNA, 370 bp, Glycine max
  unsure (1)..(370): unsure at all n locations
ctagtacgcgtaaagtctcacgattgtcacttgctcatgcaacaatttttagccttggctatacgagacatctngccaaacaaagttaggttagcgataactcgcatgtgctttttctatcatgctatatgtagcaaagtcattgatcctatcaagtatgatgaagtggaaaatgaggccgcaattatactgtgccagttggagatgtattttccccctgctttatttgacatcatgattcacttgattgtgtatctggccagagaaatcacatgctgtggtcctatttatctacggtggatgtacccggttgagcgatacatgaagatcttaaagggtatacaagaatctattagccagaagcattatt

SEQ ID NO: 9370 - DNA, 389 bp, Glycine max
  unsure (1)..(389): unsure at all n locations
agcttattttgagacccatgaatngattgtctaacgcatgtcatgcgtccttcaccatcgagtctaaagccccatggattgattgtctaacgttgttcgtctatcctccaccctcanatcttattcggagacccatgaattgattgcctagcgcagttcatgcgtcctcaaccatcaagtctggagccccacgaattgattgcctagcgttgttcatctatcctccaccctcaaatcttatttggagacccatgaattcattgccctgctcggtttatgcgtcctacaccatcgagtctggagccccacgaattgattgcctagcgttgtaccctatactccacctcaaatctaatctgagaccatgaattgatacctagcgctgttat

SEQ ID NO: 9371 - DNA, 331 bp, Glycine max
aacttagcatctctatctaacacaatggtcctaggcaaaccatgcggtctcacaacttccctaataaagagttttgagatgtgggaagcatcatccaccttgtggcatggtctaaagtgtgccatcttgataaacctatccaccaccacaaagatagagtctacacctctttgggatctaggaagcccaaggacaaagtccatactaatgtctacccaacgtgcataagggatgggtaagggtgtgtatagcccatgaggcatcaccctagacttggcttgtaaacaagccacacacctaatgcaatgcttatggacatctttctttatat

SEQ ID NO: 9372 - DNA, 357 bp, Glycine max
ttcttatccaaggctcatcttggtggcgaagctccttcttccatggcttattccctagtggatggcgcctcccttctcctcttctcctttgccttccgctgcatctccatggtgaaaaatcaccattgaaggacctcattgaagctcaaagatccagcctccatagaagctccacaagcaagcttccatcagttatgaccatttgaatttttcgagagcttccgttgttcaatttcgagcgtcacgatatattatgaccccgaatcggacatccgtgtgaaaagttatgaccatttgaatttctcgagagcctccgttgttcaatttagagcgcctcgatatattatgcgcctaaat

SEQ ID NO: 9373 - DNA, 379 bp, Glycine max
gctgcagcttgaaccaacatggaagctgcttaaattcaaatggccttcttctcgacggagtttgatttggacacataatatatcgagacgctagaaattgaacgattgaacctctcgagaaattcaattggtcataacgtttcacacggatgtccgattcgggcgcattatatatcgtgacgttcgaaattgaacaatggaacctctcgagatatttaaatggtcataactattcacacgaatgtccgattcagggacttaatatatcgagacgttcgaaattcaagaacggaacctctcgtgaaattcatatggtaataacttttcacatggatgtccgattcacgcggataatatatcgtgacgctcgaaatataac

SEQ ID NO: 9374 - DNA, 317 bp, Glycine max
  unsure (1)..(317): unsure at all n locations
ntaactcggatgtccgattcaggcgcataatatatttatacacttgatattgaataacagaagctctcgagaaattcaaatggtcataacttttcacacggatgtccgattcgggcgcataatatgtcgagacgctctaaattgaacaactgaagctctctagaaattctaatggtcattacttttcactcagaggaccgattcaggcgcataatatattcagacgctcgatattgaacaacggaagctcccgataaatttatatgggcttacttttaactcagaggtccgattcatgcgcataatatatctatacg

SEQ ID NO: 9375 - DNA, 441 bp, Glycine max
  unsure (1)..(441): unsure at all n locations
ntgtctntgttgttcacaatctagaagccatgtgtcttatggctctntgataattctttatggcatctgcggctgggccacatgagtgaaaaaggtttgcatattataaggtagcgaggttttcttggaaatcacaaggtggaagctcttcagctttgtgtggattgtgtctatgggaagtagcatcaaacgacgttcccaaaagttgtgcacacaacaaaagccatgttggattacgtccattctaactactgggggctttcaagagttccatcactatgaggagcaaggtatttcctttccatcatcgatgattactctaagatgaaatgagtattcatgatgaagcaaatatttgaagttttcaaacttttctaacattgaagattcttatgtagagtcagacaggttagacaataaagcatcttatgagtgacaatg

SEQ ID NO: 9376 - DNA, 425 bp, Glycine max
tatggatggtatgagttgtgatcacccccttgcaattaacaaaaagattgctaattgactggcagtttaaaaatattaaaatattgctccattttgttcttgttattctttgagttccacacaagatggagattaaggttgactgatgattgtgcttttccatctggagcttattaattaatgtattctcatctgcgtgtttttgtaggagatgttgaagttttgaaggaccctgagaagccagataactccctagccagaagattaactgcaattgaaggatatgaaatggtttctattgattaaaaggatgaaccctttattctgagaaggatcaatgctgggtagtgactgaaaatgaaaaatagaaaaccaacgtaaaatctgcttacctttggtatccctacggggatcattatgcactt

SEQ ID NO: 9377 - DNA, 441 bp, Glycine max
taataaggccatctatggtcttaaacatgcccctatatcctggtttgataaactcaaggtgcacttctgaagtttgaatgtaagtccagcaagtgtgatccctctttatttgtctactccaaggggtcctcaacaacctatatgcttgtttatgtagatgatatcatcataacagggaataatccttccttaatcaagcaactcatctctaagctaaatacttttttctttcttaaagatcttggttctctagactatttcttgggaattgaggtaaaacatcaatctgatggatctattgttctcactcaaggaagatacattatagacttgctggcctaaactaatatgacagaagcaaaacctatttcttcacctatggttactggatgtaagctaactaatagtggatctgatccactcactgatccatatatgttc

SEQ ID NO: 9378 - DNA, 377 bp, Glycine max
gcttggagttccaaggccattcgcttcttttatttcagtcttcttctggcttcaattcttcagtgggctttccttctgtgtccagcatcttgggatgttcccagcctttgatgacagcttttcaaggttcttgctatccaagtgatcttgaggaaggccaccaattcttgctttccagtattcataagtggttccatctaggaatggtggtctagtcactggtcctccttctttctccatgttcatcagacattatctccctagaactcactctgtgatttcgagtgttggctctgataccaatcgaaattctgataccaggggacagatgttctaccggatgttacgacattacccttcagatcatgcaaatatat

SEQ ID NO: 9379 - DNA, 284 bp, Glycine max
ctacattaagaatcaccgggttgagtcttctctgtggctgtcttactggcttaactccatcctctaaatttattcgatgcatacatgtggatgggctaataccaggaatgtccgccagggtccagcctatagcctttctatgcttcttgagaactgacaacaacttctcctcttgctcatcagcaagggaggccgatattatcactgaaaactcttgctatcattcaagtaagcatatcttaaatttgatggcagaagctttaattctggtgtggtccgctgga

SEQ ID NO: 9380 - DNA, 451 bp, Glycine max
tctctgagaaaacttccttgagaagctagagcttagctacacacacccctctcataactaagctcacctccttgagaagcttccttaagaagattcctaaagaagctagagcttagctacacaccccctataatagctaagctcacccccatgacaaaatatatgaaaatacaaaaaaaatctctactacaaagactactcaaaatgcctcgaaatacaaggctaaaaccctatactactagaatggccaaaatacaaggcccaaatgaaggaaaaacctattctaatatttacaaagataagcgggctcatacttagcccatgggctcaaaatctaccctaaggctcatgagaaccctagggccttcccttggatctctagcctaatctacttggagtcttctacccaatgcccttgcggggtaggattgcatcaagccacaactcagca

SEQ ID NO: 9381 - DNA, 402 bp, Glycine max
  unsure (1)..(402): unsure at all n locations
tcctccacatgagtntattgcccgaaggcttgaaaggagtcagatatcctcattttctgttttagaaggtgctgggagaaccctcaaaggtagggatcttagcaaagtgaggaatgttgtactcccaaaaattggtttcctcgaaacactataaaggggtctcttgagtagtgatgtatctttatggtaaaacataatcaattaatttttcatggtgaaggtaaaaacaaaaaatagttgcttctacttttttatggtatcacctaattntatgcgatagaattgattcttatgtgtcatccaaacatgatagtagctcttttacattngngatgtataatanggtttgtagttagaggttatttangaatggatgttgtgttcatatgcttggggtataaa

SEQ ID NO: 9382 - DNA, 447 bp, Glycine max
  unsure (1)..(447): unsure at all n locations
ntatgatgatgaaccaagcaatattggtgatgccgttagccctagtgattgattcaagacttcaagatcaagcatcatgaatgcaatccaatccaagattcaagattcaagaaaagaaatcaagaagcaacaagtcaagacttcatataggataagtattaaaagaattttttaaaaaccaaatagcataattttgttttacaaaagaattttgtcaaattttctaaagtgaccagagtgattactctttgttaatcgattaccagttagcagtagtcgattactagtaaccagattggttttcaaaatgttttcaaatgatgtgtaacattcaaaaatgattttcaaatagtgtaatcgattacactatattagtaatcgattacaagtgaatcttaacgttggaattcaaatccaatggtgaagagtcacaacttttcataaaat

SEQ ID NO: 9383 - DNA, 342 bp, Glycine max
tcttagtttcagatgatgcagatgggtttgtagctacctcatgcactcctctaatgactatggcatcatttctggcgctaaactgctgggagttggaggccatcttctcaattaaatttctggcttcagcaggagtcatgtctccaagggctccaccactggcagcatctatcatacttctctccatattactaagtccttcataaaaatattggagaagaagctgttctgaaatctgatggtgggggcaactggcacatagtttcttaaatctctcccagtactcatacaggctctctccactgagttatctaatacctgagatatccttcctgatggctg

SEQ ID NO: 9384 - DNA, 347 bp, Glycine max
  unsure (1)..(347): unsure at all n locations
tgaaattgaacaacggaagctctctatacattttaatggtcataacttntcacttggaggtacaattcacgcgcataatatatcgagacgctcaaaattgaacaacgaaagctctcgagacattcaaatgatcataacttttcacatggacgtcagattcaagcgcataatatatcgagatgctctatattgaacaatggaagctctcgacacattcaaatggtcataacttttcactcggaggtccgattcatgtgcataatatatcgagacgctcgaaattgtacaatggaagctcttgagcaattcaaatgggctataccttttcacttcggatgcccgattca

SEQ ID NO: 9385 - DNA, 388 bp, Glycine max
  unsure (1)..(388): unsure at all n locations
ntaaagaccaattaaaggaaataggagtgtggatgtgtattacaaacagatgaagatttccttgattagggctcaaattgaagagtctcatgaggccaccatggcaaggtttttgcatggtctctatagggagatccaagacattgtatagttgcaccactatgcctctttggaggatctcattcatcaagctatcaaggtggagcaacaattaaagaggaagcaaacatacaagaagtcctcctatggctttccaacttagaaagataaggagacattcaagaaggagggaagaccttcattcaaatctcatgaaaaaggtgttgcccttggtaaaaaaataattctaaccctactcccacttcttcaaaggcgagttctattaaat

SEQ ID NO: 9386 - DNA, 271 bp, Glycine max
gacctctatttatagcccacgcgtcacagaaaaatggagggaatattgaattttctatttaaacttcacttgaattaaaaattgaatttatggggccaaatttcggagccaaaatttcacttattatgattcgggaattttagctatggctcaacccactagtccaagatctagtccaagattctccactaagtgtgcttaggtgtcataagacatgtaaagcatgaagtttatgcacacagtgtgactatatgatgtggcaatggagtgt

SEQ ID NO: 9387 - DNA, 420 bp, Glycine max
tgtagggttaaagtctcacgattgtcacgtgctcatgcaacaattgttagccgtggctatacgagatatcttgccaaacaaagtcaggttagcgataactcgcctgtgctttttcttccatgctatatgtagcaaagtcattgatccagtcaagtttgatgagttggaaaatgaggccgcaattatactgtgtcagttggagatgtattttccccctgctttctttgacatcatgattcacttgattgtgcatctggtaagagaaatcaaatgtcgtggtcctgtctatctacggtggatgtacccgattgagcgatacatgaagatcttaaaaggggatacaaagaatctatattgtccagaagcatctattgttgagaggtacattgcagaagaagcctttgatttttgttaaatact

SEQ ID NO: 9388 - DNA, 448 bp, Glycine max
  unsure (1)..(448): unsure at all n locations
tatagaatatataataagagaactatgactattgaagaatctattcatgtttccttttatgagtctaatgctattcctccaagaaaggatattttagatgatattgcagaatctttagaacaaatgcatatttatggacaagattctaaaggaaaaggaagcaatgaagatcctccagtagaagccaaatcaaatgatgaacttctgagagaatggaaagcttcaagagatcatccccttgacaacattattggtgatatctcaaaaggggtaacacctagacattctcttaaagatntatgcaataatatggcttttgtgtgtatgattgaacctaaaaatntaagtgaagccataatagatgatcattggatagtttctatgcaagaagaactaaatcagtttgagagaaataatgtgtgtgaactagtagagaaacctgaaaact

SEQ ID NO: 9389 - DNA, 386 bp, Glycine max
tctcgatatattatgcgcctgaatcagacttccgtttcaaaagttatgaccatatgaatttctcgatatattatgcgccttaatcggactttcgtgtgacaagttatgtccatttgaatttctcgatagcattcgttgttcaatttcgagcgtctcgatatattatgcgcctgaatcggacttccgtgtgacaagttatgaccatttgaatttttcgagagcatccgttgttagatttcgagtttctcgatatattatgcgcctgaatcggacatccgtgtgacaagttatggccatatgaatctctccagagcatccgttgctcaatttcgagcgtctcgatataatctgcgcgttaatcgaacttccgtgtgacaagttatgac

SEQ ID NO: 9390 - DNA, 202 bp, Glycine max
agcttctctatatattatgtgcctgaatttgacttgcgtttgaaaaattattaccatttgaatttctccagagctttggctgttcatttcgagtgtctcgatatattatgcgcctgaatcggacttttgtgtgacaagttatgaacattcgaatttctcgagacctttctgttttcaagttagagcgctctaatatgtgatg

SEQ ID NO: 9391 - DNA, 383 bp, Glycine max
  unsure (1)..(383): unsure at all n locations
cgtttcctatcctatcgttccactgcactttcctttttctattatgtcttatctgatttccgtgcaattcctccttttcgcactggcaacaaagaattggaatcactctcatcttctctattgctatgatcttcaacctttctgccctctaaagaagccactgtcagagtcacagtcacagccataggcttgtttatgcagccattagtatccttggttgactttntagtatccatcaataataacaacactctttatgctctctctctctctctctggtacgttttccgtggcagaccgaagtagaaaaaacgaaaattcacggaaattaatgaactggaagaataccatttgacccattgacctgaaaatcacagcgcaag

SEQ ID NO: 9392 - DNA, 443 bp, Glycine max
  unsure (1)..(443): unsure at all n locations
tgtccttcacggcaaacatgatagcactggcatgttctgcagcattttctacaattggaagcaagatgacagaaataaaagccactgacatattcaatgactcagatgctccctgcaagagaccagaaacacaatgtcaatgaatgaacttatgatgcagaatttatggataataggaatattgtgaatgtatgaatacagagttttgatgatgtcaaagtaaaatcaaacaaggttgtttcaacaaacattattgctttaagattaattcaaggtcaaacaaataagatcaagaaaaagataaggtctcaaataatctcactggttgatngatttttgccttaaaacaaattgtttccaagagatcaaaggctctagtattcgattactaggcaatgtaatcgattaccaggagacaagtttaccaaatcaactttaaaaaa

SEQ ID NO: 9393 - DNA, 388 bp, Glycine max
agctttgatttcttggaactgctcctcactctcatcaacaagaccagcggagcagtatacgcttaacaccacttcaagtgtcagctcattaggttcacaatttgctttttccatttcaacataagattttacagcctcttcatactgaccttcttgcctaaaagctttgatcacaccattgaatgaatgcacatcccgttttaaaccagactcattcatcctggataaaattgcttctgcttctttgtacagtcccccccttgcaaatgcatgaatgaatgaattgtaggtctcaacagttgggttgcttccaacttcattcatagtgttaaacacaacaagagcctcttcatacagtgcagcctgccccaacgctcatcacccagta

SEQ ID NO: 9394 - DNA, 360 bp, Glycine max
tgacaggttcaggtgcaggtgctgctactggtggaggcacttgaatttggttgccagacctcaaggtgatggcactcacatttttcggattctgcacagtttgtgaaggcaatttgtcagaattctgggactgagcttggttcatctgagtagccatctgccccatctgatttgtcagactctgaatagaagctcttgtctcttgctgaaattgcatattctggatggtcatttgcctcactaactcttctaaggaaggttgaggaggggccttagttgcttgttgtctttgttgttgttgctactgctgctactgtaatggaggaagaacatatggcttgcttggaccagcaacatttt

SEQ ID NO: 9395 - DNA, 425 bp, Glycine max
gtgggaggtctggacttgacatccgaactgacattcatggctgattctgtctgcctcgagcttcagagtgggaatgccagcatcagcacttatgatgcggatgaattgggcgtctgagtgaagcggatggccatacgagtgatgccatatcttgactgcatcatctttggaggatagacatgtggtggagctgctggggacatggggtgtacataggttggaagtgtacattgatctggtgccctcaagtagaacttcactcttctcattatgtaccgcgcctgctgactacgtgaaggtgacatggtatgcttcatgacacagctgacagatgctgatgaagattgcagacagaccctataccaacagggcttggatcagactacgaagtccatcatgagcgtgctttgccattgcaatgacct

SEQ ID NO: 9396 - DNA, 371 bp, Glycine max
agctttccattttatagctacagaatgttaatgatgtcatggatgcaattcaagccaacctaaagaaaaaagaacagattgaggagcttgtcttggagtgggataatgacccacaagattcgcaaattgccaaagatgtacttcaaaacttgcaaccatcaacaaattaaagaaactcaacattagatcctatggcggcacaatctttccaaaatggttaagtgattcttcaaattccaatgttataacccttgtcatcactgattggaattattgttggtcactttcaccatttggtcaattaccttctcttaaggagcttgtcattatgaggatgcacatggtgaatggtataggtcatgaaatctact

SEQ ID NO: 9397 - DNA, 428 bp, Glycine max
  unsure (1)..(428): unsure at all n locations
nttaagaagacaatttccaatcatgctatcctatgcaatgactattaacaagtctcaaggccaatcactttctatagttgaactttaatggccaaaaccagtttttagccatggacaattatacgttgcattatcaagggtcaattcaaggcaaggattaaaagttcttattcatgataaagagcaaaaaaatatgacttctactactaatgtagtcttcaaagaggttttcaaaaatcttacaaggtaactctaaattttcaaacaacaaattgtactatctattgacaacaattcctaactgttatcttactcttatacattctaacatacagccaaagatgatatcatatattacaatgttaaattttacattgtcaggtatgtaatcttaatcaccacattaatatcatccatttataatttca

SEQ ID NO: 9398 - DNA, 342 bp, Glycine max
  unsure (1)..(342): unsure at all n locations
ngctcgtcttgctgatatttatcatgcacacttttcttatgatgacctacgaacaattagggatcaacttgaaacttatgtgcttcaagtgagaagaaatgcttctttttccacttgtgaagatgttcaaagtttggctatgaagatggttcagactgagaaacatttggtatttccattggtttataaacttattgagctagctntgatattgccggtgtcgacagcatccgttgaaagagctttttcatcaatgaagattatcaagtctaaattgcgcaataagatcaacgatgtgtggttcaatgacttgactggatgttacaccgagcggcacatatt

SEQ ID NO: 9399 - DNA, 435 bp, Glycine max
  unsure (1)..(435): unsure at all n locations
ggcttgtaagcatcgtcccataggaatggttcaatttttcttagtagcatgtaaaatggctttgccttttttgcgagcttcgggaggaacttggacaaagacgctagtctaccatttagctnttgaacttctctgatgttagtaaggctatgtatttctagtattgcagtacacttgtcaaggttagcttcgattccccagtaggtgatcatgaagcccaaaaaaattttgtcgctgatcccaaaggtgcacttctcaagattgagatgcatgtcatacttgctagtctctccgaacacttccttcaaatctgctacatgttaagctatgctgtgagacttgacaaccatgtcatccacatagactttgacatttctgcctattnttcatttgaagacccagtccatgagccttttgtatgtagctttctcattc

SEQ ID NO: 9400 - DNA, 229 bp, Glycine max
tctcttagatctttaagtgcagattttcaggaatatgattgatctcatccagcgcaagttgttgcagcccagatacgcacactgctatataaacatgaatgctgcacgagttttccaccaagtccgggattgaagagttattttgtgagttttgggacttgagtgttttgtgagccaccttgatgttaccctaacatcaagcgttggacctgagtgtgttgagttgatc

SEQ ID NO: 9401 - DNA, 342 bp, Glycine max
agcttcttagtttcagatgatgcagatgggtttgtagctacctcatgcactcctctaatgactatggcatcatttctggcgctaaactgctgggagttggaggccatcttctcaattaaatttctggcttcagcaggagtcatgtctccaagggctccaccactggcagcatctatcatacttctctccatattactgagtccttcataaaaatattggagaagaagctgttctgaaatctgatggtgggggcaactggcacatagtttcttaaatctctcccagtactcatacaggctctctccactgagttgtcaaatacctgagatatccttcctgatg

SEQ ID NO: 9402 - DNA, 435 bp, Glycine max
  unsure (1)..(435): unsure at all n locations
nttccattctgcagtagcagatctgtaaactttgaatttccctatgaatttagttactcgcataaagtctattgttattcctcaaccaaggttctccccacgcacagagattagcaccagacccagttgaccgtctcagctcttccttcaacaatatttgagaagcgtagatgctacaccacacataggatggaatgtgacctacaacaacgtccaaaaaatccctcctagggaaatatttatctttgaaaatcctagaaaccatagttttggtgttggatagaaacatccagccttggttccccaacattgccaaattaaagccacaaaagtctcaaaatctatgcccattctttcttaataacggttaatctttcccaagttggaataactgagaatctagaagggggttgaatagattcttttaaatgttta

SEQ ID NO: 9403 - DNA, 442 bp, Glycine max
  unsure (1)..(442): unsure at all n locations
ctaagctatgctgcnacattacaacaaacctcctccacctcatcatcaaaatcaaccacagcagaacaattatgacctctccagcaacagatacaatctcggatggaggaatcaccctaatctcagatggtctagccctcaacagcaacaacaacagcctgctccttccttccaaaatgttgttggtccaagtagaccatacgttcctcctccaatacaacaacaacaacaacaacaacagccccagaaacaacaaacagttgaggcccctccgcaaccttcccttgaagaacttgtgaggcaaatgactatgcaaaacatgcagtttcaacaagagaccagagccttcattcagagcttaactaatcagatgggacaatnggctacacagttaaatcaacaactgtcccagaattctgacagattaccttctcaatctgtc

SEQ ID NO: 9404 - DNA, 341 bp, Glycine max
agcttcccagatccgatcatggaagggcttggtttctgccttcattaggcagtaccagtacaatacggacatggctcccgatcggaaccagcttcagggtatgactaaacgagagcatgagtccattaaggaatatgcccagagatggagagatctcgcagcccaagtcgtaccgcccatgacggaaagggagatgatcacaattatggtagatacgttacccacgttctactatgaaaagctgataggctatatgccagctaactttgcggatctcgttttcgccggagaaaggattgattccgggctacgaaaaggcaagtttgattatgctgccctta

SEQ ID NO: 9405 - DNA, 418 bp, Glycine max
tgagatggaagacaacccttccttgtaattgtgtggtttattataatatttaataattttatcatactagaattaaaattttatattatagtaattatatttaaaaaaaattataatattttaaaattatttgatatatcatttttgtaaatcaaaataaatgtaatataaattttttaaatatataaaaatgagtttcattcaataatctttttaattttgttcaattcattaaaacttggcacaaataattaatctatataattataattcaatgttagatcaataaaataatattctatataaatttattaactataaaaaaagtaattattagtgtaatatactgtcttgtgttatgtagttaaaagaaagtataataataaagttgatttcttctcatttatcgcagaaagag

SEQ ID NO: 9406 - DNA, 320 bp, Glycine max
  unsure (1)..(320): unsure at all n locations
agcttgatttcctttggtccggaaacctttcttttctcatgtgcacccaaacccaatctccgggttcgaagacaaccttctntctccctttgttggcttggttagcatagnctttattcttcctctcaatttgatctttgactctctcatgaagcttcttcacatagtccgcctttgcttgaccttctttatgcttaaaaacagaaacattatgcataggcaaaagatcaagaggagttagtgggttaaaaccataaacaacttcaaaaggagaacaattagtggtgctatgaacagctctattgtaagcanattcaaca

SEQ ID NO: 9407 - DNA, 368 bp, Glycine max
  unsure (1)..(368): unsure at all n locations
agctttgaatgcactattcaatggagttgacaagtacatcttcagactgatcaacacttgcacagtggccaaagatgcatgggagatcctgaaaatcactcatgaaggaacctccaaagtgaagatttccagattgcaactcttggctacaaaattcgaaaatctgaagatgaaggaggaagagtgtattcatgacttccacatgaacattcttgaaattgccaatgcctgcactgccttgggagagaggataacagatganaagctggtgagaaagatcctcagatccttgcctaagagaattgacatgaaagtcactgcaatagaggaggcccaagacatttgcaacatgagagtagatgaactca

SEQ ID NO: 9408 - DNA, 433 bp, Glycine max
tgcactaaagaatgctaatgtagatttgcaaaataatttaataactgacatagtgataggaaatcgaataaatagaatgagaatagaaatggatagaatagaagtgaggagtacacttagtaataaaggatgtgggattgaaacgtgggaaaaataagatgcataatgagatatttataatgtattattaattaaactaactagctaggcaatgataaaaaaagaaaatcacattgaagtataaacgatagagacaataaagaaatacaataaaataaagagctattcactaatatgtataattatttttatttttttatttctttttctttatttttctttgttttcttttttttgttttttgtttttgtttctttttggcttttttgtcaaagtcaaaggattgactctgacttaatcaacactgttagac

SEQ ID NO: 9409 - DNA, 428 bp, Glycine max
  unsure (1)..(428): unsure at all n locations
tgtaatcgattacacacaaactgtaatcgattaccatagcatattttcagaaaatattctcaacagtcacatctttttatttggttcttgaatggctatcaaaggcctatatatatgtgacttgagacacgaatttgaaaagagttttccagaacaaaaaggtcttatcctcttaaaaagcaaaatcgatttatcctcttacaaattccttggccaaaacacttgtgattcaataaggaattatttgagtgctcaaattgttcaatctatctctttcaagagagatttcttcttctcttcttctttattctgaaaagggataaagagatcgagggtctcttgttgtgaaagaattctaaacacaaacgaaggattgtccttgtgtgtttagaactngtaaaacgaatttacaagatagtggaactctc

SEQ ID NO: 9410 - DNA, 391 bp, Glycine max
  unsure (1)..(391): unsure at all n locations
agcttgaaatgttagccaacgaattgtatcaatataggtcttgagtcataagcgattcttggcaacttgttctgaactttgcacatttatgatgttcttcatgtgctttgactgattcaacaagtctttacaagccttcattgcattgttatgtggggagcaaggactatctccaatgtgattaagaaatgcacaatttttccagcattaacctttctacatgatctaaatccttgtctattaagacatttgatccaaaaatgatcactttgctttgtactgaatagatagcataacaaacaataaactctatcattagatggngaatactctagcccagaaagaaacatttaaaccaagtacattggaaaatgcctggatgtttctctta

SEQ ID NO: 9411 - DNA, 389 bp, Glycine max
  unsure (1)..(389): unsure at all n locations
agcttgtgcattcaatatcctgatgattgtgttccatatgttctcaagactggactaatacatttgctgcccaagtttcatggtcttgcaagtgaagatcctcatatgcatcttaaggagttccatattttttgttccaccatgaagccccctgatgtccaagaagatcatatatttctaaaggtttttcctcattctctggagggagtggcaaaagattggttgtactaccttgctcccaggtccattttcagttgggatgacattntaggcatcaggcaacttagtggagagagcttgtatgcgtactangaaagattcaagaaatngtgtgcaagctgtcctcaccaccagatttctgagcaaccccntcttcattatttctatga

SEQ ID NO: 9412 - DNA, 343 bp, Glycine max
agcttgtcgaccagtaatgttctcctataatagcacaccataagcatagacatcagtcttttcatctactataccatgcataaagaattcaggaggaaggtagctgctgtagcatccaaggttaatgcaaaagaaaaacataaaaaaaaaagtgtcaattaattggtgaaaagaaggaaagaaaaaaaaatgttaacatagaaagattgtgaagatgttaaatatacaaactccgaatgtgccttccactttggagacggtgtgatgagtccattggtcgggcaaccactttgcaagcccaaaatcagatatctggtgtaagattagcattaaacaaacttac

SEQ ID NO: 9413 - DNA, 363 bp, Glycine max
tatcattgaacaacgaaagctgtcaagaaattcaaatggtcataacttatcacacgggagtccgattcaggcgcaaaatataccgagacgctcgagattgcacaacggaagccctcaagaaattcaaatggtcataacttatcacacggaagtccgatgaacgtgcatagtatatcgagaagctcataattgagcaacgaaagctctcaagaaattcaaatagtcataacttatcacacggaagtccgatgtaggcgcataatatatcgagacgcttcgaattgaacaacgaaagctctcgagaaattcaagtggtcataacattgtcaacggaagttcgattcatgtgcataatatatcgag

SEQ ID NO: 9414 - DNA, 315 bp, Glycine max
agcttgaaattgaacaacggaagctctcgagaaattccaatggtcataacttatcacacggatgtccgattcaagcgcataatatatccagacgctcgaaattgaacatcgaaagctctcgagaaactcaaatggacataacttgtcacacggacgtccgattcaggcgcataatatatcgagacgctcgaaattgaacaacggatgctgtcgagaaattcaaatggtcataacttgtcacacggaagtccgatttaggcgcataatatatcgagacgctcgaaattgaacaacgaaagctctggagaaagtcaa

SEQ ID NO: 9415 - DNA, 407 bp, Glycine max
agcttatgaacaacaaaagaagtttgagtccttgagggttaggaagagatgactcatgtgaactaataataactaattggaagtaaagtactacatattttttcaaaaattgacttatttaaagtgaataaaaataaaataagtaattttggttgttcaaaagaaaatcaactaataatatttcaataaattcacaacttattatgtttgtgtatgtaatattgattattgattttttcaaactaagtatggatactttcaatatattgaaatttgaatcttcttttcaatgctttcaagttttgaatacggaaaagttaactaaaaggactggtcatgaacccttatttctgtcaatgaagattcaagcctttataaagatgatgcataccaagtctcataaaagt

SEQ ID NO: 9416 - DNA, 423 bp, Glycine max
tgtaattgagcaacggaagctttcgagaaatttaaattgtcatcacttttcactcggaagtccgattcaggcgcatcacatatagagacgctcgaaattgaacaacggaagctctcgagaaattcaaatggtcataacttgtcactcggaggtccgattcaggcgcataatatatcgagacgcttgaaattgagcaacagaagctttcgagaaattcaaatggacatcgcttttcactcggaagtccgattcaggcgcatcacatatagagacactccaaattgaacagtggaagctctcgagatattcaaatggtcataacttttaactcggaggtccgattcatgcacacaatatatcgagacgctcgaaattgaacaacggaagctcttgagaaattcaaacggtcattacttttcactc

SEQ ID NO: 9417 - DNA, 437 bp, Glycine max
  unsure (1)..(437): unsure at all n locations
agcttcaacatcagaccacttccagggtgctggaactacttcacatggacttgatggggcctatgcaagttgaaagccttggaggaaagaggtatgcctatgttgttgtggatgatttctccagatttacctgggtcaactttatcagagagaaatcagacacctttgaagtattcaaagaattgagtctaagacttcaaagagaaaaagactgtgtcatcaagagaatcaggagtgaccatggcagagagtttgaaaacagcaagtttactgaattttgcacatctgaaggcatcactcatgagttctctgcagccattacaccacaacaaaatggcatagttgtaagggaaaacaggactttgcaagaagctgctagggtcatgcttcatgccanagaacttccctataatctctgggctgaagccatgaacaca

SEQ ID NO: 9418 - DNA, 417 bp, Glycine max
  unsure (1)..(417): unsure at all n locations
tcaagaaaaagatggcctcagcaaactccttattttcataagggaattctatcaatagacctccaatctttaatggagagggttaccattactggaaaacccaaatgcaaatttgtattgaggcaatagacctaaatatttgggaagccatagaaatagggccttatatacccaccacagtggaaagaattacaatagatggcagttcatcaagtgaaagtataactttagaaaaacctagagatagatggtctgaagaggatagaaaacgagtacaatacaatttaaaagccaaaaacataataacatctgccctgngaatggatgaatatttcagggtttcaaattgtaagagtgctaaggaaatgtgggacactcttcgattaacacatgaaggaactacagatgttaaaagat

SEQ ID NO: 9419 - DNA, 430 bp, Glycine max
agctagtggagagatcttcctctcttcttgttgcacacgtgccgcgaaaaatgcttagtcaccattctactcaaactgaaaagattttcaactcattcaacaagtttgaagatgtatacaagggcaaggtcacactacattcctataagggcatttctccttatgctacaatgcacaatgatgtgtgctacttggcacttgaaaagagaacaacttttatcatcataccttttcataagcaatggatacttggagggacaactgagtcatcttttgcttttaagcagctcaataagaatgtcctagagaaagctccttgctcagttggtgtcctcattgatcgtggtaaccaaaagatgttttggtgtggcttcaaaaagggatcaatatatcaagtagctatgctcttctttggtggtgcagatgatcg

SEQ ID NO: 9420 - DNA, 412 bp, Glycine max
tgcgagctcggccggaatccgaaattgaggagatgttgcagaccttaggtgtggctttgctgtgtgtgaactcaagcccagatgacagaccgaccatgaaagatgtggtagcaatgatgaaggaaattaggcaggagagagaggaatgtgtgaaagttgacatgcttcttaatgcatcttctgcaaatgagcaacaagaaagaaatcatctcactgaagaaccaatgtcaatgataagcaccagcagcacaaatctgcatctgcattactctccccatcgccctcaaacaccaaagtaacttccaaatagttaaatattagcaatgtgtcttggcaactaagatttccttagcaagaatggtttctgtcctgttatcattaattaattcagcttcatatttttggtttcttt

SEQ ID NO: 9421 - DNA, 428 bp, Glycine max
agcttgccttgccccttgatatatttgagggactcatggtcactatgaatgacaaattccttgggataaaggtagtgttgccatgttttcaaagcccgtactaaggcatacaactccttatcataagttgaatagttaagggtaggaccacttaacttttcactaaaataagcaattggatggccttcttgcatcaacacagccccaatcccaacatttgaagcatcacactcaatttcaaaagatttttgaaagtttggcaacgcaagtatgggggcattagttagcttttgcttaagaacattgaaagcttcttcttgtttctctccccatttgaaaccaacatttttcttgagcacttcattgagaggtgctgccaatgtgctaaaatccttcacaaatcgtctataaaaacttgctaagccatg

SEQ ID NO: 9422 - DNA, 390 bp, Glycine max
tcacacagtttatcattctcaaacttgagttttggaagaccaattactaagtctttcctaactagatgatttaaatgattcatattattgtgtgcagtcctacaatgccacaaccatgaatcatctattttactcaccaagcaacttagctcatgaaaagatgcatgctcaacatttagcatatagatgttacctatccttttaccaatgtggacaactttaccagatatggcttcacttataagacaacaatttctattgaattcaatcttgaaacctttatcacaaatttgactaatgcctataagattatgctttattccatccacatataacacattctttatctaagttttgtgttgattccctatatttccttctcccattata

SEQ ID NO: 9423 - DNA, 375 bp, Glycine max
  unsure (1)..(375): unsure at all n locations
agctntgagaaaaatctaacgacaataacttttaactcggatgtctaatcgagccctgtaatatatcgagacgctcgtaattgaaaacggaagctctaagaaaagtcaaacgacaantaactttaactcggatgtctgatcgagccctataatatatcaagacgctcgaaattgaaaacggaagctctaagaaaagtcaaacgacaataacttgtaacttggatgtccgattgagccctgtaatatatcgagacgctcgatattgaaaacggaagctctaagaaaagtcaaacgacaataaactttaactcggatgtccgattgagcgccgtaatatatggagacgcttgtaattgaaaactgaggctctaagaa

SEQ ID NO: 9424 - DNA, 412 bp, Glycine max
  unsure (1)..(412): unsure at all n locations
ntgatggtgtcgagaagaaatcacatgtttgtcatcatcaaaaagggggagaatgtgaatgtatgtatacatgattttgatgatgtcaaagaagaatctaacaaggctgcttcaaatgataagcatttgcttcaagaataattcaagattgcttcaacaaacaaagccttgtttcaagattcactaaagaccaagccttgccttaaaacaaagtgctttcaagacatgcaaggctctggtaatcgattaccaggaagtgtaatcgattaccagaagacagggttgagaaatagctgttgaaaaatgttttgaatttgaatnttcaacatgtaatcgattaccatatgtctgtaatcgattaccagcaacgaaactttggaaatcaaattcaaaagtcatacccttcaaatat

SEQ ID NO: 9425 - DNA, 411 bp, Glycine max
  unsure (1)..(411): unsure at all n locations
agcttgaaattgaacaacggaagctctcgaganattcaaatgctcataacatttcacacggatgtccgattcagatgcataacgtatctagatgctcaaaattgaaaaacagaagctctcgagaaattcaaatggtcataacttttaacatggatgtctgattccgaagcataacatatcgcgacgctcaaaattgaataagagaagctctcgagaaattcaaattgtcataaattttcacacggatgttcgattcggggataaaatatgttgagatgcttgaaattgagagataaaagctctcgtgaaattccaatggtcataacttttcactcggatttccgattcatgacacttgaaattgaccaacggaagctantgtataaatcgaatggtcgtaacttttcacac

SEQ ID NO: 9426 - DNA, 430 bp, Glycine max
agcttcttagtttcagatgatgtagctgagtttgtagctacctcatgcactcctctaatgactatagcatcatttctggcgctaaactgttgggagttggaagccatcttctcaattaaatttctggcttcagcaggagtcatgtctccaagggctccaccactggcagcatctatcgtacttctctccatattactgagtccttcataaaatattggagaagcagctgctctgaaatctgatggtgagggcaactggcacatagttttttaaatctctcccagtattcatacaggctctctccactgagttgtctaatacctgagatatccttcctgatggttgtggtcctggaagcagggaaaattttttctaagaatactctcttcaggtcatcccagctcgtgatggaccttggagcaaggtaata

SEQ ID NO: 9427 - DNA, 381 bp, Glycine max
taagctccttcaattgcacaaggctcttaatatttgaagagtatccttgtggaaccttcacccaacgaagacactgacaaaaacttatcttctccttcttggacaaagtatggcaggctgggggcaagtaaattttcttcccattagtccttggatgcaactgtgattgtgtacccatatcagctagatcttgatgggtattcaagacatccttcattttgccttgaatgttaaggagcgtcccaatcacactgtcacaaacatttttctccacatgcataacatcaatacaatgcctaacgtgaagatcacaccagtacggaagatcaaagaaaatggaccttttcttccatatgcaactctgacttttatccttctttt

SEQ ID NO: 9428 - DNA, 413 bp, Glycine max
agcttcatgcttaactatgtatggcaaatcttcattattgttgttcaagacatacaagcgagcttgtaacaaatcttctacacttggagtgatcacatgcagtcctcttgaacccttaccacccattctgtcatcatgctaagactcaggaagcccaacagatttagctttctctaagtattctgaacaaaattcaatggcttcttctgcaatgtacctctcaacaatagatgcatctggacgatatagattctttgtatacccttttaagatcttcatgtatcgctcaaccgggtacatccaccgtagataaacaggaccacaacatttgatttctttgaccagatgcacaatcaagtgaatcatgatgtcaaagaaagcggggggagaatacatcttcaactggcacagta

SEQ ID NO: 9429 - DNA, 405 bp, Glycine max
tgaaggtgtgtagcctaccatcttttcatagtagaatattggtaatgtgtctactatcacggttatcatctccctttttgtcattgagggaactacttgggctgccaggtctctccacctttggacgtattctttgaaagattcatgcccctttttgcacatgttctgtagttgcatcctatccgaagccatatcagaattgtattgacactgcctaacgaaggcaaccattaggtccttccaagaatggactcgggaaggttccaagttagtgtaccaggtaacagctaccccagtatgactttcttggaagaaatgtattagcagttcctcatattttgtgtatgcccccatcttccgacaatacatctttagatggttcttcgggcaagtagtccccttgta

SEQ ID NO: 9430 - DNA, 423 bp, Glycine max
tgtcagatatatatatcggattaatttcaaacagtatcttatgcataataggtggttctagtaataagaaagttttagtggttgatgtaacgttaagaaatcgaatcttttaagtcatcacgtttttttttttcctatatgcaatgttttaaaaataggaccaaatcgatattactactagtccaatactgtgtttctccatgtaatagttgcaacattttttatataaaaataactactgccacatatataattatgtatttaacttatttgtattaaatataacttaaagagtttaatgataatgtattgataatatttttatattatcgtttaatcataattttttgttaatatgacttttaaagtaattattataaaagttataaatacaaatttattatacataatggattatgatcg

SEQ ID NO: 9431 - DNA, 395 bp, Glycine max
  unsure (1)..(395): unsure at all n locations
agcttagatggagaagaagacacagagtgccagcttcttagggctcaccatattttttaaaatataacttcaacatcggtttttaaaaaaacccgatgttaacaaaatgatgttaaggttaacatcggttttctggagaaaaccgatgttatcataacaaacgttaacatcggttttctaaaaacccgatgttaataaacatatgttaacatcggttatttaaaaaccgatgttactaataaatgttaacatcggttctccaataaccgatgttaatgaacttcgttaacatcggtttttcacaaaaccgatgttaacgtatacacagtatntacaattatgccaccgcgcatatgttaacatcgngttttttaacaaccgatgttaacacaccg

SEQ ID NO: 9432 - DNA, 423 bp, Glycine max
agcttggacaatggaaaggaaatcttgctaaaatcttagatgaatctcctgtaaatacctctactagagatcaaatgccctaagactataccttcatggacaataaaatgacatttttcaaagctaagaacaaggttagtctcaatgcattggtcaagaactctagagaggcatgcacatttggaaggtgccaagagcgttgcataggccaaaaggcatcccggtgtaggcaaatgtgtcgaatggacaggtgaatatggtctagtgctggtccttcgatgcaatataaatttgcatgtaacctgaaaaaccatcaagaaagcaataatgtgatttacctgccaacctttccagaacctagccaatgaatgagagagggaagtgattcttgcaagttgcctagttaaatctcctataatcaat

SEQ ID NO: 9433 - DNA, 352 bp, Glycine max
agcttatcattaaaataaatctaaatggttgatgatgccatgatctatatctttcaatttttgtatgattacttgtatgatatgtttaaaagtatttgattgattgctcatgtttttcaaaattattatattttgtttctaaagccttgtatttggctatatgtttatgaaatttgaacacttagtatgacttgaatatttatggattgtgatatatgactatgtggtttgcatttaaatctggttttattcaagatattatatttgcaaaaactttaatattaagcataaattcaaaaagaaaaggggtgaaagggatgagtgaacagtacaacaaaaattgtatgcattc

SEQ ID NO: 9434 - DNA, 417 bp, Glycine max
tgttaaaaagggaagaaagtcaaaaactcttttcaaattaaaaatgttgtttctacttcaaaaccccttgaactacttcacatggatttatttggtccctctagaactatgagtttgggtggtaattactatagcttacttatagtagatgattactcaatgttcacatggactttgtttttgaaaacaaaaaacgaagcttttgatgcttttcgcaaattgccaagatgattcaaaatgaaaaaggtctcaacattgtttcacttagaagtgatcatggaggcaatttcaaaatgagtcttttgaaagcttttgtcaagaaaatggaattcaccataattttctgccccaagaacacctcaacataatggtggtgtggagaggaaaaatagatcccttgaagaagctgcgagaacc

SEQ ID NO: 9435 - DNA, 355 bp, Glycine max
agcttagctacacatacctctctaatagctaagctcacctccttgagatgagaagctagagcttagctacacactccctataatagctaagctcacccctatgacaaaaaatatgaaaatacaaaaaaaaagtccttactacaaagactactcaaaatgccccgaaatacaaggctaaaaccctatactactagaatggccaaaatacaaggcctacgaaggaaatacctattctaatatttgcaaagataagcgggctcatacttagcccatgggctcgaaatctaccgtaaggctcatgagaaccctagggccttcccttggatctctagcccaatctacttggagttttcta

SEQ ID NO: 9436 - DNA, 415 bp, Glycine max
agcttaagctccttcaattgcacaaggctcttaatatttgaagagtatccttgtggaaccttcacccgatgaagacactgacaaaaacttatcttctcctttttggacaaagtatggcaggctgggggcaagtaaattttcttcccatcagaccttggatgcaactgtgatcgtatgcccatatcagctagatcttgacgggtattcaagccatccttcgtcttgccttgaatgttaaggagcgtcccaatcacactgtcacaaacatttttctccacatgaataaagagtttagtccccattgagcatttcaagaagagcatggagggagtgtgtcagaattcggtgaagcagaagccctttcttggacaataaaggtggaattacccagggtagtggtcttgactatggcaat

SEQ ID NO: 9437 - DNA, 412 bp, Glycine max
tgctaacccatggaagctcctaatatctcccacactttttggggtggaccattcttggattgctttgattttctcagggtccacttggaccccatttctaccaactacaaaccctaagaaaactatattatctacacaaaaggtacacttctctatatttgcaaagagggtgtttttcctaaggactgaaagaacttgcctgagatgtcctaagtgatcatctaggctcctactgtacactaaaatatcatcaaaataaacaactacaaatctacctatgaaatcccttaaggcatgattcataagcctcaaaaaggtgcttggtgcattagtaagcccaaaaggcatcactagccattcatacaaaccaaactttgtctttgaaagcggtttccactcatcaccctttttc

SEQ ID NO: 9438 - DNA, 437 bp, Glycine max
  unsure (1)..(437): unsure at all n locations
agcttagcctgcaaaaaataatgaatatagagttaacatgttggttccacaaaccaaatgctagcctaaacccaatgcttaggcattcactttaagactacacagtgtaacatgatagacacaaaacagaaaagatatttatggaactataagggcataaaagagttaccttattgcaagttgaagaaaaaacaagaacaactttatcaatgtattccaaagattttgagaagttgcccgaatcatagaaggactgagttgtttccaaagcactttgagcctgcagtagttgagagagcttattttctgtagctgaatctccaggttttaactccagagaanatgtacaagcgcacaattaactcaagcaattacaaactttatcataatcactagtncaaatatacagatagtattcaattgagaaaatagagaat

SEQ ID NO: 9439 - DNA, 426 bp, Glycine max
  unsure (1)..(426): unsure at all n locations
agctatgaaattgtggatgagccaaccatgaaattgggacaatgtatcttgtcctgttttcaccaacatacactgcaaagtgcccttttggcacatcttctggaagaccaccctcttcattgtagccctgttgctgcttcttcccaaagcttgaacaccttctcacaatttgctttatcacatctgcttggggtagcttattggattttttgatggccattgtgaaattgattgttagtactctttgcacaccttcaagttgttaactttgaaagggtctcttgagggtgctgaaagtgtgtgattcatggggcgagtttggagaggctntatttatcattgggacattggtatgtgtggaaaatagacaatgagttttagagaaaacagggtcacgtggatgtggtgacatgtagcagaccacac

SEQ ID NO: 9440 - DNA, 401 bp, Glycine max
tccttaagaagattcctaaagatgcttgagcttagctacacatacctctctaatagctaagctcacctccttgagatgagaagctagagcttagctacacaccccctataatagctaagctcacccctatgacaaaaaacatgaaaatacaaaaaaaaaaaagtccttactacaaagactactcaaaatgccccgaaatacaaggctaaaaccctatactactagaatggccaaaatacaaggcccagacgaaggaaataactattctaatatttacaaagataagcgggctcatacttagtccatgggctcgaaatctaccctaaggctcatgagaaccctagggccttcccttggatctctagcccaatctacttggagttttctacccaatgcccttg

SEQ ID NO: 9441 - DNA, 431 bp, Glycine max
  unsure (1)..(431): unsure at all n locations
agcttagagaagcactgagcaccacccaacacatgggaataggaaatctgtccttgatcgtgagggcgtttaaagctntgtaatcaacgtagaagcgccaggatccatcttgtttcttcaccaacaataccagcaaagaaaatggactggtacttggctgaatcaggaccttttggagcatggagtcgatctgcaattcaatctcgcgcttttggaagtgagggtacctatacggtctcatgttaactggagtggattgaggaagcacgtgaatgtggtggttggtgtccctagccggtggcatcgcatggtggggtcgaaataaggcaccaaatatggtgagcaatgttcggagtacgaagggcaagtcctccatgcgtgaaggagggatatcctctatgagtactgtgatgtggaagtaaagtccaggt

SEQ ID NO: 9442 - DNA, 400 bp, Glycine max
  unsure (1)..(400): unsure at all n locations
agcttaaatacaactcccgaacttagaattttcattntgaccagtttccttcggtttttccgatgttttccacaaataaacgttggtggcgactccgcgcatctttcctcctttggaaagcgcacccgttagcttcgccttcgctcgcccttaaaagggcacgttgcgacacctatcaacaacaacaaatatggaatccttaccattacttgttctaggcagccctaaaacaaagtccattgataaattaatccatggagaatccgaaattggtaaaggggtatacaaaccataaggcattacctttgacttggcctttntgcaaacaatacaacgctcacanaatttctgcacatccttcttcatgttaggccaataaaaatgctctttcaatgtatct

SEQ ID NO: 9443 - DNA, 412 bp, Glycine max
cgtaaagcttttggtgggaaatgatagtgagactcaactcggataccaaccttgcgctacaataattgcagcaagacccactatccacaatgggagaacaatttttgtttaaaaccttgcatcttatatgaaaaatgttctctctttcggtttaggctaggtcacaagattgactcccaaggagccttctcaccattagaagatcaccttcttcataggggtaaaccttttcaatatgctcatcacccttggcttcacccccacttccacttgaaaaaggagaagaagtagcctcctcttggctactatagatgtcttgatccctcatgatcatggttttctttgtggggcatcgagaagcaatgtggcctatcccaatacatttgaagcatttgatgttactagttctatc

SEQ ID NO: 9444 - DNA, 388 bp, Glycine max
tataattgaacaacgaaagctctcaagagatgcaaatggtcataacttatcacacggaagtccgattcaggcgcataatataccgagacgctcgaaattgcacaacggaagccctcaagaaattcaaatggtcataacttatcacacggaagtccgattaaggtgcatagtatatcgagaagctcataattgaacaacgaaagctctcaagaaattcaaattgtcataacttatcacacggaagtccgattcaggcgcataatatatcgagacgctcgaaattgaacaacgaaagctctcgagaaattcaagtggtcataactcttcacacggaagtccgattcatgtgcaaaatatatcgagacgcttgaaattgaacaacagatgc

SEQ ID NO: 9445 - DNA, 247 bp, Glycine max
agcttgaaattgaacaacggaagctctcgagaaattccaatggtcataacttatcacacggatgtccgatttacgctcattttttatccagatgctccaaatcgaacatcgaaagctctcgataaactcaaatggtcatgggttattacaccgacgtactattttggcgcataatatgtgggggcgctgaaattgagcaacgcaagctgtggagaaattcataaggtaataacttgggccactgatg

SEQ ID NO: 9446 - DNA, 444 bp, Glycine max
cgctatcaggaccttgaaactcagcttaacaaaggcatgcgaaatgggtggaattcctagagcaattcccttatgttatcaaacataaaaagggaaaaggtaatattgtagccgatgctctttctcggcgtcatgcattactttctatgcttgaaacaaaattgattggtcttgaatgtttgaaaagcatgtatgaaaatgatgaaacttttggagaaatttttaaaaattgtgaaaaattttcagaaaatggtttctttagacatgaaggctttcttttcaaagaaaacaaattgtgtgtgcctaaatgttctactagaaattttcttgtttgtgaagcacatgaaggaggtttaatggggcattttggggtccaaaagactctagaaacattacaagaacatttttattggcctcatatgaaaaaggatgtgcagaaatttt

SEQ ID NO: 9447 - DNA, 433 bp, Glycine max
  unsure (1)..(433): unsure at all n locations
agcttgtcaaattagtgtatggattgaaacaagctcaagagtttggtatgaaagaccaagttcatttttagttcaaaatttattctccaaaggaatagcggatattacaccattcataaagacttagaaaatggatctgttgatagtatagatctatgtagatgacagcatctttggtatttcctcaaaaaggatgtgcaaacaattttttgagctaatgaaaggaaaatttaaaataagcatgatgggagaactaaagttctttctaagggctttaaatcattcaaaagaggtttagaatggatgaaaccagaccagtggctaccctcatgcatccatccactgttagtgataaagcagaanagaaaagcaccaatagtgcataccaatttcatgggaaatcactagtgtcataatcttcaagaaacaacac

SEQ ID NO: 9448 - DNA, 405 bp, Glycine max
ttgagcaaattcaaacgacaataaatttttactctgatgtccgattgagtctcgtaatatatcgagaagctcgaaatggaataccaaagctctgagcaaattcaaacgacaataactttttactcggatgtcttattgagtcccataatttatcggaacgctcgaaatagaataccgaagctttgagcaaattcaaacgacaataacctttttactcggaagtcggattgagtcccgttatatatccagacgctcgaaattgaatgttgaagctctgagcaaattcaaacgacaataacctttttactgatatgtcggatagagtcccgtaatatattgagacgctcgatatggaataccgaatctgtgagcaaattcaaacgacaataactttttactcggatg

SEQ ID NO: 9449 - DNA, 355 bp, Glycine max
agcttcaacattcaatatcgagcatttcgatatattacgggactgaatcagacatccgagtaaaaagttactgtagtttgaagttgctcagagcttcaacattcaatatcgagcgtctcgatatattacgggactgaatcagacatccgagtaaaaagttaatgtcgtttgaattatctcagagcttctgtattccatttcgagcgtctcgatatattacgggactcagtcagacatccgagaaaaaagttactgtcgtttgaatttgctcagagcttcgataatcaatttcgagcgtctagatatattacgggactcactcagacatccgagtaagaagttattggcgtttgaa

SEQ ID NO: 9450 - DNA, 304 bp, Glycine max
tttaaatgttttcaatgttttagaaagcatgtaatcggttacacatggcttgtaatcgattaccagtggtttggaaaattttaaaacaaccataagaaatttgaatttaaatttcaaagttgtgtaatcgattacagtaagttggtaatcgattaccagtgtttaaaaattcaaatttcaaatgtgaagagtcataactcttcagaagtaattgtgtaatcaattacaccattatggtaatcgactaccagtgagtagttttgaaaaatattcccaacaatcacaacttttcatttgaattttg

SEQ ID NO: 9451 - DNA, 427 bp, Glycine max
  unsure (1)..(427): unsure at all n locations
agcttctggtgggacatcttgacttgctttccaatctgacattcaccacagattctgccttcttctattttcagattgggaatgcctctaacagcacctttgtcaatgattttcttcatgcctcttaagtgcagatgtccaaatctttgatgccatattttgacttcatcttctttggaggatagacatgtggaggagtaactggtttcttgaggtgtccataggtaacagttgtcctttgatctgctgcccttcattagaacttcactcttctcatttgtcaccaagcattctgactttgtgaagtttacattgaatccttcatcacacaactgactgatgctgatcaagtttgcagtcagtcccttcaccagcagtactttgttcagactaggaagtncatcatggactagctttcccattccag

SEQ ID NO: 9452 - DNA, 408 bp, Glycine max
tggatgtttaacacaatatatacagagattcagattattacttacagttttaaaagtcgagaattaaaatcaaagatacttgcttttaaggagctaaaataagaataccattaacccttatcttgaaatacttagttcacttctctagctactttctttgacattcatgtatatatgcactataaagattaaataatggagtactaaggacttatctagttatctaccacaataaatatatctctcaacttcaacccaatatatagtattataaacggctaaatattcccaaaacagaatatataaaaagatttattttgatgattatcaatataaaaatcgttctattaatcaattgaaaatcatcataactctactgctatatatggtaatattctaataaataat

SEQ ID NO: 9453 - DNA, 413 bp, Glycine max
tgatgtttgtgttgaatgcattaaaggtaaacagaccaaaagtaagaaattatgtgcatatagagctacagacgtcttggaattgatacatacagacatttgtgggtcatttcatataccttcatggaatggttaacaatattttatatcattcatagatgattactccagatatgcacacctgtatcttatacatgaaaagtcacaatccctggatgtgttcaaaacatttaaagttgtagttgaaaatcaactcaacaaaagaatcaagagagtcagatctgaccgtggtggtgaatactatggcagatatgacggttcaagtgaacaacgtcctgggccttttgccaggtacctagaggaatgtggaatcgtcccacagtacacgatgtcgaggtcacctagcatgaatg

SEQ ID NO: 9454 - DNA, 388 bp, Glycine max
gatttctccagatttacctgggtcaactttatcagagagaaatctgacacctttgaagtattcaaagagttgagtctaagacttcaaagagaaaaagactgtgtcatcaagagaattaggagtgaccatggttgaaagattggaaacggcaaggttactgaattctgcacatctggaggcatcactcatgagttctctgcagccatcacaccacaacaaaatggcatagttgaaaggaaaaacaggactttgcaagaagctgccagggtcatgcttcatgcccaagaacttccctataatctctgggctgaagccatgaacacagcatgctatattcacaacagagtcacacttagaaaagggactccaaccacactgtatgaaatct

SEQ ID NO: 9455 - DNA, 392 bp, Glycine max
  unsure (1)..(392): unsure at all n locations
tgatgatttcctataggcatatanaacagccttcaaaactcccattggcatctctttgtttcaaatggtgtacgaaaaagtgtgctacctaccaatggagttagaaattaaagctcattaggccatgatgttcctcaactttatctttatagcatccagagagaaaaggaaggtataactacaagaacttaaaaaaatatgccacaacgcatatgatttatccaagctctacaaacaaagaaccaataggaaccatgacaaaaagatcctctacagagaatttaggcccaaacttcaagtattgctctacaactcaagattaaagttgtttcttggaaaattaaaatcaagatggagtgggctttttactatcaaagacattaagccttatg

SEQ ID NO: 9456 - DNA, 399 bp, Glycine max
agctttgacgtttgtgttgaatgcattaaagataaacataccaaaagcaagaaattaggtgcatatagagttacagacatcttggaattgatacatacagacatttgtgggccatttcctacaccttcatggaatggtcaacaatattttatataattcatagacgattactctagatatgcatacttgtttcttatacatgaaaagtcacaatcattggatgtgttcaaaacatttaaagttgaagttgaaaatcaactcaacaaaagaataaagtgtgtcagatctgaccgtggtggtgaatactatggcagatatgacggttcaggtgaacaacgtctagggccttttgccaggtacctagaggaatatggcattgtcccacagtacaccatgccg

SEQ ID NO: 9457 - DNA, 431 bp, Glycine max
tgaatgcatgtaacccaccatcttctcatagtagaacactagtaacgtgtcttctatcattattatcatctccctatccatcattgggggcgctacttaagtttccagattcctccacctttgggtgtattctttgaaagattcatcctccttcttatacatgttttgtagctgcattttattcggagccatatcagatttgtactgatactgcctaatgaaggcaaccattacgtccttccaagaatggattcgggaaggttccagattagtataccaggtgacggctgccccagtaagactttcttggaagaaatgcatcaataatttttcatttttcgagtatacccccattttcctgttgtacatcttcaagtgattcttgtggcaagtagtccccttgtatttatcagaatccagcaccttgaact

SEQ ID NO: 9458 - DNA, 487 bp, Glycine max
taacaaaaggcatgcgaaatgggtggaattcctagagcaattcccttatgttatcaaacataaaaagggaaaaggtaatattgtagccgatgctctttctcggcgtcatgcattactttctatgcttgaaacaaaattgattggtcttgaatgtttgaaaagcatgtatgaaaatgatgaaacttttggagaaatttttaaaaattgtgaaaaattttcagaaaatggtttctttagacatgaaggctttcttttcaaagaaaacaaattgtgtgtgcctaaatgttctactagaaattttcttgtttgtgaagcacatgaaggaggtttaatggggcattttggggtccaaaagactctagaaacattacaagaacatttttattggcctcatatgaaaaaggatgtgcagaaattttgtgaacattgcattgtatgtaaaaaggcaaagtctaaggtaaagcctcatggattgtatactccattg

SEQ ID NO: 9459 - DNA, 469 bp, Glycine max
agcttgtcaaattagtgtatggattgaaacaagctcaagagtttggtatgaaagaccaagttcatttttagttcaaaatttattctccaaaggaatagcggatattacaccattcataaagacttagaaaatggatctgttgatagtatagatctatgtagatgacagcatctttggtatttcctcaaaaaggatgtgcaaacaattttttgagctaatgaaaggaaaatttaaaataagcatgatgggagaactaaagttctttctaagggctttaaatcattcaaaagaggtttagaatggatgaaaccagaccagtggctaccctcatgcatccatccactgttagtgataaagcagaaaagaaaagcaccaatagtgcataccaatttcatgggaaatcactagtgtcatagtcttcaaagaaacaacacaattgccatcaaacaccacttcattagagatcata

SEQ ID NO: 9460 - DNA, 368 bp, Glycine max
agcttaaatacaactcccgaacttataattttcattttgaccagtttccttcgggttttccgatgttttccacaaataaacgttggtggcgactccgcgcatctttcctcctttggaaagcgcacccgttagcttcgccttcgctcgcccttaaaagggcacgttgcgacacctatcaacaacaacaaatatggaatccttaccattacttgttctaggcggccctaaaacaaagtccattgataaattaatccatggagaatccgaaattggtaaaggggtatacaaaccataaggcattacctttgacttggcctttttgcaaacaatacaacgctcacaaaatttctgcacatccttcttcatgt

SEQ ID NO: 9461 - DNA, 362 bp, Glycine max
tatgctacaaacatctacaatagacctcctcaacctcagcaataaaatcagccacaacaaaacaattatgacctctccagcaacaggtacaatcccgggtgagggaatcatcccaaccttagatggtcgaatccttcacaacagcagcagcaacaacaacagccttattttcaaaatgctgctggcccaaccaaaccatactttcctccaccattccaacaccaccaccaccattaccaccagcctaaaaaccaccaaccagtgaaggttcttcacaaactttccttgaaaaacttgggaaggcaatgacttttccaaaaaatgcagtttcaccaaaaaacaaaaccctcattttaaacctt

SEQ ID NO: 9462 - DNA, 375 bp, Glycine max
tctaaactttatacaagaatgaaactctgatgccacttgttagacaagtggcctcagatatcttaagaagggggggttgaattaagatattccaaactacttccccaattaaaatctatttcactttcttttcaagttataaattcccttaacaatgaacttcttaaatattaattcaaataaaacaatttgaatatgaatataaagcaataataaacaaaggagattaagggaagagaaagtgcaaactcagatttatactggttcggccacacccttgtgcctacgtccaatccccaagcaacccgcttgagagttccactatcttgtaaattccttttacaagttctaaacacacaaggacaatccttcctt

SEQ ID NO: 9463 - DNA, 312 bp, Glycine max
tatacagcctacctgcatgcatgctagctaagtcgactgtgccagacagtgcttcttaatgcctctaactcttcgaacccactcccgctcgttctcactaagcattcgagctgattctaacttcgcctgataatttgggttgcgatcgcaaagcactgactgtcacaaacttatatgtatctttcacataataagtataccataccctctactatatcccaagcatgccaacgactgcaatcatgatgataatatgatccatgccgactactattttgcgatagtggaacatctgcatcttgtaccattgat

SEQ ID NO: 9464 - DNA, 460 bp, Glycine max
agcttctaaactttatacaagaatgaagctctgataccacttgttagacaagtggcctcagatatcttaagaaggggggttgaattaagatattacaaactatttccccaattaaaattctatttcactttctattcaagttacaaattcccttaacaatgaactcttaaataatgattcaaatagaacaatctaaatataaatataaaccaataataaataaaagagtttaagggaagagaaagtgcaaactcggatttatactggttcagccacacccttgtgcctacgtccagtccccaagcaacccgcttgagagttccactatcttgtaaaatccttttacaagttctaaacacacaaagacaatcctttctttgtgttcagaattcttttacaacaagagaaccctcgtcttcttatcccttaaagaattagaaagaagagaagaatgaatctc

SEQ ID NO: 9465 - DNA, 346 bp, Glycine max
agcttatcccatgcctccttagcagatgttgcataagaaatcttctcgaatgcatcattttttaatgcttgatagatgaggaatagagctttattgtctctctttcttgaatcctttaacgtctccttttgtacttgggatagcgaagtctcatcttgtgactccttttagcatttttcaaccatttcccaaacatcatgtgctccaagaagggccttcattttgatgctccaaatgacataggtgctcccctttagaagcggaacttgaaaggataccgcttcattgcttgccataactatataggaatttcttatcagaacctaatctctgataccactatgtt

SEQ ID NO: 9466 - DNA, 486 bp, Glycine max
tgttagtgtgtgtttaaatgtctaaaataaaagaaaaattatgtaataatgtttctttgaagaaaattttatcagtgaaaataaaatattttgaatatgaattttgtagtatttttttaattagattaggttggtgttaatgatttattagtgtgttaataattcatgaacgtttcaactttcatttaaaaaaattagtagatcatatttatttgaagaaagtattttgagtatgaaatttattttaatatgaagttgtagtatttttttaattagattaggttcatttttttgtgttaaaaattgataagcgttcaagttgaaagtgttatttgatgatgttttgttgtttcttgtatcatatttaatttaatatatttgtagtaattttgtaattacctattttcattttgaaagtattattgttaaaattaattatttttactactaacttcggtcatgaattattttattttgtggtaaaaa

SEQ ID NO: 9467 - DNA, 489 bp, Glycine max
tagcaaatggacttgggtgttgcccaatttcatcgtatcttttgtaatactcaccacctctattagatctaataattttcacttttttgtctaattgtctttctactttattcaagtaaatttctaaggcatccattgcccgagatttctcatgcagtaagtaaacataaccataacgtgaatagtcatcaataaaggtgataaagtatctttcctttccgaaagaactaacatcaaaaggtccacaaatatcagtatgcacaatttcaagaagctgagtgcttcttgtagctcctttctttgtatgttttgttgttttcccttgatacaatccacacaaatatttagatccgtaaaatctagatcatgaagaatttcattctttattaatcattccatcctttctctagaaatgtgacctaaacgtttatgccacaagaaagcagatcggtcattcactaaactacgtttagtgataacattatgatg

SEQ ID NO: 9468 - DNA, 465 bp, Glycine max
agcttatcaaaccaaagcaacttctatctagaacaacttgaagagctatattagaagaaatttcaattgttgaaatgtatagtaagtcggtcatctagtgacagcataacaaagtcacaaatactagtactaagttgaagaacatattgcagtatcgagtgtttgctggttacatattttcaggttatatacctggaggagttccacaacacatattgcggtcatcaatatgctcaacttcaagaccaatgaaccatgcaccaagtgagacatcttcattagcatatttatgcaaaatcggcctgcaatcataattagactccacatgaaatttctatatgtaagagaatattctatgagaaacatggactgatccccgaactgagatttcctattaggaaaactttaagtttatgaaaaaaaaagtttctttattttaatcaaatcttgcaaaatgagtatttt

SEQ ID NO: 9469 - DNA, 484 bp, Glycine max
  unsure (1)..(484): unsure at all n locations
tgtaggcactttgaacgcaatattctccattattttccatcctccaaatgactattttgtttttgtaccttgcataataggcacttgaagaatggtattcacatcccttanattgaatatttgattaatcacatccatgtttcaacttccatgtgaagtatccataatatttgttactttgagatttttcatcccattgattataagagtttcaatagtgagattttacttcattctcaactagggttcgttccaaataccaatattagtaccatttcccaactttcatttatatccttcctttatgaccattttagaagagaacatacttcaccatgtaaatgatgggttgtgccttactaaagcttccataaactctccccttaagaaatatttagctttgatgactcttgacagtaaaacatttagcatagaaaagatcctccattattgctttcctaacatggcaaagttgaaagcaaat

SEQ ID NO: 9470 - DNA, 383 bp, Glycine max
agcttttagggttaaagtctcacgattgtcacgtgctcatgcaacaattgttagtcgtggctatatgagacatcttgccaaacaaagtcaggttaacgataactcgcctgtgctttttcttccattctatatgtagcaaagtcattgatccaatcatgtttcatgagttggaaaatgaggccgcaattatactgtgccagttggagatgtattttccccctgctttctttgacatcatgattcacttgattgcgcatctggtcagagaaatcaaatgttgtggtcctgtttatctacggcggatgtaccggttgaccgatacatgaaaatcttaaaagggtatacaaagaatctatatcacccaccaacatctaattgtgaga

SEQ ID NO: 9471 - DNA, 493 bp, Glycine max
tatgtgagagactctataaattactctagctggaacacatgacctcgcaaaatgccctgacttcccacattaaagcaggtgctttgtacaccgacgccgtgggtgtgatcacgaccacccaatcacccttcttacattccgcattccctaccccttctacctacctccccacacctaaaactacctccacctgttcctgcaccgccaatgttgtccttcccgggggcgcagaacctcaccatgtgtccaaatgcgccacacctaatgcatgatccgactccatcagcacctgaaatggctacaatgccggcgtctcctggcacacaatctcttatgaggtggacgaacccctccgatttgaaacaacctccgccgatggagccttaaccgacaccagaaataccgctcctgttgcaatccctggttaggggtacaaacttgccaaactggtagcacgcggagccgcctccgacattgggcctggcgccgaaac

SEQ ID NO: 9472 - DNA, 439 bp, Glycine max
agcttcgaaattgtggatgagccaaccatgaaattgggacaatgaatcttgtcctgttttcaccaacatacactgcaaagtgcccttttggcacatcttctggaagaccaccctcttcattgaagccctgttgctgctttttcccaaagctcgaacaccttctcacaatttgctttatcacatctgctagggagagctgattggatttttagatggccattgtgaaattgattgacagtactctttgcacaccttgaagttgttaactttgaaagggtctcttgagggcgctgaaagtgtgtgattcatggggcgagtttggagaggctttatttatcgttgggacattgggatgggtggaaaatagaaacttgagttttaaaaaaaacacgggtcacgttgatgtggggacatgtatcataccacaccctaatgactc

SEQ ID NO: 9473 - DNA, 436 bp, Glycine max
  unsure (1)..(436): unsure at all n locations
tgtgggattttgtgatagtgattttgccggagatgttgatgatagaaaaagtactaccggatttgtattttttgtgggtgattgtgtttttacatggaattctaaaaaaaaaggcattgtgacactttctacttgtgaaaccgantatgtagctgcaacttcttgcacatgtcatgccatttggctaagaagattgttggaggaacttcagttgttgcaaaaggaaagcacaaagatctatgttgataatagatctgcacaagagcttgccaagaatccggtgttccatgaacgaagtaagcatatagatacaaggtatcatttcattagagagtgcattaccaagaaagaagtagaattgactcatgtgaaaactcaagatcaagttgcggatattttcaccaagcctctcaaatttgaaaattttcgaagattg

SEQ ID NO: 9474 - DNA, 492 bp, Glycine max
tgaacaattcatactcaaaatgattgttagtcttggcaagcttggttgctaggctctaccatcaaaaattgcatgggagcaacttcatgtttttgcactgcatgcatttttgttgccttttcctccaacaccttcattttctacttttccagctccttatgtctatgccgtttcttctccaatttttggtcaactgcaacttcaatgcttttctttaaaaacttcttcaatgtaaatggtatcttctacaatttttcttgtccaagaaaaactcaaaacaatggtgatgtggaaaggaaaaataaatccttacaagagatggctagaacactgattagtgagtatagcatacaaaactatttttgggaagaagttgttagtatagtctgctacattctgaatagagtttttatcagaaaggttttgagcaagactctttatgaacttgggaaaggaggaaaaccaagtgtatcttacttccacatttttggt

SEQ ID NO: 9475 - DNA, 429 bp, Glycine max
tgtaggcctaaaatcttcttcatcaatggattcctttgcttcttggaagataaatggcagcggaatggagaaggaagagagagaggagatgccactttaaggaaaagattagtctagaagaagctcaccaccataggaggccatggataagagcttggaggaagaaggagatgaatgaagggagaaggagagaagaacacgaaatttgtgctctaaaagagctctgaaatctgaagttaatattcaaatgatcaaagttcaaaaaaatgcaccacacatgacctctatttatagcctaagtgtcacacaaaattggagggaaatttgaatttcaattcaaatttcacttgaatttgaaattgaatttgtggagcccaactttggaacccaaatttcacttaattatggattagggaattttagttatgg

SEQ ID NO: 9476 - DNA, 504 bp, Glycine max
agcttcttatccaaggctcatcttggtggtgaagctccttcttccatgacttattccctagtggatggcacctcctctcacctcttctcctttgtcttccgctgcatctccatggtggaaaatcaccattaaaggacctcattgaagctcaaagatccagcctccatagaagccccacaagcaagcttccatcactgcctttgaggatcgaggatagacgaacaaagcacctaagaaggaaggaggttccattggtcaaggtgacctggggaggtacatcaggagaagatgccacgtgggaattagagagtcagatgcaagccgcctatccatccttgtttgagtcaagtaaatttcggggacgaaatttctaaaagggtaggagagttgttacaccctgagatattataagttattttcgatgtttaattgtatttatgtgttatttgactatatgatagacttgaatgagttaagtatgccttgacctaaatcatgtgtgaa

SEQ ID NO: 9477 - DNA, 452 bp, Glycine max
tatcccatgcttctttggctgtcgttgcgttggatatcttctcaaatgtatcttcatccaccgattgattaatgagaaaaagagctttcttgactctctttcttgactccttcaacgtctcctttacaccttggcttaccaaggcttcatcttgctcctcgaagccattctctacgatatcctacacatcttgagctccttgatactccaattatcatagctgttctttgagagcatcggcatttggaaaggaaaacctccattcgccatcttttgaggatcttgaagctctgataccactttgttggaaataaggctttttatgtttaggaaaagtgtttatgaatattggagactttgaatagaaccttgatagaaaggagaattctttatggaggagagaactttgtatttttgcttgataccaatgtgtaggattacatctctattta

SEQ ID NO: 9478 - DNA, 455 bp, Glycine max
ttgagaatttgagaacatgacaaaaacaagtgacagtaatatccaagatatacaaatgggtgttggtcaatgtaccacatttaatagtacaaactaaaagaacaagaaaaacagaccaatttctaggcgtctcagaaaaaactttaaacaagacagttcacctaataagtttttggattagtagtaatcatatttgtgtaaataaatagcttaccagagttcattggactccatcgctggaaccgaaaaggagatggtatgttgagaacagaagcaccagaaacactgttatgcctggaaatgggaagatattgcctccggaaaaaccttggcatccaattgccaatacatgataaagcacaaagaagaagaattaaagaaagcaacaaaaggggcacaagaacaagaggatttatcttcatctgaaaaagctccaagtcacgaagcccaaatct

SEQ ID NO: 9479 - DNA, 422 bp, Glycine max
  unsure (1)..(422): unsure at all n locations
agcttcaacatcagaccacttccagggtgctggaactacttcacatggacttgatggggcctatgcaagttgaaagccttggaggaaagaggtatgcctatgttgttgtggatgatttctccagatttacctgggtcaactttatcagagagaaatcagacacctttgaagtattcaaagagttgagtctaagacttcaaagagaaaaagactgtgtcatcaagagaattaggagtgaccatggcagagagtttgaaaacggcaagtttactgaattctgcacatctgaaggcatcactcatgagttctctgcagccatcacaccacaacaaaatggcatagttgaaagganaaacaggactttgcaagaagctgccagggtcatgcttcatgccaaagaactttcctataatctctgggct

SEQ ID NO: 9480 - DNA, 383 bp, Glycine max
agcttttaatggaagtcaagagcacgaaactgcgcggacaccgttaactggtgagcaggtcttccagcgggttgaacaccttaatactgtatttggaaagacccaaaagaaggataaaagtaagagttgcatatggaagaaaaggtccattttctttgatcttccgtactggtctgatctagatgttagacattgtattgatgttatgcatgtagagaaaaatgtatgtgacagtgtcattgggacactccttaacattcagggcaagacgaaagatggtctaaatacccgtcaagatctagctgacatgggcatacgatcgcagttgcatccaaggtctgatggtaaaaaaatatacttgcctccagctggtcatactttat

SEQ ID NO: 9481 - DNA, 424 bp, Glycine max
tcaacattcaatatcgagcgtttcgatttattactgggctgaatcagacaaccgagtaaaaagttattgtagtttgaagttgctcagagcttcaactttcaatatcgagcgtttcgatatattacgagactgaatcagacatcagactaaaaagttattgtcgtttgaattatgtcagagcttcggtattccagttcgagcgtctcgatatattacgggactcaatcagacatctgagtaaaaagttattgtcgcttgaatttgctcaaagcttcaacattcaataccgagcgtctcgatatactacgggactcaatcagacatccgagtaaaaagttattgacgtttgaatttgctcagagctttggaattcaagttcgagcgtctcaatatattacgggactcaatcagacatccgagtaaa

SEQ ID NO: 9482 - DNA, 337 bp, Glycine max
agctttgagcaacttcaaacaacaattactttttactcggatgtctgattgagacccgtaatatctccagacgctcgaaattgaataccgaagctctgagcaaattcaaacgacgataagtttttactcgtttgttcgattgagtcccgtaatatatcgaaacgctcgaaattgagaaccgaatctctgagcaaattcaaacgacaataactttttactcggatgtttcgattgagtcccgatatatccgaacgctcgaaattgaatggtgtacctttgagcaaattcaaacgacaataactttttactcggttgtctgactgacacgcgtaatatt

SEQ ID NO: 9483 - DNA, 493 bp, Glycine max
tcctcaagtgtcacattctctagcctctttgttgagcatctgttgagcagataggctgttgttgacactacttcaccccaaaactcctttggcaagtcaaaattccttagcatacacctggtcatgttgactatggttctattgagtctctcagatacaccattgtgttgtggtgtatatgaaggtgtgatctcatgaatgataccctcatcctcacaaaatttctcgaattcatgtgatgcgtattcaccaccaccatctgatctgagtctctgaatcctgtttccactttgtgtttttaccatcaccttgaatcttttgaaggtgaaaaacacttcactcttccttcttagcaagtagatccacacttttcttgagtaatcatctataaaggacacaaaatatgaactaccccctagagaaactttctcaaaagggccacacacatcagtatagaccaaattcaaaactgctgaaaacttagttggtactt

SEQ ID NO: 9484 - DNA, 485 bp, Glycine max
  unsure (1)..(485): unsure at all n locations
agcttaaaggaagtgaaagaattagtatgggcaaaaatgtctccgcattgattggtaaatctgttccccaaatccctgaaaaatgtaaagatccaggtacattcatcatcccttgtattatagggaacagtaagtttcacaatgccatgctagatttaggagcttctattagtgttatgcctctttctatttttaattctctatctcttggtcctttgcagtcaactgatgtggtaattcatttagctaatagaagtgttgcatatcctgctagtttcatagaggatgtcttagttagagttggtgaactgattttccctattgattttttatattttgaatatggaggagggattttctaagggatcagttcccattattttatgcagaccttttatgaaaactgcttgaacttngatagatatatatatgcacgcacactatctatggaggttgatgatataactgttcttttaatattcttg

SEQ ID NO: 9485 - DNA, 401 bp, Glycine max
agcttgaagacaagactatacgaggtatcttccttgggtatagcaatatctctaagggctaccgtgtctacaacttgcaaactaagaaactcgtcatcagtcgagatgttgaagttgatgaatatgcttcatggaattgggatgaagaaaaagtggagaagaacgttcttatactcgttcaactacctcaagaagaagatgaggaagaaaacccaggtgaaccaccttcacctccatcacaacaacaagaagagatggagtatccatacagaaaaatttgcaccagtagctcgtcttaataagacaaagctcaactctgatggcaccatacagaaacacaaggcgaggctagtagctaaaggttacttacagcaacccggaatcgactacaatgagacatt

SEQ ID NO: 9486 - DNA, 495 bp, Glycine max
tgataagaatggatcgaactcctctcctttaaaataacagaattaatggtaataaggagtgatatttgaaagaaagccacaacatttatttttcttacttatttaaaagttaatttacaaagtaaaaaacttggaacaattcgtttaatattaattagatcttgactttaatatcttcaaattaattcttttaaaaaaaatatcttcacattaatgtgcatgaaacaaaacaaaaataattcaattaaagaaacatctaccttataattttagagataattggcgattcccgatataaaatacaaagacagtcgacttttcaattttttggtagatggcaaatattggatttggtctttcatagaatttcaatgaactcaaagtattcctggtaaggtaagtatttttgtacattgaacatttttttatacatataagtttaaaaatatttaaaagaagattaatttaattgatataatgttaaaaaaaatgaat

SEQ ID NO: 9487 - DNA, 453 bp, Glycine max
agctttgcatacttccccgccgcgtttagaagatcacccgcggcgtccgccaactttgccttgtccaccttgtcgctctccctctttagggcggactgcgccgcctccgccaccagcttcgcgctcgcgatgagctcggtggtcgactgctcgctgggtggcttaatgttatgggattcttcggaagccattgatacaatgttacttgcttattgcagcttttgagagaactgttctgtgttatttatagatgtcactatgatattagtataaaagtgtatctttcaaataataataaactttatatttaattatttatttacttgctatagcctctaaatttatctttttttaatccttaaaagaaatttttaagtttacattttaaattattaaaaaatagaatatttggtgttaaaagtttaacaaatttaataatattaatccttttta

SEQ ID NO: 9488 - DNA, 493 bp, Glycine max
  unsure (1)..(493): unsure at all n locations
tttagcaacatttttatttaatgttattgaaaaaatattcctaaaagccacatgtgtagtagtgataaatcatgcatcttaatcgttattttgaatagaataagaaattttagcaaagagtaaagagaaatacaaacaagaaagtctacgcacaatgaagtgcagaaaaaaaaactaagaatgcaacaagaatgcccaatcccatttatcatagagcttagtgaatctaagattcacattggttccaaacactaaagaattaagtttagtaattttggaaatcattgagtactatttgttatatttatttgaatgcattgatgtgttaataatattattgaatgctttctttattgagaatattacatcaataaattgtggttgatcttttagaatttattttattcactgggattaatgttgaaagtgaggagacttgaacacttagttttcttttaattacatttgtttcagaatanagtgtacgatgtgg

SEQ ID NO: 9489 - DNA, 396 bp, Glycine max
agcttgtaggcattggatattctttattaatggagtcatttgcttcttgatgttcattggcagcagaatggagaaggaagaaagatgattggagacaccacttcaaggagaagatgagtcaaacacaggctcaccaccataggaagccatggataagagcttgaaggaggagaaaatgaggggaggtagaaggagagaaggagcacgaaattttgtatctcaaatgaggtctgaactttgaattataattttcaaatgatcaaagttgaaaaaacgcacacacctggcctctatttatagcgtaagtgtcacacaaaattggagggaaatttgaatttctattcaaatttcacttgaatttgaaattgaatttgtggagcccaaaatttcactaaa

SEQ ID NO: 9490 - DNA, 266 bp, Glycine max
tgctttgagaaaaatctaacgacattttcttttaactcggatgtctaatcgagccctgcaatatatcgagacgctcgtaattgaaaacggaagctctaagaaaagtcaaacgacaataacttttaacttggatgtctgatcgagccctataatatatcaagacgctcgaaattgaaaacggaagctctaagaaaagtcgaacgacaataacttttaactcggatgtcctattgagccctgtaatatatcgagacgctcgacattga

SEQ ID NO: 9491 - DNA, 377 bp, Glycine max
ttgatgcaacatttggagaggttaatgaaacaaccagatgatgcgctccatgagaggttggatcaaatggagaatagagatcataatgaagaacaaaggaggagaaaagggaatgattgtgttcctagacaaaaccgaattgatggtattaaactcaacattcctccatttaaaggaaagaatgatccggaggcctacgttgagtgggagatgaaaatagagcatgttttctcatgcaacaactttgaggaggaccagaaggtgaagcttgccgccacggagttttccgactatgctcttgtgtggtggaacaagctaccaaaggagagagccagaaatgaaaagccaatggttgattcatggacggagaagaaaaa

SEQ ID NO: 9492 - DNA, 326 bp, Glycine max
agcttatgaccattcgaatttctcatgtagtttccgctgttcaatttcgagcgtgtagatgagttatgtccccgaatcggacatctgtgcgaaaagttatgaccattcgattctctcgagagcttccgttgttcaatttcgagcgtctcgatatattatgaccccgaatcggacatctgagtgaaaacgtatgaccattccattttctcgagagcttccgttgctcaatttcgagccgtctagatgaaatatgtcccccaatccaatcatttctagtgaaaacttatgaccattcgaatttctcgagagctctctgttgttcattt

SEQ ID NO: 9493 - DNA, 388 bp, Glycine max
tttcatggggctctggataaatttttagggtggaggatacaccaacaatgctaggcaatcaattcgtggggctccagactcgatgctggaggatgcatgaatgataagcatttcatagggctccggataagatttgaaggtggaggatacacgaacaacgctaggcaaccaattcgtggggctccagactcgatggtggaggatgcgtaaatgacaaccaattcatggaattccgaaaaagatttaagggtggaggatagacgaacagcccctagaaatcaattcgtagcgctacagactcgatggtggatgatgcctgaatgatttgcattttaaggagatccggataaggattgatggtggaagaaaaaagaaaaccctctaggac

SEQ ID NO: 9494 - DNA, 282 bp, Glycine max
agcttggtccccaacactctgttcaagctctcccaaaatctagaggtaaatctaggatctctatcagatactatgctagatggcacaccatgtaacctgacaacctcacttatatacaaggtggtcaacttcttcaaggaaaatatgatattaatgggaacgaagtgagcagacttaatcaatctgtcaacaataacccagatagaatctaaacctctaggggtcctaagtagtcctaccacaaaatccatggaaatactgttccacttccactggggtatc

SEQ ID NO: 9495 - DNA, 490 bp, Glycine max
  unsure (1)..(490): unsure at all n locations
tttctnnttatgaaacatatngaaactgatttgctagtcttctatggccatttgtagtttcctcttccccatgtctaccacacagcttgtggtggatagaaaaggtcttccaagaattaagggaatgtcagcatcttcatcaatgtccatcactacaaaatcagctggaaagatcaaatgtttgaccttaaccaaaaggtcttcgatcactccatatggtcttgtgaatgagcgaccaaccatttggagggtcatgcgtgtggcaattatctctatctctccaagttgccggcacatggagagagggcattaattgatactagctcccaagtctatgagagctttacccacaaacaccctttgccaatggaacatgggatagtgacactttccggaatctttgtgcctttaggggaaagatgcgttgaatacccacactacaatttcctttcaatactaatcataccctggggatttcccggtttttttt

SEQ ID NO: 9496 - DNA, 610 bp, Glycine max
agcttgtaataaataaataaaaacaaagttctttacaagtctttacttaaaacggaacaaggaattaaagaatgaccaagcttgattacacacactccctaattgttttgtttgttgttgctataattagatcatgtcttacaaaaaggagatctaatttaagaacatttaaatacaaaagtgtcatctcttactttttatctctagtatgaattatataataacatcatatttacgtttaattatttgacattcgaattaataaactttaaatacaaagaaatttaaagtggtatggacgatcgcaccacagaaatatgtaatcctttaacttcaaattatgtagcatgaaaaaatctaaaataacaagaatggttagtttactgaaaagatcctattataattcgtaaagtgaactaatcaatatttataaatacgagtttttattttagaacatatctaatatattttaatcttgggaaaagtgtgactttatcattatttaatatattaaaaccttaaagctaatcaatttttttttacattattatctccccaaaaaattatcctaaatttttttatggaaaaaattttttaaaatttagctttt

SEQ ID NO: 9497 - DNA, 381 bp, Glycine max
tcacatgattgatagtggtgttagatttggtcaatttgaaggcaagatatgggaggagtgataaaattttcactgaattgcttgtgttgttgaagaagatgatccctaaagataacaagttgttgaatattcactatgaggtgaagaaaatactatgtcctattagtatggagtaccagaaaatacatgcatgccttaatgattggataccaaaaaatgagtttgcagaaatgcataagtgccctacatgtggggtatcgtgatacaaagtgaaggatgatgactacagtaatgatgaaagcacacaaaaaaaccatccaacaaaggtgtgttgctatcttccaataatttcaatgcttaagtgattctttgcttatggag

SEQ ID NO: 9498 - DNA, 457 bp, Glycine max
  unsure (1)..(457): unsure at all n locations
agctttagttgccccttattaccttaaataaacaaagcctgtggtaactatgaattcacaaaggtatcacaattaaagaaattcaaatacttcaaggattgcagacaatgtggtcacaactaaaaaattgcagagctaaaaacttctaactaaatgcttaggtgtaacataaatgggaaaatcaaaattttgatacttactgggtatagttcaaaatcaatatctggcccaatgtttaatatgttcagaacctcagcttttgccaagtcatcctatttaacacttgtcaagaactcattgatgctctctcttgtttgaacagaggcagcagtgtcaaccaaataatcataaacctgctagatatacaacacattcatctaccaaataaaacttacaagtattcctatttattagaaaaaccaaatctaaccttgtatncagactatgctactttggc

SEQ ID NO: 9499 - DNA, 490 bp, Glycine max
tgtaatcgattacacacaaactgtaattctattaccagagcatattttcagaaaatattctcaacagtcacatctttttatttggttcttgaatggctatcaaaggcctatatatatgtgacttgagacacgaatttgaaaagagttttccaaaacaaaaaggtcttatcctcttaaaaagcaaaatccatttatcctcttacaaattccttggccaaaacacttgtgattcaataaggaattatttgagtgctcaaattgttcaatctatctctttcaagagagatttcttcttgtcttcttctttattctgaaaagggataaagagatcgagggtctcttgttgtgaaagaattctaaacacaaaggaaggattgtccttgtgtgtttaaaacttgtaaaaggaatttacaagatagtggaactctcaagcgggttgcttggggactggacgtaggccccaaggtgtggccgaacccagataaatctg

SEQ ID NO: 9500 - DNA, 440 bp, Glycine max
agcttgaaatgttagccaacgaattgtattattataggccttgagtcataagcgattcttggcatcttgttctgaactttgcacatttatgatgttcttcatgtgctttgactgattcaacaagtctttacaagcctttattgcattgatatgtggcgagcaaggactatctccaatgtgattaacaaatgcacaattttttcagcattaacctttctacatgatctaaatccttgtatattaagacatttgatccaaaaatgatcactttgctttgtactgaatagatcgcataacagacagttaactttatcattaaatggggaatactttatcccaaaatgaaacattttaaaccaagtacattggaaatgccttggatcgttctctttaaaaaagggtaattttggaattttatttggtatggaccccctttgata

SEQ ID NO: 9501 - DNA, 313 bp, Glycine max
tataatatattgatacgctcgaaattaaacctcggaagctctccacaaattcaaatggtcataactattcacacggatgttcaattatggcgaatcacatatcgagacgctaaaaattgaacagcggaagctctcgagaaattcaaatggtcataacttttaacactgaattccgattcaggattataatatatacagacgctcgaaattaaacattggaaggtctggagaaattcaattggttataacttttcacacggatggccaattcgggcgtataatatgtcgacacgcttgaaattgaacaacggaa

SEQ ID NO: 9502 - DNA, 380 bp, Glycine max
ttgatgcaacatatggagaggttaatgaaacaacgagatgatgcgctccatgagaggttggatcaaatggagaatagagatcataatgaagaagaaaggaggagaagagggaatgatggtgttcctagacaaaaccgaattgatggtattaaactcaacattcctccatttaaaggaaagaatgatccggaggcctacttggagtgggagatgaaaatagagcatgttttctcatgccacaactatgaggaggaccagaaggtgaagcttgccgccacggagttttcccactatgctcttgggtggtggaaccagctacaaaaggagagaccaagaaatgaagagccaatggttgatacatggaccgagatgaaaaagat

SEQ ID NO: 9503 - DNA, 334 bp, Glycine max
agcttataatatattattacactcgaaattaaacatcagaagctctcgagaaattcaaatggtcataacttttcacccggatgtccgattatggcgaatcacatatcgagacgctcaaaattgaacaacggaagctcttgagaaattctaatggtcataacttttaactcggatgtccgattcaggcgcatcacatatagaggcgctcgaaaaggaacaacggtagctctcgagaaattctcatggtcataactttccacactgagggtcgattaaggattataatacctcacgacgctcgcaatttttcactcgtaagctctcaagaaattca

SEQ ID NO: 9504 - DNA, 381 bp, Glycine max
tctggtgggacatcttgacttgctttcctatctgacattcaccacagattctgccttcttctatttacagattgggaatgcctctaacaacacctttgacaatgatttttttcatacctcttaaatgccaatgtccaaatctttgatgccctattttgacttcatcttctttggagaatagacatgtggaggaataactggcttcttgaggtgtccataggtaacagatgtactttgatctgctgcccttcattataacttcactcttcttatttgtgaacaagcattctgactttgtgaagttcaaatggaatcctttatcacacagctgactgatgctgatcaagtttgcattcagtccctttaccaacaagactttgt

SEQ ID NO: 9505 - DNA, 403 bp, Glycine max
agcttgagaaactcatccaattccacagtatacaccatcagatgaaacccaatgaaaattttgaagcaactgagcgagccaaagatgaaccgaggccaaaccaagggccttcccaggacacactcttcttccagacccgaaaggtgccaacctcaaatcagaccccattatgctcacatcctcttccacaaaccgctcgggcctaaacttctcgggctcggcccacaccctctcgtcgtgggttatggcccacatgttcaccatcgcggtggtgcccttgagaatcacgtgcttgccgccaaccgtaacgtcgtgcacagcaaggcgagcccacgagagtagcgggcctggtgggtgcacacggagggtttcttttactatgcactgaagggagcgcaggttt

SEQ ID NO: 9506 - DNA, 432 bp, Glycine max
agcttaagctctttcaattgcacaatgctcttaatatttgaagagtatccttgtggaaccttcacccgacgaagacactgacaaaaacttatcttctccttcttggacaaagtatggcaggctgggggcaagtaaattttcttcccatcagaccttggatgcaactgtgatcttatacccatatcagctagatcttgacgggtattcaagccatccttcgtcttgccttgaatgttaaggagcgtcccaatcacactgtcacaaacatttttctccacatgcataacatcaatacaatgtctaacgtcaagatcacaccagtacggaagatcaaagaaaatggacctcttcttccatatgcaactctgaactttatccttcttttgggtcttcccaaatacagtgtttatgtgttgaacccgctgatatacc

SEQ ID NO: 9507 - DNA, 484 bp, Glycine max
tcaagaaaaagatggcctcagcaaactccttatttccataagggaattctatcaatagacctccaatctttaatggagagggttaccattactggaaaacccaaatgcaaatttgtattgaggcaataaacctaaatatttgggaagccataaaaatagggccttatatacccaccacagtggaaagaattacaatagatggcagttcatcaagtgaaagtataactttagaaaaacctatagatagatggtctgaagaggatagaaaacgagtacaatacaatttaaaagccaaaaacataataacatctgccctgggaatggatgaatatttcagggtttcaaattgtaagagtgctaaggaaatgtgggacactcttcgattaacacatgaaggaactacagatgtaaaaagatctaagataaatgccctaactcatgagtatgaattatttagaatgaatgcaaatgaaaatattcaaag

SEQ ID NO: 9508 - DNA, 399 bp, Glycine max
tgcacacaagattctccttgcctggcacttcaaaaccttttggttggggcatataaatgtcttccgctaaatccccatgcgagaatggagttctaacatctaactgctccaagtgaagattctttgtagctacaatactcagaataactctgatggtagtcatctttacaactaaagagaagatctgtgtgaaatcaattccttgttcttgctgaaaccctttcaacacacgtctcgccttgtatcttcttctaccgtcagattctttctttagcctatacacccacttattctgtaaagctttctttccttctggaaatgtaattaaaaaccatgtcttattcttctgaagggatgacatctcatgtttcattgctagctcccactaaatagagtcat

SEQ ID NO: 9509 - DNA, 420 bp, Glycine max
tcaacatcagaccacttccagggtgctggaactacttctcatggacttgatggggcctatgcaagttgaaagccttggaggaaagaggtatgcctatgttgttgcggatgatttctccagatttacctgggtcaactttatcagagagaaatcagacacctttgaagtattcaaagagttgagtctaagacttcaaagagaaaaagactgtgtcatcaagagaattaggagtgaccatggcagagagtttgaaaacggcaagtttactgaattctgcacatctgaaggcatcactcatgagttctctgcagccatcacaccacaacaaaatggcatagttgaaaggaaaaacaggactttgcaagaagctgccagggtcatgctttatgccaaaaaacttccctataatctctgggctga

SEQ ID NO: 9510 - DNA, 303 bp, Glycine max
acatctaactgcttcactagaggatactttgtagctgcaagtctcagaatagctctgatggtccatatcttgacaactacaaagaacatctatgtggaagagattcctcgttgttgctgaaaccctttcaccacaagtctcgccttgtatcttcttataccgacagattcttcctttagcctatagacccacttattctgtaaagctttcttttcttctggaaatttcaatataaaccatgtcttattcttctgaagggtggcatctatttttattgtagctccactaatagagtcattccct

SEQ ID NO: 9511 - DNA, 280 bp, Glycine max
tgaatcggacatccgtgtgaaaagtgatgatctttctatttactcaagagcttccattggacaatttcgaacatcgtgatatattataagcctgaatcggacgttcgcgtgaaaagcttagaccatctgtatttatcacgagcttacgttgttcaattactagccccttgacactttatgcgcctgaatcggatatccctgcgaaaagatatgaccatttgaatatctggacagcttttgatgtttaatggcagcgtttcaatttattattagcccgaat

SEQ ID NO: 9512 - DNA, 373 bp, Glycine max
tcaacattcaatttcgagtgtctcgatatattacgggtctcaatcagacatccgagtaaaacgttattgtcgtttgaattggctcaaagcttcaacattcaatttcgaggttctcgatatattgcgggactcaatcagacatccgagtaaaaagttattgtcgtttgaaatggctcggagcttcaacattcaatttcgagagtctcgatatatgatgggactcaatcagacatccgagtaaaatgttattgtcgtttgaattggctcagagcttcaacattcaatttcgagggtctcgatatttaccggactcaacagacatccagtaaaagttattgtcgttgaatggctcaagcttcaacatcaatttcag

SEQ ID NO: 9513 - DNA, 384 bp, Glycine max
  unsure (1)..(384): unsure at all n locations
tccatcaagttatgaccatttgaatttctcgagatctttcgtggntcaatttcgggcgtctccatatgtcatgtgcctgaatcggacctccgtaagaaaatttatgaccatttgaacttctctagagcttccgttgtttaatttcgagcttctcgatatctgatgtgcctgaatcggacatccgagtgaatagttgtgacaatttcaatttctccagagcttccgttgttcaattttgagcgtctcgatatgtgatgttcctgaatcggacctccgtgtgataacttatgaccatttgaactgctctagatcttcctgggatcaatttcgggcgtttccatatgtgatgtgcttgaatccgacctccgtgtgaaaagttatgac

SEQ ID NO: 9514 - DNA, 395 bp, Glycine max
ctaagctatgctgctacatttatatagacctcctcagcatttttctttcttctcagaataattatgacctttcgagcaatagatacaatccaggttggaggaatcatcaatatctgagatggacaagtcctccataacaacaataacctgtccctcctttccagaatgttgctggtccaagcaagccatatgttcctcctccaatacagccacatgttgtaggaagtacatatacttttgacttgctttatgaggtacaggctaaggaaccttcttcttctcctaccctgagtcctcccattggtcaaccaccacccacaccagagttgaagcccttaccagctaacctcaattatgcttacttggaggacaaggaaatagttccagtgatcatc

SEQ ID NO: 9515 - DNA, 378 bp, Glycine max
tgaaggtagaagacgatgaatggagggagaatgtgtcttacatggcctctatttatagcttaagtgtcacacatggcctctatttattcaaatttcacttgaatttgaaaatgaatttgtggagccaaattttggagtcaaaatctcactaattatgattactgaattttagctatggttcagctcactaatccaagatcaagtccaagattctccactaagtatggttaggtgtcatgaggcatgtaaaacataaaagacatgcacaaagtgtgactatatgatgtgacaatggggtgtagcaagcaaatgctcacctccccctctaaaattaaatggatgggcttctctcaattaattaaatttattccaaccaca

SEQ ID NO: 9516 - DNA, 375 bp, Glycine max
ttatacaactgaaacatggtagagaagtagtgtacactttgcatcgtcattctctaaaacctcatcacccttacagatgattgaaaaaaactcttaattgaagtcaaagcacgaaactgcgccgataccggtgactagtgagtaggtcttccagtgggttgaacacctgaatactgtattcggaaagacccaaaagaaggataacagtaagacttgcatatggaagaagaggtccattttctttgatctttcgtattggtctgatctaaatgttagacattgtatcgatgttatgcatgtagagaaaaatgtatgtgacagtgtcattggggcgctccttaacatttaaggcaagatgaaagatggtctgaatac

SEQ ID NO: 9517 - DNA, 414 bp, Glycine max
tctggtgggacatcttgacttgctatccaatctgacattcaccacatattctgccttcttctattttcagattgggaatgcctctaacagcacttttgtcaaggattttcttcatgcctcttaagtgcagatgtccaaacctttgatgccatattctgacttcatcttctttggaggatagacatgtagaggagtagctggtttcttggggtgtccataggtaacaattgtcctttgatctgctgcccttcattagaacttcactcttctcatttgtcaccaagcattctgactttgtgaagtttacattgaatccttcatcacacagctgactgatgctaatcaagtttgcagtcagtcccttcaccagcagtactttgttcagactaggaagttcatcatgaactagctttc

SEQ ID NO: 9518 - DNA, 384 bp, Glycine max
actaagcttaaccaagggagatggaccatttcaagttcttgatttaatcaatgacaatgcttacaaagttgagctgcccggtgagtataatgttagttccaccttcaatgtctctgatttatctctttttgatgcacatggagaatccgatttgaggacaaatccttctcaagagggagagaatgatgagggcatgaccaatagcaagggcaaggatccacttgaaggacttggaggacctattgatgaggacatgaccaacagcaagggcaaggatccacttgaaggacttggaggacctatgacaagggctagagcaaggaaagccaatgaagctcttaacaagtgctgtccatactatttgaatacagcccagtttcagga

SEQ ID NO: 9519 - DNA, 409 bp, Glycine max
  unsure (1)..(409): unsure at all n locations
ntatccaacttaaacatggaaagaagacaatatatatctggctctgaagatttctaaaaccttatcacccgtatcgacgattaaagaaagcttttaatgagagtcaggaaaatgaaagtgccccaaaaccattagctagaaaagaagtgtatgatcgggtcaaggacatagtaactatcattgggaaaacccaaaaaaagccatcatctgagacaaacatatggaagaaaaggtcaatattctttgatcttccatactgttctaatcttgatgttagacattgtatagatgtgatgcatgtggagaaaaatgtttgtgatagtttaattgacacccttcttaacattaaagggaagacaaaagatggtttgaacagtcatcaatacttggtgaaatgggatccgacatc

SEQ ID NO: 9520 - DNA, 388 bp, Glycine max
ttgatgtttgagttgaatgcattaaaggtaaacagactttatgttataaattatgtgcatatagagctacagacgtcttggaattgatacatacagacatttgtgggtcatttcatataccttcatggaatggttaacaatattttatatcattcatagatgattactccagatatgcacacctgtatcttatacatgaaaagacacaatccctggatgtgttcaaaacatttaaagttgttgttgaaaatcaactcatcaaaagaatcaatagagtcagatctgaccgtggtggtgaatactatgtgcgatatgaacggtcaagtgaacaacgtcctgtgccttttgccggaacctatagaatgtggaattttccatagttacacat

SEQ ID NO: 9521 - DNA, 329 bp, Glycine max
tctacacacacaatgatcctaccaagaccctttgcattatcatcagtggcagacattattggacttctgccactcttaaattcagccaagacccaatccctttcatcctggtttttatcaccatggatggatagtgctggccatccatacactctcatttgtctggtaacttgaacacatcccttttttgtctccataaatattaaaattcggctcccgtccatcacttcttttagcagcctgatttatctacattttcaagctaaagtgttaatttggaaagaaaaagcatcaaacactgtcggtctattattattgatgacgcaaac

SEQ ID NO: 9522 - DNA, 337 bp, Glycine max
acaaatgggtgttggtcaatgtaccacatttaatagcacacactaaaagaacaagaaaaacagaccaatttctaggcgtctcagaaaaaaacttagacaagacagttcacctaataagtttttggaatagtagtaaacatatttgtgtaaatacataacctaccagagttcattggactccatcgctggaaccgaaaaggagatggtatgttgagaacagaagcaccacaaacactgttatgcctggagatgggaagatattgccctcggaaaaaccctggcgtccaattgccgatacatgatagagcacaaagaagaagaatataagaaagcaaca

SEQ ID NO: 9523 - DNA, 402 bp, Glycine max
  unsure (1)..(402): unsure at all n locations
tcacatctttataaagacatactcgattgagagggatttacattttaaangnacggagaggatatgatgtatttaaggtatgaaaagtctttatacctaaaaaatgttttaaaaaaatatttcttaatttatcatgatatttgtgtaaaatatttattgataatgaattgttattaaataactagctgggactgttttttctctagttttacacaataactgataaaccaaaaggcctaatttgagaaatataagttatacaaacctaatgaacacttataatatattatgccaataaaatatatttaattgtatatatattagaaaatctccaaccaataaatccatcataggtttcttatttaaagagaattttatctaatacatcttagagtaaataac

SEQ ID NO: 9524 - DNA, 442 bp, Glycine max
  unsure (1)..(442): unsure at all n locations
tgtgtagcactatccactgcanaagcaaaatacattgttactggaagttgttgtgctcaaaatctctggatgaagcaacaactagaagactttggggtaactcttgattacattcctctaaaatatgataacaactgtataagaatcctgtcatgcattctagaactaaacatatagagattaagcatcatttctaagagatcatgtatctaaaggtgattgttgcattgaatttgttggtagtgaacatcaactagctaacatctttactaaacctcttgctagaaataggttcttctagtcaaggtgttctacacatgtggtagtgctgaccttgaaggtaatcttttctttactattaatggagtagacattgtcatagatgctgctgtgtgaaaggaagttattagtctggacattggtggagtccgcaagtttgatg

SEQ ID NO: 9525 - DNA, 349 bp, Glycine max
agcttgcatacaagattctccttgcctggcacttcaaaaccttcttgttgggtcatatagatgtcttcctctaaatccccatgcaagaatgcagttttaacatctaactgctccaagtgaagattctctgcagctactatgctcagaataactctgatggtagtcatctttacaactggagagaagatctctgtgaaatcaattccttgtttctgctgaaaccctttcaccacaagtctcgccttgtatcttcttctaccgtcagaattcttctttagcctatagacccacctattctgtaatgccttctttccttctggcaatttagttaaaagaccacgtcttattc

SEQ ID NO: 9526 - DNA, 342 bp, Glycine max
agcttgtattttgtttattttaatccctgtaacatactccattggcagaatctgcattggaaacatagataatagataaataagctcagacataaaatggaaaatatgtgcattactacatttggcataataagagccatgaaggttaaacctgtggtgtggtataatcccagtagattgtaggaactttcacataatccatgttcttaaagttacttgcaaacaattctgcattagcagcctccttggtgtaatcaatctcctgaaaattattaatccatgttgcagtaacaggatccgagaatgtattcgctgagaacacgtgcatacatcataccataa

SEQ ID NO: 9527 - DNA, 405 bp, Glycine max
agcttgcttctacaatgccttgtatttcattcaaatcgtagccttacaaagcaatatcatccacataaactaacagagcaatgatagtgttgaatccatgcttgagaaacaaagaatgatatgaagcacattgcttgtacccatgtgagattagaaagaaagacagcctggcataccactgcctgctggcttgtttcagtccatatagctaataacattcttatgctgaggcatataagttaaaaccttaatctttgcattcattgcctctatccatataggatccttagaagcttcattataggattgaggttcaagactttgtgtaatggataaaatgatattgtgataagaaggagacaatttgctatatgaaagaacaatattataggatagagacaagta

SEQ ID NO: 9528 - DNA, 331 bp, Glycine max
attatggtgtgtaagaatgataaatggatgccctaacttatattggcgccattttcagactgcagtggtgatggcatggagctctcggatatatgtggaggcgtgatgtaaccgggggcagaaaaacttgctaaaataagccaagggatggccctgttgcatgagaacaacccccatcgcgatacctgaagcatcagtcttaagtgtgaatggtaatgaaaaatcatggatggccaagactggggcctgggtcatggctcgcttgagtccctctaaagccgattgagcaccctcgtcccaatggaagttatccttttgtaacactgcggtt

SEQ ID NO: 9529 - DNA, 388 bp, Glycine max
agcttctgtacctgagttactggatcttttaagacaacagggagtgaagattgctgaaaaccctatccttgcaacaagtcctagggaagtagacacggagatggacaagaaaatccgcagtattgtgagtagcattttgaaagacgcctctgttcctgatgctgagaaagatgttccaacatcctccaccccagatgttgctgtccctgaagctgatgaagatgtcccaacatctttcaccccgaatgtttctgtgcctgatgttgagaaagatgttccaacatctttctggccaaatgctgaagaactctcttcccccagcaaagagagatcatcagaggaagatgatcaagcctcagaggagaatcctgcaccacgggcaccaaaa

SEQ ID NO: 9530 - DNA, 405 bp, Glycine max
  unsure (1)..(405): unsure at all n locations
ggcacatgtacagacccatgattgtctttaccagttgagcctcagcctgcagagccatggttttacttctttttcgtgccctactccggaccagttcanggcagaggtcgcatagcctggagattggcctgaggcccgggcaggagaggcaccagcagaggctcccgacgaggcagatgatgcccgcgaggacgaagagatggtcgatttacttgatttcttacgagggagcggagccacatgattgggagatccctgtgtccatatttctttttgtttccatttttcttgttatatatcatcttatttctgcttgactaacggactaacgtttgttttcttgatgtgttgattgacttttgtttttgacatacatatcatttgagttggtacgtccgtatatgt

SEQ ID NO: 9531 - DNA, 323 bp, Glycine max
agcttgttcacctcctttttcaccacatctagaatgatggggttgagtcgttgctgtggctgcctcactggcttagctccatcctctaaaagtatcctatgcatgcaggtagatgggctaatgccaggaatgttttctaaagtccatccaatggatttcttgtgcttcttgagcactagcagcaacttctcctcttgctcagtagcaagggaggcaaagatgatcactgtaaatttttccttgtcctcaaagtaagcatacttgaggtttactggtaaggacttcaactctggtgtgggtggtggctgaacagtgggaggaac

SEQ ID NO: 9532 - DNA, 434 bp, Glycine max
taagctccttcaactgcacaaggctcttaatgttcgaatagtatccttgtgtaaccttcacccgacgaagacactgacaaaaacttatcttctcctttttggacaaggtatggcaagctaggggcaagtaaattttcttcccattagaccttggatgcaactgtgatcgtatgcccatatcagctagatcttgacaggtattgaagccatccttcatcttgccttgaatgttaaggagagtcccaatcacactatcacaaacatttttctccacatgcataacatcaatacaatgtctaacatcaagatcagatcagtacgaaagatcaaagaaaatggacctcttcttccatatgcaactcttacttatatccttcttttgggtctttccaaatacattattcacgtgttcaacccgctgatatacttgctca

SEQ ID NO: 9533 - DNA, 445 bp, Glycine max
tgtaatcgattacacacatactgtaatcgattaccagatgatattttcagataatattctcaacagtcacatcttttcatttggttcttgaatggccatcaaaggcctatatatatgtgacttgagacacgaatttgctaagagttttcataacaaaaaggtcttatcctcttaaaaagtaaaatcgttttattctcttacaaattccttggccaaaacacttgtgattaaataaggaattatttgagtgctcaaattgttcaatctatctctttcaagatttcttcttctcttctttattctgaaaagggattaagagaccgatgatctcttgttgtaaagaaatctatacacaaaggaagggttgtccttgtgtgattcagatattgtaataaacctttacaagatagtggaactctcaacgagggtgcttggggactggacg

SEQ ID NO: 9534 - DNA, 428 bp, Glycine max
tattaagaatagaatcgaaagtttgcaagcaatatgttcaaaagcttgtgttttggaatatcattgttggaactaaagacaatatatattccatttccagaatatagcctaattacctttgcaactgactttgaagggtactctccctttagtctaacatcaacacactgcttcaccttatcttcactaagctttggtgttgcctgataaaatccaatgaacaaaatcagaatgtgtaaaatcaaaaaattgaaaggggaagaaaacacaaaaataattatcaacagaacagcatcaagtaaatattggtacccaagtcacaaagctttgctgtcctctgggtagtgtatgatcaaccggtttacgttcagttaagagtttcactaatataacttcgaagctatagacatcactctttgaagtgagtt

SEQ ID NO: 9535 - DNA, 365 bp, Glycine max
agcttctatagaggtttttgcggactgcttgtcttatcataccagcaataccttcacctacaatattgaaaagcaagggaactaggggatccccttgtctcaaaccccttgtaaggataaattccttagaaaggctaccattaatcaaaatagatatagttgctgagcggaggcaagctgatatccatgatctccattttgggcagaaacccaacctaaacagcatgtaatccaaaaaagaccaagacactgaatcataggctctttcaaaatccaccttgaagatcatcactggtttcttatttctccttgcttcctcaaccacctcattgaggatcaagataccatggagaatatgcctttct

SEQ ID NO: 9536 - DNA, 430 bp, Glycine max
tggggatgaacgtggacagggatgctagtctactattcattatctggacttcctggatgttagtaggactatgcatctccaatatagttgtgcatttgtcgggaatgtgtgagcataaagcctaggaacttgcctccaccaaccccaaaaatacatttttccgggttaaggcgcatgccgtatttgcagatctctccgaagacctcttccagttctatcatgtgttgggctatgctatgagacttgacaaccatgtcgtcgatgtagacctcaatgtttcattcgatctgctgtttgaaaattcgatccatcaatctctagtatgtagcgcctacatatttaaggccaaacggcatgaccctatagctaacagtgtcatcttcagtgatgaatgtctgtttcttcctatctatagtatgcatccaaatct

SEQ ID NO: 9537 - DNA, 442 bp, Glycine max
ctaagcttaagataaagatggcctcagcaaattccttatttccataatggaattctatcaatagacctccaatctttaatggagagggttaccactactggaaaacccgaatgcaaatttttatcgaggcaatagatctaaatatatgggaagccatagaaatagggccttatatacccaccacagtagaaagagtctcaatagatggtagttcatcaagtgaaagcataaccatagaaaaacctagagatagatggtctgaagaggatagaaaacgagtacaatacaacctaaaagccaaaaacataataacatctgccctaggaatggatgagtattccagagtttcaaatcgtaagagtgctaaagaaatgtgggacactcttcgatcaacacatgagagaactacagatgtctaaagacctatgagtaatgcactcac

SEQ ID NO: 9538 - DNA, 365 bp, Glycine max
tgaatgcaaactggatgcattgtttaatttggtgacttatctggccttgaatcagaaatctgtaccatgcgcaagggttagtggattgagctcctatactgaccaccatacagacctttgcgcttacatgcagcaacctggagcaatagaacagactgatacttatgctgtagatattcacaatagaccttctcaatctcaacagcaaaattaatcacagctgaacaattatgacctctccagcaacagatataaccctggatggaggaatcaccctaacctcagattgtgcatgccttagcaacaacaacagctacctgctccttcgttcctaaatgctgctggcccaagcagaccatacattc

SEQ ID NO: 9539 - DNA, 356 bp, Glycine max
tcatggatttctcataagcttaatatcttataggattcttattcatgagtcaattctagcacgagcttttcaagttgtatgggactaagctgcgtatgatcactgcttaccatcctcaaagtgatggacaaactacagtgcttgattgagtcttggaacaatatttgtgggtgttagtgcatcataagccatcctatcgggaaagtttctgcatcttgctgaatggcgctacaaccccactacttatttatccactaatttaacactcgatgaaattgcttatggtaagcctactctaagtctttacattatcaagctggaacctttgcctgggaacaattgatttttctgacttg

SEQ ID NO: 9540 - DNA, 407 bp, Glycine max
agcttataatatatcgataggctcgaaattaacatctttactctcgcgaaattcaaatgggcataaattttcacacggatgtccgattcgggcgcataatatgtcaagagtctcgaaattgaacaacggaagctcttgagaaattcaaatggttataaaatttcacacggatgaccgattcaggcaaatctcatatcgagacgatcagaattgaacaacggaagctcttgagaaattcaaatggtcataacatttatctcgaatgtgcaatttaggcgcatcacatatagtgatattcgaaattgaacaacagaagctcttgtgaaattcaaatggtcataacttttcacactgagggccgaatcacggctttaatatatcgatacgcctcaaattaacatcggaaa

SEQ ID NO: 9541 - DNA, 410 bp, Glycine max
  unsure (1)..(410): unsure at all n locations
tcgggaggaacctagacagggatgctagcctaccatttagttcntgaacttcttagtcggtgatcgagttgtgcatctccaatatggcagtgtatttatgggggttagcttcaatcccctggtaagtgatcatgaagccaaggaacttgcctccgcttaccccgaaagtacatttttcatggtggaggcgcatgtcatatttgtggagttccccaaagacttcttccagatccattatgtgttaggctatgctttgagacttgatgaccatgccgtccatatataactcgacgtttcatccaatctgtcgtctaaatacttggtccatcacccgtgggtatgtagcgcatgcatttttaggccaaatggcatgaccctgtatacacatggcaagtttgtggtagataatg

SEQ ID NO: 9542 - DNA, 371 bp, Glycine max
  unsure (1)..(371): unsure at all n locations
agcttgaataacggcttgcaggtagccttgagctgngatatgaacctggtgatgtagttcaagcgccccaagaaaccccagactttctttttagtgcatggcttctgcatttcgaggatggctttaactttttcggggtcaacctctatccctttttggcttacgatgaaacccaacagttttcccgatttgacctcgaaagtgcacttggctgggttcaaccttagctggtactttcgcaacctctcgaacaacttccgtaagttgattagatgctcttctttggttttggacttagaaatcatatcgtccacatacacttcgatttcttggtgcatcatatcggggaacaaagctaccatcgcttgctg

SEQ ID NO: 9543 - DNA, 360 bp, Glycine max
agcttgaaactatcatgtatcaattcctcttgaaactgtatgaaagacaagtattaaggttaaaattaaatcccaacagtaatccccacatgaacattatccttccttaaaatggagaacacaatttgaatccctcaatatgatatgacaaatgaaaactcctgatatatatatatttcatagcagaacaatctccacaaactcattcttaaacatccgaattggtgcacttgtttgagaagcaagtaatcccaatttctcactgtgataagcaagaccaacctcctttccctctctatccatgtcatgcaaataaaaattcatatcatgaacataaccaacttccttagttcttctacc

SEQ ID NO: 9544 - DNA, 369 bp, Glycine max
gagccaattaagacgacaatatctttttactcggatgactgattgagtctcgtcatatatcgagacgctcgaaattgaatgttgatgctctgagcaaattcaaacgacaataactttttactcggatgtctgattgagtcccgtcacatatcgagatgctcgaaattgaatgttgaagctctgagccaattgaaacgacaacaacattttactcggatgtctgattgagtcccgtaacatatcgagacgctcgaaattgaatgttgaagctctcagccaattcaagcgacaataactttttactcggatgtctgattgagtcccgtcatatatcgagacgctcgaaattgaatgttgaagctctgagcc

SEQ ID NO: 9545 - DNA, 426 bp, Glycine max
agcttagtaaagctaggcactaacaatctccccctttggcaaattttgtttaaaacatacttagacacttcctgagcaggtacgagcagttatgcaagtgggatcagcaactttcattatcagagtaatcaagcacagcggaaattctgcaagttgcaagtcgtttccaggatgtcaagacatctcacatgacatcagctttctgcttctgctccccctgtctccatgctcttactgcagcatcttctatcagctactagtcttttccaggatgtcaagacatctcatgtgacatcagctttcccttgtctccatgctcttactgcagcatcttctatcagctactagtagcttacatcagtcatcatcagcagcagcagtctccccctcaaaatcatgtacatacaactccccctcaaaatcatg

SEQ ID NO: 9546 - DNA, 337 bp, Glycine max
  unsure (1)..(337): unsure at all n locations
agcttcaacattcaattntgagcgtctctatatattacgggactcaatcagacatccgactaaaaagttatcatcgtttgaattacgtcagagcttcaacattgaatttcgagcgtctcgatttattacgggactcaatcagacatccgagtaaaaagttatcatcgtttgaatttggttacagcttcaacattgaatttagagcgtcttgatatattactggacacaatcagacatccgagttaatagttattgtcgtttgaaaatactcagagctttggtattcaatttctagcgtctcgatatattacggaactcattcaggcatccgagtaaa

SEQ ID NO: 9547 - DNA, 208 bp, Glycine max
agcttgtgaacaaggatgacatagaggatgtgagaagagaggttcaaatcatgcaccatctctcgggtcaacctaacattgtggaacttaagggtgcatatgaggacaaacaatcggtgcatttggtcatggaactttgtgcgggtggtgagctttttgatcgtataattgctaagggacattacactgaacgtgccgcgggtttttt

SEQ ID NO: 9548 - DNA, 283 bp, Glycine max
agcttatcaagtggaattataccaaagtttctatggcaggatagatcactttaattaattctgttttgacagccttgcctctgttttacctgtctttcttcaaagctccttcagcagtgtcaaagaggcttatttcgatccaaatgaattttctatggggtggaggcgctgaatggaaaaagactgcttgggtggcctgggatcatatctgtgctcctaaaaaacaaggagggttacgaatcatagccttcaaggactttaatagatccccttcttattaaat

SEQ ID NO: 9549 - DNA, 351 bp, Glycine max
caggcactggtattcatgtcttatctaggcctatagagtatgtgcatcttgaaatatagggaccatctagagtgaaaattcatggtggaagctcatactttctcaccatcatagatgatttctcaagaagagcatgtctgtatgtttcgaagaataaatcagaagctgttcaaatattcatagagtggaaaacacttattggaaatcaactttggtcaaaactaaaaatattaaggactgacaatggcctgtagttgtttcagagcaattcaatgagtgtcgcctgaaattaggtattaaaaggcacaaaacaatccgtcacacaccactacagaatggattatcagaaag

SEQ ID NO: 9550 - DNA, 377 bp, Glycine max
  unsure (1)..(377): unsure at all n locations
cagatgccactctactctaaattgttaaaggatattttaacaaggtatcacaagtgtattcactgggaaaacattgtcgtggaaggaaattgtactgctgtgattcaaaagatccttccacccaagcataaagaccctgggagtgtaaccattccttgttcaattggagaagtcactgtgggaaaggatcttattgacctgngagccagtattaacttaatgccactctccatgtgcagaaggttgggagagttggagatcatgcgcactatgatgactctacaacttgctgaccgctccatcatcagaccatattgagtaattgaagatgtgttggtcagagtaaatattttatcttccacgcaactttgcggtaa

SEQ ID NO: 9551 - DNA, 375 bp, Glycine max
tgtgtagcccaccatcttttcatagtagaatactgataatgtgtctactattattgtcatcatttttttctccgtcattgaggtgccacttgagctgccaggtctctccacctttgggagtattcttttgaaggattcgtgccccctttttgcacatgtttcgcacttgcatcctatccgaagccattatactgacactgtctaacgaaggcaaccattaggtccttccaagaatggactccggaaggttccaagtgagtgtaccaagtaacagctaccccagtaagactttcttggaaggaatgtatcagcaattcctcatcttttgcatatgcccccatcttctgataatacatctttagatgggtctcgggg

SEQ ID NO: 9552 - DNA, 378 bp, Glycine max
agcttaaacattcaatttcgagcgtctctatgtattacgggactcaatcaaacatacgagaaaaaagttattgtcgtttgaatttgctctgagcttcaacattcaattttgagcgtctggatatattacgggactcaatcaaacatccgagtaaaaggttattgtcgtttgaattggctcataggttcaatattcaatttcgagcgtctcgatatattatgggactcaatcagacttccgagtaaaaagttattgacgtttgagttggcacagagcttcaacattcaatttcgagcgtctcgatatatgacggaactcaatcagacatccgagtaaaacgttactgtcgtttgaatttgctcagaggttcaaaattca

SEQ ID NO: 9553 - DNA, 409 bp, Glycine max
  unsure (1)..(409): unsure at all n locations
cttgatctgcctctatattntaacaatcccatcctccctccagataatgagtttctggtggagagtagatggcacagccccaactccatggatccattcccttcctaatagcaagttaaaattggccttggactgtatcaccaggaatagagttggtcgaactatactgcctacagcaacatctacttgaatggctcccaaagaatagccagttttgccctcataattagagagcacaatgttgtgagcagatagatcagtgtcatgtctcccgatcttgtagagcatagatcgaggcattaagttaacagccgctcctccatctatgagcactttgttgattccaacattgtcaacttctgccctgatgaacagagggttgagatgactcttcatctgaaaatctggc

SEQ ID NO: 9554 - DNA, 379 bp, Glycine max
  unsure (1)..(379): unsure at all n locations
agctttggtgagacccatccactggttttctcccagagatgacttcaagcaagaatacgccaaaggcaaatacatcagtcttctcatccacaactccatgcaagtagtactcaggggctaaatgccttcaaaaaaacatgaaaaaagttcaatggacatccgagaccccttgaaacaccaaagagagtgaaatatataagtatggtagggtatatcatgtgataagaagagagagacaaagataaatgagagatgatagtggagtggttaaaataatgaaatatttgtgtatcatgacccanaaaatataacacttttcctttaaaaacgaagtttatactccaatatactactactaatgtgtttggaaactcggtga

SEQ ID NO: 9555 - DNA, 375 bp, Glycine max
agcttttgtcggctatcgcttcaatgcattggacacccgtatcatgcgtcttaaagacgacatgatcttcatccgacgttgttttgatcctcctacggattcttagacgttttcttctattataagttcctaattttctagacattttactattttttccttgcatttggctttagttatttagcactttggttaattttgtgttttgctttggatatttagcatttggtttatgctttgctttggatatttagcatttggttggtttatgttttgctttggatattttagattctgttttgcaatggatgattagttattgttattgattgtgatgcttgctctagctattttgtggttctttatacacctctg

SEQ ID NO: 9556 - DNA, 380 bp, Glycine max
  unsure (1)..(380): unsure at all n locations
agcttgtgtagatcctcagcaacctagattggatatatgcaaacatttatccctagaaccacaacagcgcccaatgcaatgagaaaaatctatcaacagctgtttcaacaaactctcctgtatgataccctgataaataatatagcaataggtgatcaagaacacacgaaaaccatattcacaagctttcattgttggatattgttttgcatatgtggcacaaaatcctaccactcacacgtcataatcctgtcagagaacaaggtatgagcaaaaaaacaaaatataaatgtcaaataaatctttgtcaacatgataagaaatagaagtgattcaaaatcctgacctgcagtgaanatgctaacaactataatggtttc

SEQ ID NO: 9557 - DNA, 390 bp, Glycine max
tagaccttgaatgaaaggttgagttcttaccaagatgaataacactctaactatccacaaatagtagatatttatcttgaacaaaaccaagctcctgcaagaatttcttcacccatagcaactccttgcatgcttcagtaatgacaatgaattttgcatctgtagtagacaaagctacacacctttgcagctcggactgccaagtcacagctccccctacaaatttaatcaaattgctcaaagtggacttcatagaatcaatgtctccagccatatctgagtctaagtaccccaccaaagtatgcttatcaccaccaaaacaaagcctcatatcaacagtaccatgaagatacctcaaaatccatttcacaacattccaatgctctctac

SEQ ID NO: 9558 - DNA, 428 bp, Glycine max
tctctcttttcttgattattatcatttgttttaagccttgtatttggctatattattatgatatttgaacatttagtatttctttttctatttgcttagtatgattgaacaattaggaattatgttatatgaccatgtggtttttatatatttgaactattcatgtttcttgcttcatgattggtttggatttttcaatgaatgtcttgcgtatgattagtcatttgtgtatgttttatatttgttacgcactttggctttttgttgatgccaaagggggagagaaaataatgattaaattaagaaactcacataataaaataacttaatttcaagtaaagcttaaactcaaaaacaaagggggagaatatggagaattaagtgagtgatcgacaaggaaaaactatgtgtatgtgtttcttaatttc

SEQ ID NO: 9559 - DNA, 282 bp, Glycine max
gaacgaatgaattatgctcgttgttggaccattcaggccccgggcgctcatactgttcttcccacttatcattgattcgtggcgttcttgccggtggagagcttaaatgaggcgtctcaagagcactgatggagcccctgtggaagtagaggtggtgaaacttgtgagaagatgctttagactaagcaatggagaggttcttgagccatggaatgaagtgagtgccatcacgattgggaaatttggtgttattacgggatgatgacccaacgcttgtattgt

SEQ ID NO: 9560 - DNA, 459 bp, Glycine max
tatatacaatataggatatatattgaattggtgttatcaatcacatgtacatattgactattgtttaagagaaaggtcagaaaaaaataacatagttgaatcaacatcattatcaatgtgattagaatgataaaaaaacctaacaaatgaaatccaagacatcacatgataattagaaaaatacaataacaataaagaatagtaatattaaaaattagatatacataaataaatattatgtacagagaaaaaaatgttcaaacaacaacatttttgttgatccggaaaataccgtaatttgtgcctaaatcgagaccaatctagatccaattgtgatttaaaaatcacaattcttaagaagaataaattattctgcattctaaaacatatttaatgatctagcatgaaaatacattgcaaccataaataaatattggtagctatcaacaataaaagctc

SEQ ID NO: 9561 - DNA, 430 bp, Glycine max
  unsure (1)..(430): unsure at all n locations
tctgtccctgaganactggttcccagaagacaactgggagtgaagattgctgaaaaccctagccttgcaacaagtcctagggaagtagacacggagatggacaagaaaatccgcggtattgtgagtagcattctgaaagatgcttctgtgcctgatgctgagaaagatgttccaacatcttccaccccaaatgtttctgtgcctgatgttgagaaagatgttccaacatcttccaccccaaatgtttctgtgcctgatgtcaacaaagatgttccaacatcttccggcccaaatgatgaagtactctcttcccccagcacagagagatcaacagaggaagatgatcaagccgcagaggagacccctgcaccaagggcaccagaacctgctccaggtgacctcattgacttagaagaagtcgaatctgatg

SEQ ID NO: 9562 - DNA, 448 bp, Glycine max
cttgatggtgtcgagaagaaatcacatgtttgtcatcatctaaaagggggagaatgtgaatgtatgtatacatgattttgatgatgtcaaagaagaatctaacaaggctgcttcaaatgataagcatttgcttcaagaataattcaagattgcttcaacaaacaaagccttgtttcaagattcactaaagaccaagtcttgccttaaaacaatgtgctttcaagacatgcaaggctctggtaatcgattaccaggaagtgttatcgattaccagaagacagggttgagaaatagctgttgaaaaaggttttgaatttgaattttcaacatgtaatcgattaccatatgtctgtgatcgattaccagcaacgaaactttggaaattcaaattcaaaagtcgtaacccttcaaattataactgtgtaatcgattacacaaacattgttat

SEQ ID NO: 9563 - DNA, 298 bp, Glycine max
tgtgctcatgccacaattgttagtcgcggctataccagacatcttgccaaacaaagtcagggtgatgataactcgcctgagctttttcttccatgctatatgtagcaaaactattgatccagttatgtctgatgaaatggaaaatgaggccgcaattatactatgccaattggagatgtattttccccctactttctttgacatcatgattcacttgaatgtgcatctagtctgagaaatccaatggtgtggtcctgtttatctaccgcggatgtacccggttgagcgatacatgaag

SEQ ID NO: 9564 - DNA, 386 bp, Glycine max
gcttatcaaatcagacaatggatatgagtttattacgaaacagttctatgatgatattggcattacacatcaatgttcttgtgttgaaactcccaacagaatgggattgttgaatgaaaacatcaaatatctattaaatgtcacttgatccttgttatttcagtctaatttaccatctatttttggtcttatgccttgattcattatgttttccttgttaattgtatgcctacttttttccttggtaatcaaactccttatgaaaaactatatgaaattgtatatgatattgagtctttaaggggtattcggtgtctatgttttctagtactttgacagctaacagaaagaaccttgacccaagagctgttacttcagtctttttg

SEQ ID NO: 9565 - DNA, 446 bp, Glycine max
  unsure (1)..(446): unsure at all n locations
tatctaatcgattcacaatacttgtgatcgattaccctagattctaaacattttaattttcaaaatttaaaatgaagagtcacatctgttgatgtgtaatcgattacaccttaatggtaatcgattaccggtgactaattttgaaaaataaatttccaaaagtcacaattcttcaagtgacttgtttctgaaatttttttttaaaagtcacaactttttaagtgactagttttttaaagagtcacaatttttgaagggtgactagttttaaaaaaatttccaagagtcacaaactttaacttgagtcatcaagagattataaacatgtgaccatggcatgaatntcagaacatcatctctcaacatctttcaaacaatcttttcaacgctttctacagaactttctaaatcatttctcaacaatctttctacacagtttataacat

SEQ ID NO: 9566 - DNA, 383 bp, Glycine max
  unsure (1)..(383): unsure at all n locations
agcttatgctgcaaacatctacaatagacctcctcaacctcagcagcaaaattagccacaatagaacaattatgacctctccagcaacaggtacaatcccgggtggaggaatcatcccaaccttagatggttgaatccttcacaacagcagcaacaacaacaacaaccttattttcagaatgctgctggcccaagcagaccatacgttcctccaccaatccagcagcaacaacaataacagcaacagccccagaaataacaaacagttgaggctcctccgcaaccttcccttgaagaacttgtgaggcaaatgactatgcaaaacatgcagtttcaacaagagaccatagcctncattcagagcttaactaatcaaatgggac

SEQ ID NO: 9567 - DNA, 488 bp, Glycine max
  unsure (1)..(488): unsure at all n locations
ctattacgtgacactatgaaactcagcttatgcctctntgataaccctttttacttttgggatctttccaatatcttctagcatcaagtcaagacaatgtgcagcacatggagtccaaaatatttttggtctcgtgacttgtaaaattttacctaagaagatcaaaatcaataaacttgtatgagtagtgtaacaattaaaagttataactataaaaaaaaaacttcattaagcatgattgaattctcatccgccaacacataattacttccattgtccgtcaccacttgaataacattcttttctccaatctcctcaacaaagctatccataagctcaaagatcttccgaccagtcttcatgtattcaaaagcatccacactcctcacaaactgtgttcccaatgaacaatctaccacaaagttaatcaaagttttatactctctatctgttcaaccatctgacataagccctttgtgtattccaac

SEQ ID NO: 9568 - DNA, 377 bp, Glycine max
agcttgaaactgtcatgtatcaatttcccttgaaattgtatcaaagacaagtattaagattaaaattaaatcctaacattaatccccacatgaacattatccttccttaaaatggagaaaacaatttgaatccctcaatatgatatgacaaatgaaaactcctgatacatatttcatagcagaacaatctccacaaactcattctttaacattcgaattggtgcacctgtttgagaagcaagtaatcccaaagcaacatccgatttcttactgtgataagcaagaccaacctcttttccctctgtatccatgtcatgcaacaaaaaattcatatctggaacataaccaacttccttagttcttcttacgatttcatc

SEQ ID NO: 9569 - DNA, 451 bp, Glycine max
ctcagcttgctttcaatctcccccttgttgatgatgacaacccttatatcaagaaacacatacacatactttttcctagtcgattattcacttaattctccatattctccccctttgtttttgagtttaagcttcactttaaattaagttatttaattatatgagttcttgatttaatccctattttctctccccctttggcatcaacaaaaagccaaagtgcataagaaatataaaacatacataaatgattataatatcactagacatatatcatcaaaataattaagtttaaaactcataacaattaagagtaagtaaatataatcatgttcagttatactaatcaaatattaaaagaaatactaagtattcaaatgtcataaaaatataaatcatttgggtaagtcactagcatcttgcagtcctaattctcttctaatggcgtaga

SEQ ID NO: 9570 - DNA, 411 bp, Glycine max
  unsure (1)..(411): unsure at all n locations
tatcctgtcatgttcattagttcaaaaattatccagaagatggagctaggttaggaacaggtacgattggatagagaaaatttccacctttcaggctttcaccttgctactacgcaattgttttgctccaccaccaccactaccacaattgttgctacgatgtaccagcattgttgccaccacaaccattgctactgttgccatcactactattgctgctgccatcactagcatgtatcatgattgcttctataattgttacctctactgacacaaccactatcactacatttgccaggatccgatggtctcaaaaatgataattgcttccagtcaacttgngtgttcagaggagataatcaccatcgctgctgttctttccgtccaggtgaatcttttgctgtagtcatg

SEQ ID NO: 9571 - DNA, 355 bp, Glycine max
tcttacaaagcatacggctttctggatgtagatgatgatatctatacagatggatcttatatatctatatatctatagatagatatatagatatagatatatagatatagatcatacaatgaagtaccgcacgagtgggtatataggaatccaaatctgccgaatcactcatgttatgatcttctacatcctaagtcttcccgttccttcatctggcttatgttcttcatgtagcattcacactgaatgactctatgaaattacgtcgctacttccacatggtacgggtaacgtatgagacatctctatttttcccggggggaatacttagaattaccacagcttagctttcaat

SEQ ID NO: 9572 - DNA, 414 bp, Glycine max
cttatgtaggggttaaattcgaattaagtatgatgggaaagtttaatttattccttggacttcaaatcaagcaagaatatgaaggcatatacatacatcaaaccaagtacttgaaagaacttttgaagaagtttaagatggatgatgcaaagcatatgaaaatgcctatgcatccaaccactatactttgactagatgaagaatcaaataatgttgaagaaaagacacatagaggaataatacaatctcttttgtatgtaactgcatccagacttgacattatgttcagcgtatgtctttgtgcacaattcctaaaggaaccaaaggaagttcatctatctgttgtcatgcatatatcgatgactaataggaactccgaaccttgggttatgctataagagagaaaagaaatac

SEQ ID NO: 9573 - DNA, 378 bp, Glycine max
agctttggagaaccaagccaatcattatgctagacgaaatatagatgggaatagaggtaacaatggcggtaatgacggaccgaggcagaaccgggttgagggagtaaagctcaatgttcctcccttcaaaggtagaagtgatccagatgcctacctggactgggaaatgaagactgagcacgtatttgcctgcaatgactacactgatgcgcagaaagtcaagctagcagcagctgaattctccgactatgcccttgtttggtggcataaataccaaagagaaatgttgagagaggaacggcgagaggtagatacatggactgagatgaaaagggtgatgagaaaaaggtatgtgcccactagctataacagaaccat

SEQ ID NO: 9574 - DNA, 462 bp, Glycine max
tatttagatcagattctatcattttaaatttattgaacgtgtcaccatactcttccttgttccatctcttcaccctcatttttagattcttaaatttttccttgagcacaaaacctccccatcctggttgcaattgagagttccagcattggtggacaactttcttaaaggatacatccgagagccagcagtccaaaactataaaaggttgagggccccaatcaacaacctttgatcgaagaagaataggacaatgatctgaaaagttcctggcaagtgtcatttggacacttgcaggccatctattcagccattccggggaaaccaagcacctgtccagcctactcctagaagccccattaggtatgatccatgtaaacttcctgcccagccaaggaacctcaagcaactccagttcgtgaatcctattattgaatttcaatatactgctgtcactaatac

SEQ ID NO: 9575 - DNA, 314 bp, Glycine max
gcaagcttccacttattagtgcacagctttttgatgcatccttcctaggaagggaccaatcactaaaaccatgagcaagaggctccaagaagattgggctagagcttgtgaaaaaagccctaaggttctcatgaaccttaaggtagatttctgagcccatgggccaaggttgggtccaattatctttgtacatattaaactaggatgtcattatatttggtccttgtatatagggctccatattgtagggagggtaccctagaaatataggatatttcagcccttgtattttttgggcacctagactagttttt

SEQ ID NO: 9576 - DNA, 287 bp, Glycine max
atgcaatcctccctaggaagggaccaatcactagaaccatgagcaagaggctccaagaagattgggctatagctgctgaagaaggccctacggttctcatgaaccttaaggtagatttctgagcccatgggccaaggttgggtccaattatctttgtacatattagactaggatgtcattatatttggtccttgtatatagggctccatattgtacgtagggtaccctacacatataggatttttcagcccttgtattttttgggcacctagactagtttttgtatt

SEQ ID NO: 9577 - DNA, 367 bp, Glycine max
  unsure (1)..(367): unsure at all n locations
agctttacagcagatgcccctttactccatgttcttgaaggatatgttaacaaggaaacataagtatattcaccaggaaaaaattgtagtggaaggaaattgtagtgttgtgattcaaaagatccttccacccaagcataaagaccttgggagtgtaactattccttgttcaattagagaagtcactgtgggaaaagctctgattgacttgggagccagcattaatttaatgtcattctccatgtgcagaaggttgggagagttggagaccatgcccactaagatgactntacaactggttgaccgctccattaccagaccatatggagtaattaaagatgtgctggtcagagtgaaacattttatc

SEQ ID NO: 9578 - DNA, 427 bp, Glycine max
tcagctccttcaactgcacaaggctcttaatgtttgaagagtatccttgtggaaccttcacccgacgaagacactgacaaaaacttatcttctcctttttggacaaggtatggcaagctaggggcaagtaaattttcttcccattagaccttggatgcaactgcgatcgtatgcccatatcatctagatcttgacaggtattgaagccatccttcatcttgccttgaatgttaatgagagtcccaatcacactattacaaacatttttctgcacatgcataacatcaatacaatgtctaacatcaagatcagatcagttcgaaagatcaaagaatatggacctcttcttccatatgcaactcttactcttatccttcttttgggtctttccaaatacattattcaggtgttcaacccgctgatatac

SEQ ID NO: 9579 - DNA, 418 bp, Glycine max
cctatggtttgtaagaatgataaatggatgccctaacatatattggcgccattttcagactgcagtggtgatggcatggagctctcggatatatgtggaggcgtgatgtaaccgggggcagaaaagcttgctaaaataagccaagggatggccctgttgcatgagaacaacccccatctcgatacctgaagcatcagtcttaagtgtgaatggttatgaaaaatcacggagggccaagacgggggcctgggtcatggcttgcttgagtccctcgaaagccgattgagcaccctcgtcccaatggaagttatccttttgtaacagtgtggttaaaggggaggcaatggaagcatagcctcttgataacttccgataaaaccctgttagacccaaaaatccacgtagagaatgggtattg

SEQ ID NO: 9580 - DNA, 212 bp, Glycine max
aatgcagaggttcgaaccatcgatgccatggtttgggttctctatctctcggagatagacatgtggaagagtcactggatgcttcgggtgcacagaagtaacaattgtcccttggtcagctggccttcaatggaactctacgtcctacatgaggaacctatcattgcgacaccttgacgtgcacatcgaatacatcatccacacaactgact

SEQ ID NO: 9581 - DNA, 471 bp, Glycine max
gggttacctccttcttcactacatcaagaatcaccgggttaagtcttctctgtggcagccttactagtttagcccaatcttctaaatttattcgatgcatacatgtggatgggctaataccaggaatgtccgccagggtccagcctatagccttcttatgcttcttgagaatagataacagcttctcctcttgctcatcagcaagggaggcagatataattactggaaaaattttgctatcatccaagtaagcatattttaaatttgatggtagaggcttcaattctggtgtgggcggctagatagtggtagaaagagatggtttctcagcctgtacctcataaagaaattcagaggtatgtgtacttcctgaaacatggttagttctatctgactctagaaaatcaatctcaagaggtaaaacatcactaggaatgtaatcaatataaatttcagattcactctcagcat

SEQ ID NO: 9582 - DNA, 475 bp, Glycine max
actcaagctgccaataatattagtttgagtttgagtacttcttattaaaaaaattagctctgatcctttgatcaaatatattatatatttaacaaactaacttatcatatgtataacgtatgcacttataccttatcaaaatcaaaataaaccattaactcacattattaattttcaaccctgtccatgtgcagatcaatttaacttattttctttaaataataattcatcttttagtttaattcttatatatttttaaggttctcactgctatatgttatttttaaaataatcattaaaaaatcaataattgtcaattatatgaaaattcataattaacataataacgttataccttaattaaatcgcttatttctattaatcatcttgaatatctttttttataataactaaacaattccatgtcgatacgagttattcgatttactctcacttcttttattatatctatact

SEQ ID NO: 9583 - DNA, 405 bp, Glycine max
  unsure (1)..(405): unsure at all n locations
acgccccgggatcctctgagtcacctgaggatgcagcttatcatttagtaaactttattaaaactttaaacattatggcatataagatgatttttgaatatcgttaatggaatacaatcttacttaaaatggataaaattattatagaagatatttataaattaatagggtattgggattcatgactaactatcagtattatttaggacgtatttcactctatggagtgaaaaaaattatgtaaaatgagaagtaattatggatgtgtctattattaatataaataaaatatcctataaacagaatccaattaaattaaaaaaaataaaataaatgcacctttcttttcactctgtacgcgcttctcaccttntacagcaaaatagaaaatctaaaattaattta

SEQ ID NO: 9584 - DNA, 431 bp, Glycine max
tggaattgtgagttatgactaagttctgttatgtttattgcaatatttttgtaggtatgacaaaggagcatacttgtttttgccatcgtatgttatgagagtacatggagcaaagcagcaacgtgaagcagttaagagggctcccaagagtcaacttgatcctgtttttgaggttgggatattcttttctaaaatgtatgtgcatttgtaagtctgtctgtggtctgcagttaatagttgttgaaattaattctggtattattgtgtaactaggcccttaatacccttggcaataccaaatggagggtaaacaaaagggtgctctgtgtgatagatcacatatgggctaatggaggacgccttgctgatttggtggatcgtgaaatgtgagtactaaacaaactttttgctaaatctatctgttgactcct

SEQ ID NO: 9585 - DNA, 376 bp, Glycine max
agcttgttgcactagcataaacaaggagttgagcaactgcttctggtcttgggtgtcatggcaatcctttggcaggaaaaattctaaaacaaaatcagcggaggcactccggagtggaatgcccagagcagcatgcaagccaaacatgttagcatgatgtgccagaggatactccgccttgctgaaggaagtaatgtcatttgcaaaacaaggtttggtggttgtgaaagctgtcccaactactccttgcccccccaaaaggtggcactcagagcaggcttccaggaaacccattagctctacatccgccacaaaactagcagcatacacagtcgacacataattcatctcatcgtttgaatgcccacatccactc

SEQ ID NO: 9586 - DNA, 359 bp, Glycine max
agcttctgtccctgagaaactggttcccagaagacaacagggagtgaagattgctgaaaaccctagccttgcaacaagtcctagggaagtagacacggagatggacaagaaaatccgcagtattgtgagtagcattttgaaagacgcctctgttcctgatgctgagaaagatgttccaacatcctccaccccagatgttgctgtccctgaagctgatgaagatgtcccaacatcttccaccccgaatgtttctgtgcctgatgttgagaaagatgttccaacatcttccggcccaaatgctgaagtactctcttcccccagcaaagagagatcaacagaggaagatgatcaagccacag

SEQ ID NO: 9587 - DNA, 439 bp, Glycine max
  unsure (1)..(439): unsure at all n locations
gcatagtataacccttcagtttcaattcagagtctccataaatgaggaattgttctttagatcttcttaagtacttaattatggtcttaaccactttccaatattcctcaccagggtttgcttgatatcgactagttacacctagtgcataagcgacatcaggatgtgtacaagtcatggtgtacatgatagctcctactacactagcatatggtactctactcatgcgttctctttcttcaggagttattgaacaattctccctactaagagtaattccaacacctataggcaaacagcctcgtttggaattattcatgttatatctctntaagatagtatcaatgtacatagattgggagagtccaagcaaccttntagatttatctctataaatctttatacctagaatatagactgtttctccaatccttcatgg

SEQ ID NO: 9588 - DNA, 450 bp, Glycine max
cgacatcgaccaacaacgtagactgacatgtgtatcactcgtctatttgatcttgatttcactttccccgtgatatcctattgtcaatattctggaagtgttatacatattttaagaggtcaaagattaaacttgtcaaagactcaaaaataaaataaaagtccattcaaagaaataaaatgatgttttagttatgcatactaattttttattattaatattcaaattagatattttttaccacaagtgcctttttatatttttcattttaattacttacatatcagtgcatcaccatgccgcgtttcatgttatggaaaaaataatttttaaacaatcttgagttgataaatgatgtaatataataagaaaaaagattaaaaaagattattaactgaatgcttattgtttttataaaatataatcactcttatatgttttaatccttca

SEQ ID NO: 9589 - DNA, 371 bp, Glycine max
  unsure (1)..(371): unsure at all n locations
agcttgtagtgattcactctgatgtgtatggcccatttgaaatcaaatatcatggaggtaacttgtattttgtctcttttatagatgactttacaaagaaaatttgggtttacctgttacaaagaaagagtgaagtatttgtaacatttaaatcattcaagttactagttgaaaagcagtctgattgttcaattaagatgcttagaactaatggtggaggaaagtacacttcacttgaatttgataatttttgcaaggaagaaggaataattcatgatgtaatggctccatacactcctcaacacaatggaactgctgggagaaggaananaacaatgctaaatatggttagatgcatgctgagagagaag

SEQ ID NO: 9590 - DNA, 405 bp, Glycine max
  unsure (1)..(405): unsure at all n locations
ntcgagagattcaaatggtcataacttttaactcggacgtctgattgaggcgcattttatatcaagacgctcgaaattgaacaatggaacctcgtgagcaatttaaatggtcataacttttcactcggaggtccgattcacgcgcataatatatcgagacgctcgaaattgaacaatggaagctcttgagcaattcaaatggtcataacttttcactcggaggtccgattcaggcgcataatatatcgagacgctcgaaattgaacaatggaagctctcgagcaattcaaatggtcataacttttcactccgaggtccgattgaggcgcattatatatcgagacgctcgaaattgaataatggaagctcttgagcaatttaaatggtcataacttttcactccga

SEQ ID NO: 9591 - DNA, 437 bp, Glycine max
tctaaactttgtacaagaatgaagctctgataccacttgatagacaagtggcctcagatatcttaagaaggggggggttgaattaagatattccaaacttttctcctaattaaaaatctatcttactttttacttaagttatgaattcccttaatgacaatcttcttaaatattaattcaaatgaagcaacttgaatatgaatataacgcaataataaataaaggagattaagggaagagaaaatgcaaactcagttttatactggttcggccacacccttgtgcctacgtccagtccccaagcaacccgcttgagagttccactaacttgtaaattccttttacaagttctaaacacacaaggacaacccttcctttgtgtttagagattctttacaacaagagactcacagtctcttaatcccttagagaatgag

SEQ ID NO: 9592 - DNA, 380 bp, Glycine max
agctttgaatgctctattcaatggagttgacaagaatatcttcagactaatcaacacttgcacagtggccaaggatgcgtgggagatcctgaaaaccactcatgaaggaacctccaaggtaaagatgtccagactacaactattggctacaaagttcgaaaatctgaagatgaaggaggaagagtgtattcatgacttccacatgaacattcttgaaattgccaatgcttgcactgccttgggagagaagatgacagatgaaaagctggtgagaaagatcctcagatccttgcctaagagatttgacatgaaagtcactgcaatagaggaggcccaagacatttgcaacatgagagtagatgaactcattggttcccttc

SEQ ID NO: 9593 - DNA, 344 bp, Glycine max
  unsure (1)..(344): unsure at all n locations
gctttcttttccattgtttaatactaaacacttgccaccaaaaacatgaagatgcgagatgtttggtttcctaccattgaatagttcatatggagttttctttaaaattggtattattaaagccctattcatgatatagcatgcagtattagcggcttcagcccaaaaatattttggaagaggagtatcatttaataaggatctagcaatttcttctaaagacctatttttcctttcaacaactccattttgttgaggggttctaggtgcagaaaagttatgttcaatgtcatgcttatcacaaaataaatcaaattctttattttcaaactcacccncatgat

SEQ ID NO: 9594 - DNA, 455 bp, Glycine max
  unsure (1)..(455): unsure at all n locations
ntccaagccatataaattatgtggaatttaaggaagattattagtagaaaagatgtaccatatggagctgatgcatcatacccaattagggtatattgactcattagtagtcccaggagaaatatgtagggtttgctcttgattccatcatcgtttttagtattgaaatgagtgaaatcaaacttgagaccagctctttccgttgcaacaattgaaatgagtatgataagaacaaaaacacctaaaagtttccccattcaaattagttgcataaacaattgctgatttcgatatttgtttgtaattgaaatttaccttttgtatgttcttttatgtcatgaatgtaattttctatataaacaattgttattcatgctgagtgaaccttagattcccgtttgagattgaatgcaatgattcttgcggatagtttgcattagtcattgtatttagtc

SEQ ID NO: 9595 - DNA, 457 bp, Glycine max
ttgcatctttttcatggcaagatttgccaagttagcttcatctctttccttggctgcatcaactggtgccatggatgatatcagctcaataagtacaaccccaaagctatacacatcactcttgtccttgagcctgtacaattggaaatattgagggtcaagataccctagagacccttgtggagctgtggagacatggcttacatcattggggagcaatcttgaaaacccaaaacctggtaccttaatcgaaacactaatgtcaagtaaaatgttgttggttttgacatcacggtagatgatattagaagtatggagataaagaacaaaactaatgatttgtgctccaaaactaacaaatctccgccaattgtttctacactcctactatttatgcaaatattttatggaaaagcatagataataaatagtgacattaaccatacatgagaagcat

SEQ ID NO: 9596 - DNA, 345 bp, Glycine max
gagcttctaaactttatacaagaatgaagctctgataccacttgttagacaagtggcctcagatatcttaaaaaggggggggggtgaattaagatattccgaactatttcccctaattaaaaatctatttcactttttactcaaggtatgaattcccttaatgacaatcttcttaaatattaattcaaatgaaacaatttgaatatgaatataaagaaatcataaactaaggagattaagggaagagaaaatgcaaactcagttgtatactggttcggtcacacccttgtgcctacgtacagtccccaagcaacccgcttgagagttccactatcttggatattc

SEQ ID NO: 9597 - DNA, 457 bp, Glycine max
  unsure (1)..(457): unsure at all n locations
tcatggatttctcataagcttaatatcagaaagggacccaatattcatgagtcaattctagcacgagcttttcaagttgtatgggactaagctgcgtatgagcactgcttaccatcctcaaagtgatggacaaactaaagtgcttgattgagttttggaacaatatttgtgggtgttagtgcatcataagccatcctaatgggataagtttttgtatcttgctgaatggtgctacaaccccactactcatttagccactaatttaacctcgtatgaaattgtttatggtaagcctcctcctagtatttccaattatcaagctggaacctttgccgtggaagcaattgaattttttctgactttgcgccaagaaacctttcacctacttatgaagaagcttgaaaggcctangaacatatgaaaaagaatgttgatactcatcgtcgagatgtcaatt

SEQ ID NO: 9598 - DNA, 361 bp, Glycine max
agcttgtctcaataagtgtactcgatttgatcaattgacattattggtctttatcaataataaaattttcagtaataccatcaacagattgcttgagcatcaagtgttgtaagaataaaatggtataataaacatacttgctgagtctttgagctgcactctatataatatgtagctcctaccagtttacgcaattcctcaccctgattatggacaaaacccaaaagtttcaataaacactgcttattgaactctttaggtggctaataaagtaaggcatagtacttgctcagaagtcacaagcgccagaccaggattatcagtcaaataaaaataaagttatttttatgatatgaattta

SEQ ID NO: 9599 - DNA, 354 bp, Glycine max
agcttctcaaggaagttacctagtctataaataaaagcatgtgtaacacttgttataactttgatgaatgagagtcttgtaagacacaactcaaagttcaacttctctccctttttcttcctgtaatttcgtgctccctcctctctttcttttagcagatgctcacccccccctctaaaatttaattggagtgggcttctcccaattcaattaaatttattttcaaccacacacatcaaatattcacttaatgcgtgccaaattagaaaactacccctaatacaaaaaactagtctaggtgccctaaaatacaagagatgaaaaatcttacatttctagggtaccttaactata

SEQ ID NO: 9600 - DNA, 343 bp, Glycine max
agcttcaacattcaattttgagcgtctcgtatattacgggactcaatcagacatccgagtaaaaatttattgtcgtttggattggctcagagattcaacattcaatttcgagcgtctcaatatattacgggactcattcagacatccgagtaaaaagttattgtcgtttgaattagcttagagcttcaacaatcaatttcgagcgtctcgatatatcacgggactcaatcagacatccgagtaaaaagttattgtcgtttgaattggctcagagcttccacattcaatttcgagcgtctcgatatattacgggcctcaatcagacatccgagtaaaaaagtat

SEQ ID NO: 9601 - DNA, 376 bp, Glycine max
agcttgttggagttcactgagagcttctttaggtttatgagctcaaaccctattgtgtctggcagcttgctcagcttgttgaagtttgcattcagctcttctaaagctctgctaggtcaaaattcatcacagcatgcaacatgcatgcatgttaagataatgaaccaagtaataatcaacatgaataaattctgatacacacaatcacaaacacaattaatcacccctatattaattacaatcaattaatcttatttgtttcttgcacgcttctgatcatgtcatgtcattttgatttgcaaggaataacaatgttgattttgtgatgtaagagctagaaatgctcaattaatgcatggcatgttgaaattagaat

SEQ ID NO: 9602 - DNA, 354 bp, Glycine max
agcttccacttattagtgcacagctcctgatgcaatcctccctaggaagggaccaatcactagaaccatgagcaagaggctccaagaagattgggctagagctgctgaagaaagccctatggttctcatgaaccttagggtagatttctgagcccatgggccaaggttgggtccaattatctttgtacatattagactaggatgtcattatatttggtccttgtatatagggctccatattgtaggtagggtaccctagaaatataggatttttcagcccttgtattttttgggcacctagactagtttttgtattaggggtagttttgtaatttcacatgcactaagtggata

SEQ ID NO: 9603 - DNA, 364 bp, Glycine max
tgtctctcaatactatgaatctgttcatcttcaagccttttgtgagaatatccgcaagttgcatttcaggactgcagtacttcaagtcaagttgttttttgctcaccttttcacgaagaaagtgaaatctcgtctctatgtgttttgatcttccgtgtactattggattcatggccaagctgatactggaattgctgtccacatacaattcgactggcctctaaatttctattttctattcttccagtaaagagtctagccatagtgcttggcatgcagcatagcatgctgcaatgtactcaacctcgcaagaagataatgctactacatgttggttctttgaacaccagcttattggtgcacc

SEQ ID NO: 9604 - DNA, 430 bp, Glycine max
tggaaggtagtcatacctcacaaaatatatatatgtatgtttaggtaggaagataccatagatatgcatgtatgtaaacaaaaaaatacttcacaaaatatatatatatgtatgtttaggtagtgaaaataccttagatatgcatgtatgtaaacaaaaaaatacttcacaaaatatatatatgtatgtttaggtagtgaaaataccttagatatgcatgtatgtaaacaaaaaaatacttcacaaaatatatatatgtatgtttaggtagtgaaaataccttagatatgcatgtatgtaaacaaaaaatatacttcacaaaatatatatatatgtatctttaagtaggaagataccttatatatgcatgtatgtaaacacaaaaaatacttcacaaaatatatatatatatatatatatatatatatat

SEQ ID NO: 9605 - DNA, 390 bp, Glycine max
tatttgtaaagaaaccctgaaccctactttgtcaaatacccattaaaactcaatcaatcaagtaatcctaaaccattatctttgaaatacccctaaaccataactagcaaagtaaccctaaagtctaatttgtcaaataaccataaatacccctaaaccataactagcaaagtaaccctaaagtctaatttgtcaaataaccataaaccctaattagttaagtaacacaaaaccctaattagtcaagtacacataaatctgaaatagtcaaacacacataaaccccaatttctcaagtaaccctaaacatctaattgttcaaatacccctaaatcctacttagtcaagtaacctaattagtcaagtacccctaaaccctatagtcaaata

SEQ ID NO: 9606 - DNA, 416 bp, Glycine max
tgtggaaacaaaaaagtgcaacacatttgatatagtttataggcttctgaagttggctttagtcttgccggtagcagctgcaagcgtggaatatgtttttttagctatgaagtttgtgaagagtatctatgtaacaaaataaatgattaatggttaaatgattctcttgtaacttttatagaaagagatgttctttgaacaatcaacaatgatgtgattttagctcatttttaaaaaatgggtaataaacgatttttattgtaaatacatatcattaaacaacattatttcttatttttaatatattttagtctataatttcttttatattttattcacactgatatttatttattgttagattcgtccctgcttgcctgccatattcaaattaaagctgtttaaatgatagaatt

SEQ ID NO: 9607 - DNA, 435 bp, Glycine max
  unsure (1)..(435): unsure at all n locations
taaaattcattatggatgcatacactaagagcattctaatggcttctaatctagcaactagagcatatgtttcttcataatctataccttcttcttgattatatccttttgcaactaatctagccttatttctaatgattatgccatgttcatctaacttattcccaaatacccattttgttcctatgatgggatagtttttaggtttctcaacaagttcccacacattgtttctttcaaattgatttagttcttcttgcatagcaattatccaattatcatctattatggcttcttttatatttttaggttcaatcatagatacaaaagccatattattgcataattctttaagagaatgtctagttgttaccccttttgagatatcaccaataatgttgtcgacgggatgatctnttgaggctttccattctt

SEQ ID NO: 9608 - DNA, 401 bp, Glycine max
  unsure (1)..(401): unsure at all n locations
tgtgttcctacaaatgctgaagaacaacccatttagtggtgctgctcatgaagatcctatacagcacctgagtgggactggttgtactcactacctgagaacaacattactacatggaaccagtgcataagtgccttcttaaggatatatttttctctcatgaagatggatcagtacatcaaggacattggaaacttcgtgcagaaggaacaagagactttacttgaagccttggaaaggctgcaagagataattagaagtttctcacatcatggcttttcacctcaaaggctagttcacattttctatggtggagtgtcctcacacaattggacaagtttggatgctacttgtgagggtaatctcattttanaaccccttactaatgacctcaagtgtag

SEQ ID NO: 9609 - DNA, 432 bp, Glycine max
tatcaaactctacaatttatgcacactgataagaatgtcatatttttgcatttaattcgtagaggagttatttcgtataaaaataataacaaaatatttataaataatatatcatttaaataattcaataatataataaagtaaaatagtaaataataaatttcacaatagttaaataatcaattttaataatacatcacacttttagataataacttaccgatattatagtggtagtatgttattagagaataatggtttgatgttattagatgtgataattttttatttgggaacaacacattaaattgaagtatgttgaatattagatagacaaaaaacaatccaaaatgatttatcttttagtctaattatttctaacttgctgactagttgactcgatagtaaactcgagagtctacttaagttact

SEQ ID NO: 9610 - DNA, 361 bp, Glycine max
  unsure (1)..(361): unsure at all n locations
tcagaaagaaattntggcactacagactgagaaagagtttgtaaggagcttgtatgaaaattcctatgaaaagcactgggaaattgaagaccagattacacaaatgcagaaaagggtttgcagcttgcaagatgagtttggaattaatacattcatagaagataacgatgcacgagctctgatggctgcaacagctctgaagtcatgcaaagagaccctggctaagttgcaagaggcacaggcacaatcatctgaagaggctaaagaatcataccaaatggttaaggaagctcacagcaagtttgaaacccttagagacctattcatttctaaacataagagtccacaagaccaagtaaca

SEQ ID NO: 9611 - DNA, 416 bp, Glycine max
tggaatcaaataaaaaaccacaattagtctcatattgtaaaaattgttcaaatcgtgtctcaatagaattaattgattgatctaatatgtataaaaaatactcattatgaaaagattcttcaggtgaatgtgtgatctcattactaatattttttttatcaaaatgaggctgtttatgaattttacgtttttcatgaaattttggctctatatccatttcgatagtcattttttctgtggattctaaagccaatgcaaacccgttttccctataatgttttaaataagtgataacaccttttaaatgatctatagcaacatctatatgcatatcttttgattgtagaatcttgctaacagaattgacagcaaacacaatatcataccaaatattattcctaataaatatcaaaatc

SEQ ID NO: 9612 - DNA, 422 bp, Glycine max
  unsure (1)..(422): unsure at all n locations
tgtaatcgattacacatatactgtaatcgagtaccagatcatattttcagaaaatattctcaacagtcacatctttctatgtggctcttgaatggctatcaaaggcctatatatatgtgacttgagacacgaatttgctaagagatctttggatcaaaaaggtcttatcctcttaaaaagcaaaatcgttttatcctcttacaaattccttggccaaattacttgtgattcaataaggaattatttgagtgctcaaattgttcaatctatctctttcaagagagatttcttcttttcttcttcttcattctgaanagggattaatagaccgacggtctcttgttgtgaaagaattctaaacacaaaggaagggttgtccttgtgtgttagaacctgaaaaagaattacacgatagtggaact

SEQ ID NO: 9613 - DNA, 414 bp, Glycine max
tgatatccttagcccctttcgatataccattgcagttagagccgacctaacatgcatacccaagatgtccaccccaagataccactgcctagtagtaaaggtctccacaagctttgccacaaagaatacccctgcaaggacatacccctcatgtgggaaaatctctttgccaaccaagtaatcaacaaagtaacttatcatgtacggaccgacatactagacaagagtagtgacaccagcaaatacggcattacaagctgcctccttccagaacgacttgagaagtgcccaagccaatgaaggctgctcggattggttttcagccttcaacctctcccaattagaattcaaaaccttataatttgtcttggatcggtctttcgccgcaacaaggggaatgttcttaagctcaag

SEQ ID NO: 9614 - DNA, 422 bp, Glycine max
  unsure (1)..(422): unsure at all n locations
nttaataatggtgatgtcttatttatttgtctttatgtggatgaccttatctttaccggcaataacccaaatttgtttgaagacttcaaggattccatgtctcatgaatttgagatgacagatatgggactcatgtcatattacttgggaatggaaatgaagcacatggagaatggtatctttgtctcacaagaaagctacacaaaagaagtgttgaagaaatttaatatgcttgattgcaatcccgtgaacacacctatggaaggtggcttgaagttatcaaagtttgatgaaggagagaaggtagaccccacggtcttcaagagtcatgtggggagtttgatgtatctaaccaatacaaggcccgatattctatatgcggtgggagttgtgtgttgctntatggaggctcctacctctac

SEQ ID NO: 9615 - DNA, 386 bp, Glycine max
tgtgcctcttcatgtctggaatatgaatgtagcatatatatccaaagacccttaagtgctttgctgatggcttcttcccgttccaagcttcaattggagtcttgtcttttacagacttagttggacatctgttgagtatgtaaacaacagtgtagactgcttcagcccagaatatgttaggtagtcccttttccttgagcatcgatctagccatctccataactgtgcgattctttctctcggacactccattttgttgaggagaatatgcgactgtaaggtgtctctcaatgccttcatcctcacaaaatctttcaaactcgcgagaggtgtactccttgctgcgatcacttcttagtacttttatcccgttttcactttgattt

SEQ ID NO: 9616 - DNA, 356 bp, Glycine max
tccgttgttcaatttcgtgcgtctcaatatgtgatgtgcctgtgtctgacctccgtgtgaaaagctatgaccatttgaatttctcgagatcttccgtggttaaatttcgggcgtctccatatgtgatatgcttgaatcggacctccgtgtgaaaagctatgaccatttgaatttctcgagagattgcgttgtttaattttgagcgtctcgatatctgatatgcctgaatcggacattccatttaaaagttatgactattttaatttctcgagaactttctttgttcaatttcgagcgtctctatatatgatgctcctgaatcggacttccgagtgaaaatttattatcatttaaat

SEQ ID NO: 9617 - DNA, 390 bp, Glycine max
atgaagaagcgttaaagcaggaagtatgggtcaaggctatggtataagagatacagatgatcgagaaaaacaacacatgggagttagtaaatcgtccccatcaaaaagatatcattggggctaagtgggtctataagacaaagctcaaccctgatggcaccatacagaaacacaaggcgaggctagtagctaagggttactcacagcaatccagaattgactacaatgagacatttgcaccagtagctcgtcttgataccatatgagctctaataactcttgcatcacaaaaaggatggagtatccatcaactagatgtcaaatccgcctttcttaacgccgtacttgaagaagagatctatgtggagcagccacaaggattcgtgtctg

SEQ ID NO: 9618 - DNA, 429 bp, Glycine max
  unsure (1)..(429): unsure at all n locations
ttagttaatttaattctactttntccaaaaataatataaatttttttatgttaaatgatataagtaaaatatctaaatctttacatttttcttataatacaaaattctaaaatattatcatatgatgtctttagatgataaattattagaaataaattcaaatgataaaaatattaaatgtgttatttcatgtaattntacatttatcaactagttttttggttaatcttaccaaactctttcaactagctttcgagtttttttaactcctaacttgtagcttataatctcccctttagtttgttagctttcatctatcttataagctaggtttatcaaacatagtctcaattattatactgtctacacatttatggattaaattcaaagttatgttttcagagattaaactgtcacccatatacacat

SEQ ID NO: 9619 - DNA, 387 bp, Glycine max
tgtcactctctggtaatcgatgaccagaacgctgtaatcgattgccagaagcccaacatttttgaaaagggatcttcagatgtgtaatagattaccatgactttgtgatcaattacgaaagcttatcaagttcaaaaatagatcgaaaaaccttgtaatggattacacaagacatgttatcgagcactactggctctgaatgtaggaaattcatattctaaatgaagagtcacaacttttcaagaaagataactgtgttatcgagtacaccaagattgtcatcgattgctagtgtcaagttatgagaaaatctggcaacagtcacatattttcattcgattgttaaatggtcatcacaggcctataaataaatgacttgatcacgaa

SEQ ID NO: 9620 - DNA, 409 bp, Glycine max
  unsure (1)..(409): unsure at all n locations
tgtgcattcaatatcctgatgaggatgttccatatgttctcaagactggactaatacatttgctgcccaagtttcatggtcttgtaggtgaagatcctcataagcatcttaaggagtttcatattgtttgttccaccatgaagcccccggatgtccaagaagatcatatatttctaaaggcttttcctcattctctggagggagtggcaaaagattggctatactatcttactcccaggtccattttcagctgggatgaccttaagagggtgttcttggagaaattcttccctgcatctaggaccactgccatcagaaaagacatttcaggcatcatgcaacttantggagaaaacttgtatgagtactgggaaagattcaagaaattgtgtgcaagtttccctcacca

SEQ ID NO: 9621 - DNA, 444 bp, Glycine max
tcttattccatacccaatgatgctctttgactgagagttagaatgacatcttttgactggacagatcaccaattcaagtcttatagagatttccttgtatcttagcaaagaagagtgaagagttgtccttattctagatgatacacatatccttattaaaggtgacattgtatccactgtcacataatttatttatactcaatatgcttcaatcctttaaccagtaaaacattatctatagtacgatagggagaaatgcatactttacctacaccagttatcaaacctttcttattccctcaaaaagtgaccaccccactagacatagggcttagggattggaacgcagacttttcacctgtcatgtgtcatgaacaaccactaatcaagtaccatgattggtgttctttcttgctataaaaaagatgtacaataggaattatt

SEQ ID NO: 9622 - DNA, 433 bp, Glycine max
tgttcttgactcatcttctccttgaagtggcatctccaatcatctttcttccatctccattttgctctcattgatcttcaagaagcaaaggactccattgatgaagaacattcaaggcctacaagctccacatggagctacattattttctctagtaacacaccttaagtatgtttttactcctctattgaccacctcaatttgcccatccgtttgagggttatatgttgaactaaatttcaatttaattccagcagatttgaataattccctccaaaattgactcagaaaatttttatccagataaaaaatgatggtgtttggaaacccatgtaatttcacaacctcccgaacaaatagatcaggtatgtcatttgcagtgaaggggtgactaatggggataaaatgagcatacttaagtcaatctgtctac

SEQ ID NO: 9623 - DNA, 430 bp, Glycine max
  unsure (1)..(430): unsure at all n locations
taaccatggaacggtatgagataattaaagatattgtgtcagggaactttggtgtggcaaagctggtcaaggaaaaatggagtggtgaattgtatgctatcaagttcattgagagaggcttcaaggttccattttcaaactccatgtatcttttctgttgtcataccttagtcttgtacatatgtactttggattgtcctttgttaatggggttctattgggttttgcagattgatgaacacgtgcaaagagagattataaatcataggtccttgaagcatcccaatatcattagatttaaagaggtaaggaattggagacatttttggtttcaatgagtatagtctcaaagtgtaattatttgccttctcggaagaaaatcattcccttcctttagctacttcttaccaactntgtgaaaatatatatg

SEQ ID NO: 9624 - DNA, 405 bp, Glycine max
tagcttgtgtcacaattcactgtgacagtcaaagtgtcattcacttatcaaatcaccaaatgtaccatgagaggacaaagcacatagatgtgaaactacacttcatcagagatgtgattcaatttgagaaggtgaaggtggagaaggttttaacagaagaaaacacgactgatatgttcacaaagtccctctctagtgtcaagttcaagcactgcctggacttgataaattttgaagatgcctaaagcaaattggtagaagtgcagccctgaatcgcaagatagacactcgttgatttggagtcaaggtggagatttgtggtgtatgactcaaaataaaaaatggcacaagtgagaaggctttaagaggtgctgtcataactgaattcagatataataactgaat

SEQ ID NO: 9625 - DNA, 358 bp, Glycine max
gagcaaattcaaacaacaataactttttactcagatgtctgattgcgtcctgtaatatatctagacgctcgaaattgaatgttgaagctctgagccaatcacacgacaataactttttactcggatgattgattgagtcccgtaatataacaagacgctcaaaattgaatgttgaagctatgagccaattcaaatgacaataactttttactcggatgtctgattgagtcccgaaatatatcgagacgctcgaaattgaatgttgaacctctgagccaattcaaacgacaataactttttactcggatgtctgattgagtcccgtaatatatcgagactgctcgaaatgaatgttgaa

SEQ ID NO: 9626 - DNA, 413 bp, Glycine max
  unsure (1)..(413): unsure at all n locations
agcttcaacattcaaattcgagcgtctcgttatattataggactcattcagacatccgagtaaaaagttattgacgtttgaatttgctcagagcttcaacattcaatttcgagcgtgtcgctatattacgggactatatcagacatccgagtaaaaagttattgtcgtttgaatttgctcagagcttcaacattcaatttcgagcgtctccatatattacgggactcaatcagacatccgagtaaaaagttattgtcgtttgaatttgctcaaagcttcaacattcaaattcgagcgtctcgttatattataggactcagtcagacatccgaganaaaagttattgacgtttgaatttgctcagagcttcaacattcaatttcgagcgtgtcgctatattacnggactatatc

SEQ ID NO: 9627 - DNA, 239 bp, Glycine max
agcttgaaattgaacaacggatgtctctctagaaattccaatgctcataacttttcacatggatgtccgattaaagagcataatatatcgagacgctcgaaatttaacaacggaagctctcgagaaatgcaaatggtcataactttttacacggaagtccgattcgggcgcataatatatcacgacgctcgaaattgaacaatggaacctttcgagaaattcaaatgagataacttttc

SEQ ID NO: 9628 - DNA, 259 bp, Glycine max
agcttgtgcctcttcacgtttggaatatgaatgtagcatatagatccaaagacccttaggtgctttgttgatggtttcttcccgttccaagcttcaattggagtcttgtcttttacagacttagttggacatctattgagtatgtaaatagcagtgtagactgcttcagcccaaaatgtgttaggtagtcccttctccttgagcatcgatctagccatttccataattgtgcgattctttctctcggacactccatttt

SEQ ID NO: 9629 - DNA, 173 bp, Glycine max
caataccccataaatctaacctctaagggttctaagtagtcctaccacaaaatccatagaagtagtgccccacttccactggggtatctctaaaggttgtaacttccccgaaaggttctgatgatctatcttagccttctgacagactatgcatgcatacacaaactcactaa

SEQ ID NO: 9630 - DNA, 197 bp, Glycine max
ttactatgcagataatatccaagaaaaataccttcatctgacttagcatcaaatcttcctaagttatctttgccttattcaatacaaaacatttacaaccaaagatatgaagatgtgagatgtttggttttcttccattgaacaattcatatggagtttctttcaaatgggtcttaattaagtcctatctaaaatct

SEQ ID NO: 9631 - DNA, 417 bp, Glycine max
  unsure (1)..(417): unsure at all n locations
aactaccataagggaaaagagcctagtgtgcttagcgcatgtttagaaacaagccagactaggcaagtaaagttgtgagaaacaagacaagattgttgccaaaggttactcacaatatgaaggtatagactatacataaacctttgctcatgttactcgtctaaggcaatacacattatactctcatttacagctcatacaaaaatgagactatatcaaatagacgtaaaaagtgcattcctcaatggagcaatacaagaagtagtccatgtagaacaaccccatgggtttgagggtaacactnttccacaccatgtatgtaaacttaataaagctttgtatggacttaagcaagctcttagagccttggatgaatgtatcaaatcatttctttaagcaatggatttgacagaggaa

SEQ ID NO: 9632 - DNA, 402 bp, Glycine max
  unsure (1)..(402): unsure at all n locations
agcttatagaatatataataaaagaacattgacaattgaagagtctattcatgtttcctttgatgagtctaatgccattcttccaaggaaggattttttagatgatatttcagattccttagaagatacacatattcatggaaatgactctaaagaaaaagatgaaggaagcaatgaggattctcaagataatggagttagaggaaataatgaacttccaagagaatggaaagcctcaagagatcaccccctcgacaacattattggtgatatatcaaaaggggtaacaactagacattctcttaaagatttatgcaataatatggcttttgtatctatgattaaacctaanaatataaaagaagccataataaatgataactggatcattgtcatgcaaga

SEQ ID NO: 9633 - DNA, 450 bp, Glycine max
tatgttgcaaacatttacaatagacctcctcaacctctttagaaaatcaaccacaacagaacaattatgacctctccagcaacatatacaatcccggatgaggaatcatcctaatctcaaatggtctagccctcaacaacaacaacagcagcctgctccttccttccaaaatgttgttggcccaagcagaccatacattcctccaccaatccaacaacagcaacagccccaaaaacaacaaacagttgaggttcctccgcaaccttccctcgaataacttgtgaggcaaatgactatgcaaaacatgcagtttcaataagagaccagagcctctattcagagcttaactaatcagatgggacaattggctacacagttaaatcaacaaccagtcccaaattctgacaagcttgcttctcaatctgtccagaatcccaaaattctacacat

SEQ ID NO: 9634 - DNA, 392 bp, Glycine max
  unsure (1)..(392): unsure at all n locations
agcttccttgaaaagattcctaaagaagctagagcttagctacacacacctctctaatagctaagctcacctccttgagatgagaagcttgaacttagctacacaccccctataatagctaagctcacccccatgacaaaatacatgaaaatacaaaaaaaagtctgtactacaaagactactcaaaatgcctcgaaatacaaggctaaaaccctatactactattatggccaaaatacaaggcctaaacgaaggaaaaaaaacctattctaatatttacaaagataagcgggctcatacttaacccatgggctcaaaatctaccctaaggctcatgagaaccctanggccttcccttggatctctggcccaatctacttggagtcttctat

SEQ ID NO: 9635 - DNA, 429 bp, Glycine max
agcttaaaaaccaactggtagttgaaacttaactaaaggttatgtttgacaaaactaattggaagcttaaaagcttaaaaactagctagtcaatattttatgtaacacttcaaattctttttccaaaaatttgcttcaaaaactatttaaataataaatattatgaaatgtgtcatttactcttaatttctatttctaagttggcaaagtatctcatcaattttctttttataaattagatgaaataaaataaagtaaaataagtgtgttgcttgaaaaatgcaagttttcacatcacaatattaaatttgtaaataaatgaacttaggtttataatatgatgcctttgccgcaaataaagcaaataaatagtctcacactagaagaaatttggatacaacccacagtgtaaaagtagttaaatgattg

SEQ ID NO: 9636 - DNA, 358 bp, Glycine max
  unsure (1)..(358): unsure at all n locations
agcttgtaggcctttgatcttcttcattattagagtcttttgcttcttgaagatcaatggaagtggaatagagaaggaggaaaggtgattggagatgccacttcaaggagaagatgagtcaagaacaagctcactaccataggaagccatggataagagcttgaaggtaggagaaaatgagtggagggagaggcagagaggggggaacaaaatttatgcctcaaatgaggtcagaactttgaagtctaatttctcaaatgatcaaagttgaaaaaattcacacacaaggcctctatttatagcctaagtgtcacacaaaattggagggaaattngaatttctattncaaattatcttg

SEQ ID NO: 9637 - DNA, 425 bp, Glycine max
  unsure (1)..(425): unsure at all n locations
ctatgctgcanatatntacaatagacctcctaacctatcttcgaaatcaacctcagcagaacatatttgacctctccagcaacagatacaaccctggatgaggaatcaccctaacctcagatggtccagccctcagcaacaacaacagcagcctgctccttccttccaaaatgctgctggcccaagcagaccatacattcctccaccaatccaacaacaacaacaaccccaaaaacagccaacagttgaagcccctccacaaacttccctcgaagaacttgtgaggcaaatgactatgcagaacatgcatgtttagcaagagaccagagtctcaatttagagcttaaccaatcagatgggacaattggctacccaattgaattaacaacagtcccagaattctgacaagttgtcttctcaagctg

SEQ ID NO: 9638 - DNA, 446 bp, Glycine max
  unsure (1)..(446): unsure at all n locations
tggttcatatcattattagattacatattattctcttatttatgattagatactatatagtgatttagtccttattactctttattaaattgagggcgaccctggtgcagcggtaaagttgtgccttggtgacttgttggtcatgggttcgaatccggaaacagcctctttgcatatatgcaagggtaaggctgcgtacaacatccctcccccataccttcgcatagcgaagagcctctgggcaatggggtacgaagttttttttttttactctttattaaattgatcctctataatcaatattaatcctatttgttcattataaataaagacttagtgtggtcatccaacacacacacaacattacagtaaaatacttttatatattaacatctttgagagaaatatcatatcatgtacacttaaanataacagcaatataatga

SEQ ID NO: 9639 - DNA, 357 bp, Glycine max
tggttcgaggtacttacccgtagaagatcgaagaacgatgatgaacgaatgattaacgtcgaataacggttaaaacctgttagtgcttatctctactgactttaaaagataggctaagattttgttaaaacataagcacttatacaatgaaggaaagctggagttgctgcacatgatgtccaacgttatgtcaaggaataagatcgggctgcacaatgcacaaggcaagataaaatgtcaaatgaagaattgaaagtgcaggatccacgatgtcggatacaatgtcctgacatcctgcccgagaatactggagttgctgtacaatgcaagataaaagtcaagtgcagaagtgaagct

SEQ ID NO: 9640 - DNA, 355 bp, Glycine max
  unsure (1)..(355): unsure at all n locations
tcaagatattatttgatgatgccaaagaatttcaaagatctttaaagatgaatttcaaggatgatgaaagcaagatgtcaagcaaagcaaagatctcaaataagaattaagatagactcttagaaaagtttctgaaaaacacaaatgataggccaagtgagtttctatcttaacaaaaacttttccaagcattttactctctggtaatcgattaccagaggttgtaattgattaccagtggccacaaagctttctggaaatgttttcaaagttattttcaaagttttcaaagttgtaatcgattaccaatgctttaaaacagttaaaaatgattntgtaaatatgtaatcgatta

SEQ ID NO: 9641 - DNA, 401 bp, Glycine max
agcttaaagtccattatggatgcataggctaataacattctgattgtttctaatctagcaactagagcacatgtttcctcataatctatcccctcttcttggttatatcctttggcgactaatctagccctatttctaataattattcctcttggaagatcataatttgttttgacttcatcaacttgagagtcttcattgtttatttctccttttcctttatgatattttccaagaatatgtatttcttcttatgattctgaaatatcatctagtatatcctttcttggcaaaatagcattagattcatcaaaagaaacatgaatggattcctcaataatcatagttctttggttatatattctatatgctttactctgcaatgaatatccaagaaagat

SEQ ID NO: 9642 - DNA, 319 bp, Glycine max
  unsure (1)..(319): unsure at all n locations
taacacaaggcatgcgaagtgggtggaattcctagagttattcccttatgttatcaaacataaaaagggaaaaggtaatattgtagccgatgctctttctggcgtcatgcattactttctatgcttgaaacaaaattgattggtcttgaatgtttgaaaagcatgtatgaaaatgatgaaacttttggagaaatttttaaaaattgtgaaaaattttcagaaaatggtttctttagacatgaaggctttcttttcaaagaaaacanaatgtgtgtgcctaaatgttctactagaaatttgctggtttgtgaagcacatg

SEQ ID NO: 9643 - DNA, 389 bp, Glycine max
  unsure (1)..(389): unsure at all n locations
tggcatttattcagctgcaaggtacaagatttaaccatagcataatatgtttctcaactctttaaatatttagctctatgcatatatgattggggtaatttgcaggtattttacttgtgcaaatgtgatgcctggttcacttggttatggagagcaagatgccaagactttcgcatcatgggtatataacactgcttctttcttaaatttgattattccttttgcttcactcaaacatatcagttgctatttaacaaacgggtattatcatcattgttttatctttcttagggtgttgattatcttaagtatgacattngtaacaatggtggaacacagcctattgataggtatgtaaaatagttatattttcacaacactgttatata

SEQ ID NO: 9644 - DNA, 332 bp, Glycine max
cacctatgtctgcaagtcatttgatgttgcaagcaaggtcgatagccagctgaaatagtgatttggcccatgttctcaagtcctcctattcatggtgcatccattgtggctgccattctcaatgaccggttatgagctcaacttctgctacacaaagaaggattagtagctgactatcttatgattctttccccactgctcttttttttctctgatgaatactagtcttgaatggcactgtcacatggtaaagaatatgatggtacttcgatatgtatagaggccattctccaatatatggttgatttaatgggagatcctaatgacattgc

SEQ ID NO: 9645 - DNA, 423 bp, Glycine max
  unsure (1)..(423): unsure at all n locations
agcttgctntntgtgcttttcattgctttaattgttgaataatccttggaaatttgtcttgttaaaactctattggtttagctttcatttcattttttttggtctttggttattgcttgtctctttgtttccttgcttgtgagttgccatatagggaattggaaatgaggattggtgccatatcttaaagaatttgagtcaagaagcaaggggccaaccaccttaagagctattggactaagaagcactccaaattgagtgaaacactaaagagagaatagccaccacaattgaggactnttttctttgtaattttgtaattggcaatttgctntgctttcaaattttgtaacaaaaaggcctttcattggaagtaagttgggagcctctgctangtcaccctactttcatttgtatgtaata

SEQ ID NO: 9646 - DNA, 379 bp, Glycine max
  unsure (1)..(379): unsure at all n locations
agcttactaaaacctttgatcttgttgatagacttggatctatgagaatcatgcttgcctttgttgctcataaaaacataaatcttttacaaaagggtgttaagagtgcctttttaaatggtttcattgaggaggaactctatgtttaagaacctcctggttttgaagatcacactnttctagatcatgtgtttaaacttaaaaatgctatgtatgatttgaaacaagcacctcgtgcatggtatgatagactgagctcttttcttttagaaaatggttgtttcggaggcaaaagtaatactactctttttagaagagaagtgggaatggtttcattatattttaattatgtagatgatatatatttggagtactaatg

SEQ ID NO: 9647 - DNA, 362 bp, Glycine max
  unsure (1)..(362): unsure at all n locations
cctctncacgtctggaatgtgaagagcatatatatccatagaccccttatgtttcttgactatcggcgacagttcaatccagactgatgaaaggtgatggagactccccttctaagagaagatgagttaagagcaagctcaccaccataagaagccatggataagagcctgaaggcaggagaagatgagtggagggagagggaaagaggggaacaaaattttgagagagataagagggagaatgaggtctaaagtttgaagtctaatttctcaaattatcaaagttgcaaaatgcatacacaaggcatttatttatagcctaagtgtcacccaaaattggagggaaattngaatttctattc

SEQ ID NO: 9648 - DNA, 307 bp, Glycine max
agcttttgcaagctggaatcatacatcctatgtttgacagccagtgggtgactgccgtacaggtagtcccgaaaaagaccatcctcacagtgataaagcatgagacggaggagctgattcctactcgggtgcacaataaatggagagtctgcattgactatacgaggctaaagcatgataccaaaaatgaccattatccgatgccatacagtgaccagatgcttgaatgcctggcagggaaatctcacatagctggtccttgatggtttttttggatatatgcttataactattgctcatgaggatc

SEQ ID NO: 9649 - DNA, 365 bp, Glycine max
  unsure (1)..(365): unsure at all n locations
agctntagtgtttagtgtcaagtcttatgttttactgtgtagggtctaatccttagggtttaggatttagggtgtaggggttatggtttagaatttagaggtaatggtttagggtcaagtcttagcgtttagggtttaggttttacggtttagggttgaaataaaattactccagactcatatgcatctaatgaaataaaattacatttagaagttgaaataaatggagtggatcaagccaggttgagtgactttagttatccataagtaaaccttaataaactgaataccatacattacgtgtgaaattcaaatgagaaatatacaacaaaatatttaaacggagacatgcaaatcattcattt

SEQ ID NO: 9650 - DNA, 389 bp, Glycine max
  unsure (1)..(389): unsure at all n locations
gcttgtgcctcttcacgtctggaatatgaatagcatatagatccaaagacccttatgtgctttgctgatggcttcttcccgttccaagcttcaattggagtctgtcttttacagacttagttggacatctgttgagtatgtaaacagcaatgtagactacttcagcccaaaatgtgttaggtagtcccttctccttgagcatcgatctagccatttccataactgtgcgattttttctctcagacactccattttgttgaggagaatatgcgactgtaagttttcgctcaatgccttcatcctcacaaaatctttcanacttgcgagaggtgtactcttttccgtgatcacttcttaatacttttattcattttccactttgatttttc

SEQ ID NO: 9651 - DNA, 379 bp, Glycine max
cctcttgcctgtctctatataaccttttgggcgggtcatatagatgtgtccctctaaatccccatgcaggaatgcaattttaacatctaattgctccaagtgaagattctctgcagctactatactcagaataactctgatggtagtcatctttacaactggagagaagatctctgtgaaatcaattccttgtttctgctgaaaccctttcaccataagtctcgccttgtatcttcttctaccgtcagattcttcctttagcctatagacccacctattctgtaacgttttctttccttttagcaatttagttagagaccacgtcttagtcttatgaagggatgtcatctcatctttcatcgctagctcccacttaata

SEQ ID NO: 9652 - DNA, 406 bp, Glycine max
  unsure (1)..(406): unsure at all n locations
agcttgccatttaaaaaggcattgttattatcaatttgctaaagatcccaatgaaaggaagtgactaaagtcagaatagttctgattcttataggtttcacaactagggaaaatgtttctttgaaatcaaaaccaggttgttgatggaagccttttgctacaagacgtgccttgtacttactgacagacccatctgaattatgcttgactctaaaatcccgcttgcaaccaattggttgcctattaggaggtttaggaaccagttcccatgtattgcttttgagtagtgcaaccatttcttcatccatagcatctttccacttanggatcttaagtgtngttnttgacagtttaggcacaacatgagttaaaagccagggtggttggagtctaggcttgacaattc

SEQ ID NO: 9653 - DNA, 297 bp, Glycine max
agcttgtgcatccaataccctgttgaggatgtcccatatgttcttaaaactggactgattcatttgcttccaaagtttcatggccttgcaggtgaagacccgcacaaacatttgaaagaatttcacattgtctgctccaccatgaaacccccagatgtccaagaggatcacatatttctgaaggcttttcctcactcattagagggagtggcaaaggactggctgtattaccttgctccaaggtccatcacgagctgggatgaccttaagagagtattcttagaaaaaattttccct

SEQ ID NO: 9654 - DNA, 319 bp, Glycine max
agcttcaacattcaatttcgagcgtctctatgtattacgggacttaatcagacatccgagcaaaaagttattgtcgtttgaattagctcagagcatcagaattcaatttcgatcgtctcaatatattacgggactcaatgagacatctgagtaaaaaagttattgccgtttgaatttgttgagagcttcaacattccatttcgagcgtttcgatattttacgggactcaatcagacatccgagtaaaaagttattgtccgttgaatttgctgagagctccaacattcaatttcgagcggtctgatgtttacgggactca

SEQ ID NO: 9655 - DNA, 382 bp, Glycine max
  unsure (1)..(382): unsure at all n locations
agcttctcactcncttgacattcatgggaggaggaagtttctcaatcacatcaatctttgccttgtccacctctattccccttactattccttcttgaaccatgaatgacatttctcccaattgagaactagattggactcttcacatctttgtaatactctttcaagatttgataagcaggcttcaaaagatggcccaaaattagagaaatcatccatganaacttcaatgcatttttccaccatatcagaaaaaatagccatcatacacctctgaaatgtagttagggcattgcatagaccaaaaggcatgcgccgatatacgaatacaccaaaaaggcaggtgaaagtagtactctcttgatcttgggatctacaaaat

SEQ ID NO: 9656 - DNA, 353 bp, Glycine max
  unsure (1)..(353): unsure at all n locations
agcttatgttgcactttcaacttctcgaagctaaatatgtagttgtaggaagttgttatgctcaaagtcttaggatgaagcaacaactagaagactttggagtaaaccttgatcacatttagggattaggcatatagaaataaggcatcattttcttagagatcatgtgttaaaaggttacaactacattgacttcattgatagtaagcatcaactagcagacattttcactaaaccgcttgctagagataggttctttttcattagaaaggaactaggcatattggatgcatctagcatagaataatattttgtttgcatagtgtgtgaatcatatngctattcatatcatt

SEQ ID NO: 9657 - DNA, 347 bp, Glycine max
agcttttgtttactttttttattaaattattattattgactcaaatgtggatttaatatttataaatatatttttatgaatctaattactgtaatatattgatatggtcaagattttacattatcatttacttttttatcgttatataagatgataaaattgtaattttgtaataaaaaaacttattattttaacaccatataactaatgtatagtataatttgttctacgctcataatatatcagaattaacatatactgttatttgatttagtcttctacatatttttattattttcttatccctcgattaagattattttttaacatcatgagaatatattttt

SEQ ID NO: 9658 - DNA, 383 bp, Glycine max
  unsure (1)..(383): unsure at all n locations
cggaccttaagcaccgcggctgcaagctttgtggtacataaaacggtgcttggatagcctgatcgctagctgccatgttctcaatgagttccatcacttcctcgggtgtctttaacttgatctttcctcccgtggatgcgtccagtaattgcttcgattgaggtcgtaatccatcaataaagatgtttaattgtactagctcgctatatccatgagtgggcgttttccttaacaatccgtggaaacgatctaaggcttcgctaagggattcatctagtaattgatggaaagatgagatttccaatttcccttcagctgtcttggattcanggaagtactttntcataaatntctctacaacttctttcccaagtcctaaaggt

SEQ ID NO: 9659 - DNA, 341 bp, Glycine max
  unsure (1)..(341): unsure at all n locations
tgcctataggttggacctcccagaagagtatggagtcagcaccacttttaacatttctgatttaactccttttgcaggtggagctgatattgaggaggaggaactaacagatttgaggtcaaatcctcttcaaggggaagaggatgatgcaatccccctatgaagggaccaatcactagaaccatgagcaagaggctccaagaagattgggctagagctgctgaagaaagccctatggttctcatgaaccttanggtagatttctgagcccatgggccaaggttgggtccaattatctttgtacatattagactaggatgtcattatatttggtcccttga

SEQ ID NO: 9660 - DNA, 447 bp, Glycine max
  unsure (1)..(447): unsure at all n locations
agctntgtggcatagaaagctttattntttgataagtttagatatcctgagaattctgctcatggtcaactcccaagaacagtggatgtaattgcagaagacgaccttgttgattcttgcaagcctggagatcgagtggcaattgtggggatatataaggctcttgcaaggaaaaggtagtgtgaatggagtatttaggtagctccagaaaatatactgacataactcctttgcacttgcttgctttcttgaacagaaacttgattgactgattttcatgtaggactgttctcatagccaacaatgtttctcttctcaacaaagaggataatgcaccaatctacagtgttgaagatgtcaaaaacattaaagagatagctacaagagatgatgcanttgatctgctaagtgattcacttgcaccttctatatatgggcattcttgga

SEQ ID NO: 9661 - DNA, 356 bp, Glycine max
  unsure (1)..(356): unsure at all n locations
ggaactacttcacatggtcattatggggcctatgcaagttgaaagccttggaggaaagaggtatgcctatgttgttgtggatgatttctccagatttacctgngtaaactttatcagagagaaatcagaaacctttgaagtattcaaagagttgagtctaagacttcaaagagagaaagactgtgtcatcaagagaatcaggagtgaccatggcagagaatttgaaaacagcaggttcactgaattctgcacatctgaaggcatcactcatgagttctctgcagccattacaccacaacagaatgggatagttgagaggaaaaacaggaccttgcaagaggctgctcgggtcatgc

SEQ ID NO: 9662 - DNA, 452 bp, Glycine max
agcttcaacattcaatttcgagcgtctcgttatattactggactcaatcagacatccgagtaaaaagttattgtcgattgaattggctcagagcttcaacattcaatttcgagggtctcgatatattgcgggactcaatcagacatccgagtaaaaagttattgtcgtttgaattggctcagagcttcaacattcaatttcgagcgtctcgatatatgacgggactcaatcagacatccgagtaaaaagttattgtcgtttgaattggctcagaggttcaacattcaatttcgagcgtctcgatatactacgggactcaatcagacatccgagtaaaacgttattgtcgtttgaattggctcagaggttcaacattcatattcgagcgtctcgatatattacgggactcaatcagacatccgagtaaaaattattgtcgtttgaattggctc

SEQ ID NO: 9663 - DNA, 427 bp, Glycine max
tgtagggttaaagtctcacgattgtcacgtgctcatgcaataattgttagccgtggctatacgagacatcttgccaaacaaagtcaggttagcgataactcgcctgtgctttttcttccatgctatatgtagcaaagtcattgatccagtcaagtttgatgagatggaaaatgaggccgcaattatattgtgccagttggagatgtattttccccctgctttttttgacatcatgattcacttgattgtgcatctggtcagagaaatcaaatgttgtggtcctatttatctatggtggatgtacccgattaagcgatgcatgaagatcttaaaagggtatacaaagaatatatatcgtccaaaagcatctattgttgagaggtacattgtagaagaagccatttgaatttgttcagaatacttagag

SEQ ID NO: 9664 - DNA, 389 bp, Glycine max
  unsure (1)..(389): unsure at all n locations
tgacactctgaaactaagctatccaatgggtcgccattattntcttcttagtcctttttctttgtatgagcatttctattttgtctcttgtaatggagtaagctagcttatgctattgaaattaatcatttgtcaccattattcttaattctctcttctcttcacaggtacaaggtagcattaggggtggctttggcccttcgttatcttcatgaggatgcggagcagagtgttcttcatagggatattaagtcagctaatgtgttgttggacacggattttagcaccaagcttggcgattntgggatggctaagttggtggatccaaggttgaggactcaaaggacagggctggtggggacttatgggtaccttgccccagaatatat

SEQ ID NO: 9665 - DNA, 457 bp, Glycine max
agcttagctacacacacctctctaatagctaagttttcctccttgagatgagaagctagagcttagctacacaccccctataatagctaagctcacccccatgacaaaaaacatgaaaataccaaaaaaaagtccttactacaaagaatactcaaaatgccccgaaatacaaggctaaaaccctatactactagaatggccaaaatacaaggcccaaacgaaggaaaaagctattctaatatttacaaagaagagtagatccaacctttacccatgggctcaaaaatctaccctaaggttcatgagaatcctagggccttctttagtagctctagcccaagcctcttggagtcttctatccaatacccttggggggtaggattgcatcatcccctccagcttggaaaggatttgacctcaaatcccgaggttcttcatactctaggctccttccctc

SEQ ID NO: 9666 - DNA, 389 bp, Glycine max
  unsure (1)..(389): unsure at all n locations
gagcacttnttggtcgatattgtatctcttcactttctccttgctagatcaatctaatatgcctagttcatttctaatgaaaaagaacctatctctagcaagtggtttagtgaaaagtctgcttgttgatgctcactatctatgaactcaatgcaacaatcaccttttaacacatgatctctaagaaaatgatgcattatttctatatgttcagtccaataatgcatgccagaatttttagttagattgatcacacttgtgttgtcacattttagaggaatgtgatcaaggtttactccaaagtcttcaacttgttgcttcatccagagattttgagcacaacaacttcctacaactatatattaagcttcggtagtagaagtgctaca

SEQ ID NO: 9667 - DNA, 427 bp, Glycine max
  unsure (1)..(427): unsure at all n locations
gacactataaaactcagctggaagcaacacagcttataagagccacctttttcctcgcttaagagttctacggggggggagttcacagtacccttataatcttgggtggagttaagcacctcaaattaatgtgagcaccatattaattatcaactggtgaattcaattaagttcttaattatattccaacaacaagatcgcagaaattaacctgaaagaaagaggtttgagagggatccagccctgtgttgccaggaggaacaacaacatcaataggtgcaaccaaccctacacgagcaggagctaccaactgtatagaaaatntggataacaacatccaaaagtgaatatataggaagctcacaacttaattaaaggtaactttctctcattcaacatatatatacactacactcaatcatagcat

SEQ ID NO: 9668 - DNA, 423 bp, Glycine max
  unsure (1)..(423): unsure at all n locations
gggatttcctttagtagggaatctatccttcctatgatgtatccaaaccaagtcaccctcattaagaactagctcttttcttcctctattgcctttagttgaatacacctttgtttggttctctatttggttcttaaccctctcatgcatcttctttacaaattctgacctagattccccttctttatgtataaaaaaagtgtccagtgggaggggaatgaggtctaacggtgttaggggattgaacccatagacaacctcaaaaggggactgcttggtggttctatgaacccccctgttgtaggcaaattctacatgagaaagatactcatcccaagacttatggttgcctttcagaagagcccttanaagggtggataaagacctattcactacctctgtttgcccatcagtttgtggatg

SEQ ID NO: 9669 - DNA, 457 bp, Glycine max
  unsure (1)..(457): unsure at all n locations
agcttgtgcattcaatatcctaatgagggtgttctttatgttttcaagactggactaatacatttgctgcccaagtttcatggtcttgcaagtgaagatcctcataagcatcttaaggagttccatattgtctgttccaccatgaagacccctgatgtccaggaagatcatatctttctaaaggcttttcctcattctctggaggaagtggcaaaagattggttgtactaccttgctcccaggtccattaccaactgggattacctgaagagggtgttcttggagaaattcttccctgcatctaggaccactgcaatcaaaaaatacattttatgcatcaggcaacttagtggagagagcttgtatgagtactgngaaagattcaagatattatgtgcaagctgtcctcaccaccaaatttctgagcagctccttctgcaatatttctatgagggac

SEQ ID NO: 9670 - DNA, 424 bp, Glycine max
tgaaattgaacaacggaagctcttgagaaactcaaatgtgttcatctcgtcacacggaagtccgattcaagcgcataatatatcgagatgctcgaaattgaacaacgaatgctctcgtgaaattcaaatggtcataacttgtcacacggaagtccgattcaggtgcataatatatcgagacactcgaaattgaacaaccaaagctctcgagaaattcaaatggtcataacttttcacacggaagtctgattcaggcacataatatatcgagacgctcgaaattgaacaacgtatggtgtcgagaaattcaaatgggcataacttgtcacacggatgtccgattcaagcacataatatatccagatgctcgaaattgaacatcggaagctctcgagaaattccaatggtcataacatttcacacg

SEQ ID NO: 9671 - DNA, 393 bp, Glycine max
  unsure (1)..(393): unsure at all n locations
agcttgaaattgaacaacggaagctgncgatatatttatatgttcataacttatgacacaaaagtccgattcaggcgcataatatatcgagacgctcgaaattgaacaacgaaagctctcgaggaattcaaatggtcatatcttgtcacacggaagtccgattcaggcgcataatatatcgagacgctcgaaattgaacaacggaagctctcgagaaattcaaatggtcgtaacttgtcacacggaagtccggttcaggcgcataatatatcgagacgctctaaattgaacatcggatgctctcgagaaatgcaaatggtcataacttgtcacacggaagcccgattctggcgcataatatatcgaaacgctggaaattgaacaacggaagct

SEQ ID NO: 9672 - DNA, 448 bp, Glycine max
  unsure (1)..(448): unsure at all n locations
agcttacttgtatgatggctactgttgaagatantggnacaatcgaggctttctataatgcaaatctgggaatcaccaaaaagcctgtgcctgacttcaggtaaattgcctatttgatatatccatcatattgacaaatgtatttcaatgatagtgttttgtggttctgatgtttatgtgttcatgcgttttggcatattgattgcagtttctatgatcgttcatctccaatctacacccaaccacgatatttgcctccctctaagatgcttgatgctgatgtcactgatagtgttattggtgaaggatgtgtgattaaggtaagcatttcagaaccttcacattctactgatctgctctgtacatgagaattatacaattcttaacaaagatgtcaaatataatgagattaatttatttataggaaactaaccttgtattccatact

SEQ ID NO: 9673 - DNA, 429 bp, Glycine max
agcttatctcatttcattttatatcaactattgtacacaaggaattacatgataaaatgctgagagagtagcataaaatggagccaccttgctaactcatgagacatcccatttgtttgtctcttgaccaaaacctattccaaaggttgaaaattgggccaaaacctgttagacaaatgacctcagataacttaagaaggggggttgaattaagatattgcaaactatttccccaattaaaattctattttaatttcaatgcaagttacaagttcccttaaaaatgaactcttaaataatgattcaaataaaacaatctgaatataaatgcaaagcaataagaaataaaatagtttaagggaagagaaagtgcaaactcagatttatactggttcggccacacccttgtgcctatgtccagtccccaag

SEQ ID NO: 9674 - DNA, 417 bp, Glycine max
tgacgttccaattgctggaacacagagctgccactctcctcttgattatgatgtagaatctacagccaacgacttagaataatggggtcattccgaaacatctcctgtagttcttcaagaaggtgagaaattagaagatttcagtgcaaatgaatctcatttgactgttgaacctgatcctccacagctcaattctggaatcaatcagagaccaaaaaggatcactatacctcctgaaagatacggatttgaagacatggctgcctatgcattacatgcagttgaagaaatagattcaaatgaaccaaccacttaccaagaagctatcaatcatcctgaagctgagaattggttgttagctatgaaagacgaaatggaatctttgtataagaatcagacctggaaacttgttgaact

SEQ ID NO: 9675 - DNA, 446 bp, Glycine max
  unsure (1)..(446): unsure at all n locations
agctntctctggtctacaagagctctttctttctcatacacttcttctgcaaatggaaacacgttctacaaactcccaggtggttgtctcaaaccaggagagaatggtaagatcttgcttatttttttctaaatataatagtctgaaaataacaactcatgattatcttaatgtacatttttgtgggcttgaagagaaagttgactagcaagcttggtgctaattcatcagcttttgtgcctaactggcaggtattattactttttattgttaaatttggcagttggtgtctatttgtgtctttattgttgtcatttgcatgtatccttggaaaactgcagataggtgagtatgtagaaatctggtgaaggctcttcttttattgaagtacactgctaagccacaatacaagtgatcgaggccgtacccgaatcatataaacatga

SEQ ID NO: 9676 - DNA, 453 bp, Glycine max
  unsure (1)..(453): unsure at all n locations
agctnttatccatggcctcctatggtggttagcttcttctagactcatcttctccttgaagtggcatctcgtctctctcttccttctccattccgctgccattcatcttccaggaagcaaaggaatccattgatgaagaagatcctaggcctacaagctcaaatggagcttacatcatgtggtatcaagagcatcttcatctaggtgatgttcatttgcttcctctatctttttgttcggtgaattctctttagttccttgttcttcatcttattctccatgtatatcctccattgtcttgtggtttggtgctgtttagagtatattcaaaaaaataaaccgattaaatcttagatctacatttgttcttgcatttctctggttcanattttgtagatctactcttgaatcttggttttgtgttgattttaggttctatcaattntcattcat

SEQ ID NO: 9677 - DNA, 388 bp, Glycine max
  unsure (1)..(388): unsure at all n locations
tgtaatcgattacacacatactgtaatcgattaccttactttgtttttagaanacattctcaacagtctcatctttttatctgtttcttaaatggccatcaaaggcttatatatatgtgacttgagacacaaatttgaaaagagttttcaagaacaaagaggtcttatcctcttaaaaagcaaaatagtttctatcctcttacaaattccttggccaatacacttgtgattcaataaggaattattngagtgctcaaattgttcaatctatctctttcaagagagatttcttctcctcttcttctttattctgaacagggattaagagaccgacggtctcttgttgtgaaaagaattctaaacaacaaggaatgattgtccttgtgtg

SEQ ID NO: 9678 - DNA, 406 bp, Glycine max
  unsure (1)..(406): unsure at all n locations
ngtctanaggtgtgtttgattcccatatcttctactttggcaaaacaaaatcaaaattgaacttctcttgttcttcaggcttggcagcagtatcaccattcctatcattaataattgattttgggtctttaacggtttggacaacctcagtgatagaacccaaagctttctccttttgacgagctggtaaatgatattaaatgattacttttaaagtcagaatatcacatattactaataatggcttaacatattaccatcataacgaattaatgacttangtaatccatttggtcgtaatgccttttcattcacgccttctgtatacttgctcacttcaacctgcattctgtagtaatagatgtattagcagtaagcatatttcagctgttacttaatactaaaa

SEQ ID NO: 9679 - DNA, 417 bp, Glycine max
agctctgagcaacttcaaacaacaataacgttttttctgatgtctgatagagacccgtaatatatccagacgctcgaaattgaataccgaagctctgagcaaattcaaacgacaataagtttttactcggatgttcgattgagtcccgtaatatatcgaaacgctcgaaattgaagaccgaatctctgagcaaattcaaacgacaataactttttactcggatgtctgattgagtcccgcaatatatcgaaacgctcgatattgaatgtcgtagctctgagcaaatacaaacgacaataactttctactccgatgtctgactgactcgcgtgatatattgagacactcaagattgattagcgaagctctgagacaattcagatgacaataacattttactcggatgtctgagtgaga

SEQ ID NO: 9680 - DNA, 371 bp, Glycine max
taagctccttcaactgtacaaggctcttaatatttgtagtttattcttgtggaaccttcacccgacaaagacactgacaaaaacttatcttctcctttttggacaaagtatgacaagctgggggcaaataaatattcttcccatctgaccttggatgcaactgtgatcatatccccatctcagctagatcatgacgggtattcaagccatccttcgtcttgccttgaatgttaaggagcgtaccaatgacactgtcacatacattattctccacatgcataacatcaatacaatgtctaacgtctagattagaccagtacggaagatcaaagaaaatggacttcttcttccatatgcaagtcttactttta

SEQ ID NO: 9681 - DNA, 454 bp, Glycine max
  unsure (1)..(454): unsure at all n locations
agcttgtcttcaacaaataaatcattatctttttgtgatcttcaaagcccaactccagcttctttctccccatatccactatgcagcttgcagttagcatgaatggccttcccaatattacaggaatgtcattatcttcacagatatccattaccacaaagtctgcctgttttactctgaccagcacatcttcaattactccatatggtctggtaatggagcggtcaacaagttgtaaagtcatcctagtgggcatgatctcctactctcccaaccttctgcacatggagagtggcattaagttaatactggctcccaggtcaataagagcctttcccacagtgacttctccaattgaataaggaatggttacactcccagggtctatacgctngggtggaaggaccttttgaatcacaacactacaatttccatccacaacaatgttttcctg

SEQ ID NO: 9682 - DNA, 363 bp, Glycine max
  unsure (1)..(363): unsure at all n locations
agcttaataagtccatctatgtattgaaactatcctcctgctagtggtatttaaaatttcatgaggttatttcttcattcagctttgaagagaatgtcatggatcactgtatatactagaaggtcagtgggagtaagatttgtttccttgtattatacatagatgatattctacttgcgactaatgataagggtatgctatatgaggtgaaacaatttctctcaaagaactttgatatgaaggatatgggagaggcatcttatgtcataggcataaagatccatagagaaagatctcgaggcattntaggcttgtctcaagaaacctatatcaacaaagttttagagagatttaacatgaaag

SEQ ID NO: 9683 - DNA, 451 bp, Glycine max
agctcaataaatctatgtatgatttaaaacttgccttacttcagtggtaccttaagtttcatgggataatttcttcatttggatttgatgaaaaccacatggatcaatgcatataccacaaggtcagtgggagtaaaatatgttatcttgttttatatgtagatgatattttacttgcaaccaatgatcaaggtttgctacatgaggtgaaacaatttctctctaagaatatggacatgaaggatatgggtgatgcatcttatgtcatcggcattaagattcatagagatagacctcgaggtattttaggtctatcataagagacctatattaacaaaactttatagtgaatttggatgaaaattgttcaccaagtgttgctcccatcgtgaagggtgatagatttaatttgaaccaatgcccataacatgacttttgaagggaacagatg

SEQ ID NO: 9684 - DNA, 442 bp, Glycine max
cctgcggcatgcaagcttgaaattgaacaacggaagctctcgagaatatataatggttataactcagcacacggacgtgcgattcaggcgcataaaatatcgagacgctcgaaatagaacaacgaatgctcttgagaaattcaaatggtcataacttgtcacacggatgtccgattcatctacataatatatccagacggtcgaaattgaacatcggaagctctcgacaaattgcaatggtcataacttttcacaaggaagcccgattctagcgcatcacgtatcgagatgctctgaattgaaaaccggaagctctcaagaaattgaaatggtcataacttgtcacacggaagtccgattcagacgcataatatatcaagatgctcgaaattgaacaacgaatgctctcgagaaattcatatggacataacttgtcacacgg

SEQ ID NO: 9685 - DNA, 416 bp, Glycine max
  unsure (1)..(416): unsure at all n locations
gcataaatgggacgttgattntgtcaagagacggagcnctcaatatgaagacgttggngttattagaatttagccttttcaaaccgcccagctaatgaatgatgatgatatcagttctcaagctgaaaacaacggggtaaagcaaacaaaaatgaatatatatatatagagagagagagagagagagagagagagattaataaaaatcaattatattttcaaaaacactttttttaccatattaaaatacaaatagacttgattaattataaaattagttgaaaatatttnttatattcttgaaaataattaagattatgtntgattaaattatttgttatgggaatatntattatagttgctaaaatatttttatcattaccttaaggatgttatntgtttttttatctttttat

SEQ ID NO: 9686 - DNA, 451 bp, Glycine max
  unsure (1)..(451): unsure at all n locations
ggatcttaagcaccgcggctgcagctgtgtagcgatattctgctgggataagatnttcgcacctattacccagatgtcggtgcagcttgataatagtttcctcctcttccttggtgtagtttcctcttttgaggtttggccttaggtaattcagccaccttagtctgcaactctttccacatctcgcaagacctaacaaattaataacaacaacaacaaagtaaaaccaattacaatggattcatatatgatttagctataagctgtgcatgtatataattaaatattgaatatatggttcctacaaattcatgtagaagttaaaccaaaccttgaaaacagagaagaagaaaaattgaaagccacattggcgactatattgatggtacatactctcacatacttaatttgtttctgaccaaactatttgataagttccattcccacctga

SEQ ID NO: 9687 - DNA, 372 bp, Glycine max
  unsure (1)..(372): unsure at all n locations
agcttaagctccttcaactgctcatggctcttaatatttgaagagtatccttgtggaaccttcacccgacgaagacactgacaaaaacttatcttcttctttttcgaccaagtatgacaagctgggggaaagtaaattttcttccgatcagaccttggatgcaattgtgatcgtatccccatctcagttagatcttgacgggtattcaagccatccttcgtcttgccttgaatgttaaggagcgtcccaatcacattgtcacatacatttttctccacatgcataacatcaatacaatgtctaacgtatagatcagaccagtacagaagatcanagaaaatggacctcttctccatatggcagtctacttta

SEQ ID NO: 9688 - DNA, 608 bp, Glycine max
agcttagtgtttttttttgtagaatgatgttcttgtgcttttcctttttgaatgcacgactttatctcttttctctactagttcgtcaattttcttcgattctttgatgccctgtttatagtaagaggtttataaatatggagagaatctttagtattgaaaatataaccattgttgatcttgattctttcttccctctattgacagttgttgtgtatttttgattgattctagataaatacattctaaaatagtccttcataactcaacatagccgttagacatatataaggaattctaaaatagacttgtagatacattccatttaatggtatcatttaatattgcataaactgatttattctagaaagtgcatatttaaatatgcatttggatggatttggcaagtacttctcatcaatcatgtttaacatatatttaatcaaatagttaacacaaatttatatatttattttcatcaaaatcttaagagatgtgtggatcatcctatgatggattggctagtttctaatagtgaacacatcactatggaaaatattgttaaaaagctcaaccaaaaagaatgaaaaatgttatatatgtacatg

SEQ ID NO: 9689 - DNA, 644 bp, Glycine max
agcttgcaaagttagaaatatcttgtgtgattccgatgttgtgaagtcaaggaaagatttttctattgccatgatgaggtcatctatagttttaggagcctctttgtgttgtaatgactgaatggcattaaagaagccaagatctaagacattaaaatcaagcaagtttgggggttgagaaaccaatcgaatgtcaaaaccgccttcactagcagcttaatggaagtcgttgtcatcttcatcaatgtgacatggagcattgtcttgttgtatgaaaatagtttctcctctatcccctattggccattttgctttgattgcagacaacacatgatgaataagaaaatgtttgcttacttgtttatttattgaagatattggttttgtttccatagtccctgtatctctgtttgcactccttctctttgccggttcctttgtaacaaatggaaaaataccaatcttgccatctaaagtctcattgccattagagttgaatctttgtctagccatgacaataagaacataaccttgcaaatgaaattcttgcttctacatgttcgatgtggctcctcctccccagcagccaagtaataattcatagagttcttggtcatataaaaccatctttcatcaatgaatac

SEQ ID NO: 9690 - DNA, 539 bp, Glycine max
  unsure (1)..(539): unsure at all n locations
ccttcaaacctcccacaaaggagaagacagagtaaagattgtgtgtctccaaactttactaggtgagtttgaatccttacatatgaaagagttagagtccattttcaattatttctcaagaattctcgttgtttcaaatcaactaaaaagaaatggtgagaagttagaagatgtaaaaattatggagaatatactacgcttgttagatcccaaatttgaacacattgttgtgacaatcgaggaaaccaaagatttagaaaccatgacgataaaacaacttcaaggaccactacaagcttatgaggagaagcataagaagatgcaagaagcataagaggaagcaagagatcactgagcaactcttgaagatgcaattgaaggagaatgaagaaagtcaaggaaatgaaagaagtcaacaaggtcgaggtagagctcnaagtcgcagtcgaggacaagttggatgtggcaacaatagacganggttcaaattcatcagcaacagttacaagaaagggaaaagctcaacangagaacgtgga

SEQ ID NO: 9691 - DNA, 595 bp, Glycine max
  unsure (1)..(595): unsure at all n locations
agcttaagcacctttttcctcatttcttccttcattgatgggttgagccttctctggggctgtctgactggtctatagtcttcttccatcattatcttgtgcatgtagtaggcagggttgattcctttaagatatgatatgtgccaccaaattgcttccctgtgtctcttgaggacctctaccaacccgttctcttcctctgccgttagcttactgttgatcaccacaggcttggtctcgttcttttccaagaacatatactttagatggttgggtaggatcttcagctctaccttggtcttctcgaatggactcaagcttttcaattcttcaaaacttgtcacccctgcaggaatgttttcctcatgatctaagtcttccaagaaagcccttagatcccttttcctcatcactggttagacaatctacaacattgataaaaactttctccaatgaattttgtgtgggagagcaccaacgtcttttttatcgacctcctccaccttgaagcaccttctatcttcccctangtatttaattgcttcgaaaggttgaagtttaccttttggtcgtcgacactcattttcagattacc

SEQ ID NO: 9692 - DNA, 493 bp, Glycine max
ttgatgcaacatttggagaggttaatgaaacaacgattatgatgttctccatgagaggttggatcaaatggagaatatagatctaatggagaaaaaagggagaaaaaaaggaatgatagtggtcctaagacaaaaccgaattgatggtattaaactcaacattcctccatttaaaggaaagaatgatccggaggcctacgttgagtgggagatgaaaatagagcatgttttctcatgcaacaactatgaggaggaccagaaggtgaagcttgccgccacggagttttccgactatgctcttgtgtggtggaacaagctacaaaaggagagagcaagaaatgaagagccaatggttgatacatggacggagatgaaaaagatcatgaggaagcggtatgttccggctagttactcaagggacttgaaattcaagctccaaaaactaacccaaggcaacaaggtggttgaggagtatttcaaggaaatggatgtg

SEQ ID NO: 9693 - DNA, 505 bp, Glycine max
agcttgttgtcccttaggattctcacttatgaatcttttagtactaaaaacaaactcaatttagaaggagacgacaatgcacctgtgaatagaggaaggtgccaagaattgcaatggcagcaccaagagcattgatgggctgaacaggcgtgtgaaagataaggatggaagagacaatgaccgaaatcctcttcattgtgtttccaatgctgaatgttaagggagaaatctgatcaagagacatgtatgagacttgattgtacaagtggtagaagacactctgggcagctacccacctgtaaacatcaaaatccattagttaacaacattttataaagggagacataaggttgggtgggtggttaaggaaaaatgaaaagaaaaaaagactgaatttactcctccctgttaatgaaaattaacaaaactaacatctcacatctgccaataataaaattcatatagaggatacactatagtaatttggccagcaccatgaaataaa

SEQ ID NO: 9694 - DNA, 537 bp, Glycine max
agcttaataaatctatgtttgatttaatacaagcctcacgtcagtggtaccttaagtttcatgggataatttcttcatttggttttgatgaaaaccacatggatcaatgcatataccacaaggtcagtgggagtaaaatatgttttcttgttttatatgtagatgatattttacttgcaaccaatgatcaaggtttgctacatgaggtgaaacaatttctctctaagaatttggacatgaaggatatgggtgatgcatcttatgtcatcggcattaagattcatagagatagacctcgaggtattttaggtctatcataggaaacctatattaacaaaattttatagtgattttggatgaaaattgttcaccaagtgttgctcccatcgtgaagggtgatagatttaatttgaaccaatgcccacaaaatgactttgaaagggaacagatgaaaaaaattccttatgcttcagttgttggaagcctcatgtatgctcaagtgtgcataaggcctaacattacttttgcagcttgaat

SEQ ID NO: 9695 - DNA, 559 bp, Glycine max
tatactctacttccatcataattttatgcattctatactagtggctaattcctttaaggtctaaaatatgccatccaatagcagccatgtgtttcttgagaacttcaaccaatcagaactcttcaccagaggataaggtattactaatcaccaccgactttgcttcattctcttccaagaatacatacttcaaatgcgctagcaggactttcaagtctaccttgggtttctctattgtgggattcttctttagctcttcaaagacacattcccctaaaggaattacctttagtttatctaggacctccaaataggccttaagatctctctcctcctcttttgtgagacaatcaatagcattcatcaatgccttctcaagtggagagtgagaggccatgttttgcacccccatattagcttttgctcaattgtttccactttgaaacacgccttgtgatcattgggatattttatttcttcacatgaattgaagggactttttgatcatcaacactcatttctaagttaccattgcccattgtaactacacacttaactg

SEQ ID NO: 9696 - DNA, 365 bp, Glycine max
tcgtttcgccaccatttgtcacccacaaatttagtgttctgtagaggtagtgaatagatatctatccaaattgttaagggctctcctaaaaggcaatcacaagtcttgggtgttggacaagtgacctcaataacttaagaaatgggatgaatttaagttaaaaaatttcttatttaatggactcttaaatcccttttaaatctattttattagaatattggagatgaagatgaaaattatatcaacagaatacttcaagtgtgcaagataaataaaatatgcaagataaagtaatcaagatagggaagagagaaatgtaaacttagtttatcctggtttgaccacttcctgtgcctacatccagt

SEQ ID NO: 9697 - DNA, 506 bp, Glycine max
agcttctgtccctgagaaactgggtttctgaagacttatggagtgaagattgctgaaaaccctagccttgcaacaagtcctagggaagtagacacggagatggacaagaaaatccgcggtattgtgagtagcattctgaaagatgcttctgtgcctgatgctgagaaagatgttccaacatcttccaccccagatgtttctgtgcctgatgtcaataaagatgttccaacatcctccgctccaaatgctgaagccctcccttcacccagtgaagaggaatcaacagaagaagaggatcaagcctcagaggagacccctgcaccaagggcaccagaacctgctccaggtaacctcattgacttggaagaagtcgaatctgatgaagaacccattgccaacaggttggcacctggcattgcaaaaaggttacaaagccgaaagggaaaaacccccatcaagaggtctggacgaatcaagactatgggccagaagaagagcactccagt

SEQ ID NO: 9698 - DNA, 534 bp, Glycine max
  unsure (1)..(534): unsure at all n locations
gtggagtgcctgacaaagaggcactggttctttatgttgcttcatgttggaatacgaatgcaagcactgcttgtgacaatcatatataataaagctttgaacctatcatgccaatcaaagcaaggacagaccacaggggaaataatcaacttcatgagtgttgatgcagaaagagttggtgagttcagttggcacctacatgatctgtggttagtagtcctacaggttttagtaggcttgttggttttatataaaaatcttgggcttgcttcaattgctggttttgttgcaattctcattgtaatgtgggcaaacattcccttgggttcaacccaagagaagtttcacaacaagttgatggagtcaagagatgaaagaatgaaagcgacatctgagattttgaggaacatgaggattctcaaactgcaaggatgggaaatgaagtttttgtctaagataactgaactcagaaagatcgaacaaggctgtntaaaaaaagttatatacactntagtcttgatcatatctatattt

SEQ ID NO: 9699 - DNA, 591 bp, Glycine max
  unsure (1)..(591): unsure at all n locations
tgcttctcccattttgtgagctaaatgctgatttcctgttttgtttaaaaagataaggcataatcccttcttttatttcatctatttaatgtttcaagaaattctttcataccttcaaaattgacgtattattttttttctaaatttaccggtatcaataaggggaaataaaagtatttcaagaaaggacaactcagttaaataaacttattgtttaattaggacaatttaataaaaaataataaattatttttaattcttaactaatgttcaagggatacaagattacaattaaaaaatttatatttttttaccgagaaaaaggcattatatttattaatccttctttcagttttatgaattgcttaaaaaaattccattcattaactaattcatccgttgcttaattataaattatntatttttaaaaaattacttttttagtaataaatgatagaagatatattattttaattatttcaataaaacaatatagtgaaataaacattttttttacttataatcaaatttatttaataattttaattagatcttataaaataaacctttaaaagaataataaaattgcat

SEQ ID NO: 9700 - DNA, 542 bp, Glycine max
  unsure (1)..(542): unsure at all n locations
agcttcttctagactcatcttctccttttagtggcgtatcctctctctcttccttctctattcgctgccattcatcttccaagaagcaaaggaattcattgatgaagaagatcttaggcctacaaactctaatggagctacaccaatactaatgccacctttctttctttgatgtctccccatttagtgttgcctaagtcttgggtgctgcccgaggtggatgtggtggatctcttgtcagaagatgaggtagaggacctagaggaggacacttcgtatgaataagacctcatcacaaagcccggcttatggaggaagattcttcaaaggattcatctgaggattctcgttagaagggctttctccatccaactntattgaattctttttgtggatacaattgactttgggcttgggtaaggatgactactctaagttttaggattttccccttatatgtattttgggacaagtagacctatgctcagaccttttgtaattattaatcatgactacttacattattggtttgggttggatat

SEQ ID NO: 9701 - DNA, 668 bp, Glycine max
  unsure (1)..(668): unsure at all n locations
agcttcatacaactttgtgcgattttttcctgttcgttcggacctattgtttcttctaatcctcctttagaaatgaaatgaaaatgtcttaaatctcattattggttatgagaaattctatctgtatgctttcattcctccttcgtcgcattattttttgagaaaaaaaaatgtgtgttgttctgatcgtattgggggtttgtttctttaccaagcacgttcgcattttagtgaaagctttaaggaacttcaatgtcttctgtcttttacttttcaagacttcaatgtctgaattctttacattttcaagacttcaatgtcttcagtctttacttttcaagacttcaatgtcttcatgtcttcagtctttacattttcaagacttcaatatctttagtctttacgtttcaagacttcaatgtcttcagtcttttatgttcctaaagacttaatgtctcctatttttgntatgcaagcctacaacatcttttgcttaatacttttgatacttccgtattgatatccttttgttctttttataaggttcacttccttggctttcgctaagttccaacccgatagcatgatcgcttgaatgaaactagtggccttatctttacttaccttttgattttcaataaaagataagtaaaaaaggggcactatca

SEQ ID NO: 9702 - DNA, 424 bp, Glycine max
  unsure (1)..(424): unsure at all n locations
aaaagnactaccggatcngtatgttattatgggtgattgagttcctacatggagtcctaagaagcaaggcattgtgacactttctacttgtgaagccgagtatgtagctgcaacttcttgcacatgtcatgccatttggctaataagattgttggaggaacttcagctgttgcaaaaggaaagcacaaagatctatgttgataatatatctacacaagagcttgccaagaatccggtgttccatgaacgaagtatgcatatagatacaaggtatctttccattatagagtgccttaccaagaaagaataaaaatcgactcatgtgaaaacccaagatcaagttgcggatattttcaccaagcctctcaaaattaagatcttttaaaattgccagcaaaacttggtgtgcagaaaaattttccaa

SEQ ID NO: 9703 - DNA, 588 bp, Glycine max
tcaagcttttagtcttcaagaacataatataaagaaagttcgttttttctattgaggcagaaaggaagatactggatcatagagtgaatgaactgcaggatagacaagaaaccgcagctgaattagaggagaaaatgagatctcaaactggtttactggctgccaaagatcaaggtgagctttgtctgattccttctcttttgagaagtgatcttgtaatattttttatggatgagaaacttacatttctggaacttaatggtttattgcagaaatcgaagcactaatgcatgcacttgatgaggaagaaacgcagatggaagaattaacaaataagattgtggatcttgaaacggtagttcaacaaaagaatcaagagattgagaaccttggatctttccgtggtaaggttatgaaaaagctttccataactgttagtaagtttgatgagcttcaccacctgtctgcaagtctcctttctgaggttgaaaagctccaatcccagttgctagaaagagatactgaaatttcttttttgaggcaagaagttactagatgcacctatgatgctcttcttgatcacaaatg

SEQ ID NO: 9704 - DNA, 573 bp, Glycine max
  unsure (1)..(573): unsure at all n locations
ttgagccaattcagacaacaataactttttactcgttgtcttatngagtcccgtaatatatcgagacgctcgaaattgaatgttgaacctctgagcaaactcaaacgacaataactttttactcggatgtctgattgagtcccgtcatatatcgagacgctcgaaattgaatgttgaacctcatagcgaattcaaaccacaataactttatactcggatgtctgattgagtcccgtaatatatcgagacgctcgaagttgaatgtttaagctttcagccatttcaaacgataataactttttactcggatatctgattgagtcccgtaatataacgagacgctcgaaattgaatgttgaagctctgaactagttcaagcgacaataactttttactccgatgtctgattgagtcccggaatatatcgatacgctcgaaattgaatgttgaatctctgagccaattcaaacgacaataaccttttactcggatgtctgattgagtcccgaaaatatcgaaaccctcgaaaatgaatgttgaatctttgaaccaattcaaacgaaccaaaacttt

SEQ ID NO: 9705 - DNA, 470 bp, Glycine max
gcttcacgttcattttcagcgtctttatagtttcgggactcaatcagacatccgagaaaaaagttattgtcgtttgaattagctcagaagttcaacattcaatttcgagcgtctcgatatgttacgggactcaatcagacatccgagtaaaaagtcattgtcgtttgaattggctcagagcttcaacattcaatttcgagcgtctcgatatattacgagcctcaatcaaacatccgagtaaaaatttatggtcgtttgtattggctccgagcttcaacgttcattttcgagcgtctcgatatgttacgggactcaatcagacatccgagaaaaaagttattgtcgtttgaattggctcagagattcaacattcaatttcgagcgtctcgatatgttacgggactcaatcagacctccgaataaaaaagtaattgtcgtttgaattggctcagaacctcaacattcaattt

SEQ ID NO: 9706 - DNA, 551 bp, Glycine max
tgtgggattttgtgatagtgattttgccggagatgctattatagaaaaagtactaccggatttgtattttttatgggtgattgtgtttttacatggagttctaagaagcaaggcattgtgacactttctacttgtgaagccgagtatgtagctgcaacttcttgcacatgtcatgccatttggctaagaagattgttggaggaacttcagttgttgcaaaaggaaagcacaaagatctatgttgataatagatctacacaagagcttgccaagaatccggtgttccatgaacgaagtaagcatatagatacaaggtattatttcattagagagtgcattacaaagaaagaagtagaattgactcatgtgaaaactcaagatcaagttgcggatattttcaccaagcctctcaaatttgaagattttcgaagattgcgagcaagacttggtgtgcagaagaattttccaattaagggaggatgttagatattaattagaccaatattaataacaagttttatgagccttaaattgtggaagatgaaagttgt

SEQ ID NO: 9707 - DNA, 583 bp, Glycine max
agcttggatttccttttagtagggaatctatcttttcttagatggagccaaacccagtcaccctcattaagaactagctcttttcttcctttattgcctttagttgaatacacctttgtttgattctctatttggttcttaacccactcatgcaacttctttacaaacattgacctagattccccttctttatgtataaaagaagtgtctagtgggagggggaatgaggtctaacggttttagcggattgaacccatagacaacctcaaaaggtgactgcttggtggttttatgaacccccctgttttagaaaaattctacatgaggaagatactcatcccaagacttatggttgccattcagaagagcccttaaaagggtggataaagacctattcactacctttgtttgcccatcaatttgtggttaagaagtggtagtgaaaagaaagttagttcctagcttatcccataaggttttccaaaagtggctaaggaacttggcatctctatctgacacaatggtccaaggcaaaccatggagtctcacaacttccctaaaaaaaagtttgagatgtgggaag

SEQ ID NO: 9708 - DNA, 559 bp, Glycine max
agcttgctactacaatctccccctttttgatgatgacaactctgaaatcaagaaacacatacacacactttttcctagtcgatcactcacttaattttccattctccccttttgtttttgagtttatgcttcacttgaaattaagttaattacttatgtgagttcttgatttaatccatatttctctccccctttggcatcaataaaaagccaaagtgcataacaagtataaaacatacatacactattaatcattcacaagacattcattgaagaatataaaaccaatcatgaagcaagaaacatgaatagatcaaatatataaaaaccacatagtcatataacataattcatgatttttcaaacataccatgcaaataaaagaaatactaaattgttcaaatgtcataataatatagcaaaatacatggctagaaaacaaagtgctagtaatattaaaaatattagaaaaactaaaatgatggtggcggtggtggtggtagatcaaagcttgtacgaatgtaagaaacatcttcttcaaccttggtgattcttgact

SEQ ID NO: 9709 - DNA, 434 bp, Glycine max
tgtaggccttagatcttcttcatcaatttttttcttgcttcttgaagatcaatggcagcggaatggagaaggaggaaaggtgattatagatgtcacttcaaggaaaaaatgagtcaaaatcaagttcaccaccataggaagccatggataagagctagaaagtacggaaagatgagtggagggagagggagaaagaagagggtaccttagtaatgtaggatttttcagcccttgtattttaggacacttatactagtttttgtattaagaataattttataatttcacatgcattaaatgtattatttgatgtgtgtatgttggtagataaattcaattgaattagaagaagcacaatgcacatgatgtagtaccatgtgagatgtgttgaaagtgaaaacaagatcatagagagaaggggttgacatcatgga

SEQ ID NO: 9710 - DNA, 546 bp, Glycine max
  unsure (1)..(546): unsure at all n locations
agctttacttcatttcttcaagtagtgtatgatttgcttccagattaaaacacgttgcctaaaagttactatcaggccaagaaaatactatgtccgatgggtatggagtatcaaaagattcatgcttgcccgaatgattgcatactatacaggcatgaattcaaagaaatgtccaaatgccctaggtgtgggtcgtcacggtacaaagtaaaggatgatgaggactacagttcggatgaaaactcaaagaagggcccttcaatgaaggtgttgtggtatcttcccatcattccaaggtttaagcgtctttttgctaatggagacgacgcaaaagaccttacctggcatgcaaatgggagaaactctgatggaatggtttgtcatccggctgactgctcccagnggaagaagattgatcgtttgtatccggattttagcaaagaggcaagaaatcttatgcttggactatccagtgatggaatgaatccatatgacaatntaagcactcaacacagttcatggccagttatgctagtaatttacaat

SEQ ID NO: 9711 - DNA, 518 bp, Glycine max
tgcctaattaacctgaaattgagagaaaatgattacctaacactcaaaatggaagtactaagtatttattacctatgcttagtagaaaatacttataacactacaaaataaccataaattggaagagtttgatacaatttacacaagttttatacacaaaagttagtcgtattcatcgactaacaccagtccccatgaaaagttagcaatttccagtgttgaaaccaaacataattttgcctcatcatccaacaccagtaccataaacataaaatgcttcaaatgcttaggcagaggacatattgcttttgattgtccaacctggaggaccgtgatcatgaaggcagatggagaaatcaccagtgaatctaaaatcaatgaagaagaagtggaagaatagcttgaggaggaagctatgtagggtgatatgctaatggtgagaaggctctggggaagtcagatgcagccactggacaacactcaaagagaaaatattttccacaccagatgcacaatta

SEQ ID NO: 9712 - DNA, 609 bp, Glycine max
agcttatggatggcgtgtctggcttccttttggtatttttcctgttctcctattcaaggtacaaccaaatcaggaagcaccctctagatgaagagaaaaccgccttcataactgaagacaccaatttttgttacagggtcatgccctccggactcaagaatgcaagagccacatacaaaaggatcatggaccgggtctttaaacaacaaataggccaaaatgtcaaattctatgtggatgacatggtcgtcaagtctcatagtgtagcccaacacttaatagatttggaggaagtgtttggagagattcacaagtataacatgtgcctcaatcctgaaaagtacacatttggggttggaagtggaaaattcttgggcttcatgatcacccacaagggaattaaagccaaccttgacaagtgtacgatgatactagaaatgcacaatcctaccaatgtcggagaagtggagaaactaaaaagtagactgacgtctttgtccacgtttctcccgaagcttgcagaaaaggcgaggccattctacaagttactcaaaaatactgagctgtccccaaacaaatgtgtccctgggcgaatctcaaaggctcgtc

SEQ ID NO: 9713 - DNA, 526 bp, Glycine max
agcttcaacattcaatttcgagcggctttatatattttggtactcaatcagaaatccgagtaaaaagttattgtcgttggaattggctcataggttcaacattcaatttcaagcgtctcgatatattacgggactcaatcagacatccgagtaaaaagttattgtcgtttgaattggctcagaggtttaacattcaatttcaagcgtctcgatatattacgggactcaatcagacatccgagtaaaaagttattgtcgtttgagttggctcagaggttcaacattcaatttcgagcgtcccgatatattacggcactgaatcggacatccgagtaaaaagttattgtcgtttgaattggcttagagcttcaacattcaatttcgagcgtgtcgatatattacgggactcaatcggacatccgagtaaaaagttattgtcgtttgaattggctcagaggttcaacattcaatttcgagcgtctcgatatattacgggactcaatcagacatccgagaaaaaagtatt

SEQ ID NO: 9714 - DNA, 447 bp, Glycine max
ttgagaatatggttgcagccattggtcaatatggtgttcatttgcccattcctagctatcatgacattagagttccactcttgaagaaggaagttgaatatactgaaaatttgatgaaaggtcatagggagcaatgggtcaagtatggttgtactattatgtctgatgcatggactgatcggaaacaaagatgcatcattaattttttgattaactctcaagctggttccatgtttttgaagtctgttgatggatctgattttgtaaagaaaggtgaaaagctttttgagttgcttgatgccattgtggtggaagttggagaagagaatgttgttcaagttgtaaccgataatgggagcaactatgttttatcacgtaagttgttagaggagaaaaagaaacatatttattggactccttgtgcagctcattgtattgatttgatgc

SEQ ID NO: 9715 - DNA, 602 bp, Glycine max
agcttctcgatatattatgcccctgatttggacccttttttgataacttatgaccatttgaatttctcaagagctttcgttgtacaatttcgagcgtctcgatatattaagcgcctaaatcggacctccgtgtgataagttatgaccatttgaatttcccgagagctttcgttgttcaatttcgagcttctcgatataatatgcgcctgaatcggacttccgtgcgaaaagttatgaccatgtgaatttgtcgagagcattcgttgttcaaattcgagcgtctcgatatactatgcgcctgaattggacctccgtgtaacaagttatgaccatttgagtttctcgagagcatttgttgttcattttcaagcgtatcgatatactatgcgccttaatcggactctatgtgacaaggtatgaccatatgaatttctcgagagcattcgttgttcaattaggagcagttcgaaatattattgcgctctaatcggacttccgtgtgacaaggtatgaccatttgagttttctcgtgagcttccggtgttcaatttcaagccttctcgatatattatgcgccggaacggatattccatttgaaattg

SEQ ID NO: 9716 - DNA, 571 bp, Glycine max
  unsure (1)..(571): unsure at all n locations
agcgcgcctccaatattgagctncgtttttattattttatcgggcttttctccctcctgaaatcaatccatcacatccaaattcagcaaaacaataataaagcaaaatccaaaaacagtagttcctatattttccaaagactgacaaacacaaatacacacaaaatactacatattgaaacattcaacttgatatattttttccattttcaccttgccccaaagtccagagtccttatcataccaatacctcccaggcttcaacttctgaggagggatagggcagcccagaatctcagccaactcctcttgtcttaactgcctgccattcacaacaagctgctccggccgaagctgattcgcaggacactccttttcagccctcattatctgattaatctccaaagaactacacactttcgacaacattctggaacactttcccaaagtcgacctcttcgactcatcaattggcttcccaatgcaactcacgcatttccttccctcaggcatagaccccatcgctttcagcacacaggtactgcaataccttgaataacacaccaaacacg

SEQ ID NO: 9717 - DNA, 460 bp, Glycine max
tcttagtttcagatgatgcagatgggcttgtagctttctcatgctctcctctaatgactatggcatcatttctggcgctaaactgttgggagttggaagccatcttctcaattaaatttctggcttcagcaggagtcatgtctccaagggctccaccactggcagcatctatcatacttctctccatattgctgagtccttcataaaaatattggagaagaagctgctctgaaatctgatggtgggggcaactggcacatagtttcttaaatctctcctagtactcatacaggctctctccactaagttgtctaatacctgagatatccttcctgatggctgtggtcctggaagcagggaaaattgtttctaagaatactctcttaaggtcatcccagctcgtgatggacctttgagcaaggtaatacaaccagtccttttgccactcctctaatgaatg

SEQ ID NO: 9718 - DNA, 580 bp, Glycine max
  unsure (1)..(580): unsure at all n locations
agcttatgctgcaaatatttacaatttatctcctcttcctcagcagcaaaatcaaccacagcagaacaattatgacctctccagcaacagatacaaccctggatggaggaatcaccctaaccacagatggtccggccctcagcaacaacaacagcagcctgctccttccttccaaaatgttgttggcccaagcagaccatacattcctccaccaatccaacaacagcaacaaccccagaaatagccaacagttgaggcccctccacaaccttccctcgaagagcttgtgaggcaaatgactatgcagaacatgcagtttcagcaagagaccagagcctccattcagagcttaaccaatcagatggggcaattggctacccaattgaataaacaacagtcccagaattctgacaagctgccttctcaagctgtccaaaatcccaaaaatgtcagtgccatttcattgaggtcgagaaagcagtgtcaaggacctcaacccgtagcaccttcctcatctgcaaatgaacctgccaaacttcactctactccagagaaaggtgatgacaaanatttacctaac

SEQ ID NO: 9719 - DNA, 536 bp, Glycine max
  unsure (1)..(536): unsure at all n locations
tatccccacaagagtgcagaatagttggttagtctgtattgattataggaggctgaaccaggcaaccagaaaagatcattttcccctgccattcattaatcaaatgcttgagcacttagcaggtaagtctcattactattttcttgatggtttttctggttatttacaaattcatattgctcccgaggatgaagaaaagaccacattcacctgtccctttggcacttttgcctataggaggatgccctttggcctatgcaacgcccctggtaccttccagcggtgtatgcttagcattttcagtgattttttagagagttgcatagaggtgtttatggatgattttactgtttatggatcctcttttgatacatgtttggatagtctggatagagttcttagtagatgcattgaaactaaccttgtgctgaattttgaaaaatgtcacttcatggaagaacaaggtatagttttagggaatatcatttccagtangggcatagaggtagaccctgcaaagatagctgttatttcac

SEQ ID NO: 9720 - DNA, 428 bp, Glycine max
tttgtactttcggaatttgcaaggtatatcttgttattttaggacagttttcaattttcttcggttccaaacatgatgtctcaagaagcaatacctgctccttccaacaataacaacctcagagactccacggttcaacttcatgaaccaaactcaaaccctaatcctaaccctaattcggttaagagaaaaagaagcctacccggaacaccaggcaagttattatttaattaaatccttctcttctgcatactatatatgtacttactgttctgattcttaattcagaaaaaatatatttgtaattaattacgggttaattatgtggttgtggttgcatggaccaagcagatccgaatgcagaagtgattgctctgtcgccaaagtcgctgatggctaccaaccgattcatctgcgaagtatgcaac

SEQ ID NO: 9721 - DNA, 446 bp, Glycine max
  unsure (1)..(446): unsure at all n locations
taggtttccttctagaatcttctaaactgcgtcccctgntgcctttgatctcttgagaaaaatgatttgtaggtactcttctagaaggttctctacagaacaagccttgagtaagttactacttggttcagttttttttttttgggggggggggggggtntntggntatttacanattcttattgctccctatgatgaagaaaataccacattcacctgtccctttggcacttttgcctataggaggatgccctttggcctatgcaacgcccctggtaccttccacctgtgtatgcttatcattttcaatgattttttagagagttgcatataggtgtttatggatgattttactgttaaggatcctcttttaatcatgtttggatagtctggataagttcttttaaatagcattgaacaaacctttggctgaaattttaaaaatg

SEQ ID NO: 9722 - DNA, 510 bp, Glycine max
agcttataatatatcgataggctcgttattaaacattgtaaactctcgcgaaattcaaatgggcataaattttcacacggatgtccgattcgggcgcataatatgtcaagaggctcgaaattgaacaacggaagctcttgagaaattcaaatgggtataaaatttcacacggatgtccgattcaggcaaatcacatatcgagacgatcagaattgaacaacggaagctcttgagaaattcaaatggtcataacatttatctcgaatgtccaatttaggcgcatcacatatagtgatattcgaaattgaacaacagaagctctcgtgaaattcaaatggtcataacttttcacactgaggtccgattcacggttataatatatcgatacgctcgaaattaaacatcggaaactctcgagaaattcaaaagatcatgacttttcacacggatgtccgattctggcgcataatatgtcgagaggctcggaattgaacaacggaagctcttgag

SEQ ID NO: 9723 - DNA, 305 bp, Glycine max
agctttgagcaaattctttcgacaatttcgttttactcggatgtccgattgagtcccgtaatatatcgagacgctcgtaattgaaaacagaagctctgagcaaattcaaacgacaataacgttttactcggatgtccgattgagtcccgcaatctatcgagacgctcgtaattgaaaacagaagctctgagcaaattgaaacgacattaactttttactcggatgtccgagtgagtcccgcaagaaaccgacacgctcgcagttgaaaggggaagctctcataaacatccctcgactataacttt

SEQ ID NO: 9724 - DNA, 583 bp, Glycine max
  unsure (1)..(583): unsure at all n locations
tggagtgacatgaaagttgattacaatgaactaaagtatttggcttgcttatgctcatctaaagcaggataagttggaaccaagggccttgaagtgtatcttcataggctatccacagggagtgaagagatacaaactgcggtgtttggaacctagacacaagaagtgcatcatcagaagagttgtaatgtttaatgaacttcaaatggaaaatttaatcctgccattcaagtctgctggaagttagagttcacaagttcaggtgaagtctgaagagattgtaaacgctcaataatagtaatggcaagagacaagtttgttcctgcatctagacaagcaaatgaagaagcatctcaagattattgtttagctagagatagggaaataaggacaatcaaacctcctgaaagatatggtcatgcagatctgatctcctatgctntaatagttggaaaggagaatgaagatcaggaggaacctcagtcctatgatgaggccataaagcagcaggacaactcanaatggattgaagctatggaagaagaaatgacttctctagaaaagaatcanacttggatacatg

SEQ ID NO: 9725 - DNA, 544 bp, Glycine max
  unsure (1)..(544): unsure at all n locations
tatccatgaacaccgatatataatcacggttttgattctacaaagataacaaaacagtcatagatatatttatctattgaacagaactgtcaaaaatactagtcactatataatgatctgaactacatctcacctgaaagtcaatgaagtaagcatgctgtataaaagtgaaacataattacaaagtcagcgaatttattatcaatgaaatgaaataatagttttaacagtctcaaatccactataacacaaagtaaacttgattagtacctcccagacatcaatggtaaggagtggctgcaagagataaaaatgaaatctcgtcagacattttaaccatgatgcttcagccttatcctagcattcatgtttcaaaacataaaatgaattatggatattatgtaatccttactacttacataatagtagtttcaaacaaaggggttcacagcattgggagtcttcaccacaactagcttcttgtcctcaccagattgaagaggattcagaacatntcccacgtcaagtctgctttctttatcta

SEQ ID NO: 9726 - DNA, 571 bp, Glycine max
  unsure (1)..(571): unsure at all n locations
agcttggagaggatgcttcaatggagttttaagatttattgagagaaagagagaggggggagcacgaaattgaaggaagaaaaagagagcgaagttgaactttgagttatgtctcacaagactctctttcatcaaagttacaacaagggttccacatgcttctatttatagactaggtagcttccttgagaagctttcttgagaaaacttccttgagaagcttctttgagaaaacttccttcagaagctagagcttagctacacatacccctctcataactaagctcacctccttgagaagcttccttaagaagattcctaaagaagctagagcttagctacacacacctctctaatagctaagttcacctccttgagatgagaagctagagcttagctacataccccctataatagctaaactcacccctatgccaaaaaacatgaaaatataaaaaaagtccctactacaaagactacttccaatgaaggtaagtaaattgcanattacaaaattacaaaatggtcctcaattntggtgggttttctctctttggtgattcactcaatt

SEQ ID NO: 9727 - DNA, 500 bp, Glycine max
tgacgacgatgatgagggatatgcaaattctgttctgtgacagaagtggaaagtaagcatgaggcatacgctggaccaaccaaacgcggtcttccggatggtgggatattgatgagtggatgtcacactgaccaaacttgtgcttatgcaagtactgcgggcaacgctgccagagcttatggggcttttagcaatgctatacaggctataattgaggagactgatggtgcaatcacaaaccaagaacttgttcaaagggcaagagagaagctgaagaactccggtttcacacaaaaacctggactctattgcagtgatcaccatgttgatgctccttttgtgtgttgatctcttctcatctgatgactgatgcatagaaagagagaataatgtgtgttgtttatagaatgctggtgtatagatgtatatgtttggacaatcatattgaagttatgtgtgtgatcatacaggttttctatgcatcactattatcaggtacg

SEQ ID NO: 9728 - DNA, 484 bp, Glycine max
  unsure (1)..(484): unsure at all n locations
agcttccatcactcatgtttgtcatgtttgaatgcaaaaactatttactgtagcaattcgtggtatctttcctgacaaagttagggttgccataactcgtctatgctttctttttaatgctatctatagcaaagtcattgaccctagaaaattggatgaattggagaatgtggcttccattgtcctttatcaaatggagatgtattttcctccatcattttttgacataatggttcacttaattgttcatctggcgagggagatccggttgtgtggtccttttttttacggtggatgtatctagttgagcgatatataaagttgttaaagggttataccaagaatcaataccgaccagaaattttgattgttgaaaggtatgttgctgaagaatgtatcaagttttgctcccaggacattgaaattggtaaatctgtcgtccttcctgaaactcatcatggccggacacggngggggggggggg

SEQ ID NO: 9729 - DNA, 373 bp, Glycine max
agcttattctccttcatttgcacaaggttcttaatatttgaagagtatccttgtggaaccttcacccaacaaagacactgacaaaaacttatcttctccttcttggacaaagtatggtaggctgggggcaagtaaattttcttcccatcagaccttggatgcaactgtgatcttatatccatatcagctagatcttgacgggtattcaagccatccttcgtcttgccttgaatgttaaggagcgtcccaatcacactgtcacaaacatttttctccacatgcataacatcaatacaatgtctaacgtcaagatcactccagtacggaagatcaaagaaaatggacctctttttccatatgcaactctgacttt

SEQ ID NO: 9730 - DNA, 569 bp, Glycine max
tctagtcaaatggacttaccttgaattaattcctttgttagcccctttgagcctatgctcccctttctttgttttgaagctcattacaagccttaagtgaaaaaccatgatatcaccttacccttaaggaattttggagctttggaattgttttgggaataagtgtgtgtgtgtgggggggggagggcatgcataccatacattcctccaccaatccaacaacagcaacaaccccagaaacaaccaacagttgaggcccctccacaaccttccctcgaagaacttgtgaggcaaatgactatgcagaacatgcagtttcagcaatagactagagcctccattcaaagcttaaccaatcagatgggacaattggctacccaattgaatcaacaacaatcccagaattctgacaagctaccttttcaagctgtccaaaatccctaaaatgtcagtgccatttattgaggtcggaaagcaattgtaaaagacctcaacccgttcacctttctcatttctaatgaacctgccaaacttactctatttcagaaaatgggatgacaaaatttacc

SEQ ID NO: 9731 - DNA, 519 bp, Glycine max
ctaagcttcacatatatcccgcaaatattcccaagtagcacccttagcctctattgcttcccattgaatcaacaattgagacatggtagcttctaaatgtttgacaactcgaacattcaacaccttccatgggcaaagtgttggtcccagttcactagaagtgagtggaaaaggaagatatggtggaggacttttgccatgaaatggtttcagaagagcaatatgaaatacaagatgtattttagcagactcgggtagttgtactttatatgcaacagtaccaattctttcaatcactggaaatagaccaaaatagtgcatgcctagcttccgatgcttcctcaaagccactgaatgttgcctataaggttgtagcttaactaaaaccaaatcaccaaccttaaattgcaaatctcttcttttcttatcatcttgcatcttcatatattgttgagcccttagtaaattacccttaagcttgctcaaagttgatcaacatagtgtaaaaattcctgagtg

SEQ ID NO: 9732 - DNA, 426 bp, Glycine max
agcttctataagaagattcctaaagattctagagcttagctacatttacctctctaatagctaagctcacctccttgagatgagaagctagagcttagctacacaccctctataatagctaagctcacccccatgacaaaaaaaaatatgaaaatacaaaaaaaaagtccttactacaaagactactcaaaatgccccgaaatacaaggctaaaaccctatactattagaatggccaaaatacaaggcccaaacaaagaaaaaacctattctaatatttacaaagataagcgggtcatgcttagctcatgggctcggaatctaccctaaggctcatgagaaccttagggccttcccttggatctctagcccaatctacttggagtcttctacccaatgccctcgcgggataggattgcatcattcc

SEQ ID NO: 9733 - DNA, 594 bp, Glycine max
cactactcaagcttcatgatgatgaatcaagctgattcaggaagggtggttgacatcttgagatgatgacaaaaagcccaatagagtgatttcaagattgagtcaacaattcaagaatcaagagtcaacacttcaagaatcaagaaaagataaattcaagtttcaagagaagaaatcaataagacttcacaagggaagtattgaaaagttttttcaaaaaacaaacatagtacagttttgttttccaaaagaaggagaatcaggattagctaagttaccagagctgttactctctggcaatagattaccagtttcctgtaattgagtaccagtggcaaagattgttttcaaaagctttcaactaaatttacaacgttccaattaatttcaaaatggtgtaattgattacaagatattggtaatcgattaccagtgtggttgaacattgaaattcaaattcaattgtgaagagtcacatctttgcacaaaaatgctttgtgtgatcgatgaccaagatttgataatagcattccaatgacaagttttgaacaaaaatcaaaagatggaactctttcaatggttttaaattttttt

SEQ ID NO: 9734 - DNA, 460 bp, Glycine max
tatgctgcaaatatttacaatagacctcctctaccttatctagcaaaatcaaccacagcagaacaattatgacctctccagcaacagatataaccctggatggaggaatcaccctaacctcagatggtccagccctcagcaacaacaacagcagcctgctccttccttccaaaatgctgctggcccaagcagaccatacattcctccaccaatccaacaacagcaacaaccccagaaacaaccaacagttgaggcccctccacaaccttccctcgaagaacttgtgaggcaaatgactatgcagaacatgcagtttcagcaatagactagagcctccattcaaagcttaaccaatcagatgggacaattggctacccaattgaatcaacaacaatcccagaattctgacaagctaccttctcaagctgtccaaaaatccaaaaatgtcagtgccatttca

SEQ ID NO: 9735 - DNA, 605 bp, Glycine max
agcttgcaagtgaaatctaattactctacttaagtacgcaacacaaagaatagtttacactagaataaaaaggtatggtcaaaagagtattctatataaaatatatctcgatacgagtcctcgaactatagagtatcaacattgctaagaacaagaaatcacgaacaaccatactatctatgcaattaaggcaaaacaccatactactaacatacccagaattataaggttcttataataagtatacaacgtacatataagaagtaagaatttaatagttaataaggatgtattaaagaatcacaaacttcaactactacattcacgactacacacaaaataaagtgagttaagtagtcatgcgtttacacatcaagaaaggcatactcatccaagacatatatatggttcaaaaggttttcacaacactaatccacacatcaagatagaaataagtttattaacaacatacaagcaagaagataagggcctcattaagcattatccatcagtatcaaagcttcttgcatcacctaacggcttaccataatgtcgaacccgacttcacaaattatagagatgggcagtctcataactcatgactc

SEQ ID NO: 9736 - DNA, 604 bp, Glycine max
  unsure (1)..(604): unsure at all n locations
agctttagtcaaacagaataatccgtttatgtcatagaattgggtgttgaaagagcataacaagactttctgtgattggtttaaagatacaatctttgtagatgagaatgctttagaaacattaagaaagctagcagatgggcctaaaagaaatgttataacctggcaaggatacgacataaacaagtattcattttacacaaaagcacaagatgacaaaagtacaatgcagaacagcggggtcaccctaagggctgaatctcaacactttgcaagtgtcaatgacgccaatccctgtgtagctttcatcccttactttgggttcattgatgaaatttgggagcttaattatttgaaatttacagtatgtgttttcaaatgtaaatgggttgacagcaacaccggtgtgcgcaccgatgatataggatttacgctggtagatctaaagaaacttggttaccacaatgaccctttcatcatggcagaacaagctagacaagtattttacgtgcaagacccttgtgatgaaaggtggtgtgtggttctgcanggcaaaatagttggtgttaatgtagaagatgaatattcatacatggacacctat

SEQ ID NO: 9737 - DNA, 376 bp, Glycine max
actccagctgcacagcagattttcgttatgacccactttcccactcattaaaaaccaccacgccataaacctagggaactatacaaaaacagatcggcccctggatggaggaatcgcggtaacctaaaatggcccacaccatcaaaccagccacacaccatttggtcttccataacgaaggcgcctaggccgcccataccgcccttatctccaccagatctacacctaactcaagcccatatacaagaccaacccgaagcccactcacgccatccaccttaacaacgagggggccaatgactatacaaaccatgcactttcagcaagagactaaaggctgccatccaagcctaacccatcagaggcgacattcggc

SEQ ID NO: 9738 - DNA, 644 bp, Glycine max
  unsure (1)..(644): unsure at all n locations
taaaaatttaagaaaaaaacattgtacataaaattctctcatttttcaaataataataatactaatatagacatattataaattattttttaatttctattctaaaatattaatttaaaatattataataaataaagcgttagtatttaatattattattattgaaattaatttttgatttagtatttgagatttgaataaatatgaacaaaaaagttactaaatagcatccttcattattggttttttttaaaaaaatttaatgattcccaaaagagttaaataatcaaattatcaattgttaacaattttggttaaaacaacccatagtgaaacagacaaaatattaataagaaataaacttattgaatttgaaggtcttaaaaggaaaaaatgcacatccgtcataaatttaagacaaagaacttttanaattctttaattaacattttaaccatttatatttgaacaactgtttcaaaaaaaaaattcttacagaatcatttatactatttaaccgtgctggaaaaaaaaaacccacaactcttgaattttattttaatgcacatttcttatttataaagaatagaaaggggttggtgcattttcttaattccttgccgatgggttaaaaaagaaaagaa

SEQ ID NO: 9739 - DNA, 333 bp, Glycine max
agcttttttatttgcttgatgccatttttgatgaagttggagaaaagaatgttgttcaagttgtaaccgataatgggagcaactatgttttagcgggtaagttgttggaggagaaaaggaaacatatttattggactccttgtgcagctcattgtattgatttgatgcttgaagatattgggaagcttcccttgataaggaagaccattagaagggcaattaatctacttgggttaatgtatgcccattctagtaccttaagtttgttgagagattttacaaacaagaaggaattggtgagacatgctattactagatttgccactttttatc

SEQ ID NO: 9740 - DNA, 596 bp, Glycine max
gagattacctgcaggcacgcaagcttcttatccaaggctcatcttggttgtgaagcttcttcttccgtggcttattccttaatggatggcgcctcctctcacctcctttcctttgtcttccgctgcatctccatggtggaaaatcaccattaaaggaccccattgaagctcaaagatccagcctccatagaagccccacaagcaagcttccatcacttaggctataaatagaggccatgtgtatgcattttttcaactttgatcatttgagaattacacttcaaagttcatacctcttttgaggcacaaaattttgagccccttctctgcctctgcctacactcatcttctcctaccttcaagctcttatccaaggcttcctatggtggtgagctgcttcttgactcatcatttccttgaagaggcatctccaatcatcattcttccttctttattctgctgtcattaaacttcatgcagcaaaggactccattgatgaagaagatccaaggcctacaaactgcaatggagctacatcatgtggtatcaagagcatcttcatctaggtgaagtgcttttgcttcctttatcttttt

SEQ ID NO: 9741 - DNA, 572 bp, Glycine max
agcttgagcttagctattcatacctctctaatagctaagctcacctccttgagatgagaagctagagcttagctacacaccccctataatagctaagctcacccccatgacaaaaaacatgaaaatacaaaaaaaagtccttactacaaagactactcaaaatgccccgaaatacaaggctaaaaccctatactactagaatggccaaaatacaaggcccagacgaaggaaatacctattctaatatttacaaagataagtgggctcatacttagcccatgggcttgaaatctaccctaaggctcatgagaaccctagggtcttcccttggatctctagccaatctacttggagtcttctacccaatgcccttgcggggtaggattgcatcagaaaggtcacccttcaaagacggtcctccaaccgatgtcggtattcaacgacactgtgttaccaccacacgtcataaccgatgtagaaatgtcattagagccgatgtagaaggcctttttttttaatattgaacttaagttccatcatcatgttattgttgcgagcagaacatatatata

SEQ ID NO: 9742 - DNA, 514 bp, Glycine max
agcttctggtgggacattttgacttgttttccaatctgacattcaccacagattctgccttcttctattttcagattggggatgcctctaacagcacctttgtcaatgattttcttcatgcctcttaagtgcagatgtccaaatctttgatgccatattctgacttcatcttctttggaggatagacatgtggaggagtagcttgtttcttgaggtgtccataggtaacagttgtcctttgatctgctgcccttcattagaacttcactcttctcatttgtcaccaagcattctgactttgtgaagtttacattgaatccttcatcacacagctgactgatgctgatcaagtttgcagtcagtcccttcaccagcagtactttgtccagactaagaagtccatcatgaactagccttcccattccaatgatctttcctttagagccatcttcaaatgtcacatagctagtggagcagggctcaatgttcaccaagaattctttaacttctgtca

SEQ ID NO: 9743 - DNA, 424 bp, Glycine max
tgtagggttaaagtctcacgataggcacttgctttttctcaattgtgagccgtggctatacgagacatcttgccaaacaaagtcaggttagccataactcgccagtgctttttcttccatgctatatgtagcaaagtcattgatcctgtcaagtttgatgatctggaaaatgaggctgcaattatattgtgccagttggagatgtattttccccctgcattctttgacatcatgattcacttgattgtgcatctggtcagagaaatcaaatgttgtgcgcctgtttatctacggaggatgtacccagttgagcgatacatgaagatcttaaaagggtatacgaagaatctatatcatccagaagcatctattgttgagagggacattgcagaataagccattgaattttgttcagaatacattg

SEQ ID NO: 9744 - DNA, 375 bp, Glycine max
aatctatagcaatgtgcttttctcttatgaatatacccagcaatagcaacaacctccattctatccaataggggattatgtatcatttcaacaacatttgtagtgcaaacaaaaagaacttgcaacgcataactgcttaagtaattatggtaaaaacaagcctactttgcctacagggaattgaatgaaagcaatacattcaagaactatttgaccatcctaagaactacctatcagcaataaacacaattaataaaccatgtacaaatgctaactatatcacaatctcactacaaaggctctagattataaattaatacctttgatagatcaatggtaacatcaagatagtggtcaagaaaattagcattctgc

SEQ ID NO: 9745 - DNA, 435 bp, Glycine max
tgcaagcttctagcgtacccgctattggtgtctataaaattcaaaaacaaatccctcttattactagctattttgaattctttagttcctgaatgtacaaccttcaaattgttgctcgttcccgtatttgttttttgcaaaaaagaaaattaatctgaaacaattcacgctgaatcgttatcgctattattactcgaaccatagggaataacagctcaacaagtaatttaaaatgtaacttttaaattatgtgggatttttttaattacaattttacttcaatatctaattttgttaatctacttaggtcgctttttaaatataaatatgaatgtaaaggtgatctactgataatataaagtacttgctaatcacaaattatgatacctatcattctacaatttaactgaattgtataaatattaataaatttat

SEQ ID NO: 9746 - DNA, 423 bp, Glycine max
  unsure (1)..(423): unsure at all n locations
agcttctcgatatattatgtggctgattctgacttccgtnngattagttatgaccatttgaatttctcgggagctctggctgttcaatttcgagcgtctcgatatattatgcccctgaatcggactttcgtgtgacaagttatgaccatttgaattccacgagagcattcgctgttcaatttcgagcatctcgatatattatgcgcctgaatcggacttccgtgtgacaagctatgaccatttgaatttctcgagagcttccggttttcaattcagagcatctcgatacgtgatgcgctagaatcggacttccttgtgaaaagctatgaccattggaatttgtcgagagctttcgatgttcaatttctaccgcctggatatattatgcaccttaatcggacatccgtgtgacagtcatgacca

SEQ ID NO: 9747 - DNA, 391 bp, Glycine max
  unsure (1)..(391): unsure at all n locations
agcttgtaagtgtaatatgggtcctatttctcgatttttattngcaagacacgggctccgaatgatttatattgtcgcttgattgcagctgcagatattttaccattttttatatagaaaatattcaacatacatttgtgaggaaaaagatatgcactctactcacaccagaaaactaatcttacttttaattttctacagtatatatactaattaacatttttaatttatgaatctctatatttactttctcttctatcgtactttaatcttatttctttcttctatatttctttccatctcattacataatacatctatcattattttttctattatttccgacagagtcagatcttatgttgtctgtcgatggctggttcctatttac

SEQ ID NO: 9748 - DNA, 367 bp, Glycine max
  unsure (1)..(367): unsure at all n locations
cttaagcaccgcggctgcagcttatgcagtcaatttagattcatctcggagaggatcttttccaggcatanttgtgcaaaatctcttgaactaggaagatgttgtccatcatctttctgtttttaatgaaggcagtttgagtttccccaataatagtctcaagcactggggctatgcggttggctagaattttagacacaatcttgtataacaaattatagcaagatatgggtctaaaatggttaacctgggaggcctgatcatgcttaggaataagcacaataatagcatggttgatttgctttaaaaattttccagttgtaaagaattcattaaccgccgcaaagatatcatcaccaatgatatt

SEQ ID NO: 9749 - DNA, 390 bp, Glycine max
ttcacttggatgtccgattcaggcgcatcatatatctatacgctcgaaattgaacaacggaagctctcgagaaattgaaatggtcataacttttcactcagatgtccgattcaggcgcatcatatatcgagacgctcgaaattgaacaatggaagctcccaagaaattcaaatggtcataagttatcacacgaaggtgcgttttaggagcatcacatatcgagacgctcgatattgaacaacggaagctctcgagaaattgaaatggtcataacctttcactcggatgtctgattcaggcgcatcatatatcgagacggtcaagattgaacaacggaagctctcgagaaatagaaatggtcataacttatcactcaaatgtctgattcac

SEQ ID NO: 9750 - DNA, 338 bp, Glycine max
agcttccagttctcaatttcgagcgtttttatatattatgcgccttaatcggacctccttgtgataatttatgaccatttgaatttctcgagagctcccattgttcaatttcgagcgtctcgatatatgatgcgcctgaatcggacctccgtgtgataatttatgaccatttgtatttctcgagagatttcgttgtttaatttcgagcgtctccatatataatgtgcttgaataggaccttcgtgtgaaaagttataactatttgaatttctcgagatcttccctggttaaatttccggcgttttcatatgtgatgtgcttgaatcggactctctgtg

SEQ ID NO: 9751 - DNA, 389 bp, Glycine max
agcttaagctccttcaactgcacaaggctcttaatatttgaagagtatccttgtggaaccttcacccgatgaagacactgacaaaaacttatcttctcctttttggaaaaagtatggcaagctgggggcaagtaaattttcttcccatcagaccttggatgcaactatgatcgtatccccatatcagctagattttgacgggtattcaagccatccttcgtcttgccatgaatgttaaggagcatcccaatcacactgtcacaaacatttttctccaaatgcataacatcaatacaatgtctaacgtctagatcagaccagtacggaagataaaagaaaatggacctcttcttccatatgcaactcttacttttataccttttttgggt

SEQ ID NO: 9752 - DNA, 418 bp, Glycine max
agcttgggctaagcaagtttgcccgctaagcccaaggcacttgtgattttttgtatgtcttgccatgcactaagcgtgccctgtcacgttaagcgcaatttactctttgtttctatagttgttggaattgggcttagcgagccttctcgctaaaccatttgatgcaatcctaccccgcaagggcattggatagaagactccaagtagattgggccagagatccaagggaaggccctagggttctcatgagccttagggtagattttaagcccatgggctaagtatgagcccacttatctttgtaaatattagaataggtttttccttcgtttgggccttatattttggccattctagtagtatagggttttagccttgtatttcggagcattttgagtagtctttgtagtaaggactt

SEQ ID NO: 9753 - DNA, 326 bp, Glycine max
  unsure (1)..(326): unsure at all n locations
agcttgtacattcaatttcgagcgtttcgatatattacgggactcaatcggacatccgagtaaaaagttattgttgtttgaatntgttcagagcttcaacattcaatttcgagcttttcgatatattacgggacacaatcagacatccgagtaaaaagttattctcgtttgaatttgctcagggcttcggtaatccatttcgagcgtctcgatatattacgggactcaatcagacatccgagtaaaaagttattgtcgtttgaatttgctcagagcttctacattcacattcgagcttttcgatatattacggactcaatcagaca

SEQ ID NO: 9754 - DNA, 397 bp, Glycine max
  unsure (1)..(397): unsure at all n locations
aatctcagcttaacatcagaccacttcaggtgctggaactactttacatgtgatntgatggggcctatgcaagttgaaagccttggaggaaagaggtatgcctatgttgttgtggatgatttctccagatttacctgggtaaactttatcagagagaaatcagaaacctttgaagtattcaaagagttgagtctaagacttcaaagagagaaagactgtgtcatcaagagaatcaggagtgaccatggcagagaatttgaaaacagcaggttcactgaattctgcacatctgaaggcatcactcatgagttctctgcagccattacaccacaacagaatgggatagttgagaggaaaaacaggaccttgcaagaggctgctcgggtcatgcttcatg

SEQ ID NO: 9755 - DNA, 381 bp, Glycine max
gcttcaacattcaagtttgagcgtctcgatatatgtcgagactttatcagacatccgagtaaaaagttattttcgttttaattggctcagaggttcaacattcaatttcgagcgtctcgctatattacgggactcaatctaacatccgagtaaaaagttattgtcgtttgaattggctcagggcttcaacattcaattttgagcgtctcgatatatgacgagactcaatcagacatccgcgtaaaaagttattgtcgtttgaattgtctcagaggttaaacattcaatttcgagcgtctcgatatgttacgggactcaatcagacatccgagtaaaaagctattgtcgtttgaattggctcagagattcaacattcaattt

SEQ ID NO: 9756 - DNA, 272 bp, Glycine max
  unsure (1)..(272): unsure at all n locations
agcttctcgatatattatgtggctgattcggacttccgttagattatttatgaccatttgaatttctcgggagctntggttgttcaattccgagcgtctcgatatattatgcccctgaatcggactttcgtgtgacaagtgatgaccatttgaatttcacgagagcattcgttgttcaattccgagcatctcgatatattatgcgcctgaatcggacttccgtgtgacaagttatgaccattcgaatttctccagagcttccggctttaaat

SEQ ID NO: 9757 - DNA, 412 bp, Glycine max
actaagcttccaaagaaagtggcaaaagaatattcaaaataattttctttcataccatagataaatagtaataaataaaagaagtttaagggaagagagaaatgcaaacttgatttatactggttcggccacttcccgtgcctacgtacagtcctaaagcaacccacttgagattttccactctcttgtaaaatccttttacaagttctgaacacacaaggacaatccttcctttgtatgcagaattcctttacaacaagagaccatcggactattaatcccttttcagaagtgagaagaagagaagaagaaatctctcttgaaagagatagattgtacaatgaagatcaatcacaattccttattgcatatgcaagtgtttgaccaacgaatcttcaagaggataagacat

SEQ ID NO: 9758 - DNA, 385 bp, Glycine max
cttggagtttccaagtgccaattcgtcttcttcttttgtccagtcttcttctggcttcaattcattagtgggctttccttctgtgtccagcatcttgggatgttcccagcctttgatgacaactttccaggttctgctatccagtgatttgaggaaggccaccatccttgctttccagtattcatagttggttccatccagaattggtggtctgttcactggtcctccttctttctccatgttcatcagaatttatctccctagatctcactcagtgatttagagtgcccgctctgataccaattgaaattctgataccaatgccagatgtcgtacaggatgtcacgacatcacgcttcagaacatgcagattatatttgagtgt

SEQ ID NO: 9759 - DNA, 421 bp, Glycine max
agcttgaatcggacatctttgtgaattgttatgaccatttgaatttctcaagagcttccgttgttcaatttcgatcctctcgacatattatgcacccgaatcggacatctgtgtgaaaagtcatgatcatttgaatttctcgagagtttccgatgtttaatttcgagcgtatcgatatattataaccctgaatcggacctcagtgtgaaaagttatgaccatttgaatttgacgagagcttccgttgttcaatttcgaatatcactgtatgtgatgcgcctaaatcggacattcgagttaaatgttatgaccatttgaatttctcaagagcttccgttgttcaattctgagcgtctcgatatgtgatttgcctgaatcggacatccgtgtgaaaagttatgaccatttgaatctctcaaga

SEQ ID NO: 9760 - DNA, 375 bp, Glycine max
tgttatggaagtcaagagcatgaaagtgttccaattttattaactggtcaatacgttctagagcaggttgatgacatcaatacgatatttggaaagacccataagaaggaaaaaaagtaaaacttgcatactgaagaagaggtcgatattgtttgatcttccatattggtccgatctagatgtcagacattgtattgatgttatgcatgtggagaaaaatgtgtatgatagtgtcatcgacatgtttcttaacattcaaggaaagacaaaggatgatttgaataatcgtcaagatctagatgagatgagtatatgagaccagttatgtacttggtctaatggtgagaaaatatacttggctccaacttgacttac

SEQ ID NO: 9761 - DNA, 413 bp, Glycine max
  unsure (1)..(413): unsure at all n locations
agcttgaaggcattctttattgaagtttaacaatttttatttgacaagtaaattattgaggggtttggcaatcttagagaaatgttgtatgagctttctatagaaaccagcatgccccaaatgtttttactcctttcatgtctcaaggtggtgggagcttttcaattacttctatcttggcttgatatacttcaataccacttgctgaaattttatgctcgagcactataccttcggttaccttgtagtgcaatttttgccaattaagcacaaggttcttttcaattcatctttctaggactctntccaagtttttgaggcatgacatgaacaatgatccgattatagagaaataatccataaatacctctactcattnttataccatgttagaacagatgacattcatacat

SEQ ID NO: 9762 - DNA, 387 bp, Glycine max
tgaaggtgtgtaaccccccatttttcacagtaaaatattggtaatgtgtctactattattgtgatcatctctttctccgtcattggaggtgccacttgagctgccaggtctctccacctttgggcgtattctttgaaagatttgtgcccctttttgcacatgttctatagttgcattctatccggagccatatcagaattgtattgatactgcccaacgaaggcaaccattaggtcttcccaagaatggactcgggaaggttccaagttagtgtaccaggtaacagctaccccagtaagactttcttggaagaaatgtatcagcagttcctcgtcttttgcgtatgcccccatcttccgacaatacatctttagatggttcttgggg

SEQ ID NO: 9763 - DNA, 370 bp, Glycine max
  unsure (1)..(370): unsure at all n locations
agcttaccgctgtgcatgtgctgctgttctaactggacatgctttattgcacactctctatggccaagctatgagacataatacccagttttttgtggaatattttgcattggatcttttaattaatagtgatggtaagttgttgcagaaaacatcttgctttcacttaatttgcaattaattaacctaatgaagtcttagccttcattggtcttgatgagtaaatttcccatgtgcttcacatcacttgttacaaatgtgttatctgtttcaatggtaatttctttattaaacaagcattcaatggtggaaattttntcttttgtcctggtgatgggaaagttaactaatttctttctatattggatat

SEQ ID NO: 9764 - DNA, 413 bp, Glycine max
  unsure (1)..(413): unsure at all n locations
agcttttaccaaagagtttttactctctagtaatcgattaccagtttattgtaattgattaccagtagcaaagattgttttcaaaaagctttcaactgaatttacaacgttccaattgatttcaaaatggtgtaattgattacaatgatttggtaatcgattaccagtgtgtttaaacgttgaaattcaaattcaaatgtgaagagtcacatcctttcacaaaaatgctttgtgtaattgattacaatgatttggtaatcgattaccagtgataagttttgaacaaaaatcaaaagatgtaactcttccaatggttttcaagtttttctaaaggttataactcttctaatggttttcttgaccagacatgaagagtttataaaagtaagaccttaacttgcattntacaacac

SEQ ID NO: 9765 - DNA, 426 bp, Glycine max
agcttgtccatccacgatgtctccaatataaaggtctacccctaaccatttgctcacacgaacatgaaattggacatcaccataatcaaatccatgtgtcccacactcaaagataagcttacaaaataattataattaaaacaatttaagaaacatcaattaactatgacataaactctatcatctttagatcatggtatttgaaagtaaataaaaccaataacatccagctcacataagccaaacatctcatattcaactatcatgaaacaattcaagaatcaacatcatgcatcaactatcaagcattatcaacatgagttcatcaatcatcatcaacatgaacaccaaacatcaacaccaacgacagactctactccatggatatttacaccacatgaggaattaaccaaagtacatccctta

SEQ ID NO: 9766 - DNA, 378 bp, Glycine max
  unsure (1)..(378): unsure at all n locations
tttgaanagacacatctcttcaaaccattttgattatgcacgaagggcctatatatatgtgtgtctgaattntaaaaaaaagatattccaagagaacttcaatgccaaattctctttcaaaagaaactcttgggcaaacacgtgcaaatccattaagagtttctccatggacttaaattgtaatatccttctcttcaagagagaattcttctttctttcttctcattcaaagagattgattaagggactgaggatctcttaagttgtaaggattactgaacacaagggatgggttgtccctgtgtggttcagactttgtaaacggatttttacaaagggagtggaaaatttcaagtgggttacttgagtactggacgc

SEQ ID NO: 9767 - DNA, 379 bp, Glycine max
  unsure (1)..(379): unsure at all n locations
agcttatatacagaggtgttgctctgtgtgggagaagaccattntctatggctgccactctatctgttacaataagtatgtagtcaagaaacatcacttcaaccattagacccattctagtgaagacaatagttaaggttctaagggtgctagacatcatggttgcatggtgtatgtaaacatctcactcatgtggatcttcaacacttgaccaatgttaggtggcattttaccacctggtatagtggcttctgttcgcaatgttacagtgtgcattacttgcatagctgttagtgtgaacattccatgagttgtttctccagacaacattattccatcagaaccttctcgaacaacaattagtatatctgatacctct

SEQ ID NO: 9768 - DNA, 204 bp, Glycine max
caccacttcttgttgaagatgagtctagaagaagcttaccaccataggaagccatggataacaccttgaaggtataacaagatgattgaagggtgaggaagagaaaaacatgaaatttagtgcctttaaagagaactgaattttgtagtgtaattttcaaatgatcgaagctgaaaaaatgcacactgttcacttccggcagtg

SEQ ID NO: 9769 - DNA, 450 bp, Glycine max
  unsure (1)..(450): unsure at all n locations
gagaccacctgcaggcacgcnagcttggaacgaataaactgaaaaagttttcgaggttagcttttggtgaagatgtcggcgagttgaagatgggaaggaacgaattgagtaatgagccttttggagagaactaactcgtgaacaaagtggtagtcaatatcaacatgattggcacgcttgtgagcaaccggattctgggaaagaaatgtagctcttttgttatcacaaagaagagtagggggagcagagcaaacatgcagattgcgcagcaaatgagtgaaccacattagcttatctgctgtatttgccatagcccaatattcagattcagagctggaacgagcaatagtaggctactttttagcactccaggacacaagattaccttccaagaatatcgagtagccataggtggagtgacgcgtctcaacacaatgagcccattcgaca

SEQ ID NO: 9770 - DNA, 222 bp, Glycine max
ctgattgtagtggaatggagaaggaaaaagatgaatggagacaccacttcaagtagaagatgagtctagaagaagcttaccaccataggaagccatggataagagcttgaaggtagaagaagatgaatgaagggagaggaagagaaaaacatgaaatttagtgcctctaaagagatctgaattttgtagtggtaattttcaatgaatcaagttgaaaaaatg

SEQ ID NO: 9771 - DNA, 385 bp, Glycine max
aaacattaaatttcgagagtctcgttatattacggtattcaatcagacatccgagtaaaaagttattgtcgtttgagtaggctcataggttcaacattcaatttctagcctcacgatatattaccggactgaatcggacatccgagtaaaaagttattgtcgtttgaattggctcataggttcaacattcaatttcgagcggctcgatatattacgggactcagtcagacaaccgagtaaaaagttattgtcgtttgaattggctcataggttcaacattcaatttcgagccgctcgatatattatgggactcaatcagacatccgagtaacaagttattgtccgttgaattggctcataggttcaacatttcattgccgagcgt

SEQ ID NO: 9772 - DNA, 411 bp, Glycine max
  unsure (1)..(411): unsure at all n locations
agctntaagccaattcatacgacaattactctttattctgatgtcnganngagtcccgtaatataacgaaacgctcgaaattgaatgtttaacctatgagccaattctaacgataataactttttactcggatgtccgattgagtctcgtaatatatcgacacgctcgaaattgaatggtgaagctctaagcctattcaaacaacaataacgttttactcggatgtccgattcaatgacgtaatatatcgggacgctcgaaattgaatgttgaacctgtgagccaattcaaacgacaataactttttactcggatgtctgattgagtcccgcaatatatcgagacgctcgaatatgaatggtgaacctctgagccattcaaacgaccataacttttactcggatgtcgatg

SEQ ID NO: 9773 - DNA, 272 bp, Glycine max
  unsure (1)..(272): unsure at all n locations
agcttgtcaagggaacatttatgcattatttcatagatgagagctttcttgcgtccttccaaacagaatcaaagaagtatgacaacattaacatgagaagttctactgatacactattagaaaatatgttntctacatcggttatttatgactttcaacatcggtttttcaaccgatgttgaaagtaccgacgttgatagtattatcgttaacatcggnttttgaanaaccgatgttaacgtaaaattaccaacatcggttatattaataac

SEQ ID NO: 9774 - DNA, 398 bp, Glycine max
  unsure (1)..(398): unsure at all n locations
cagcttccacgtatatgacctacatgatcacatgataactttttaatttctttacataagtaaaggggcatcatttccaatcatgatatactacagaaatggaatttttaccatcttcttgtaacctccagatgcatgtttcttcttcaagacttcaataaagtccatagcataaaggtatggcatgtttggcatccctacaaaatacaaatcaaataggaaatgactaagttataatgtctttatctaatatgaacatagttctggattgatcatttttacacccttagataattttgttttatacaactatgttcacatattaaactatacctccatgaaccacagaaagaaaaaagtctttaggatgataattnttattttttttacttaaagtc

SEQ ID NO: 9775 - DNA, 424 bp, Glycine max
  unsure (1)..(424): unsure at all n locations
agcttcaacatcagaccacttccagtgttctggatttatcttcacatggacttgatggggcctatgcaagttgaaagccttggaggaaagaggtatgcctatgttgttgtggatgatttctccagatttacctgngtcaactctatcagagagaaatcagacacctttgaagtattcaaagagttgagtctaagacttcaaagagaaaaagactgtgtcatcaagagaattaggagtgaccatggcagagagtttgaaaacagcaagtttactgaattctgcacatctgaaggcatcactcatgagttctctgcagccattacaccacaacaaaatggcatatgtgaaaggaaaaacaggactttgcaagaagctgctanggtcatgcttcatgccaaagaacttccctataatctctgggctg

SEQ ID NO: 9776 - DNA, 340 bp, Glycine max
  unsure (1)..(340): unsure at all n locations
nttctttgtgggttgatgggttctgtcgcgcacaatgtcatgttcactggctgacatactctcaattagctcagttgcttcttccggggtcttcagctttatttttccccttgcataagcatctatcagttgcttggcttggggtctcaacccatatatgaacatattcaattgaattggctcaagaaacccatgagtgtgagttcttctcaataaacctctgaacctctccaatgcttcactcagagattcatcacggaattgatgaaatgagaagatagcagctgttcctctcaaagtcttggactctgggaagtatttctttagaaactttttaaca

SEQ ID NO: 9777 - DNA, 386 bp, Glycine max
taccactatagtctatacaaagaaattattgtgatttttttacgctttactaaggtataaggggaagtaataattttaggattttgagataattatcattcccttatgtgatgagtgattctagaatgagaagtgtttattgggcttggctcttccaaagtgaataagggtaaagtaattaattttagtcattgatgaaaaaaattagcggttgatatttcaactcattcttgatttgttatgcaagtgcatgtaatatcgactattaattttctcattaatgattgagaatatttaatttactttctagagtgagttgctcacgaggagctaaatctttattgaaatgttttcttctgtttctgtgtctaacagcaactttctcg

SEQ ID NO: 9778 - DNA, 406 bp, Glycine max
  unsure (1)..(406): unsure at all n locations
agcttgtccttcacggcttacatgatttcactggcatgttctgcagcattgcctacaattggaagcaagatgacagaaataaaagccactgacatattcaatgactcagatgctccctgcaagagaccagaaacacaatatgtctatgaatgaacttatgacgcagtgtttatggacaagaacaagaataggaatattagaagctttagttgtacaataatagaaattaatgatcaagaaattctgaaaatgatatagctatacctgtatggcgtctacaaggtatccagacaatatagatacccatgctgtcaagatagcaagccagattattgcctcccattgagttaattcaagatcttcctccacatcagaattntcaccattctctcctccctacattatg

SEQ ID NO: 9779 - DNA, 389 bp, Glycine max
  unsure (1)..(389): unsure at all n locations
ntntgagctgtatcaatcaactctattgacaagtttgctctttgcatgaatgtaatgatgaaattttaatgataaatgacgcagttataaaatggtggttagaaaatatgtgatagaggaggagatggaatgcatgtttgttacttcaattgaatcataaatgaatgagaggcttacatcataaagcctaaacaattgatattcatcaattaagatcaaaatttaatccaataattaaacaatgttaacccacaaaattccaactagaacaagaaacttcagttattacctctatttggtcaccgacattaatcaggagagcatcagggattattggaactttaaaccactgatcatctttgaggacttggaggccttctacttctttg

SEQ ID NO: 9780 - DNA, 377 bp, Glycine max
tataatatatcgatacgctcgaaattaatcatcggatactctcatgaaatgtaaatgggcataagttttcacccggatgtccaattcgggcgcataatatgtcaagagtctcgaaattgaacaacggaagctcttgagaaataaaatggtgataactctttacaccgatgttcgatttatgcgaatcacgtatcgagacgctcagaattgaacaacggaagctcttgagaaaatcaaatggtcataaaatttcacaccgatgtccaaattagggcgcataaatatagtgcgctcgaaaatgacaacgggagctttcgtcaaattcaaatggtcataatttttcacactggagtccgattcaggctataatatatcaa

SEQ ID NO: 9781 - DNA, 352 bp, Glycine max
agcttgaatcggacattcgtgagaattgttatgactatttgaatttctcaagatcttccgttgttcaatttcgaccttctcgacatattatgcgcccgaatcggacatccgtgtgaaaagttatgactatttgaatttcctgagagtttccgatgtttaatttcgaacgtatcgatatattataagcttgaatcggacatccgcgtgaaaagttataaccatttgaatttctcaagagcttccgttgttcaatatcgaacttctcgatatgtgatttgcctgaatcggacatccgtgtgaaaagttataccacgtgaatttttcaagagcttccggtgttcaattttgagcg

SEQ ID NO: 9782 - DNA, 413 bp, Glycine max
gcttgaccaacggaatgcaaatgatttactcagttctattaggcaacactcttcagcttttggggatggactccagcgtttggctcattactttgccaatggccttgagacaaggttggctgctgggaccccatcatacatgcccctagaaggaacaacttccgctgatatgttgaaagcttacaaactatatgttacatcctctcctttgcagaggttgacaaattatttggcaacccatacaattgttagtcttgtggaaaatgagggcagtgttcatattattgattttggcatttgctatggttttcagtggccatgccttatcaagaagctctcagaaaggcatggtggtcctccgaggcttcgtataacaggaattgaacttcctcagccgggatttcggcctgcag

SEQ ID NO: 9783 - DNA, 438 bp, Glycine max
agcttataatatatcgaggcgctcgattttgaacatcggaagctcttgagaaattcaaatggtcataacttttaactcggagttcaattcatgcgcatcacatatagagacgctaaaaaatgaacaacggaagctctccagaagttaaaatggtcataagttttcacactgatgtccgattcaggcttatattatatcgagacgctcaaaattgaacaacgaaagctcttgagaaattcaaatggtcataactttttacactgaggtccgattcaggcttataatatatcaagtcgctcgaaattaaacatcggaagctctcgagaaattcaaatggtcataacttttcacacggatgtccgattcgggcgcatattatgtcgagaggctcgaaactcaacaacggaagctatcgagaaattcaaatggtcataactt

SEQ ID NO: 9784 - DNA, 401 bp, Glycine max
agctctgatcacattcatacgacaattacttattactcggatgtctgattcagtcccgtaatatatcgagacgctcgaaatggaattttgaagctctgagcaaattcaaacgacaatcactttttactcagatgtctgattgagtaccgcaatatgtcgagacgctcaatattgaatactgaagctctgagcaaattcaaacgacaataacttgtcacttagatgtctgattgagtcccgtaatatatcgagttgctcgaaattgaagaccgaagctctgagcaaattcaaacaacaataacgttttactcggatgtctgattgagtcttgtaatatatagagacgctcaatatggaataccgaagctctgagcaaattcaaacgacaataacttctttac

SEQ ID NO: 9785 - DNA, 392 bp, Glycine max
tgaaggaaaactggatgcattggttaacttggtaatttaactggccttgaatcagaaatctatacctgttgcaaggtttgtggtttgtgctcctctgctgaccaccatacagacctttgcccttccatgcagcaacctggagcgattgagcagcctgaagcttatgctgcaaatatttacaatagacctcctcaacctcagcagcaaaatcaaccacagcagaaaaattatgacctctccagcaacagatacaaccctggatggaggaatcaccctaacctcagatggtccagccctcagcaacaacaacagcagcctgcttcttccttccaaaatgctgctggcccaagcagaccatacattcctccaccaatccaacaacagcaacaacc

SEQ ID NO: 9786 - DNA, 395 bp, Glycine max
  unsure (1)..(395): unsure at all n locations
ntattccccatttaatgtcattttataattaagcattttacaatttgaattatcttaatgttctaaccgtgcttattatttacaaattttatcctcagatatttacactattgaattccaaaaaaagaggtttacctcatgctcacattcttttgttcttacatccttccaacaagtatccaactcctaaagatacagataaaattgtctcaactaagctaccagatcaaaatagagatccaattttacatgagtgcatcaagagtcatatgatacacggtccatgtagaccagctaatagacattcaccatgcaagaaagatggtaaatgttctaaatttttccataaaaggttccaataaaaaaacatttgttgaccaggacaattaccctat

SEQ ID NO: 9787 - DNA, 421 bp, Glycine max
agcttgtcttcatggggaatagagtgtaaactccagtggaagcagtcaagacttatcgtttaaaacttgacattagacatcatttagatttactgggaactttttatgttcctagtttatctaggaatttagtttcattatctaaacttgatgttactagatactcttttaattttggtaatggatgtttctgtttatttaagcataatcatctcattggtactggtgttctttgtgatggcttatataaattgaaatcagatggtttgtatgctgaaacctctttaactctgcatcataatcttggcactaaatgtagtttagtgaatgaacgatctactttcttgtggcataaacgtttaggtcacatttcaagagaaaggatggaaagattaataaagaatgaaattctcactgatct

SEQ ID NO: 9788 - DNA, 418 bp, Glycine max
  unsure (1)..(418): unsure at all n locations
agctntgttccaaacacttctttggttctgtttcttcctcgttttttatcacaagattgccactgtccaaaagcactactacaggattctgtgcttgtttgtgagagttgttggtgtaccagacaagatacgcattttgggtgagaacaagattgcctgtgttgttgagtgttatgatacccgaggaatcattgatggggttggccttattagcaacccaaacaactgtctggattgggatgttcttgtaccaaatacccacataacgtttatgggaataacctggtgatgtgccatcattttcttctattttctaaaccctttttgcaccattttaattattgattgatcttaattgtcaattaattaggcagttntattatttgggcccattaagctaatttgatgttnttaatct

SEQ ID NO: 9789 - DNA, 409 bp, Glycine max
gacaacagggagtgaagattgctgaaaaccctagccttgcaacatgtcctatggaagtagacacggagatggacaagaaaatccgcagtatggtgagtagcattttgaaagaagcctctgtgcctgaagctgatgaagatgttccaacatcttccaccccgaatgtttctatgcctgatgttgagaaagatgttccaacatcttccggcccatatgatgaagtactgtcttcccccagcaaagagagatcaacagaggaagatgatcaagccgcagaggagacccctgcaccaagggcaccagaacctgctccaggtgatctcattgacttagaagaagtcgaatctgatgaagaacccattgccaacaggttggcacctggcattgcggaaagacttcaaaacagaaa

SEQ ID NO: 9790 - DNA, 313 bp, Glycine max
tcacggtaaatatagacatcccattcctaggctagacgatatgttggatgaattgcatggagcctgtgttttctctaaaattgatttgaaaggtgggtaccatcaaattaggattagagagggggatgaatgaaaaacaactttcaaaactaagtatgggctgtatgaatcgcttgttatgccctttgtgctaaccaatgctcctaacactttcataagattaatgaaccatgtgttaagggaatttctaggaaaatttgttgtgggtattttgatgatatcttgatttacagcaaattccatgatgaacatc

SEQ ID NO: 9791 - DNA, 407 bp, Glycine max
gtgtcttatgaatccccctgtgcttatgccaccagtacctggaaggcctctcatcttatacatgacaatcttagatgagtcaatggggtgtatgctggggcaacatgacgaatctggaaagaaagagcgcgctgtttactacctgagtaagaagttcacgaactgtgaaatgaattactcattgctcgaaagaacgtgttgtgctttagtatgggcatcccatcgcctaaggcagtacatgctgagccatactacctggttgatatccaagatggacccggttaagtacatctttgaaaagccagctctcacgggacgaatcgcccggtggcaagtcctgctatccaagtttgatatagtttacgtcacccaaaaggcgataaaaggaagcgccttagcagattatt

SEQ ID NO: 9792 - DNA, 352 bp, Glycine max
tttccctccttcaaggaatcttcttgaagccctctcacatacgccacaccatacttggcattcatcagagggtcttcccctgcagtctcttgccctctcccccaccgtggatccctgaaaacgtttatgttcggagcccagaacgtcatccccgtcgcttgccccgcattgtacaccgccctcgcttccttcccaatagtcttcagcaacaatgcagtaacataacaccaacatgtcaataatgtaattcgataaagtcccacacccgagtaataaagagaagatgaagtgtatataaagctttgaggtgttggatgttagtgattatgcaactgaccttgctgatttggta

SEQ ID NO: 9793 - DNA, 548 bp, Glycine max
  unsure (1)..(548): unsure at all n locations
agcttgtgctaagaatgtcatgatccttttcatcatattttaagaaaattgaatgtcatgatccatcacttctctgcatatatatttagtattaagatgtgtaccaacaatcctaaaatgttctgtgcagatattttccattgaaagacactacacaagattagagactccgaaattaattttgttttatgccaattgctattatgctttgttgtgtcttgctaaatgcatatttaatttgaagcaacttcattatttttgtgttatctgttaatggtttaattggataatagtttacaagccaggtaatatataatttagatatatgtgcagagatgtaatattgtcatgtaaattttaatatttaattattgttatgttagagtatgtgcatgcaattgttttagagagggctggtgataagtgaagctagctcacaaacaattcaagatgcagttagctttataagctaggctcatgagtcatgattngagtctgatttgaatttttaccctgtttagtaaatgagctgagcttcagcttttaat

SEQ ID NO: 9794 - DNA, 350 bp, Glycine max
agcttaatctcatagaagggaagcgtttgttcaccatgagtcatgggcgtttatatcagaaaagagtgaagaacgcttttgacaagaaggtacatatgcgccggtttagcaaaggggacttggtgttgaagaaggtctcccaagctctgaaagacaacagagggaagtgggacccgaactacgaagggcctttcgctgtaaaagggctttctccggaggggctctggtgctcaccaacatggatggcgaggagctaccttcacccgtgaactccgatggtttcaagcgatactacgcttaggatctggggcaattgaggaagtcgctgcatgttcttttatttttgggtg

SEQ ID NO: 9795 - DNA, 650 bp, Glycine max
agcttatatatttatttatctctatttattaataaactaaaatagtaattacattgtatttttagtttttactattttttaatacaagtaacaaaatattctacaaattaagagaaaactattaaaaaaattagctaaatttattaaagtaaaaaggaaaatatacatataatgcaatttctattatttataaatagatataaatagtttttgttatcttttattgtttaatttctacgtttgaaagtaaaagcattaagttactgtttatttagttgattttttaattcttaactaataatatatttaactaattagacattgtacaaaaaaattgtgttcaaaataaaaattatttttcataattaatttttaagaaaatggtaaattttatatcaataaaatggagaataattatgaacaagtcatcgatctatttatagcacatatattgataatataaataatgaaaaataaacaaacattataaaatattcattatgattttaacataatccattttggtattatcctaattggaaattggtgaattttttaaggataatataatattttttaaatatttttttaatcaattatggataatttttaaatattcaaaaataattgggattcaattaataaaaaaa

SEQ ID NO: 9796 - DNA, 385 bp, Glycine max
  unsure (1)..(385): unsure at all n locations
gacttgatggggcctatgcacaatgcaaagccttgtaggaaagaggtatgcctatgttgatgtggatgatttctccagatttacctgggtcaactttatcagagagaaatcagacacctatgaagtattcacagagttgagtctaagacttcaaagagaaaaagactgtgtcatcatgagaattangagtgaccatggcacggagtttgaaaacagcaagtttactgaattctgcacatctgaaggcatcactcatgagttctctgcagccattacaccacaacaaaatggcatagttgaaaggaaaaacaggactntgcaagaagctgctanggtcatgcttcatgccaaagaacttccctataatctctgggctgaagccatg

SEQ ID NO: 9797 - DNA, 310 bp, Glycine max
cgcccttgacattaatggtttgaggaagtatctcaatcacatcgatctttgccttgcccacctctattccccttactgagatgttatgccccaacattattccttcttgaaccataaaatggcatttctcccaattgagaactatattggactcttcatatctctgtaatactctttcaagattggataagcacccttcaaaagatggcacacaaacagagaaatcttccatgaaaacttcaatgcatttttcccccatattagaaaaaataaccatcgtacacctctaaaatgatgtcggggcgttgca

SEQ ID NO: 9798 - DNA, 384 bp, Glycine max
acttcattactgttattcagtattacaaatgagcttgttgcaattcttctagacttagagtgataacatgtaatcctcttgaacccttacctcccactctctcatcatgccgagactccggaaccctaacaggttttgccttttccatgtacttgaaacaaaactcaatagcttctttctcaatgtacctttcaacaatagatgctttaggacggtgtagattatttgtataccattttaagatcttcatgcatcactcaaccgggtacatccaccgcaaataaacgggaccgcaacatttaatttccctcaccatatgaacaatttattgaaccatgatgtcaaaaatgaaagaggaaaatatatcttccactgacatatgat

SEQ ID NO: 9799 - DNA, 503 bp, Glycine max
agcttgttgttcctggatgcatctggtattggactcaacaattgctaagagaattgtctcaactttgtcaaatggagggagaactattttgatgaccatacctcaaccttcaagtaggatgtattgcatgtttcaaaaggtgtttatgctttcagaagggaaccttgtgtattttggaaaaggatctgaagctatggaatatttttctagatttggatatgccccaaccacggtcatgaacccctcagatttccttttgaatcttgcaaatggtatgttgtttgctctttattattttaaaaagtgtgaggtttcctttgttatttatgaaactttgtggacagaagttcaaaatctcatttatctattagtacctacatatatttggataaattcacttattctatttttcatgattgattaaatctataaattagattataagaattactagctttgtgacaagtcattcatttaagttcttttcatctcaatttttcatg

SEQ ID NO: 9800 - DNA, 430 bp, Glycine max
agctttgtatggtagaaggggtatgttctccctatgttggttagagcccggagaaggcctcaccttaggaccagaagtggtacagcaaaccactgagaaagttaagttaattcaggagaggatgagagctgttcagagtagccagaaaagttatcatgataagaggaggaaagatctggaattcaaggttggtgatcatgtattcttgagagtcactccgtggactggggttggtcgagcattgaaatctcgaaaactcacacctcgcttaattggtcctttccaaattcttaagagagttggccctgtggcataccaaattgcattacccctgtctctttctaatcttcacaatgtctttcatatgtctcaactccataagtatatctgggatccatcccatgtgatttgattggatgatggtcaaatg

SEQ ID NO: 9801 - DNA, 376 bp, Glycine max
tatgacgattcgaatttctctatagcttccgttgatcaatttcgagcttctcgatatgtgattagcctgaatcggacatccgtgtgaaaagttataccagttgaatttctcaagagcttccgttgttcagttttgagcgtctcgatatgtgatttgcctgaatctgacatccgtgtgaaaagttatgaccatttgaatttctcaagaccttacgttggtcaatttcgagcctctcgacatattatgcgaccgaatcggacatccgtgtgataagttatggccatttgaatttctcgagagtttccgatgtttaatttcgagcgtatcgatatattataagcatgaatcggacatacgtgtgaaaagctatgaccat

SEQ ID NO: 9802 - DNA, 449 bp, Glycine max
  unsure (1)..(449): unsure at all n locations
agcttgtagaattcaccccaattccaattgcatatgttgacttactcccctatctgctcgataatgcaatggaagttataagcccaacaaagatttctcaaccttcttttcctagaggatacaaccccaacgtgacatgtgcttatcatgggggagttccggggcattccattgagcattgtatgaccctgaaacataaggtgcaaagtctgattgatgcaggctggttgagattcgaggaggaaaatcactcgggagttttgatgtcgttgtgatgcaatcctaccccccaagggcattggataaaagactccaagaagattgggccaaagatgcaagagaaggccctagggttctcatgagccttanggtagatttcgggcccatgggctaagtatgagcccacttatctttgtacatattagattaagatttcattaaattgggcc

SEQ ID NO: 9803 - DNA, 402 bp, Glycine max
  unsure (1)..(402): unsure at all n locations
acttaccaccctcttattgatggccagactaaacactccattcagtcgctgaaggatcttttgagggcatgtgtcttagaacaaaagggaagttgggagagttttctgccattgatagagtttagctataacaatagttttcattctaccattggaatggctccctattaagccctgtatgatagaagatgtangacactcctgtgttggctagaacctggagacaacctcaccttaggacctaaagtggtacaacaaaccactaagaaggtcaagttaatccaagagaggataaggactactcagagtaggcagaagagttatcatgacaagaggaggaaagacctgaaattcgaggttggtgatcatgtattcttgggagtcacttcgtggactggggtt

SEQ ID NO: 9804 - DNA, 487 bp, Glycine max
agctttttatgaagtttgaatgttttttttaaaaagatgtaatcgattaccatctttatgtcatcgattactagtaacggaatttttgaaattcaaaatgaaaagacatgacttctcattaaataaatgtgtaatcgattaccaaaaatctgtaattgattaccaatgaggaaatttcaacgataactctgaaaagtcacatttcttcatgagttttttgaaaagccaccaaaggcctataaatatgtgacttggctttaaaaaatcttcagagtttttcggaacctcattgtcttattctctcaaaaacaaaaatttggccaaacacttgcgaatcaattaagggattcttattagttcttcaaattggattattcttctctaaaaagagagaaaaaattgtgtacattaaaaagtaaaactgttgttgagatgaagaagctgtgaaatctcttgatttgggagtttttttgaacacaaaggaaag

SEQ ID NO: 9805 - DNA, 432 bp, Glycine max
  unsure (1)..(432): unsure at all n locations
ntggccaattctgccaantnnaggtcaaattgagcttttatgttagaacctttgcacttgaataattggactgcgagtttgggcttttgttttctgtaattagtttaattaggtagttaggtaggtagttaggtagttagttagttatttactaacactctatatattagtgttagttagttagtgacttcacttgaacttcattttgtacaaaagtacttgtgtaagctgatgcaatcctccctaaagggaccagtcactaagtgaatatttgatgtgtgtgttgagaaataaatttaattgaattggtagaagccgtatccaattaaattttagagggggaggtgagcatttacttgctacaccccattgccacatcatatagtcacactntgtgcatgtccttcatgctttacatgcctcatgacacct

SEQ ID NO: 9806 - DNA, 402 bp, Glycine max
agcttcccgcatccgtacttggaaggatctgattattgctttcctaaggcaatatcagtataattccgatatggctcccgatcgcactcagctacaaaatatgttcaagaaggaagatgagacctttaaagaatacgcgcagcgatggagagacctggcagcacaagtggcacctcccatggtcgaaagggagatgatcaccatgatggtagacaccttgccagtatttgatgcaatcctaccccgtaagggcattggatagaaaactccaagtagattgggccaaagatgcaagagaaggccctagggttcttatgagccttagggtagatttcgggcccatgggctaagtacgagcccacttatctttgtaaatattaaattaaggtttcattatttttg

SEQ ID NO: 9807 - DNA, 459 bp, Glycine max
agcttgctcgtcttgctgatatttatcatgctgacttttctgatgatgaccgaggaacaattagggatcaacttgaaacttatgtgcttcaagtgagaagaaatgcttctttttccacttgtgaagatgttcaaagtttggctatgaagatggttcaaactgagaaacatttggtatttccattggtttataaacttattgagctagctttgatattgccggtgtcgacaacatccgttgaaagagctttttcagcaatgaagattatcaagtctaaattgcgcaataagatcaacgatgtgtggttcaatgacttgatggtatgttacaccgagcgggagatattcaagtcacttgatgatattgatattattcgaacatctaccgcaaagaagtctcggaaaagacacttgcctcgtaattttatttaaccccctattggaaggataatgttaatct

SEQ ID NO: 9808 - DNA, 321 bp, Glycine max
attgagaggaaaaatatatgttatgtctaacaagccaacaaagggagaaagaaggttgtcttcgaacccggagattgggtttgggtgcacatgagaaaagaaaggtttccggaacaaaggaaatcaaagcttcaaccaaggggagatggaccatttcaagtgcttgaaagaatcaatgacaatgcttacaaagttgagctgcccggtgagtataatgttagttccaccttcaatgtctctgatttatctctttttgatgcagatggagaatccgatttgaggacaaatccttctcaagagggagagaatgatgaggacatg

SEQ ID NO: 9809 - DNA, 411 bp, Glycine max
tgttccaaatgttttttaaatgtgtgtaattgattacaatatattggtaatcgattaccagtgtatctgaacgttgaaattcaaattcaattgtgaagagtcacatcttttcataaaatgctttgtgtaattgattacaaggttatggaaatcgattaccagtgacaagttctgaataaaaagtcaagagatgtaactcttccaatggttttctcaagattttctcaaggttataactcttctaatggttttcttgaccagacatgaagagtctataaaagcaagaccttgacttgcatttcaataatttttacaacttttgaacttctttgaacaacttttgagatatcttgaaaccttcgcttctaatctttcttcttcttcctttgccaaaaagctttctaagttttt

SEQ ID NO: 9810 - DNA, 427 bp, Glycine max
  unsure (1)..(427): unsure at all n locations
tcttagtctcagatnannnnatgagtttgtagctaccttatgcactcctctaatgactatggcatcatttctggcgctaaactgctaggagttggaagccatcttctcaattaaatttctaacttcagcaggagtcatgtctccaagggcttcaccactggcagcatctatcatacttatctccatattactgagtcctttataaaaatattggagaagaagctgctctgaaatctgatggtgagggcaactggcacataattttttaaatcgctcccagtactcatacaggctctctccactgagttgtctaatacctgagatatctttcctgatggctgtggtcctggaagcagggaaaattttttctaagaatactctcttaaggccatcccagctcgtgatggaccttggagcaaggtaatac

SEQ ID NO: 9811 - DNA, 420 bp, Glycine max
agcttggtatgaaaaactaagtttacttctcttaaaaaatggctttgagcgaggaaaggttgagaaaacacttttttgcaaaaactatgaatctcagtttttatcagtgcaagtatatatggacgacattatatttggtgctattaataaaatgctttgtgaagatttttctaagctaatgcaaacagagtttgaaatgagtatgatgggagaattgaaattctttcttggactacaaataaagcaaacacccaaaggtatctatattcaccaaaccaagtatgtgaaataattgttgaaaaaagtcaacatgaacaatgcaaaagaaacgaagactccaatgcatcctacaacatacctaggtggttgaaagcccacatgcaagatttggattggctcccaagtttgagaactactaaa

SEQ ID NO: 9812 - DNA, 377 bp, Glycine max
aacattccaattgatttcaaaatgtgtgtatcgattacaagatattggtaatcgattaccagtgtatctgaatgttgaaattcaaaatcaattgtgaatagtcatatcctttcataaaaagctttgtgtaatcgattacatggttttggtaatcgattaccagtgacaagttttgaataaaaatcaaaagatgtaactcttccaatggttttcaggttttctcgaggtcataactcttccaatggttttcttgaccagacatgaaaggtctataaaagcaagatcttgacttgcatttaacagaacaattacttacaacttttttatatactcttttacaacctttgaatctctttgaacatcttcttgaacttctt

SEQ ID NO: 9813 - DNA, 269 bp, Glycine max
ataaggcatgcgaagtgggtggaattcctagagtctttcccttatgttatcaaacataaaacgggaaaaggaaatattgtagccgatgctctttctcggcgtcatgcattactttctatgcttgaaacaaaattgattggtcttgaatgtttgaaaagcatgtatgaaaatgatgaaacttttggagaaattttaaaaatgtgaaaaatttcagaaatggttctttgacatgaagctttctttcaaagaaacaaattggtgtcctaatg

SEQ ID NO: 9814 - DNA, 320 bp, Glycine max
cagcatgcaagctccacactggagaatggagaacatattattagcgctaggcaaaaacactcagggggctccgaacaaaagtagaggatggacgaatgccaagaaggaccgcacttaggcaaacatgaaactcagctccaaactcgaaagtggaggacacaagaatgacaacgcggcacccgaaaaggatgagaaaggaggattgccgtgagggacctcacttaggcaatcatggaacacagatccaaactcgaaagtggaggacacacgaatgacaacgcaaaggatccacggggccccagaaaaggaagataatggag

SEQ ID NO: 9815 - DNA, 614 bp, Glycine max
  unsure (1)..(614): unsure at all n locations
agctttgaaggtgcgtagcccaccatttttcatagtagaatactggtaatgtgtctactatcattgtcatcgttttttcgtcattgaggtgccacttgagctgccaggttctccacctttgggcgtattcttagaaagatccgtgcccctttttcttttttttttttcacatgttttgtagttgcatcctatccgaagacattatactgacactgcctaacgaaggcaaccactaggtccttccaagaatggactcgggaaggttccaagttagtgtatcaggtaacagctaccccagtaagactttcttggaaggaatgtatcagcaattcctcatcttttgcgtatgcccccatcttccgacaatacatctttagatggttcttgtggcaagtattccccttgtacttgtcaaagtccgacaccttgaacttgggaggggtgatgatattgggttctaagaacaactctnttaagttagcaaaggcataatcttcacctccttcaatggccctgagtctttcctctatatgatccaactcttccatttctgccatagcacaaggttttttactttgtgtggaatgcaagaggtgtaacttggggtgatactg

SEQ ID NO: 9816 - DNA, 631 bp, Glycine max
agcttgtatgagtactggaaaatattttttaaattgtgtgcaagctgccctcaccaccagatttctgagcaacttcttcttcaatacttctatgagggacttaccaacatggagaggagtatgattgatgctgccaacaattcaattcaagaaatgatgttattgttcttagaggagtccatgaggtggccacagattcatcttcatctactgaaaataaaaagcttgaaggaaaacttgatgccttggtcaaactagtaactcagcttgccatgaatcagaaatctacacctgttgcaagagcctgtggtctatgttcttctgtagatcaccattcagatctttgtccttctttgcagcaatctggagtcaatgagcaacctaaagcttatgctgcaaacatttataatagacctccacagcagcaaaaccaacaacagcaaaataattatgacctttcaagcaacagatacaatccaggttggaggaatcatccaaatttgagatggacaagcccttcactacaacaatagtctatcccttcctttcagaataccgctagtccaagcatgccttatgttcctcctccaatgcggcaacaacaacggcagctacaacaaatacaacaagc

SEQ ID NO: 9817 - DNA, 499 bp, Glycine max
agcttgcctggttttattttgtgataattatgaagaatgattttatttatttttattttaaaacttagtacactacttataagttataatcatacactaaaaaattactatcaagcttggcattattttcaagaactttattgtttctttggtttgtcattttccatttaccattgtctgttttcaataagtaggcatgttattgaattgaattgaattcttaagaatctaggcattgtaatcgattaccagagacagaatacttagaggtttttcaaaaagaagtttgaaatttgaattttaaatactgtaatcgattaccatttaactgtaatcgattcccagtaacgaaaattttagaaatttgaaatgaaaagtcatgacccctcaatgtataactgtgtaatcgattaccagtgagggaattctaaaattgttctgaaaagtcacatctcttcaaaagttttgaaaaaccacaaagggcctatatatatgtgag

SEQ ID NO: 9818 - DNA, 565 bp, Glycine max
agcttaactacacttaaggttctttgctccttcaaaactatgtgttcaactaagcaatgcattaaagacatgttaatttaattgaataataaatgcgagtctttattaggaggtgtgattaattcatttaatataataaatgggcagattattcaaggagtagttgaagatttgatttattctagactattactttttgttggacaagtgacctcaataacttaagagggggtgaattaattaagttttaaaatttccccgctaacaaattttaacccctttttaaatgatacatgataaactcaaaatgcagaagaagaagaagaaacaatcaatttaataattttcttttaaatgcacaagacaaagtaaactgcaataaaataactgagataagggaagagagaattgcaaactcgatttatcctggtttggccactccccgtgcctatgtccagtccttaagcaacccacttgagattttccactatctttgtaaactctttacaacttctgaacacatcttgggattcttctctcttgtgttcaggattctcataagtca

SEQ ID NO: 9819 - DNA, 473 bp, Glycine max
agcttccatcacttttgacgactgttttttgagattccttagcattggcctgataccttgcacataagtaagcacttagcatgacatatggtctatttttagttaagtagaggagtgatccaatcatacctctatatcttaactcatccactgatttacctttctcatctaagtcaaggtaggttaaagttgccattggagtagatgcttctttgcatttttccatgccaaatttcttaattagttttgtacaatatttcgtttgatttaggaaggttccatgtttcatttgcttgacttggagtccaagaaagaagttcaactctcccgtcatagacatctcaaattccttttgcatacaactagaaatttccttacacaaaatttcatttgtagcaccaaatataatatcattaacatatattttaacaattagcaactcactgtttacttttcttaataaacaatgtttt

SEQ ID NO: 9820 - DNA, 254 bp, Glycine max
gcgtctcaatagattacgggactcattcagacatccgagcaaaacgttattgtcgtttggattagttcagagcttcagaattcaatttcgatcgtctcgatatattacgggactcaatcagacatctgaggaaaaaagttattgtcgtttgaatttgctgagagctcaacattcaattttgagcggctcgatgtattaccggacctaatcaaacctcccaggtaaaaagtattggtggttggatttgctgagaa

SEQ ID NO: 9821 - DNA, 324 bp, Glycine max
aataaccaaatgcacatttggccaaccctcaggcaagtacctgggacatgtgggttcttctcgcgggggcgaaacagtgctaaccaaggttcacgctatttaacagtggccggaacctctatcggggcatgcactcttaaactttttgggactcgcgggattctacaaaagattcattttcggctatgcgacaattgctgcaccttaacccaacttctaacactggaaccttttcaatgggcccaagaagctcgtgcaatttttgctgctcttaagcagatgctgacctcaacccctgttctccggttgtcggactttactctt

SEQ ID NO: 9822 - DNA, 410 bp, Glycine max
aacatagaattcccatgtatatgtagatagtttctgcattctaccagacaatttttttttagaaataagcaataggatgcttgttttggcttaacacaacaccaactcccctccctgaagcatcagtttctaatacaaaaagtttattgaaattaggaatagccaagacaggtgcagaagtcatggctatcttaagtttttggaaagcctgtgcagtagcttgaccccatttgaaagagtccttcttcaatagaacagtcagaggtgttgcaatggtagcataggtcttaacaaatcttctataataacctgtaagtcctaggaagccccttaatttctttagattcataggctctggccaattctgaattgcctctaatttgtttgcatccatagctatgcctgatcct

SEQ ID NO: 9823 - DNA, 558 bp, Glycine max
agcttgttcatcttgagataatttgtgttcatcctcatttgaagttgatggtgcaacatatttctttggcctaacaggaactccaatatttttacagcttttaatgttatgattggtttggccacaccttccacatgtaaactcaggcaatttcctctttagcttatgtcctgtgacattgtcctcatttacaggtctccttctatttttctttggccttcctctttggacccttttatgtggtggaacagggtgtgtatactgtgtctgggcccaatattgtggtccttggactggttcaataaaatgctagtatgtcttattataagcttctattgacagccactcatgacacatgtcctcaggcttccctcctttgtgagttattgttgcaatgacatgtccgcatggcatccctacatcaaagttgtaaaatcagcacacatgtaggttaggaatgaaaaaaaaactattaagaacacaacctgttagttgccatactccacaagtgcatgtccattcacctaaattgacctcaaccttatttccccacatgtg

SEQ ID NO: 9824 - DNA, 117 bp, Glycine max
agcttcaacatcagacgcctttctttgtgttggaactacttctcatggacttgatgggggctatgcaagtcgtgagccttggatgaataaggtctgcctatgatgaagcggatgatt

SEQ ID NO: 9825 - DNA, 442 bp, Glycine max
  unsure (1)..(442): unsure at all n locations
agctntctccactaagttgcctgatgcctgaaatgtcttttctgatggcagtggtcctagatgcagggaagattttctccaagaacaccctcttaaggtcatcccagctgaaaacggacctgggagcaaggtagtatagccaatcttttgtcactccctccagagaatgaggaaaagcctttagaaagatatgatcttcttggacatcagggggcttcatggtggaacaaaaaatatggaactccttaagatgcttatgaggatcttcacctgcaagaccatgaaactttggcagcaaatgtattagtccagtcttgagaacatatgaaacaccctcatcaggatattgaatgcacaagctctcataagtgaaatcaggtgtagccatctccctaagagtcctcttacgaggtggagggtgagccatgttctcagtatgaaa

SEQ ID NO: 9826 - DNA, 389 bp, Glycine max
tcataaggttatatatggcctcaaataagctcctaatgcttggtttgataaactaaatgagactctactaatgtttgaattcaaatccaacaagtttgatccttcactatttgtttattttaaggcttcatccataatctacattccggtatatgttgatgacatcataaaaacatgaaatgatattcctttattacatcaactcatttctaagctaaatatagtattttctctcaaagatcttggatcctcagattatttcttgggaatgaaagtaaagcatctatctgatggttccattgctttaacttaaaccaaatatattatagacttaatgggcaaaaccaacatgttagatgtcaaacctatatcttccccaatggtaactg

SEQ ID NO: 9827 - DNA, 430 bp, Glycine max
agcttcattcttagaatgaagtaagtagatatacatatatcgtgaataatcatctataaaggttatgaagtatttcggactatttgcatccatgtctggacaacatatgtctgtatgtatgatttccaataaattagaactcctctttgcaccctttttagacttgttagttttcttacccttaatgcaatctacacaagtctcaaaatcatcgaaatccaaagtactaagtactccttcatttactaattgcttgattctctcaatagagatatgtcctaatctctggtgccacaacatagaggattcttcattcacattacatcgttttaacccaatagaaacatgcatagaagtagcatcgtttttcaattcaatcgaataaagaccatcaaccaattgaccacaaccaataatttcagaattattt

SEQ ID NO: 9828 - DNA, 266 bp, Glycine max
  unsure (1)..(266): unsure at all n locations
gctctcgagaaactcaaatggtcataacttatcacacagacgtccgattcatgcgcataatatatcgagacgctcgaaattgaacaacgtatggtgtcgagaaattcaaatggtcataactngtcacacggaagtccgattcatgcgcataatatatcgagacgctcgaaattgaacatcgcaagctctcgagaaattccaatggtcataacttgtcacacggaagtccgattctggcgcataatatattgagaagcttgaaattg

SEQ ID NO: 9829 - DNA, 419 bp, Glycine max
agcttgaaattgaacaacagatgctctcgagaaattcaaatggtcataacttatcacacgtaggtccgattctggcggatagtatatcgagaagctcataattgaacaacgaaagctctcaagaaattcaaatggtcataacttatcacacggaagtccgattaaggcgcataatgtatcgagacgctcgaaattgaacaacggaagcactcgagaaattcaaatggtcataacttatcacacggaagtccgattaaggcgcatagtatatcgagaagctcataattgaacaacgaaagctctcaagaaattcaaattgtcataacttatcacacggaagtccgattcaggcacataatatatcgagacgctcgaaattgaacaacgaaagctctcgagaaattcaagtggtcataact

SEQ ID NO: 9830 - DNA, 423 bp, Glycine max
  unsure (1)..(423): unsure at all n locations
agctngaaggagtttcatgcaccatggaactatttcactctataagttgattccaattggcttcctagttttcagcttacctatttggatgtgggatcatggcagttaggtcccagctttccatcgtggattcagtcacaaaaaaaacttaaatatttaggcatgtctaacacagggattattgattctattcctacacagatgtgggaagcacaatctcaggttttgtatttaaaccactctcataatcatatccatggtgagcttgtgactacattaaaaaatccaatatctatcccaactgttgatctaagcacaaatcacttatgtggtaaattaccctatctttcaaatgatgtgtatgggttagacctttcaaccaattcattctctgaatccatgcacgattgtttatgtaacaat

SEQ ID NO: 9831 - DNA, 405 bp, Glycine max
actttaatagtcgttttatagattcggcgttgtcaagtggagaacgtaacttttccaagaattcatttttttatggatactgtctcattttctgcataaaaatttgtagagattctgataggtctagattaatctgataattcaaatcataccacttaaatgtattcgaatcttttttattcatatcagattcgaattaatctaattgaaaatcgatgttgatagactttaattattatatatagatagaatttttatgatttaatccattaatcatgtgttattttctataatttgctattatttagttggttctaagtcaataataacattcatatatatcgcttacattataatggtaagtatggcattattatttgtcaacaatggaataaaattatgtta

SEQ ID NO: 9832 - DNA, 431 bp, Glycine max
agctctcatagttcaatttctagcgtctcgatatattatgcgcctaatacggacatccgagttaaatgttatgaccatttgaatttctcgagagcttccgttgttcaattacgagcgtctctatatgtgatgcgcctaaatcggacatccgagttaaaagttatgtccatttgaatttctcgagagcttccgttgttaaattttgagcgtctctatatgtgatgggcctgaatcggacatccgagttaaaagttatgtcaatttgaatttctcgagagcttccgttgttgaatttcgagagtctcgatatattatgcgcctaaatcagacatccgagtgaaaagttatgaccatttgaatttctcgagagcttccgttggtcaatttcgagcgtctcgatatattatgcacctgaatcggacatccgaatg

SEQ ID NO: 9833 - DNA, 391 bp, Glycine max
  unsure (1)..(391): unsure at all n locations
tgtaaaaaaatgaagcaggttaaaactcttttcaaagaataaattttgtttgtattagaaaaccccttgaacaacttcacattgatttatttggtccctttagaactatgagtttgggtggaaattactatggcttagtaatagtagatgattactcaaggttcacttggacttagttnttgaaaaccaaaaatgaagcttttgatgcttttcgcaaacttacaaggtgattcaaaatgaaaaaggtctcaacattgtttcaattaaaagtgatcatggaggtgaatttcaaaatgagtcttttgaaaacttttgtgaagaaaatggaatttaccataatttttttgccccaagaacacctcaacataatggtgttgtagagaggaaaaat

SEQ ID NO: 9834 - DNA, 417 bp, Glycine max
  unsure (1)..(417): unsure at all n locations
tcttggtttcagctgctgaagatgaatccgtggctacttcatgcactcctctaatgactatagcatcatttctgccactaaactgttgggagttggaagccatcttctcaattaaatttctggctttagcaggggtcatgtctccaagggctctaccactggtagcatctatcatacttctgtccatgttactgagtccttcataaaaatattggagaagaagcagctctgaaatctgatggtgagggcaactggcacatagttttttaaatctctcccaatattcatacaggctctctccacagagttgtctaatacctgaaatatcttttctgatggccatggtcctggaagcagggaaattnttttataagaatactctcttgaggtcatcccagctcgtgatggaccttggag

SEQ ID NO: 9835 - DNA, 408 bp, Glycine max
  unsure (1)..(408): unsure at all n locations
taatgatgattcaacccctaagcacttatgggctgaagcagtgaatactacatgttatcttaaaaacataatttacataagacctatccttaaaaagactctatatgaattgtggaagggatgaaaatccaacatatcatattttcatccatttggatgcaaatattttattctcaccacacaggataacttgggaataattgattcaaaaagtgataatgggatatttcttggatactctaaaaattcaaaggcattcagagtttataactcaggaaccttggtagttgaagaaactattcatataagatttgacgaaaataagtctgacaaagatttattagagctacacgatttgcagatntaagactcgatggtgactctatagcacgtagcttgtaaagaaag

SEQ ID NO: 9836 - DNA, 469 bp, Glycine max
  unsure (1)..(469): unsure at all n locations
acctgcggcatgcaagcttatgtntcaaacatntataatagaccccctcagcagcaaaaccaacaacaacagaataattatgatctttcaagcaacaaatacaatccatgttggaggaatcatccaaacctgtgaaggacaagtcctccacaacaacaacaacttgtccctccttttcagaatgctgctggcccaagcaagccatatgttcctccccaatgcagcagtagcaacaacaacaaagacaacaagcaactgaggctcctcctcaaccttccttagaagagttagtgaggcaaataaccatccagaatatgcaatttcagcaagagacaagtgccttcattcagattctgacaaatcaaatggggtagatggctactcagatgaatcaagctcagtcccacaattatgacaaattgctttcacaaactgtgcagaatccgaanaatgtgagtgccatcacctt

SEQ ID NO: 9837 - DNA, 447 bp, Glycine max
  unsure (1)..(447): unsure at all n locations
agcttcaagaaaaagatggcctcagcaaactccttatttccagaagggaattctatcaatagacctccaatctttaatggagagggttaccattactggaaaacccgaatgcaaatttttattgaggcaatagatctaaatatttgggaagccatagaaatagggccttatatacccaccacagtggaaagagtttcaatagatggtagttcatcaagtgaaagaataactatagaaaaacctagagatagatggtctgaagaggatagaaaacgagtacaatacaacttaaaagccaaaaatataataacatctgccctgggaatggatgaatatttcagggtttcaaattgtaagagtgctaaggaaatgtggaacactcttcgattaacacatgaaggaactacngatgttaaaagatctatgataaatgcactaactcatgag

SEQ ID NO: 9838 - DNA, 424 bp, Glycine max
  unsure (1)..(424): unsure at all n locations
ntgaggaaattcatacgacaataccttttgacacggatgtcggattgagtcacgtaatatctcgagacgcttgaaattgaataccgaagctctgagcaaattcaaacgacaataactttttactcggatgtcggattgagtcacgtaatatgtcaagacgctcgaaatagaataccgaagctctgagcaaattcaaacgacaatacctattgactcggatgtcggattgagtcacgtaatatctcgagacgctcgaaattgaataccgaagctctgagcgaattcaaacgacaataacttattactcggatgtgcgattgagtcccataatatgacgagacactcggaattgaataccgaagttatgagcaaattcaatcgacaattaattttactcggatgtcggattgagtcacgtaatatg

SEQ ID NO: 9839 - DNA, 323 bp, Glycine max
  unsure (1)..(323): unsure at all n locations
agctntaacattcatttacgagcgtctctatatataacgggactcaatcagacatccgagtaaaaagtaattgtcgtttgaatttgctaagagctgcggcattcaatttcgagtgtctcgatatattacgggactctatcagacatccgagtaaaaacttattgtcgattgaatttgctctgagcttcaacattcaatttcgagcatcccgatatattacgggactctatcagacatccgagtaaaaagttattgtcatttgaatttgctctgagcgtcaacattcaatgtcgagcgtctngatatattacgggactcaatca

SEQ ID NO: 9840 - DNA, 438 bp, Glycine max
acatcgagtaaaaatgctattaaatttccctataatagatgattggtacaattcttttctgtacttcaagttggtaaaaaaaatttagttactccaatcatttagaatgaagttggtccaccccatttttactcgagcaagttagacaaattcgtatcataaatatactcacaaaactaatgtaaaatgtctattatgtaattatctgttgcatgttatatatcataagtttgttgagttcatctttagttttgttagctcacaccaatatttatgtcaatttacatattgttatatataataagtgtgtaagattttataataaatatctcaaaaattatttgtgagtgattaatagtgcaaaaaatttataacggtaatgcatgaaaattaaattcattaataaattcttgaatgaaaatacacaataaaatgaac

SEQ ID NO: 9841 - DNA, 389 bp, Glycine max
  unsure (1)..(389): unsure at all n locations
atnctgactccgatagatataagattcttgtgggataactcattctccctaccattactagacctgatatctcctctgctgcgggagtggctgccaatttatgcagaatcctcatttggaccattggaatgctgacatgcctattctgagggatgtatatacagctcctggactagggttgctgtatgaaaacaatggtattacgcaactatcatgatattgtgatgctgattgggctggatgtcccatggataggagaactacatcacgttatagggtcttcactggtggaaatctaaactcttgcaaagcaagaaacagactattgtctctcggtccaccgcacaagccgacgatcgatctatggctatcattacatgtgagctcat

SEQ ID NO: 9842 - DNA, 424 bp, Glycine max
agcttgtcgcattgtacgagtaccctgaagacttcttccaggtctgccaattgaagatgtcaactttcgctacaaggtcatgccattcggcctaaaaaatgcaggcacgacataccaacgactaatggactgagtcttcaaacaagagatcgaatgaaacgtcgaggtatatgtggatgacatggatgtcaagtctggaggatgcatactggtcttgttatatccagggtaggcatacaggaagcttaacacctggaacccagacgtcccatcgactaacctgttgatgttgggcagatggtatgtgtctttagagcatgctctagacatatcagagtagtcagtgcatattcgacatttgctattagcctatttgaccatgacgatgttggcgagccaggtagagaacctaacctctctgatg

SEQ ID NO: 9843 - DNA, 434 bp, Glycine max
  unsure (1)..(434): unsure at all n locations
agcttgttcatattcttgatcccatttgttctttntggtctttttcagtaagttcatgatcggcctagccttctcagctatccaaggtagaaatcttatcaaagaggctatgcgtcctgtgagtctttgtatctctttgaaagtcttcggactcctcatctcaatgacgactggacatttatctagattagcttgtatgcctctttgggaaagcataaaaccaaaaaattttcctcctccaatcccaagaacacatttttagaggttaagtcgtatgtatgtttttggatttgtgaaatgatctcggctaggtcctcaacatgggacttgactccattggatttgaccactatctcatcaacgtacacctctatatttctacgaattttatctttgaagatcttatccatgaggcattggtacatagctcccac

SEQ ID NO: 9844 - DNA, 379 bp, Glycine max
tcttatccaaggctcatcttggtggtgaagctccttctttcatggcttattccctagtggatggcgccgcctcttacctcttctcctttgtcttccgctgcatctccatggtggaaaatcaccattaaaggacctcattgaagctcaaagatccagcttccatagaagctccacaagcaagtttccatcatgaatgatgcaatcctaccccgcaagggcattggatagaagactccaagtagattgggctagagatgcaagagaaggccctagggttctcatgagccttaggatagatttcgggcccatgggctaagtatgagcccacttatctttgtacatattaaattaaggtttcattaattttgggtcttttatt

SEQ ID NO: 9845 - DNA, 436 bp, Glycine max
  unsure (1)..(436): unsure at all n locations
agctngccaccacggagttttccgactattctcttgtgtggtggaacaagctacaaaaggagagagcaagaaatgaagagccaatggttgatacatggacggagatgaaaaagatcatgaggaagcggtatgtgccggctagttactcaagggacttgaaattcaagctccaaaaactaacccaaggcaacaagggggttgaggagtatttcaaggaaatggatgtgctcatgattcaagcaaatattgaagaagatgaggaggtaactatggctcgatttcttaatggtttgactaatgatatccgtgatattgttgagctgcaggagtttgttgaaatggatgatttgcttcacaaagcaatccaagtggagcaacaattaaaaaggaagggagtggctaagaggagttttaccaactttggttcttctagttg

SEQ ID NO: 9846 - DNA, 453 bp, Glycine max
  unsure (1)..(453): unsure at all n locations
cttggttacatacatcatgcaaactaccctnttccccaagggtagttgtgatgatattgataaggcttgtaggaattntattttgggacatgattcgagtgaaaggaaaatccacctagtatcttggaacaccatttgttcagataaaaataatggtggtttgggcctgtgcaagaagaggtatgtaaatcangcctttatgttgagagctaattggcagttttgtcaaatggaagctcctatttgggcttctattttacgaaacaagtacagatgtggtgcagattcgttccctacagttgatagtaaaagggccggtagcaatatttggcgtgggatttgctttacgtgggattttttttttgtaagaatgtggtttggagggctggggatggtactacaatgaaattttggcgtgattgctggatccctagaagctttcctctgattgat

SEQ ID NO: 9847 - DNA, 445 bp, Glycine max
  unsure (1)..(445): unsure at all n locations
ngaagtggttaaactttctacaagatacctgctctgataccatttgttggatcaagtggcctcggaataattaagaaggggggttgaattaattattaatgaacctttactaattaaaaatttatccttcttaatgttactagattcaattaggcttttactataatgttaagaaagtaaataacagaaaaagaaacttaaccaaaagtaaaagcgataattaaagtgcacagcggaaattaaagagtgtagggaagaagaagacaaacacaagaatttatactggttcggcaacaacccgtgcctacatccagtccccaagcaaccaccggttcttgagatttctttcaaccttgtaaaatcctttacaagcaaagatccacaagggatgtacccttccttgttctctttgaacaaccaagtggatgtaccctccacttgaact

SEQ ID NO: 9848 - DNA, 422 bp, Glycine max
  unsure (1)..(422): unsure at all n locations
ntagattcatcacttaccccaagcaatacacactgcatgctcttgtcatccagctttgttcttttctgatcaggtacatggacatgagttaggcacccaaatactttaaagtaatctactttaggtttgattccactccacatctcttctggagttttatctttcactgtcaatgtaggactcctgttgagaacatgaactgtccattttgcagcttctggccaaaaaacctttggtacttgtttgtcacaaagcatgcaccggaccatattcataatggttcgatttttacactccgctacgccgttttgttgtggagtgtaagatgttgtgagttgcctgcttatgccattaattttacaaaattcattaaactcatttgaggtgaattcacccccccctatctgtgcgtaaacaacata

SEQ ID NO: 9849 - DNA, 388 bp, Glycine max
tccttaagaagattcctaaagaagcttgagcttagctacacatacctctctaatagctaagctcacctccttgagatgagaagctagagcttagctacacaccccctataatagctaagctcaccccatgacaaaaaatatgaaaatacaaaaaaatgtccttactacaaagactactcaaaatgccccaaaatacaaggctaaaaccctatactactagaatggccaaaatacaaggcccagacgaaggaaatacctattctaatatttacaaagataaacgggctcatacttagcccatgggctcgaaatctaccctaaggctcatgagaaccctagggccttcccttggatctctagccaatctacttggagtcttctacccaat

SEQ ID NO: 9850 - DNA, 387 bp, Glycine max
  unsure (1)..(387): unsure at all n locations
tgtgttntaatgtttcaatgctgattgcaccggttccccattctgttatagatgtaattttttcgtaattggtattctgaataactgattgaaatgattaaaacatcctgaaggcttacaatgactactatattttacacaggatactgtagttggatttttgttggctggagtgggaaatgttgacatacgtaggaagacaaattacctcattgtggattcaagtatgccactgaactatattttacttactattctgtagtctgagtatgtttggtattaatcccctaaaaactacaatgtttttcttgtgaaattgtacatcatgaagtgactccctgcctcttttatctaccatccaaattgtgatacccaataaacaatata

SEQ ID NO: 9851 - DNA, 443 bp, Glycine max
  unsure (1)..(443): unsure at all n locations
agctntaacaccattaagggtaaagactcttcccgtggcctttggatgtccagtttgaccattcgggcctccaccatttcgctctttcttgggtcgtgaacaatctctttgagtgtgtcccttttgtccataattaaaacatgttgcgcctatatcaggacaattcgaggagatgtgccctggcttaccacatctgtaacaaatgatatgagtggagaaagtattgggcttgctaccactaccacctgcaaatcccctagcaacagtcctctgattgtcatggcggttaccatattgcttagggggtttcgaatatggttttcctcaatgttgaggcccattctttntgttcctcattggacctgtactccaataataggccgccctatctcgggagtcttcatcccaaatccggcacatgttaaccaaaagtgggaactgac

SEQ ID NO: 9852 - DNA, 438 bp, Glycine max
catgcaagcttgtaggtaaactagatgccttagttatacctggtaacccaactggccatgaataaaaaatctgcacttgtcgccagactctgtggtttatgctcatttgtcgaccaccacacagacctttgcccttctatgcaacaatctgaagcaattgaacagcctgaagcttatgctgcaaacatctacaacagaccttctcaacctgagcagcaaaatcaaccacaatagaacaattatgacctctacagcaacaggtacaatcatgggtggaggaatcatcctaaccttagatggtcgaatccttcacaacagccgcaacaacaaccttattttcaaaatgttgctggcccaagcagaccatacgttcgtccaccaatccagcagcaacaacagcaacagccgcagaaacagcaaacagttgatgctcctccg

SEQ ID NO: 9853 - DNA, 429 bp, Glycine max
tgtgttatgaaatttatgattctccaagaataatttaatttctcccaattatgcatgaaccctacttatgaaatttagggataatttaatttctttcaattatgcatcaaccctgatcatgaaatttagggatttttttttcctgctgaaagtatgaaatcttatattgaaaagggtatcaattaagttggcctagaaggaaattttgaaattgctatttgcaaaccccattttgctattctcagtcccacttgcttttttttcccaaaaattattattaaacatgattaaaggattgaaagtttataccctgcaattaaattaatgtgaatgctttgaaattattggtagcaataaatatatatatatgctacatatttcttttgaaagtgttgaatgcaaatcacaactaaatgtgaatattattta

SEQ ID NO: 9854 - DNA, 424 bp, Glycine max
tataatgtcttgaaaaagattgattatccatatgaggtcagcgttatttctaaattctaattctatcaaataagccaattatcattatttattattgaatttataattgacattcctctcatatgcatctgaaacaaaccttgatcctagacattcttactctcatttctttacttttgtgttacgcattggaattcatttttatccaagatttacattcactcaaaattttattggttaaatacgtgtgtcaagaggggacataaatagaatttatttcacttaagatttctcacttatttgacattgtaatcataatttttttccagcacatattgcacagcatgaaagatcccagtattgctgcattttggttgactacatttcctcagattatgggtggatttacctatgacgatgatgt

SEQ ID NO: 9855 - DNA, 409 bp, Glycine max
agcttatttaaaagttctgcttaaagacgtttttgattaattaattattttaaaacctagtgaaatactaactaaaaaaagaaacttataaaattttgtataagtaatgtacaaatccaaaaataattgataaacaaaatcatattgaattcaagtcgttaaagcatagagtatattaaaagaaaataaaaaaaacataatagtaaaaaatgtatggattagagatgatttgcaaaaaatgaattctattctatgtgaacagtgtgcatggacagtaataaaaattggaatactaaaatcctagaattattctcctttccgaaaaaaaattccctaaactaaaaccttggtgcttgtatataagtacttggccccaaagcttacaaatctattttaagtccaagcccat

SEQ ID NO: 9856 - DNA, 368 bp, Glycine max
actaagcttatgctgaaatattacaatagacctcctcaacctcatcagcaaaatcaaccacagcagaacaattatgacctttccagcaacagataccaccctggatggaggaatcaccctaacctcagatggtccagccctcagcaacaatagcagcctgcttcttccttccaaaatgctgctggcccaagcagaccatacattcctccaccaatccaacaacagcaacaaccccagaaacagccaacaattgaggcccctccacaaccttccctcgaagaacttgtgaggcaaatgactatgcagaacatgcagtttcagcaagagaccagaagcctcattcagagcttaaccaatcagatgggaca

SEQ ID NO: 9857 - DNA, 413 bp, Glycine max
ttcattagattgaactgccttggatttattatttgtattcacagacttgtacaaatcaacttcaagctcacataaatcttcaacccaccagtcttttggcaccagtcgagttctgagtccattctggtttgactcaattccattttcctctggaagcttcttccggttataggtgtaggaccaatctactttggatacatcaacacatgccttatttgctatagattcaatgcaatggctgacaacctttatgtcctcaaccaagggtaacatatactttgaagtctgaagaaggatgattgaatccttccaactacggaaaatgctagagctaatgaaaacatcaatcttgtcaatgaggttccctttctcaatggcctcatgcattccaagatactctgctgcacatcgag

SEQ ID NO: 9858 - DNA, 421 bp, Glycine max
ttgttttcaatttcgaccatctcgatatattaccggactcatccggacttccgtgtataaacttattgtcaattcaattttctccgagctttggatcaaaattttgagcgtattgatatattacgggactcattcagacatccgagtaaaaaattattgtcgttagaatttgatacgagcttccgttttcaatttggagcatctctcgctaaattgcgacagtctgtcgggcatccaagaaaaaatttattgtcgtttcatatttctaagagtttccgttttcaatttggagtgtctcgatatattacgggactcaaccggacatccgtgtataaagttattgtcatttcaaattgctcagagcttctagtctcaatattgagcgtctcaatatattacccgattcaatcggacatgcgag

SEQ ID NO: 9859 - DNA, 441 bp, Glycine max
  unsure (1)..(441): unsure at all n locations
agctctgagcaaattgaaatgacaataactttatacacggatgttcggttgagtcccgtaatatatcgagacgctcaaaattgagatccgaagctctgagaaaattgaatcgacaataactttatacacggatgtccggttgagtcctgtaatatatcgagacgctccaaattgaaaacggaaactcttacgaaattcaaacgacaataactttttactcggatgcccgacagagtgtggtaatatatcgagggatgctccacattgataacgagcgctcggatgaaatacaaacgacaatatcttttcactcagatgtctgattgagtcccgttatatatcgagacgctcaaattttagatccgaagctctgagaanattgaatagacaataactttatacacggatgtcgggttgagtcctgatatatatcgagacact

SEQ ID NO: 9860 - DNA, 428 bp, Glycine max
tgccataactcggttgtgcttattcttcaatgccatatgtagcaaagtccttgatcctgtcaagttagatgagctgaaaaacgaggcttccattatattgtattagttggagatgtatttttctcttgctttctttgacatcatggttcacttaattattcatctagtcagaaaaatcaaatgttgtggtcctatttatttgccatggatgtacccggataagcaatacgtgaagatcttaaaagggtatacaaagaatccacaccgtctggaagcatctattgtggaaaggtacattacagaagaagctattgaattttattcagagtacattgaaaagacaaaatctgttgggcttcccgagtctcaacatgacgaaagagtgggaggtaagggttcaagaggactgtatgttatcactccaagta

SEQ ID NO: 9861 - DNA, 443 bp, Glycine max
agcttgtgcaatccactgggaaccatcctctgagcaagcatacaaatggaaaaatatgagtcccaaagtaccaaaatccctgcggatatatgaagctcatgttggaattagtggttctgagccaaaaatatcctcattcaatgatttcacagacaaggtttcccccctcatttctttgggttggaatttgtaactaatcaattatacatatcttccatgtctatatattgtaatgggctccattgaatttttacttttattatatgcacaatgcaggtgcttccttacattaaggaagctggatacaatgccatccagttgattggaattgttgaacacaaggattattttactgttggttacagagtaagttaaatgttgtaattcttaacttattttctcactgtaattatattgtgattgagattctttagaagttcttc

SEQ ID NO: 9862 - DNA, 404 bp, Glycine max
  unsure (1)..(404): unsure at all n locations
ngaggtaatctactcaaatgtgtatggaccatccaaattggatctcttggtgcaaatatgcattgtgtttccttcattgatgatttaactagaaaagtgtggatttatttgattaaatgaagagtgatgtgtttgatgtgttcaaaaagttcaaaaggttgatttagaaacaaaataacaaacagataaaagtgttaagaacaaacgaaggtggtgagtatgtattagatgtgtttcgaaacttctatgaggtagaagtgatagtgcatgaaataacattatcctatactccacaacacaaaggaactattgagagaaagtgtaacgacccgcctcgtcgctacgatatcacttactataaaatatgacatttcaatttagaagtaaaagcctcattaatttga

SEQ ID NO: 9863 - DNA, 439 bp, Glycine max
  unsure (1)..(439): unsure at all n locations
ntacataaaggcgaaagatatgaaacattaatacttgtatgaacaacatcttgtcttgttccctttggtatgactgaaagtatttgtctgaaagtattttattatatcccttaacgttctatcaacaacttcaaaacaatgtatgagtcatagcagcttcaccccaaattatgagtttaggcattgagattaactcagctaaaggagtaccttgttttatgttggaagtagaatcttaattgacatttattggaatatgaaatctcgaatgggatgcttttccgcctagaatcaacaaagcatccattccatcagatgccacagttaaaacaatttctcctttagatctaaatgtggcaaagaaaagctcttcaaagaagacttatgtgtccctccataaccataaagaataaacaatattgcattatttaaattttca

SEQ ID NO: 9864 - DNA, 281 bp, Glycine max
  unsure (1)..(281): unsure at all n locations
ngtcaaagctctatatggatngaaacaagctccaagagcttggtatgaaaggctaagctcattcctagttcataatggattcactagaggaataatggacactacactattcataaaggccgaaaaaggaaaacttcttattgttcaaatctatatagatgacataatctttggtgcaacctcaaaaaggatgtgcaaggatttttctgagctaatgaaaggtgaatttgaaatgagtatgatgggtgagctaaatttattccaaaggctttaaattattt

SEQ ID NO: 9865 - DNA, 245 bp, Glycine max
aactcaagcttgaatcggacctcagtgtgaaaagttgtgaccattttaatttctcgagagcttttgttcggcaatttcaggcgtgtatatatgtgagtcgcccgaatcggacatccgagttaaaagtgatgtgcatttaaatatgtcaagagctaccgtggctcaattgcgagcatctcgatatgcgatgcgtctgaattggagatccctgtaaaaagtattgaccatttgaattggtccagagc

SEQ ID NO: 9866 - DNA, 255 bp, Glycine max
agcttataatatatcaatacgctcgatattaaacaacggaaactctcgcgaaattcaaatagtcataactattcacacggatgtccggttcgggcgcttaatatgtcgagaggctcgaaattgaacaacggaagctcttgagaaattcaactggtataacttttcacacggatgtccgattcaggcgaatcacatattgagacgctcaaaaatgaacaacggaagctcctgagaaaatcaaaagggcataacttt

SEQ ID NO: 9867 - DNA, 345 bp, Glycine max
agcttgcttcatgaaaggaaggattgatatgatatattaatattctcatgtaaacatgacccacaataaggttttaaacttcttgaccatcttgggcttgagatggatcttcctgtcattagtcaattttctatccataatatatttaattttttagttatatgatatcaatgtaagcctttgatctcattgattgaaactccaagctctgacaagtcacactttacaatgttgctttgtgatgtctgtggatggggaagcaagcaaggtgatgaaaggtgttcaatatgaagcctgtgattatctctttaagcctataaggatgaaagaactaataaacatatg

SEQ ID NO: 9868 - DNA, 359 bp, Glycine max
agcttccacttattagtgcacaactccttcaagaatttagcatatcttggaatttgctttattgcatccagcagaggtatgtttacctctacttttctaaatgtttccaagatctccttctctgcctcttccatttttttgttggaaattgctcttggagggaatggaagaaggatatgctgcttctctttagattcacctgcatagaaattcttaggtaacttactctttaaatttttgtcatcatctttttctggagtagagagaaattgggcacgttcatttgtggatgaggaagatgttgctggttgaggtccttgacactgctttcccgacctcaatgtaatggcactcatatt

SEQ ID NO: 9869 - DNA, 369 bp, Glycine max
agcttacaaggtgtctctatatataacactaatgagacacaagtttttacaaaccaagtgaggtgggactaagactacaaaactctaacaatccaagcaatgtgggactaagaccacaaaattctaacaattctctcacttggggtctaagttctaaattctagcaactccttgtaagcgatgagttcatcgactctttacctagtgtagcgccttcatcttcaattatccttgaaggccaaatgaggcaatgcaaagcctcagcttatcagttgtaacagctttagtcaacatatctactggattctctgatcctaagatcttcaacaaagataagtctccatcatttatcaactccctgataaaatg

SEQ ID NO: 9870 - DNA, 381 bp, Glycine max
agcttcttcttgtttctctccccatttgaaaccaatatttttcttgagcacttcattgagaggtgctgccaatgtgctaaaatccttcacaaatcgtctataaaaacttgctaagccatgaaaactcctcacctcggtcacagacttaggtgtatgccattcttgaatagccctaaccttctcctgatcaacttgcactccttttgaactcacaacaaaaccaagaaacacaacatggttagtacaaaagatgcatttttcaagattggcatacaattgttcttttctaagcgcagtcaagacagattttaaatgatcaatatgcaaatcaagtgaagtgctcttgataataatatcatctaacgtcaccacaacaaactt

SEQ ID NO: 9871 - DNA, 379 bp, Glycine max
aaactccagcttcttcacatagtccgcctctgcttgttcgtttttattcttaaaaatagaaacattaggcatagccaaaagatcaagaggagttagtgggttaaaaccataaacaacttcaaaaggagaactattagtagtgctatgaacaactctattgtaagaaaactcaacatggggtaaacaagctttccaagtttttaagttcttcctcaaaactgtcctaagcaaagttcccaatgtcctattaacaacttttgtttgcccatcggattgtgggtgacaaatggttgaaaataacattttattgcccaacttgccccacaaagtccttcaaaaaaggcttatgaacttagagtcctatcactaacaatgatcc

SEQ ID NO: 9872 - DNA, 370 bp, Glycine max
agcttcacaaaagtttatatggcttgaaacaagcattgaggcagtggtacaagaagtttaatgagtttatgagcaactcatgattcaaaagatgtgacatagaccattgctgctatgttaagaaatatactaatagttatgttatccttgtcgtgtatgttgatgacatgttgattgcaggatctagtatggcagaaattaacaagttgaagcagcagttggcaaaaaactttgaaatgaaggatcttggtccagctaaacaaatccttggtatgagaattcttagaaacagatcaaaaggaatcttgaagctgtctcaggagaaatatatacacaaattgcttgacagggtttaccttggagattctaa

SEQ ID NO: 9873 - DNA, 287 bp, Glycine max
agcttgaaggtttatttctatgaattctaatataagcaacaattaccttgtatgatgtaaatatgagaaaatctaattaatttaatgatactattcttaaaacatccttcatttaattgcgattctatttttaatgactttttttttttcatgatatgaagattacataaaggaaagtttaggaaaataagattttttaattgagattattacaattaaattatgttaagtgactttcttaattagtacaaaattaattatttttacttatatttgaatctggaagg

SEQ ID NO: 9874 - DNA, 395 bp, Glycine max
ttgaagtggcttgacctttcaaataattattttcattgactgattcctcctacttttggaaatttattttatctcaaatatctagacttgtcttcaaacaagtttaaaggttcaattcctccaaaattgggtgctctaaggagcctcaaaacattgaacctttccaataacttgctggttggagagataccaaaggaacttcagggccttgagagtttacatgattttcaaatattcaacaatcacttgatggaagggtattggaccaatctaagagtttttgctgcttatgagaataatttcgatggaagggttccaagtaaacttggattcatttatgagcttaaaacacttaacctgcattcaaaccaccttgaaagccctataccgggaag

SEQ ID NO: 9875 - DNA, 329 bp, Glycine max
  unsure (1)..(329): unsure at all n locations
agcttcttccttatcataccgccggttaatcggtacacttatttacctgacaaacactcgtactgatataacctatgttggtcaacaactcatccaatatatggctcatcctacctcagctcactcccaagccgcctttcgtgtcttacgatacctcaaaagctctccatgtttcagaatatttcttgctgccaacggacctctacaactcaaagctttcaacgactcctactggncctgctgtcgggatacgacgcgttccatcacagggtacttcgaatatctcagaatcttccattatttcttgggcgtcgaaaaaacaacctact

SEQ ID NO: 9876 - DNA, 361 bp, Glycine max
  unsure (1)..(361): unsure at all n locations
tgtgggtggaggacgcatgaacgaaaacacaattctggtgctcctaanaagggttgaggatggagaattgcactaagcaatcactacgcacggctccaagctccagggtggaggacgcatgaacgaaaaagcaattcatggggctccgaaaaagggttgaggatggagaattgcactaagcaatcactacaaacggctccaaactcgtgggtgaaggacgcatgaacgaaaacgccattcatggggctccgaaaaagggttgaggatggagaattgcactaagcaatcactacgcatggctccaaactcctgggtggaagacgcatgaacgaaaatgcaattcatggggctcccaaaaaag

SEQ ID NO: 9877 - DNA, 376 bp, Glycine max
agcttgctcgtcttgctgatatttatcatgcagacttttctgatgatgaccgaggaacaattagggatcaacttgaaacttatgtgcttcaagtgagaagaaatgcttctttttccacttgtgaagatgttcaaagtttggctatgaagatggttcaaactgagaaacatttggtatttccattggtttataaacttattgagctagctttgatattgccggtgtcgacaacatccgttgaaagagctttttcagcaatgaagattatcaagtctaaattgcgcaataagatcaacgatgtgtggttcaatgacttgatggtatgttacaccgagcgggagatattcaagtcacttgatgatattgatattattcg

SEQ ID NO: 9878 - DNA, 384 bp, Glycine max
  unsure (1)..(384): unsure at all n locations
tgggcaaattctacgacaataacattttactcggttgtccgactgagtcacgtaatatattgagtcgctcgaaatagaatacagaagctgtgagcaaattctaacgtcaataactnttttctcggatgtccgattgagtcacgtaatatatcgagacgctcgaaattcaatacagaagctatgagcaaattcaaacgacaataacttttaactcagatgtctgatcgagtctcgtaatatatacagacgctcgaaattgaatacaaaagctttgagcaaattcaaacgacgataacttttaactcaaatgtccgatcgagtcccgcaatataacgagatgctagacatagaatacagaagttgggagctaattctaaagacaat

SEQ ID NO: 9879 - DNA, 361 bp, Glycine max
tagcttgccaccacggagttttccgactattgtcttgtgtgggggaacaagctacaaaaggagagagcaagaaatgaatagcccatggttgatacatggacggagatgaaaaatatcatgaggaaacggtatgtgccggctagttactcaattgacttgaaatttaagctccaaaaactaacccaaggcaacaagggggttgaggagtatttcaaggaaatggatgtgctcatgattcaagcaaatattgaagaagatgaggaggtaactatggctcgatttcttaatggtttgactaatgatatccgtgatattgttgagctgcacgagtttgttgaaatggatgatttgcttacaaagc

SEQ ID NO: 9880 - DNA, 388 bp, Glycine max
tctgttttcaatttcgagcgtctcgatatattccattactcaatccggcatccgagtaaaaagttattgtccttttgaattgctaggagcttctgttttcaatttcgagcgtatcgatatattaggggactcaatcggacatccgagtaaaaaattattgtcgtttgaatttgatatgggcttccgttttcaatttcgagcgtgtcgatatattacaagacataatcggagtaccgagtaagaagttattgttgtttgcattaggtacgagcttccgttttcaattttgagtatctcgatatattacgggaatcaatcagacatccgagaaagaagttattgttgtttgcattttgttcgagcttccgttttcaatttcgagcgtctc

SEQ ID NO: 9881 - DNA, 374 bp, Glycine max
agcttaacaaaaggcatgcgaagtgggtggaattcctagagcaattcccttatgttatcaaacataaaaagggaaaaggtaatattgtagccgatgctctttctcggcgtcatgcattactttctatgcttgaaacaaaattgattggtcttgaatgtttgaaaagcatgtatgaaaatgatgaaacttttggagaaatttttaaaaattgtgaaaaattttcagaaaatggtttctttagacatgaaggctttcttttcaaagaaaacaaattgtgtgtgcctaaatgttctactagaaatttgcttgtttgtgaagcacatgaaggaggtttaatggggcattttggggtccaaaagactctataaacatta

SEQ ID NO: 9882 - DNA, 340 bp, Glycine max
tccttaagaagattcctaaagaagctagagcttagctacacatacctctctaatagctaagctctcctccttgagatgagaagctagaacttagctacacaccccctataatagctaagctcacccccatgacaaaaaacatgaaaataccaaaaaaagtccttactacaaagactactcaaaatgccttgaaatacaaggctaaaaccctatactactagaatggccaaaatacaaggcccaaacgaaggaaaaacctattctaatatttacaaagataagcgggcttatacttagcccatgggctcaaaatctaccctaaggctcatgagaaccctac

SEQ ID NO: 9883 - DNA, 368 bp, Glycine max
tctaccccctgatatttttttgtcatttctccattctctcttcatgaacttttcacactgcaacagtgtgctccactagagagacactgaatttgggtccaacaccgcattaaaagtcatcgttgtgactcactgatgcaatcctacccccccaagggcattggatagaagactccaaaaatattggaccagagatgcaagagaaggccctaaggttctcatgagccttagggtagattttgggcccatgggctaagtatgagcccacttgtctttgtacatattagattaggatttcattatttttgggccttgtatataaggcttcataatgtatgtagggtacccctaaaatgaaagatttttct

SEQ ID NO: 9884 - DNA, 281 bp, Glycine max
tcagttcactgcttcatgtagtgcacaatatgctttcagagaaaacactctgccaaaaaagttactatcaagcgaaaaagatattatgtctgatgggtatggggaatcataagattcatgtttgccctaatgattgtatattgtacagacatgagtttgaagagatgaacaaatgccctcggtgtggggtatcacgctacaaaatgaaagatggagatgagtgtagtattgaccaaaactcaaagaaagttcccccagcataggtgatgtggtatcttctg

SEQ ID NO: 9885 - DNA, 382 bp, Glycine max
ttcagtataattcagataatatagaattctctattttgtatcagtttgcaggtgcagcacagtctcttggtgctggtgctatcttggttaacccatggaacatcacagaggttgctgcttctatcggttatgcgtaggaaatgccaccttatgaaagagaaaaaccacatcagtttaatttcaaacatgttgaaactcacacgtcacaggaatgggcagcaacttttgtgaagttttaatcctataacatagcttgcattctgcttctcttagatcaatgttcttccgcactttatttttcttgtgatatagaacatggcgccttacatgagcatattatatcgaccactaaagctagtttgaaatagagtcaatgggaaaa

SEQ ID NO: 9886 - DNA, 360 bp, Glycine max
agcttaacaaaatagaatatttatgcttttctggaaacaacctactgggccaattgccatcatcattgtttgggctaactcagcttagtgatttagattgttcatacaataaattagttggcccaatgccagacaaaattagtggactttctaatttatgttctctggatttgtcaactaactccatgaatggaacaattccccattggtgcttttctttgtcatcgttgatacaattatctcttcatgggaatcagcttacagggtcaattggtgaattctcttctttttccttgcattattgagatctctcttataacaagctacaaggtaatatccccaactcaatgtttcatctac

SEQ ID NO: 9887 - DNA, 213 bp, Glycine max
ttagtaaagagagagaacttccaattaatcagagcttcatatgcttttcggatgaaaaacaatgtgtgtaccggtgaatgggagtatgctgatgaaatcttctcataaccacaaatgagatattggatgttagcatttcgtttctataatgaccacttagaggaaacattgggtctcacctaaatacaagaaaatcacttcaagtgtattaat

SEQ ID NO: 9888 - DNA, 394 bp, Glycine max
taaaggagaagttggttttctgaactctaaactggataacatgacaaaatcaataaagatgctgaataaaggctcagatacgcttgatgaggtgctgcagcttggaaagaatgttggaaaccagagaggacttggattcaatcctaagtctgctggcagaacaaccatgacagaatttgttcctgccaaaaacagcactagagccacgatgtcacaacatcggtctcgacatcatggaacgcagcagaaaaggagcaaaagaaagaagtggaggtgtcactactgtggcaagtatggtcacataaagcccttttgctatcatctacatggccatccacatcatggaactcaaagtagcaacagcagaaagaagatgatgtgggttccaaaacac

SEQ ID NO: 9889 - DNA, 371 bp, Glycine max
agcttcctcgtggcttctttgagaagctttctcaagaggcttctttgagaagctagatccttatctatccacacccctctattaactaaattaacttccttaaaaataattacggatgaaaataacgcaacaaataatcaaacattaaacataattactaataatatatagatatatatatcagggtgttacaactctcctacccttttagaaatttcgtcctcgaaatttaccttactcaaacaaggatgggtgagcttctcgcatctgactttctaattcccacatggcatcttctcttgatgcacctccccagatcaccttgaccaacggaatctctttccctcttaggtggtttgttcgcctatcct

SEQ ID NO: 9890 - DNA, 387 bp, Glycine max
tcaagaattatggcctcatcaaactacttgtttccctagggaaattctataaatagacctcccatctttaatggagtgggttaccactactggaaaacccgcatgcaaatctttatagaggcaatagatttaaatatttgggaagccatagaacaaggaccttatgttccctctataatagccggaagtgcaacaatagaaaaacctagagcagattggactgaggaagaaagaagattagtacaatataatttaaaggccaaaaatattattacatctgccttaggaatagatgaatactttagggtttcaaattgtaaaagtgctaaggatatgtgggatacactacaagtaacacatgaaggcacaacagatgttaaaagatct

SEQ ID NO: 9891 - DNA, 365 bp, Glycine max
agctttgggatgacagtccataccttctgaaacagttacctggaattgggatggttacagcaaaggtaacatttattgattcgttgatgttattaacacataattgttactaatacatatgctctagcaatcagttgcctaatattctaattttgaagttctttccaggcactgcattcaatgggagttagatcgtttgaggaacttgctgatgctgatccgaggagaatagagctagtgactggtcgaaaatacccatttggtaaccatattaaagattctctactgtctctacctccaaaagttgatgtgacgcttgcagagattgaaagccatatacaaggaaattccaagctagtagtaac

SEQ ID NO: 9892 - DNA, 372 bp, Glycine max
  unsure (1)..(372): unsure at all n locations
tgttggttataacaaactttaaccaactaactactaactaataaaattaactaccatatgaattaactaatttcaacacttcctcttaattcatattggtacaagacattactcctagcctatctctcatttccttaaatntgatacacttcaaaggctntgtcaacatgtttgctagttgatcttaagatctacaaaactcaagctcaaacttctccttattcacatgatctctcaaaaagtgaaacttggtctcaatatgtttacttctcccatgtgtcactgggtgttgtgccaagtcaatagttaacctattattaattaacaatctcattggcttgaccatctttcaaataagttctttcatcacag

SEQ ID NO: 9893 - DNA, 332 bp, Glycine max
tgcttccttcatcgtagttatccacgagaccataataccaactctggtccaatggccaaaagattttaattctccggtttagtacccaatatgcatccacatcacctaaaaggatttcataaaaatggcgcctcttcctggagttactcttgtttttatattgtttcctaggcctcaaaactctgccagcagtatcagctgatgttgattctgaacctaacggagacttcaaactgtggttaacaatactttgactagaagattggaaaaaggacaaaccatttgaacctttcataaaaaatccagtacagcttggatcaaaccttgaagat

SEQ ID NO: 9894 - DNA, 410 bp, Glycine max
agcttctggcgggacatcttgacttgctttccaatctgacattcaccacttattctgccttcttctattttcagattgggaatgcctctaacagcacctttgtcaatgatttctttcatgcctcttatgggcagatgtccaaatctttgatgccatattctgacttcatcttctttggaggatagacatgcggaggagtgactgggttcttgaggtgtccataggtaacagttgtcctttgatctgctgcccttcattagaacttcactcttctcatttgtcaccaagcattctgactttgtgaagattacattgaatccttcatcacacaactgactgatgctgatcaagattgcagtcagacccttcaccagcagtactttgtccagactaggaagtccatcatgggc

SEQ ID NO: 9895 - DNA, 388 bp, Glycine max
tagcacttggaatactgacgctccattgaccagcctgttgatgctatgtaaatggtatgcatctttggggcatgtcctgttcagatcagtgtaatcggtgcacattctccatttgtcattggccttttttaccataacgacgttggcgagccaggtggaaagccgaacctctttgatgaagtttgcatggaggagctggtcgacttcttctttgacagctttaagctgctcttctcccatcttccttttcatttgttatataggtttggcctggggacagatagccaatttgtggcagattatgccaggatagatccctgacatgtcagatgattgcaaggcaaataaatccacatttctgcattgcaacgtggcaatgcaccggtgc

SEQ ID NO: 9896 - DNA, 378 bp, Glycine max
  unsure (1)..(378): unsure at all n locations
ttagctntgtccccaagagcttcatgtatactggtctaaaatcgcgaagtgaacctcggatccctgtcagatacaatactagaaggaattccatgcaaccttattacttccttgatgtacaactccactagcttatccattctatacttcatattcactgggataaaatgagcagatttggtgagtcgatctactataacccacacagcatcatgtccacgactagtcttgggtaaactagatacaaaatccatagatatgctctgccatttccattctggaatttccaatggcttcaattctcttgatggtcgctggtgctcaaccttatccttttgacatgtcacacaatangctacatattcagctacatctttc

SEQ ID NO: 9897 - DNA, 340 bp, Glycine max
tgtctaactcacttccccactcttccttatttcttgcacgaagaagataagccaactcattaagaactaatggaatgtccttggcataattgaccaccctttttgataagttgtcatactccctttgatcatcacattggttaaagaaattcaaattgaaaagttcaagtgcttgatttaaactgaattctctaagcgggtatacctcatcagctttgttagctttaagaacttgcatatctctagttgttacaatgattctactacctgatccaaaattaccaagaggtccaagtaattttttctagtgatttgaatcattcacatcatcaagaacaat

SEQ ID NO: 9898 - DNA, 342 bp, Glycine max
ttcactcggaggcccgattcaggcgcataatatatctagacgctcgatattgaacaacggaggctatcgagaaattcaaatggacaatactttgaactccgacgtcctattcaggtgcataatatatctatacgctcaaaattttacaatggaagctctttggctattcaaatggtcataactcttcactcgaacgtccgattaacgcgcataatatatcgacacgctccaaattgaacaatggaggctcttgagcaatccaaatggtcataacttgtgactcggagggccgattcaggcgcataatatatcgtgacgcatcgaattgaacaacggaagctc

SEQ ID NO: 9899 - DNA, 282 bp, Glycine max
agctttgatgtaacatttgtagaggttatatgaaacaacgagatgatgcgctccatgagaggttggatcaaatggagaatagagaccatatgaattgctcaagagcttccattgttcaatttcgagcgtctagatatataatgcgcctcaatcggacctccgagttaaaagttttgaccattggaaatgctcaagagcttccattgttcaatttcaagcgccacgatatattatgcacctgaatctgacctgctagtgacaacttatgaccatttgaattgc

SEQ ID NO: 9900 - DNA, 375 bp, Glycine max
  unsure (1)..(375): unsure at all n locations
tctccctgtggttctcgttcttcttcttccactcctcaactcatggatccttcaacttcttcttcttattatgactcacattggcccatttccattacgaaaggtattcgctctactcgtaatcctcatcctatttataatttcttaagttatcaccgtttgtctcctttgtatagatcctttgttttctcattggcctcccttactattccttccattgtccgtgaggcacttgatcatcctggctggagacaggctatggttgatgagatgcaggctcttgacgataatggtacttgagagctggtacctctatctcctcggaagaccactgtgggttgtagatgggtctacactngtaaagttgggcccaat

SEQ ID NO: 9901 - DNA, 381 bp, Glycine max
tcccaagtttttaagttattcctcattactgtcctattcaaagttcccaaagtcctattaacaacttccgtttgcccatcggtttgtgggtgacaagtggttgaaaataacaatttagtgcccaacttgctccacaaagtcctccaaaaatgcaaatcatcaagcctaggtataggatgcctatatttaatggtgatgttattaagggctctacaatcagaacacatgcgccatgtcccatcctttttagggaccaaaatcactgggacagcacaaggactcgtactatctcttacccaacctttgctaatgagttcatccacttgtctttgaatctctatgcgttcttgtgaattacttctataagctggcctattgggc

SEQ ID NO: 9902 - DNA, 352 bp, Glycine max
ttgagccaattcaaacgacaataactttttacattgttgtctgattgagtcctgtcatatatcgagacgctcgaaattgaatgttgaatctatgagccaattcaaacgacaataactttttactcggatgtctgattgagtcccgtaatataacgagactctcaaaattgaatgttgaagctctgagctaattcaaacgacgataactttctactcggatgtctgattgagtcctgtcatacatcgagacgctcgaaattgaatggtgaagctctgagccaattcatacgacaataactttttactcggatgtctgattgactctcgtcacatatcgagacgctcgaaaatg

SEQ ID NO: 9903 - DNA, 363 bp, Glycine max
agcttaaacattcaattttgagcgtttctatatattacgggactcaatcagacatccgagtaaaaagttattgtcgtttgaatttgctcagagcttcaacatttaatttcgagcgtctcgatatattacgagactatatcagacatctgagtaaaaagttattgtcgtttgaattcgctcagaggttcaacattcaatttcgagcgtctcgatatattacgggcctcaatcatacatccgagtaaaaagttattgtcgtttgaattggctcagagcttcaacattcaatttcgagcgtgtcgatatattacgggcgtcaatcatacattccgagtaaaaagttattgtcgtttgaattggctc

SEQ ID NO: 9904 - DNA, 310 bp, Glycine max
agcttagtcagggaattcattgtcattattccctctgacataacaaacagaaagagtgatgagtaccataaagtgtttgtcagaggaaaatgtgttagattctcccctgctgtaatcaacaaatacctgggcagaccaactgaaggagtggtggatattgatgtttctgagcatcagattgccaaggaaatcactgccaaacgagtccagcattggccaaagaaagggaagctttctgcacggaagctaagtgtgaagtatgcaatcctgcacaagattgttgctgcaaactgggtacccaccaatcaca

SEQ ID NO: 9905 - DNA, 370 bp, Glycine max
tggttacctccttcttcactacatcaagaattaccgtggttgagtcttctctgtggctgtcttactggtttagccccatcctctaaatttatccaatgcatgcatgtggatgggctaataccaggaatgtctgccagggtccagcctatagccttcttatgcttcttgagaactgataacaacttctcctcttgctcatcagtaaagaaggcagatataattactggaaaacttttgctctcatctaagtaaacatattttaaatttgatggcaaaggcttcaattgtggtgtggatggttggatagtggtagaaagagatggtttctcagcctgtacctcataaagaaagtcagaggtatgtgtacttt

SEQ ID NO: 9906 - DNA, 374 bp, Glycine max
agcttcctcaccgtggacggcgtcgttaccgatttccagctgctcgtccggcatcctcaagggtatgaacaattttatgacaaggagaataatggtggtggacaccaagttccatccaataacaaacatggccgccaccaattgcttgaagaactgcacaccaccacctccaccatataatgcaccccttgaatttgttactggcaatagaagtctacaaagggctggttctgctaatagacctgtgaggagaccacccaaaaggccagccacagcatgtgtgtgaaacacaccaagggtgtcatctacctgaacataatatttttcacaaaattatggtaagtacaaattatactaagtaaaaaatcaagagt

SEQ ID NO: 9907 - DNA, 332 bp, Glycine max
agctttgtaattatgtaaccgagggtgcgcatgaagcagagttcggtgtcgacgcccacggtgatgaaaaaggttcggaggacggaggaggcgagtttggacgacgccgtttggaggctgggggcgaggaggtagtggaagtagagggagccggcttcggggggcgcgtggcaggcgcatagccagaagaggcgcatggtgaagacgaggttgaagaaggtggagagggattcgggtgtgtgcgagtccatgatccatgcgatgggctcgggattcagtttctggagctgggaacgggggcaggtgctatcgtgcgccgtgggggagtggga

SEQ ID NO: 9908 - DNA, 344 bp, Glycine max
cgcttaacaaaaggcatgttaagtggttggaattcctagagcaattcccttatgttatcaaacataaaaagggaaaaggtaatattgtagccgatgctctttctcggcgtcatgcattactttctatgcttgaaacaaaattgattgggcttgaatgtttgaaaagcatgtatgaaaatgatgaaacttttggagaaatttttaaaaattgtgaaaaattttcaaaaaatggtttctttaaacatgaaggctttgttttttaaaaaaacaaaatgagtgggcctatatgttttattaaaaaaatgtttgtttttaaaccatcaaggacgtttaaggggcatttt

SEQ ID NO: 9909 - DNA, 385 bp, Glycine max
tccttttctcttctttgaaatccaattggggccaactatttgacattgcccttgggattgccagaggtcttgtttacttgcatgaggaatgttgcacccaaatcatccattgcgacataaagccacaaaatatacttttggatgatcaatataatgctagaatttcagattttgggttagcaaagctgttattgatcaatcaaagccgcactgaaactggaattagaggaacaaaagggtatgttgcaccagattggtttagaagtgcaccaatcactgctaaggttgacacttatagttttggtgtgttgttactagagatcatttgttgtagaaagaatgtagaaaaggagcttgttaatgaagaaaagggatattgactgat

SEQ ID NO: 9910 - DNA, 365 bp, Glycine max
  unsure (1)..(365): unsure at all n locations
ttgagccaatacaaacgacaatatcttttttctcggtatgtctgantgattcccgtaacatatcgagacgcttgaaattgaaagctgaagctctgagccaatacaaacgaccataactttttactccgatgtctgattgagtcccgtaacatatcgagacgctcgaaatcgaatgtagaaactgtgagccaattcaaacgataataacttttttcacggatgtctgattgagtcccgtaacatatcgagactctccaaattgaatgtcgaacctctgagcaaattcaaacgacaataactttttactcggatgtctgattgagtccccgaacatatcgagacgcttgaaattgaatgttgaatct

SEQ ID NO: 9911 - DNA, 396 bp, Glycine max
tcagctttcaattttaagcgtgtcgatatattactgttactcaatcagacattggaataaaaatcaattgtcgtttgaatttgctcagagcttctattttcaatttcgagcgtctcgatatattacgggacataatcggacatcggaataaaaagttattgtaatttgaatttgctcagagcttctgttttcaatttcgagcgtctcgatatattatgggactcaaccagacatccaagggaaaagttattatcatttgaattggcttagggcttgcgttttcaatttcgagcgtgtcgatatattatgggacttaaccggacatccaagtaaaaatttattatcgtttgaatttgctctgagcttcttttttcaatttcgagcgtctcgaaatat

SEQ ID NO: 9912 - DNA, 359 bp, Glycine max
agctcttaactgagattgcaacgttccaattgtttttttaatggtgtaatcgattacaatatattggtaatcaattaccagcgtatcattgaaatgcaaattaaattgtgaagagtcacatcttttcataaaatgctttgtgtaatcgattacatggctatggtaatcgattatcactgacaagttctgaataaaaagtcaagagatgtaactcttcaaatggttttctcaaagattttctcacggatataactcttccaatggttttcttgaccagatatgaaaagtctataaaagcaagaccttgacttgcatttcaataactctgttagaacaacttttagaatatcttgaacaac

SEQ ID NO: 9913 - DNA, 357 bp, Glycine max
agcttcttagtttcagatgatgcagatgggtttgtttctacctcatgcactcctctaatgactatggcatcatttctggcgctaaactgctgggagttggaggccatcttctcaattaaatttctggcttcagcaggagtcatgtctgcaagggctccaccactggcagcatctatcatacttctctccatattactgagtccttcataaaaatgttggagaagaagctgttctgaaatctgatggtgagggcaactggcacatagtttcttaaatcgctcccagtactcatacaggctctctccactgagttgtctaatacctgagatatctttcctgatggctgtggtcctggaa

SEQ ID NO: 9914 - DNA, 438 bp, Glycine max
  unsure (1)..(438): unsure at all n locations
ntaagattttcaaggctatggttgacaaatagtctggtttgtatgttagagctttgagaatagatagaggtggtgaattcttatcaaatgaattcattactttttgtgaggagcaagggataagaagagaattgattgctccatatactccaaagaaaaatggagtggccgagaggaaaaacagaattgtggttgagatggcaaggagtatgatcaaagctagaggtgtgccaaacagattctggtatgaagctgtagcaactgcagtgtacattttcaatgtttctcataccaaagctgtcatgaacatgacaccacttgaagcttggagaagaaagaaattgtctgtaagtcatttgagaatttttggttgtacaacatatgcattagttgatttatggactaagttggatgataaatctatcanatgtgtattta

SEQ ID NO: 9915 - DNA, 417 bp, Glycine max
agcttggttcccaacgcactattctttcttttctaaaatctacaggtaaacctaggatctctatcagatactatgctacatggcacaccatgtaatatgacaatctcacttatatacagggaggtcaactcaacttctccaaggaaaatatgatattaatgggaatgaagtgagcagacttagtcattctatcaacaataacccagatagaatctaaacctctacggtgtctatgtagtcctaccacacaatccatggaaatactatcccacttccactgcgtatctctagggttataacatcctgaaggtcttgatgttgatctatacttctgacagactacgcatgatagacaaaacactaacctctttctatgttggccaccaatcatcattttaaatctgatcctcttgaaca

SEQ ID NO: 9916 - DNA, 377 bp, Glycine max
  unsure (1)..(377): unsure at all n locations
tgtgcctcttcacgtctagaatatgtttgattcatattgatccaaagaccctcaggtgctttgctgatggcttcttctcgttgcaagcttcaattggagtcttgtcttttacagacttagttggacatctgttgagtatgtaaacaactgtgtagactgcttcagctaagaatgtgttagatagtctcttctctttgagcatcgatctagccattttcgtaactgtgcgattctttctctcggacactccattttgttgaggagaatatgcaactgtaagttgccgctcaatgccttcatccttacaaaatctttcanactcgcgagaggtgtactctttgccgcgattacttgttagtacttttattccgtttcca

SEQ ID NO: 9917 - DNA, 330 bp, Glycine max
  unsure (1)..(330): unsure at all n locations
agcttgaagttgagcacgtggtacctnggttgacttttgatttttctggcgcattgaagcccaaatatcacgagcagtttctttgttcaacgatagtctccaagattgtgcgatcaatggcttggaaaagatagttcttggctttaacatctttgagtttgctatcatcagctgctttactttgctcggcagtggaattggccggagctaccacgattccatcttcaataatgctccaatactccttagaacgaaggagattctccatcaacatggaccaatgatcataccgaccattcaaattgggaatagagggttgcagacaggatg

SEQ ID NO: 9918 - DNA, 334 bp, Glycine max
taataagaggcatgctaagcgggtagagtttttagattctttttcatatgtcatcaaacataaaaaggggaaagggaatgtagtggctgatgcactgtctaggagacatgctttacttgctatgcttgaaactaaactgtttggtctcgagtctttgaaagacatgtatgtgcatgatgtggactttgctgaaatttttgctgcatgtgaaaagttttctgaaaatggttactataggcataatggattcttgtttagagcaaataaattgtgtgtgcctaagtgttccattagagagttgcttgtgagtgaatcacatgaggggggggggggg

SEQ ID NO: 9919 - DNA, 388 bp, Glycine max
agcttcttagtctcagatgatgcagctgagtttgtttctacctcatgcactcctctaatgactatggcatcatttctggcgctaaactgctgggagttggaagccatcttctcaattaaattcctggcttcagcaggagtcatgtctccaacggctccaccactggcagcatctatcatacttctctccatattactgagtccttcataaaaatattggagaagaagctgctccgaaacctgatggtgagggcaactggcacatagtttcttaaatcgctcacagtactcatacaagctctctccattgagttgtctaatacctgagatatctttcctgatggctgtggtcctggaagcatggaaaattttttctaagaatattctct

SEQ ID NO: 9920 - DNA, 406 bp, Glycine max
tactcaagctgaggcaaactggatgcgttggtcaacttggtaacttatctggccttgaatcagaaatctgtacctgtcgcaagggtttgtggtttgtgctcctctgctgaccaccatacagacctttgcccttccatgtagcaacctggagcaattgagcagcctgaagcttatgctgcaaatatttacaatagacctcctcaacctcagcagcaaaatcaaccacagcagaacaattatgacctttccagcaacagatacaaccctggatggaggaatcaccctaacctcagatggtccagccctcagcaacaacagcagcctgctccttccttccaaaatgctgctggcccaagcagaccatacattcctccaccaatccaacaacagcaacaaccccagaaac

SEQ ID NO: 9921 - DNA, 365 bp, Glycine max
agcttctgggataaatcctcgagttttcagtttcaaaactcccagtgtttcattggaattaggtgtaacctacagcattgacaaattatctcataaatatatcacttcaaggttcgttgtttgtttctcacgaaacttattcaccattggaaacaaagaggatttacctttctccaactatgaccaagaaattcattcacagctatagcattctgtccatacatcagtggtgaggaccagtaaccccacagaaaccatttgtgcacattctctggcacatagaacaaaactatcataataaaggttcattacagtaaccaactttgaagttacatgtaccatttcttacctcgggaaatcacaaa

SEQ ID NO: 9922 - DNA, 436 bp, Glycine max
  unsure (1)..(436): unsure at all n locations
tccatcaataggattgcatcatccctcttcccccttttaatgatttgacctcaaatccagaggttcaagaaactttgggcttcttccctccacttgtaaaaagaataaaaacatatatattagtgttgttgggtatgttagagtagggtaaggtctgaaaatccctttcctgagcatcttcacatgagggaacatggttcctcaccaactcaatcagtggtgctgcaagtatagaaaaatatgggacaaaccttttgtaaaagtttgttaagtcatggaagcccctaatttcccttatacttggtggagtgggccactcaaaaatgatttttattctcttaggatccgtggaaaccccttgatcactatttaaaaaattaaggaaagtaatgcaataaaacatacattnttctgtattttcatgtntattactcct

SEQ ID NO: 9923 - DNA, 381 bp, Glycine max
  unsure (1)..(381): unsure at all n locations
agcttctggtgggacatcttgacttgctttttcttcttacattcaccacagattctgccttcttctattctcagattgnggatgcctctaacagctcctttgtcaatgattttcttcatgcctcttaagtgcagatgtccaaatctttgatgccatattctgacttcatcttctttggaggatagacatgtggaggagtagctggtttcttgaggtgtccataggtaacagctgtcctttgatctgctgcccttcattagaacttcacttttctcatttgtcactaagcattctgactttgtgaagtttacattgaatccttcatcacacagctgactgatgctgatcaagttagcagtcagtcccttcaccaacagtact

SEQ ID NO: 9924 - DNA, 436 bp, Glycine max
gaccttaaatctcagctttgcagctggaatattatcctatctccgatgttatgggtgggtcccgtccaggtagtcccgaagaagactggcctcacagtgatcagaaatgagaaggaggagttgattcctactcgagtgcagaacagttggagagtctgcattgactataggaggctgaaccaggttaccaaaaaggaccattttcccctgccattcattgaccagatgcttgaacgcctggcaggtaaatcccactactgtttccttgatggtttttctggttatatgcaaattactattgctcctgaggatcaggaaaagaccacattcacctgccccttcggcacttttgcttataggaggatgcctttcggcctgtgcaatgcccctggtatcttccagcagtgcatgattagtattttcagtggatttttag

SEQ ID NO: 9925 - DNA, 419 bp, Glycine max
tcaagaattatggcctcatcaaactacttgtttccctgggaaattctataaatagacctcccgtctttaatggagtgggttaccactactggaaaacccgcatgcaaatctttatagaggcaatagatttaaatatttgggaagccatagaacaaggaccttatgttccctctataatagccggaagtgcaacaatagaaaaacctagagcagattggactgaggaagaaagaagattagcacaatataatttaaaggccaaaaatattattacatctgccttaggaatagatgaatactttagggtttcaaattgtaaaagtgctaaggatatgtgggatacactacaagtaacacatgaaggcacaaaagatgttaatagatctaggataaacactttaactcgtgaatatgaactt

SEQ ID NO: 9926 - DNA, 385 bp, Glycine max
  unsure (1)..(385): unsure at all n locations
tcttagttntagatgatgcagatgatttttgtttctacctcatgcactcctctaatgactatggcatcatttctggcgctaaactgctgggagttggaagccatcttctcaatcaagtttctggcttcagcaggagtcatgtctccaagggctccaccactggcagcatctatcatacttctctccatattattgagtccttcattaaaatattggagaagaagctgctccgaaatctgatggtgagggcaactggcacatagttttttaaatctctcccagtattcatataggctctctccactgagttgtctaatacctgagatatccttcctgatggccgtggtcctggaagcanggaaaatgttttctaagaatactctct

SEQ ID NO: 9927 - DNA, 384 bp, Glycine max
agcttccttaagaagatcctaaagtagcttgagcttagctacacatacctctctaatagctaagctcacctccttgagatgagaagctagagcttagctacacacccctataatagctaagctcacccccatgacaaaaaacatgaaaatacaaaaaaatgtccttactacaaagactactcaaaatgccccaaaatacaaggctaaaaccctatactactagaatggccaaaatacaaggcccagacgaaggaaatacctattctaatatttacaaagataagcgggctcatacttagcccatgggctcgaaatctaccctaaggctcatgagaaccctagggccttcccttggatctctagccaatctacttggagtcttct

SEQ ID NO: 9928 - DNA, 438 bp, Glycine max
cgagaatggagaattgcactaagcaatcactacgcattgcttctaactcgaaggtggaggacacatgaacgaaaacacaattcatggggctccgaaaaaggggttgagaatggagaattacactaagcaatcactacgcatagctccaaactcgaaggtggaggacacatgaaagataacgcaattcatggggctccgaaaagattgagaatggagaattgcactacgcaatcactacgcatagctccaaacgcgaaggtggaggacacatgaatgaaaacgcaattcatggggctccgaaaagattgagaatggagaattgcactaagcaatcactacgcatagctccaaactcaaaggtggaggacacatgaacataacgcaattcatggggctcccgaaagattgagaatggagagtggcactaagcaatcacta

SEQ ID NO: 9929 - DNA, 439 bp, Glycine max
  unsure (1)..(439): unsure at all n locations
tccncataacccttatagaaagtctcttcaatgaaattaactgtatagtacatgatcgntcactcattaagcgagaagtacaaaataaatcacattgattttttgttcaaaagtaccaagtaaaattttcggcctttccttgttctctgtccttatctcgggtataaggttttattcaatagagaaccctttcttctgtgcctatacgaattgatattattccattccaatttctattggtaactcacaagaaaaaactcaaattgacaaattagagcgagctcatccatgcagtcatgcaaatcaagcatcttcggctataatggaaaactatctgccagaagagcccattacaaccaattgagttaacaaccaaaaaaataaaacttgagctaaaaaccaaataaacaatacactgcaagcagttaccgaaatcacc

SEQ ID NO: 9930 - DNA, 418 bp, Glycine max
aaactcagctatgaggtgcttgactcctagcctcgttggaagttttatattcccgagctttcacttgggtgtcgttcttggtgacaattgcatcagggaggccataccttcatatgaggtgttacgaggtaaacttcgccacctcgttggctatgatttctcatagtggtcttacctcaatctacttggtgaagtagttgatagcgactagtaaatatttgattgctcctagggcttttggctatagtcccattatgtccattccacacatggcaaagagccaaggggagcttaagctgtggagattgtcaggaagggtgcgtggaatgcttgtaaactcttagcatcgtctacatttctttgtgaaatcaagggtgtccatcctgagtgtcggccaatagtagctggcacacaccac

SEQ ID NO: 9931 - DNA, 421 bp, Glycine max
  unsure (1)..(421): unsure at all n locations
tctaatgtctctccaccaatgagaataggcccttctttctctattatattgaaattctgaccagccaccatatttagaggttaaaactctaacctatagctgatgctgatcagatgcaaaagcccataaccatctacccaacaaagctaagttgaatttggagatatcctttatccccagtcccccatcagacttaggcaaacaaatatcatcccatttcacccaagggatttttttatgatcaatgtctccaccccacagaaaattcctttgaagggatatcagcttattgacaaccttttgaggtattttaaagaaagaaaggagataaattgggagggcattgaggacagaatntatcagagtaatcttccccgccatggatatatttttctgagcccatntggctaatcttgatttg

SEQ ID NO: 9932 - DNA, 384 bp, Glycine max
ggatcttaagcaccgcggctgcagctgaagcaactagatgcattgtttatttggtaacccagttggccttgaatcagaaatctatacctgtcgcaagagtctgtggtttatgctcctctgctgaccaccatacagacctttgcccttccatgcagcaacctggagcaattaagcagcctaaagcttatgctgcaaacatttacaatagacctcctcaacctcagcaacaaaatcaaccacagcaaaacaattatgacctctccagcaacagatacaatcctggatggaggaatcaccctaatctcagatggtctagccctcaacaacaacaacagcagcctgctcctttcttttccaaatgtgttggcccaagcagaccataca

SEQ ID NO: 9933 - DNA, 458 bp, Glycine max
  unsure (1)..(458): unsure at all n locations
ccggatccttaagcacctgcggctgcagcttgatgcaacattgnagaggttattatcatcgagatgatgcgctccatgagaggttggatcaaatggagaatagagatcataatgaagaagaaaggaggagaagagggaatgatggtgttcctagacaaaaccgaattgatggtattaaactcaacattcctccatttaaaggaaagaatgatccggaggcctacttggagtgggagatgaaaatagagcatgttttctcatgcaacaactatgaggaggaccaaaaggtgaagcttgccgccacggagttttccgactatgctcttgtgtggtggaacaagctacaaaaggagagagcaagaaatgaagagccaatggttgatacatggacggagatgaaaaagatcatgaagaagcggtatgtgccggctaagtactcaagggacttgaaattcaag

SEQ ID NO: 9934 - DNA, 422 bp, Glycine max
tccctcatcatgaaattttctttcttgaaacatatttgttgtatcaccattccacaactttttcagatcatcaatcaaaggttgtaaataaacatcaataccaattgttggattaaatgggttaggtacgacacaactcacaaacatataagttttagtcatacatatttctagaggaagattgtatggggtaacaatgattggccaataagaataaggtgaagacgatgcttaaatatatgggttaaatccatttgtgcataaaccaagtcgcacattttgcgtatcaatagaaaaatctggatgtacccgttcaaagtgcttccagacttcatagttagagggatgacttaacatgcctgaagatcttctattctcatagtgctatgtcatttcgcttacagtttgcatgggtgcaaata

SEQ ID NO: 9935 - DNA, 381 bp, Glycine max
  unsure (1)..(381): unsure at all n locations
agcttctaaggttgatagggcaattgtgcttggnttcttggatgtccaagataccagtgattntccaaggaattgacaagcaccactggtgccttttctttctacttaaccaccagcaaaatcaatatcacaatatcctacaaaattaaactcagacccttttcttataggccatgattactagttccaatatgatatcttaaaattcttttaatttcagtaacatgacaaatttttggacaagattgaaatttttcacaaagacaaacaacaaacacaatatctggtctactggcaattaaatataataaggaaccaatcatacctctatacttatnttttgaagtatcattacctttctcatcctcatcaatgaccatg

SEQ ID NO: 9936 - DNA, 428 bp, Glycine max
  unsure (1)..(428): unsure at all n locations
taagctccttcaactgcacaaggctcttaatatttgtgagtatccttatggaaccttcacccgatgaagacactaacaaaaacttatcttctcctttttggacaaagtatgacaagttgggggcaagtaaattttcttcccatcagaccttggatgcaactgtgatcgtatccccatctcagctagatcttgacgagtattcaagccgtccttcatcttgtcttgaatgttaaggagcgtcccaatcacactgtcacatacatttttctccacatgcatagcatcaatacaatgtctaacgtctaaatcagaccaatagggaagatcaaagaaaatggacatcttcttccatatgcaagtcatacttttatccttcttttgggtctttccaaatacagtattaanggtgtgaacccactggtatacct

SEQ ID NO: 9937 - DNA, 436 bp, Glycine max
tgtcgggttcagttataattaagcgctcgcgttatcttatggactgagcgaaaaggctcacgtcatcaaatactacgcatcttttaaagcacacagcgaggatcggaacctcaaccctacgttcttttaaaagactgtgaggagaaaatcacagaggacaggaatccctgggggaaaccaagaggaacacacaaaaataagaacatgccgcaacttccttaattgccctagatcttaagcgtaatatcgcttgacaacgtcggagttcacgggtgaaggtagctcctcatcatccatgttggcgagcactacggcccctccggagaaagctctttttacgacgaaaggcccttcatagttcagggtccactttcccctattgtctttgagggcttgggagactatcttcggcaccaagtcaccttcgctgaacctg

SEQ ID NO: 9938 - DNA, 376 bp, Glycine max
  unsure (1)..(376): unsure at all n locations
agctgtcacatggatgnccganctttttcttattatatcgagacgctcgaaatcgaacaacggaagctctcgataaattcgaatggtcataacatttcactcggatgtccgattcggggacataatatatcgagacactcgaaattgaacaacggaagctctcatgatattcgaatgctcataacatttcacacggatgtccgattcggggacataactcatctagactctcgaaattgaacaacggatgctctcgagaaattcgaatggtcataagatttcacacgaatgttcgattcggggacataatatatcgatacgctcgacattgaacaaccgaagctctctagaaattcgaatggtcataacatttcac

SEQ ID NO: 9939 - DNA, 339 bp, Glycine max
agcttatcgtgacatctgaactcgatgtatgtcatgtctccatgtggggttagctgaaacatggatgctagggtggcaagcacattacccatctgattttcctctctaggaatgtggtggaaagagacctcatcaagaactcaatcagtttcttgatgtaggcctgatagggtatcaacttgtgatccctatgttcccattctcccctcagctggcgaattaccaaggctgagtctctgtacactttaagcaatttgacattaaagtcaattgccacttggattccgagggcacatgcctcatactcagccatattattcgtgcaatcgaagcccaatc

SEQ ID NO: 9940 - DNA, 441 bp, Glycine max
  unsure (1)..(441): unsure at all n locations
tctagaagttggaatcttcattttgatgaaattatattatattttggattcataaagaacgaagatgaaccttgtgtctacaagaaggttagggggagtaggggtgttcatggtgtggtttggttcggtttttaggcaaaaagtcatccaaacccaacataaaataaagatgtgttttggtttggctcagtttaaatataacatcaaatctaaacaaaaccaaaccaatcatatttcagttttgcggtttttttatttttgtaatctattatcctaatttaaatctgtcaactaaacttacataattattatatatgctatataattttaaaaatgaaatttatttttattaaattttgtttaaaatgttttaactaaaaattatcttcacttctatttagcattgatantaaaataatttaccaactctttntgtaacat

SEQ ID NO: 9941 - DNA, 422 bp, Glycine max
tgatgccaaatggcccatgctttacagcatcaacattgctttattgtgagcagaactcttcctcagcttctgaagcctttgtagtcttatttatttctgagtttgaacaccactctccttggaccaacccattagatgatcggttaagaatcaaatcatcaattttctccagaaccacatcaccttcgccaaatgggcgcgcaaatgcggctccagtttccagcattgtatcatagtgtgacatatcaagcaattgggattcagatggatcagtgtcccagaggataagccacattgctgaagaacattagtagttttcttggtaaattgtcccatcctctaacacattactccataaaggatcttgtaagaatcatccagggtgaacctaataaatgaaagacaagagaaactaataacta

SEQ ID NO: 9942 - DNA, 435 bp, Glycine max
ttttattgtaatcttgaaattcaggacaacactctgatttttgaaattttcgggataaaaatggtcattgaccagtcccttttccatgacttaaccaaattacctagtgacggtgtaccatttgaaggtacactgaatgacgactggaaatttgatttctctgcccatgatgcccgccagttggtttgcaccaacaatgcggatatgaccggacgtcttcttgccgggtcattggcttttgaaagccgcatccttcactatttaattgtgcgtattttgcttccacggtcttccaaccttgcccaggtttctgaggaagatctaattatcatgtgggcctttcatacagggcgtcaacttgactgggcacacttagtcagatatcgcatgcataaggcattgtgattacatgctccactaccatatccacagctt

SEQ ID NO: 9943 - DNA, 425 bp, Glycine max
  unsure (1)..(425): unsure at all n locations
agctntatcttttaagatctttatgtgcgattntcatgaaaatgatagatctcatccagcgcaagttgctgcagcccagatacgcacactgctatataaacatgaaggctgcacgagttctgtaccaagtccgggattgaagagttattttgtgagttttgggacttgagtgttttgtgagccaccttgatgtcaccctaacatcaagtgttggacctgagtgtgtagagttgatctctattgttcagagagcaatctctggtgtgtatttgatttaactgtaaacacgggagagtgattgatagggagtgagaggggttctcatatctaagagtggctcttaggtagaggttgcacgggtagtggttaggtgagaaggttgtaaacagtggcttgtagatcttctaactaacactattttagtg

SEQ ID NO: 9944 - DNA, 400 bp, Glycine max
  unsure (1)..(400): unsure at all n locations
agcttctatagaaggttcgttcctatttnctctacaattgcatcacctctcaatgagttggtgaagaagaatgtggcatttacctgnggtgaaaaacaagagcaagcccctgctttgcttaaagaaaagcttactaaggcacctattctagctcttcctgacttttctaaaacttttgagctagaatgtgatgcctctagagtgggagttggagctatattgttacaaggtgggcaccctattgcttattttagtgaaaaacttcatagtgccactctcaactaccccacttatgataaagagctntatgccttaataagagccctccaaacttgggaacattaccttgtttccattggaattgtcattcatagtgatcatcaatcacttaagtacatta

SEQ ID NO: 9945 - DNA, 344 bp, Glycine max
  unsure (1)..(344): unsure at all n locations
agcttcagattcggatccataggactatctttatgtctacaatnctgcatgcctgtctcctccaaaatgtcgagggcgtacttcctttgagagatcacaataccatctcctgactgagccacctcaataccaaggaagtacttcaaatatcctaagtctttggtctggaaatgactaaataagtgctcctttagctgaataatcttagaagcatcattccctgtaatcactatatcatcaacatatactatcaagtaaacacattttccaggggatgaatgacaataaataacagaatgatcagcctcactacgtttcaacccaaaaagttgaacaatatgact

SEQ ID NO: 9946 - DNA, 433 bp, Glycine max
  unsure (1)..(433): unsure at all n locations
agcttcaagaaaaatggctctagtttactctttatttccagaaggaaattctatcaatagacctccaatctttaatggagagggttaccactactggaaaacccgaatgcaaatttttattgaggcaatagacttaagtatttgggaagccatagaaatagggccatatatacccaccacagtagaaagaattacaatagatggtagcacatcaagtgaaagcataacaatagaaaaacctagagatagatggtctgaagaggatagaagacgagtacaatacaatctataagccaaaaacataataacatctgccctgngaatggatgaatatttcanggtttcaaattgtaagagtgctaatgaaatgtgggacactctancantaacacatgaaggaactacacatgttaaaagatctangataaacaca

SEQ ID NO: 9947 - DNA, 401 bp, Glycine max
agctcgcaatcatttggtataaaaatcaccttgtcttgtggctctacacaagggtgactgcaaccttctaaaatagtatctccttcatcctattaaaatcaaaatgacaatgttaaatgctattcgtaaaaagatccctccaaccaaaacaagggataaacagagaaggaaggtaaatgctagaagaaaagaatgtagtaattgtgaaaacaacaaattaagtaccaatgaagtgatgtcatgccttgtgtagggagtaggacaactagaagccaaatcaacaaatctcaactatagattcctatccatgtacattctctataaaacattcatggttagtgtggttctactaaattgtgcatgacaagagtatattcattagacatctaaatggaagttat

SEQ ID NO: 9948 - DNA, 338 bp, Glycine max
  unsure (1)..(338): unsure at all n locations
tccgttgctcaattacaagcgtctcganatattttgttcttgaataggacctccgagggacaaggtatgaccatgngaatttctcgagagcttccgatgttcaattgcgagcgtctccatatattatgcgctagtatcggacctccgagtgaaaagttaggaccatttgaattgctgaagaacttccattgtacagttcgagcgacacgatattttacgcgatcgaaacggacctctgtgtgacaagatatgaccatttgaatatctcgagagcttccgtggttcaatttcgagcggctcgatactttatgcggctgaatctgaccttcgagttaaaa

SEQ ID NO: 9949 - DNA, 328 bp, Glycine max
  unsure (1)..(328): unsure at all n locations
agcttgtaattgagcaacggaagctttcgagtantatttaaattgtcatcacttttcactcggaagtccgattcatgcgcatcacatatagagacgctcgaaattgaacaacggaagctctcgagaaattcaaatggtcataacttgtcactcggaggtccgattcaagcgcataatatatcgagacgcttgtaattgagcaacagacgctttctagaaattcacagggacatcgcttttcactcggatgtccgattcaggcgcatcacatatagagacactcgaaattgaacagcggaagctctcgagatattcaaatggtcataac

SEQ ID NO: 9950 - DNA, 422 bp, Glycine max
  unsure (1)..(422): unsure at all n locations
tgttagtgtgtgtttaaatgtctaatataaaaganattttatgtaataatgtttctttgaagaaaattttatcagtgaaaataaaatattttgaatatgaattttgtagtatttttttaattagattaggttggtgttaatgatttattagtgtgttaataattcatgaacgtttcaactttcatttaaaaaaattagtagatcatatttatttgaagaaagtattttgagtatgaaatttattttaatatgaagttgtagtatttttttaattagattaggttcatttttttgtgttaaaaattgataagcgttcaagttgaaagtgttatttgatgatgttttgttgtttcttgtatcatatttaatttaatatatttgtagtaattttgtaattacctatntttcatttgaagttatta

SEQ ID NO: 9951 - DNA, 456 bp, Glycine max
  unsure (1)..(456): unsure at all n locations
agcttcaagaaaaagatggcctcagcaaatttcttatttccagaagggaattctatcaatagacctccaatctttaatggagagggttaccactactggaaaacccgaatgcaaatttttatcgaggcaatagatctaaatatctgggaagccatagaaatagggccttatatacccaccacagtagaaagaatttcaatagatggtagttcatcaagtaaaagcataaccatagaaaaacctagagatagatggtctgaagaggatagaaaacgagtacaatacaacctanaagccaaaaacataataacatctgccctaggaatggatgaatattttagagtttcaaattgtaagagtgctaaggaaatgtgggacactcttcgattaacacatgaaggaactacagatgttaaaagatctaggataaatgcactaactcatgagtattgaata

SEQ ID NO: 9952 - DNA, 435 bp, Glycine max
  unsure (1)..(435): unsure at all n locations
tgataggtaaggactctatttgtgactcaaaattatttctagttcaaactagcttttgtatcttatacagcattttgtcatccaactgaatgcttattattaagcagggatttgatgaatccaatattggagaaagggcataacagagttcctgtctattatgagcagcctacaaatattattggacttgttctggtatgtaattatgcatacaatcacttatttttctttattccttcagtattgaacaatcattatctgctatgtgaaaacttataaaaaccacaaacagtatgagactattttctttaagcttcaacctgttaacttgctttccatcaagatgattngcacaagttaattatttttgtctgttcgaccaaaactatgttgctaggttctgataaaccctaagttaatattaattaataattt

SEQ ID NO: 9953 - DNA, 473 bp, Glycine max
tgacgtaagctccattggagcttgtaggcctaggatcttcttcatttatggattcctttgcttcttggaagatgaatggcagcggaatggagaaggaagagagagaggagacgccacttcaaggagaagatgagtctagaagaagctcacccccataggaggccatggataagagcttggaggaagaaggagatgaatgaagggagagggagagaaaagcatgaaattttgtgctctaagagagctctgaaatctgaagtttaattttcaaatgatcaaagttcaaaaaatgcacacatatggcctctatttatagcctaagtgtcacacaaaattggagggagatttgaatttctattcaaatttcacttaaatttgaaattgaatttgtggagccaaattttggagccaaaattcactaatataattaaggaattttaactatgggtcagcccactaattcaagatcaagt

SEQ ID NO: 9954 - DNA, 517 bp, Glycine max
  unsure (1)..(517): unsure at all n locations
tgacaattgagtggtattttgtttcacataacagggagaatgagcagctatccaagtatggtgacaccaaaactgctcgaagcattatgttgatagaactgaaaaaactcatagaggcaaatcctcttttccgtgataagcttatcttccctacccttaagtcatcaagactgcgaactttgatcaatcaaaggtatgtgtgattaatttctaccaactttatctatctattttgccatgctctttcattcacatagttgggctctgctttttgacccatatgtcgttatgggaaaaatgaaaagtaaatcatgttgatttctggacatgtagtatatntcatattttgtcagtggtaaatgataagaatttggaaggttttctggtccttttttaattcattcttgtaaatttgaatttttagcgtgctgtgccttgcctattttttaatcagtgaatttatctatgccccttaatcatgcagtctaaactggcagcatcagctctgcaaaaaccc

SEQ ID NO: 9955 - DNA, 450 bp, Glycine max
taacccatggaagctcctaatatctcccactctttttgtggtgggccattcttggatggccttgattttctcaaggtccacttggaccccatttctaccaactacaaaacctaagaaaactatattatctacacaaaaggtacacttctctatatttgcatagaaggtgtttttcctaaggactgaaagaacttgtctgagatgtcctaagtgatcatctagcctcctactatacactaaaatatcatcaaaataaacaactacaaatctacctatgaaatcccttaagacatgatgcataagcctcattaaggtgcttggtgcattagtgagcccaaaaggcatcactagccattcatacaaaccaaacttggtcttgaaagcaattatccactcatcaccctttttcatcctgatttggggataccacttttaaaaacaaattttgaa

SEQ ID NO: 9956 - DNA, 482 bp, Glycine max
tatagaatatataataaaagaactatgactattgaagaatctattcatgtttcctttgatgagtctaatgctatttctccaagaaaggatattttagatgatgttacagaatctttagaacaaatgcacattcatggacaagattctaaaggaagaagtcaaatcaaatgatgaacttccaaaagaatggaaagcttcaaaagatcatccccttgacaacattattggtgatatctcaaaaggggtaacaactagacattctcttaaatatttatgcaataatatggcttttgtgtctatgattgaacctaaaaatataaatgaagccataatagatgatcattggatagtagctatgcaagaagaactaaatcagtttgaaagaaacaatgtgtgggaattagtaaagaaacctgaaaactaccctatcataggaacaaaataggtatttaggaataagttagatgaacatggcataatca

SEQ ID NO: 9957 - DNA, 530 bp, Glycine max
agcttggaggatcaatatacaggatcatcttccttgtatttaagcaaataattttttaattaaagatctttgaatgttgttagaaattatcactatgagtgtaagtttttggtacctatcaattcattagtcttcaagttagaaatttattgatttccaccccttgcaaactcaacatttgttataaaaagtttaaaatttagagagaaagcgtttgtttttatttattattaaatttgcttcacaaccctttgcaaactcagtaggttgcaaaccaaaatgcagtgatatagtgccatccaacaacaacaacattccgtaaagttcaaaaagctaggcacaaccgttcaactttcaaactcaaaaccacaacatgaacagaaaaacgtgaaacataacaaaatgggttgcactaatagtaggaagcaactaagaaaatagtaaactaaaaagtgttttattaagccaacttgaagttgagcacactaagatgagaaagaaacttgagccagcaccccactcaaccccca

SEQ ID NO: 9958 - DNA, 436 bp, Glycine max
gcaagctggagccaattccaagtcactaggttgtcttgagccatccccgacaacagttcctgagccataaggggacccacctttgaccttctccatctcatacatgccatctccaaatgtgtacccaaccggaacaaaaatcattccatggtgaacaagctgagtgacagaggtcaacggggtctcttcttgtccacctccttgagaactagtgctagagaagaaccctgcaggttttcctgctagtgcctgtgtatgccacagccctatagtgccttctaaaaatgctttgaattgagaagccatggttccaaatgttgttggaaaaccgaacagaaagccatcggcatcggcaagctcacggggtttaataatatgaacatcatcactctttggaggtgctcccttcttcacaaggacttcttcagacagtgtt

SEQ ID NO: 9959 - DNA, 278 bp, Glycine max
tgcgaccatttgaataactcaagagcttccattgttcaattttgatcttctcgatatattatgcgccctaatcggacctccgagtgaaaagctatgaccatttgaataactcaagagcttccattgttcaatttctagcgtctcgatatcttatgcgcctgaatctgacctccgtgtgaaaagttatgaccacttgaatatctcgagagcttcccttggtgaattctagcgtctcgatatcttatgcgcctgaatccgaccttcggaggaaatgtttg

SEQ ID NO: 9960 - DNA, 479 bp, Glycine max
agctttgatgcaacatttggagaggtttatgatacaacgagatgatgcgctccatgagaggttggatcaaatggagaatagagatcataatgaagaagaaaggaggagaagagggaatgatggtgttcctagacaaaaccgaattgatggtattaaactcaacattcctccatttaaaggaaagaatgatccggaggcctacttggagtgggagatgaaaatagagcatttttctcatgcaacaactatgaggaggaccaaaaggtgaagcgtgccgccatggagttttccgactatgctcttgtgtggtggaacaagctacaaaaggagagagcaagaaatgaagagctggttgatacatggacggagatgaaaaagatcatgaggaagcgatatgtgccggctagttactcaagggacttgaaattccagctccaaaaacttaccccaagcaacaagggggttgaagagtatttcaa

SEQ ID NO: 9961 - DNA, 544 bp, Glycine max
  unsure (1)..(544): unsure at all n locations
tcaggctgctcaattgctccaggttgctgcatggaagggcaaaggtttgtatggtggtcagcagaggagcacaaaccacaaacccttgcgacaggtacaaatttctgattcaaggccagctgggttaccaagttaaccaatgcatccagttttccttcaagcttcttagtttcagatgatgcagatgggtttgtagctacctcatgcactcctctaatgactatggcatcatttctggcgctaaactgctgggagttggaggccatcttctcaattaaatttctggcttcagcaggagtcatgtctccaagggctccaccactggcagcatctatcatacttctctccatattactgagtccttcataaaaatattggagaagaagctgttctgaaatctgatggtgggggcaactggcacatagtttcttaaatctctcccagtactcatacaggctctctccactgagttgtctaatacctaagatacccttnctgatggttgtggtcctagaagcatggaaaaaattctctaagaatactc

SEQ ID NO: 9962 - DNA, 411 bp, Glycine max
agcttgtgtagcggtaattctaactgttaaaagattttcgcacctgttacctagatgtcggtgcagcttgataatagtttcctcctcttccttggtgtaatttcctcttttgaggtttggccttaggtaattcagccaccttaatctgcaactctttccacatctcgcaagacctgacaaattaataacaacaacaacaacaaagtaaaaccaattacaatggattcatatatgatttaggtataatctgtgcatgtgtataattaaacattgaatatatggttcctacatattgatgtagaagttaaaccaaaccttgaaaacagagaagaagaaaaattgaaagccacattggcgactatattgatggtacatgctctcacatactttattttgtttctgaccaaacta

SEQ ID NO: 9963 - DNA, 462 bp, Glycine max
cgttctatagaaggttcgttcctaatttctctacaattgcattacctctcaatgagctggtgaagaagaatgtggcatttacctggggtgaaaaacaagagcaagcctttgctttgctcaaagaaaagcttactaaggcacctattctagctcttcctgacttttctaaaacttttgagctagaatgtgatgcctctagagtgggagttggagttgtattgttacaaggtgggcaccctattgcttattctagtgaaaaacttcatagtgccacccttaacaggggggttcatagaactaccaagaagtccccttttgaggttgtctatgggttcaatccctaacaccgttagacctcattccccttcccctagacacttcttttatacattaagaagggggattctatggtcaaagtttgtaaagaaagttggcatgagaggggttaataacccaatttga

SEQ ID NO: 9964 - DNA, 374 bp, Glycine max
agcttcaacatcagaccacttcctttgttctggaactacttcacatggacttgatggggcctatgcaagttgaaagccttggaggaaagaggtatgcctatgttgttgtggatgatttctccagatttacctgggtcaactttatcagagagaaatcagacacctttgaagtattcaaggagttgagtctaagacttcaaagagaaaaggactgtgtcatcaatagaatcaggagtgaccatggcagagagtttgaaaacagcaggttcactgaattctgcacatctgaaggcatcactcatgagttctctgcagccattacaccacaacagaatggcatagttgaaaggaaaaataggactttgcaagacgct

SEQ ID NO: 9965 - DNA, 529 bp, Glycine max
gaatcggacatccgtgtgaaaagttatgagcatttgaattattttttagcttccattgttcaatttcgagcatctcgatatattataagcctgaatcggacattcgtgtgaaaagttatgaccatttgaatttctcaagagcttccgttgttcaatttcgagcctctcgacatattatgcgcttgaatcggatatccgtgtgaaaagttatgaccatttgaatatctcgacagcttctgatgtttaattcgagcggatcaatatattataagcctgaatcgaaccttagtgtgaaaaggtatgaccattttaatttcccgagaactttcggttttcattttcgagcgtctctatatgtgatgctccttaatataacatccgtgtgaaaagatatgaccatttgaatttctcaagagcctccggtgttcaatttgagcctctcgatatgtgattggccgaatcggacatccccgtgaaaaggtaataccttttaatttttaataaatttccttgttaaatttttagcttc

SEQ ID NO: 9966 - DNA, 337 bp, Glycine max
accttcaacctagaggagacggaccatttttgtgttggagaagatcaacgacaatgcctacaagattgacttgcctagtgagtataatgtaagtgccactttcaatgtgtctgatctatctctttttgatgcagatggaggagccttggatttgaggacaaatccttttcaagaaggagggagtgatgaggacataaccaagggcaaggaccatgaagcacttgaaggtcccatgaccagaggcagacttaaacaagcccaacacgtcatagagacaaggctggtcatttgtatagctgccattgatgatgattgaaggcccaagtggagaaagatg

SEQ ID NO: 9967 - DNA, 471 bp, Glycine max
  unsure (1)..(471): unsure at all n locations
ttgcagtctatataaagcttcaagatgtgatgtagctccttgtttatcttgtaggcctcggatcttcttcatcaatggagtcctttgcttcttgaagattaatggcagtggaatggagatggaagaatgatgattggagatgccacttcaaggagaagattagtcaagaagaagctcaccaccataggaagccattgataagagcttgaaagtaagagaaaaggagtggagggaaagggagagaaggagcacgaaattttatgcgtcaaaagtagtctgaactttgaagtttaattctcaaatgatcaaagttganaaaatgcacacacatgaccactatttatagcctaagtgtcacacanaattcgagggaaatttgaatttctattcaaattttacttgagtttgaaattgaatttgtgcaccaaattttggaaccaaatttcactattatgattagtaaattttagc

SEQ ID NO: 9968 - DNA, 555 bp, Glycine max
tttatccatggcttcctatggtggtgagctttttcttgactcaacttcttcttgaagtggcgtctccaatcatctttcttccttctccattccgctttcattcatcttgaaaaagcaaaggactccattgatgaagaagatcctagttctacaagctccacatggagctacatcacttagtaacgtaacataaagcgtaaaatcattcagttcatattctaagattactttccaatctcactgaaaatccaatttcatgacactagtgataaaatagaatcaagcattatgagtataatgaaattaccaaaaatgagtaaaacagattcatacatatataatacccaaagggatccatatgggtacaaagattacattcaatcctttagaaaaactaaccgatcattgcgtagagcacaagactaacaagagaaatggcgaataaagtgatccataatcacaactctgcagtgcctcggctgcactattacttttctccttctttgcatttttctctggaatttcttcaactcgattctcttttccttaacaatg

SEQ ID NO: 9969 - DNA, 349 bp, Glycine max
agcttcctcctcagctgctcaaatgcctctctacaaagttggtcaagcaaaaaattttcgtccttctgaagaagcttggacaatgctaggagaatctggctaaaatcctagatgaatctcttgtaaaaacatgcatgtccaagaaaagaacatacttcttgcacaaacatggggtaaggaaaagaaataataacatcgatcttcgccttatcgacctcaatacctatactagagacgaaatgccctaagactataccttcatggaccataaaatgacatttttctaagttaagaacaaggttagtctcaatgcatcgatcaaaaactctagagaggctacccaaacatg

SEQ ID NO: 9970 - DNA, 344 bp, Glycine max
tcatgagagagtcaaagatcaaattgagaggaaaaatattttctatgctaaacaagccaacaaagggagaaagaaggttgtcttcgaacccggagattgggtttgggtgcacatgagaaaagaaaggtttccggaacaaaggaaatcaaagcttcaaccaaggggagatggaccatttcaagtgcttgaaagaatcaatgacaatgcttacaaagttgagctgcccggtgagtataatgttagttccaccttcaatgtctctgatttatctctttttgatgcagatggagaatccgatttgaggacaaatccttctcaagagggagagaatgatgaggacatga

SEQ ID NO: 9971 - DNA, 472 bp, Glycine max
ccttatgctgcaaacatctataatagacctcctcaatctcatctgcaaaatcagccacaacaaaacaattatgacctctccagcaacaggtacaagcccaggtggaggaatcatcccaaccttaatggtcgaatccttcacaacagcagcaacaacaacaacaaccttattttcaaaatgctgctggcccaagcagaccttacgttcctccaccaatccagcaacaacaacaacaacaacaacaaccctagaaacaacaaacagttgaggctccttcgcaaccttcccttgaagaacttgtgaggcaaatgactatgcaaaacatacagtttcaacaagagaccagagccttcattcagagcttaactaatcagatgagacaattggctacacaattaaatctacaatagtcccagaattctgacagattaccttctcaatctgtccagaatccaaaaaagtgagggcatta

SEQ ID NO: 9972 - DNA, 445 bp, Glycine max
tccattgttcaatttcgagtgtctcgatatattatgcgtttgaatcggacctccgaatgaaaagttatgaccatttgaatttctcgagagctacctttgttcaatttcgtgcgtctcgatatattatgcgcctgaatcggacctccgagtgaaaagttatgaccatttgaatttctcgagagcttccgatgttcaatttcgagcgtcttgatatactatgcgactgaatctaacctccgtgtgaaaagttatgaccatttgaatttctcaagagcttccgttgttcaattttgagcgtctctatctgttatgcgcctgaatcagacctccgagttaaaagttatgaccatttgattttcttgagagcttccgttgttcaattttgagcgtctcgatataatatgcgcctgaatctgacctccgagttaaaaggtatgacccattg

SEQ ID NO: 9973 - DNA, 291 bp, Glycine max
agcttctatagaaggttcgttcctaatttctctacaattgcatcacctctcaatgagctggtgaagaagaatgtggcatttacctggggtgaaaaacaagagcaagcctttgctttgctcaaagaaaagcttactaaggcacctgttctagctcttcctgacttttctaaaacttttgagctaaaatgtgatgcctctggagtgggagttggagctgtattgttacaaagtgggcaccctattgcttattttagtgaaaaacttcatagtgccaccctcaactaccccacc

SEQ ID NO: 9974 - DNA, 555 bp, Glycine max
ttatagcagatgccactctactccaaattcttgaaggatatgtttttatggaaacataagtacattcaccaggaaaacattatagtggaaagaaattgtagcactgtgattcaaaagatccttccgcctaagcataaagaccctgtgagtgtaactattccttgttcaattagagaagtcactgtgggaaatactcttattgacttaggagccagtataaatttaatgccactctccatgtgtagaaggttgggagagctggagatcatgcccactaaaatgactttacaattggctgatcgctccattaccagaccatatggagtaattgaagatgtgctggtcagagtgaaacattttatcttcctggcagactttgtggtaattgatatctgtgaagatactgacattcttgtaatattgggaaggccattcatgttaactgcaagctgcatagttgacatgggtagaaagagaaatgggttttgaggatcagaaaattgattttgatttgtttgttgaaagcagcccgcttcagaacaaaatgtttgctta

SEQ ID NO: 9975 - DNA, 394 bp, Glycine max
gctatcaatctttgagcaggagaacttccaatgcataattggatgcatcacacattagctcaaaaggggatgtccaatcaggtgcctgaataataagggtggtagtcaccgcacgcttgaggcaatcaaaagcctctttgcatcggtcatcaaaataaaactccaagtccttttgcagcagattggatagtggaagggccactttgctaaaatccttgataaagcgcctataaaaccctgcatgaccaagaaaagaacgaacctctcgaacgcaagaggggtaaggcaattgtgaaataacatttatttttgcagggtctacctctatgcccctactggaaatgatatgcccctaaactataccttgttctaccatgaagtgacattttttaaa

SEQ ID NO: 9976 - DNA, 251 bp, Glycine max
agcttcaacatcagaccacttcccaggtgctgtgactacttcacatggacttgatggggcctatgcaagttgaaagccttggaggaaagaggtatgcctatgttgttgtggatgatttctccagatttacctgggtctactttatcagagaaaaatcagacacctttgaagtattcaaggagttgagtctaagacttcaaagagaaaaagactgtgtcatcaagagaatcatgagtgaccatggcagagag

SEQ ID NO: 9977 - DNA, 187 bp, Glycine max
tctggtgggacatcttgacttgctttccaatctgacattcaccttttattctgccctcttctattttcagattgggaatgcctctaacagcacctttgtcaatgattttcttcatgcctcttaagtgcaaatgtccaaatctttgatgccatattctgacttcatcttctttggaggatagacatgt

SEQ ID NO: 9978 - DNA, 347 bp, Glycine max
  unsure (1)..(347): unsure at all n locations
agctgggccactggagaaaaggtatcanatttatattgattcctttgggaagttccatataaacttcttcaaacaaatctctattcaaaaaagcattattaacatctaattggagaagacactagtttctagcagcaacaacacagagcaaaactctcacagtggtaagcttggccattggagaaaatgtatcagagaaattgattccagcttattgagtataccctttggcaaccaatcgagctttgtatctatccacaaagccatccattttatatttaaccttatacacccatctacaacccatacaatgcttatcaggtggtaagggaacaagtgtctagggg

SEQ ID NO: 9979 - DNA, 371 bp, Glycine max
agcttctcctctagaaagttccaaattcttccaccaggtccaccactctccccataatcagcaacctccaccatggcaccatctcaagcgccccctccattgcaccttcagagccctctccgacaagtacgacgacgtcatctccctatggttcggctcccgcctcgtcgtcgtctcctcccaaacactactccaagaatgtttcaccaaaaacgacgtcgtcctcaccaaccacccccactttctctctggaaaacacatatcttctacactatggtgagtactaacgcgttaaggggaggaagattgatggtggcacaagagaacgaggaggaaaaggtggaggcttctaagtatcagcgcgaaaaacc

SEQ ID NO: 9980 - DNA, 442 bp, Glycine max
tcgataatccatttcgagcgtctcgatatattacgggactcattctgacaaccgagtgaaaagttattgtcgtttgaatttatcagagcttcagtatgcaatattgagcgtctcgatatattacggcactcaatcgaacattcaattaaaaaggtattgtgcgttggatttgatcagagcttcaacattcaatttcgagggtttcgatatattacggggactctatccaacacttccgtaaaaaagttatggtcgtttgaatttgctccgggcttcaacattcaattttgagcgtttcgatatatgacgggattcaatcggacatctgagtaaaaagttattggcgtttgaatttgctcagagcttcggcattcaagtccgagcctctcgatatattacgggactcaatcagaccaccgagtaaaaagttattgtcgtttga

SEQ ID NO: 9981 - DNA, 285 bp, Glycine max
ttttactcggatgtctgattgagtcccgtaatatatcgagacgctcgaactggaataccgaagctctgagcaaattcaaacgacaataactttttactctgatgtctgattcagtcccgtaatatatcgaaacgctcgatattgaaagttgaagctgtgagcaacttcaaactacaataactttttactcggatgtctgattgagtcccataatatatcgaaacgctcaatattgaatgttgaagctttgagcaacttcaaacaacaataactttttactcggat

SEQ ID NO: 9982 - DNA, 473 bp, Glycine max
ttacatcccatattgtgataaaatcttttgtattttttgttatgttgaggttatgaaatgatgattcaaactatgagtatgtgataaattgaacatgtgacggatgatgaaatacatgtgtattgagatgagatgtgtgtattgagttgtgaactatgaactgtgcaatcacacaattgtaagaccctttaaggacgacgagtattgtgatgggatccactgtgggaacccgacgagttaaaatgattttgaaagcaattgagtaaatgtgtgtattgcatagttcatagataaagtgtatatgattcatgaggtgtgataacatgttaaattgagattataccattgtgattgggattaagtgtatgtgataaattgagtatgtatatgattgatatatatatatatgtgcattgaaatgttgtgtgcattgaattgtgaacctataatttgttaattacacgatcataagt

SEQ ID NO: 9983 - DNA, 377 bp, Glycine max
tggtccttctttgtataagagtaagaggtagactttttatattatgactttctctttaattggtgctctacccttatacaaaggtgaactagctcatataggtctctatatggaaggagttcaaccatgtctcttacttccatatttaaaccacttaggaacctagcaatgcttggtctttccttccccctatgtctagctctcaaaaagagtaattccatttgttgtctatattcttccacactcatactcctttatctaagcctttggagcttgtccataagctccctttcatagtaagagagaatgtgcctttttctaagggcactcttaagattattccaatactatattggaggatccccatgaatccttct

SEQ ID NO: 9984 - DNA, 320 bp, Glycine max
agcttcagtaagagatctgaaacattgatagaattctctataatgtcaatgcaggatcctatagattttcccattgataaggcctcagcaaccttccctcgagctgcttcatgcctccacaagaccaagaccgtgtttagcaaaggccatctaacatgagaatctgccttcttctgtgtgaagcctaggcccttgagcaataaatccaactgtctacaattaagaaaatcacaattagtaatggcaatgccatgtgagctttccaaatgttttcactaagtaagtaagtaaaaagttgcataaacctttcttatgtcatc

SEQ ID NO: 9985 - DNA, 319 bp, Glycine max
agctttgaatgctctattcaatggagttgacaagaatatcttcagactgatcaacacttgcacagtggccaaagatgcatgggagatcctgaaaatcactcatgaaggaacctccaaagtgaagatgtccagattgcaactgttggccacaaaattcgaaaatctgaagatgaaggaggaagaatgcattcatgacttccacatgaacattcttgaaattgccaatgcttgcactgccttgggagagaagatgacagatgaaaagctggtgagaaagatcctcagatccttgcctaagagatttgacatgaaagtcact

SEQ ID NO: 9986 - DNA, 522 bp, Glycine max
  unsure (1)..(522): unsure at all n locations
tcaagaaaaagatggccttagcaaattccttattttcagaagggttttctatcaatagacctccaatctttaatggagagggttaccactactggaaaacccgaatgcaaattttcatcgaggcaatagatctaaatatctgggaagccatagaaatagggccttatatacccaccacagtagaaagagtttcaatagatggtagttcatcaagtgaaagcataaccatagaaaaacctagagatagatggtctgaagaggatagaaaacgagtacaatacaacttaaaagccaaaaacataataacatctgccctaggaatggatgagtatttcagggtttcaaattgtaagagtgctaaggaaatgtgggacactcttcgattaacacatgaaggaactacagatgttaaaagatctaggataaatgcactaactcatgagtatgaattatntanaatgaatgcnaatganaatattcagagtatgcaaaagagatttacacatatagtaaatcatctag

SEQ ID NO: 9987 - DNA, 410 bp, Glycine max
gtttttaagttcttcctcattactgtcctaagcaaagttcccaaagtcctattaacaactttcgtttgcccatcggtttgtgggtgacaagtggttgaaaataacaatttagtgcccaacttgctccacaaagtcctccaaaaatgacttatgaacttagagtccctatcactaacaatgctccttggcaaaccatggaatctcacaatctccttgaaaaacaaatcagccaaatgggaagcatcatcaacttttttacatggaataaaatgagccattttagaaaacctatcaacaaccacaaaaatggaatctctaccattgcttgtttttggcagccccaaaacaaaatccatggataaatcaatccaaggatactcccgaattggcaatggagtatacaatccatg

SEQ ID NO: 9988 - DNA, 217 bp, Glycine max
agctttcacatggatgtgcgattcgtttcttaatatatcgagacgctcgaaatcgaacaacggaagctctcgataaattccaatggtcataacatttcactcggatgtccgattcggggacataatatatcgagacactcgaaattgacaaccgaagctctcatgatattcaatgctctaacattcacacggatgccgattcgggacataactattt

SEQ ID NO: 9989 - DNA, 433 bp, Glycine max
taactaatcaaatgggacaattggctacgcagttaaatttacaacagtcccagaattttgaccgattaccttctcaatctgtccaaaatcccaaaaatgtgagtgtcattgcattgaggtcgggaaagcagtgtcaaggacctcaaccagtagcatcttcctcatccgcaaatgaacctgcccaacttcactctactccagaaaaagatgatgacaaaaatttaacgagtaagttacctaacaatttatatgcaggtgaatctttcactggtaattctgatttacagaagcagcatatccctcttccattccctccaagagcaatttccaacaaaaaaatggaagaggcagagaaagagatcttggaaacatttagaaaagtagaggtaaacatacctctgctggatgcaataaagcaaattccaagatatgc

SEQ ID NO: 9990 - DNA, 376 bp, Glycine max
agcttctgggaaaaatcctcgagttttctttatcaaaactcccagtgtttcattggaattaggtgtaacctacagcattgacaaattatctcataaatatatcacttcaaggttcgttgtttgtttctcacgaaacttattcaccattggaaacaaagaggatttacctttctccaactatgaccaagaaattcattcacagctatagcattctgtccatacatcagtggtgaggaccagtaaccccacagaaaccatttgtgcacattctctggcacatagaacaaaactatcataataaaggttcattacagtaaccaactttgaagttacattaccattttcttacctcgggaaatcacaaatccctccaaaa

SEQ ID NO: 9991 - DNA, 295 bp, Glycine max
agcttctatagaaggttcgttcctattttctctacaattgcatcacctctcaatgagctggtgaagaagaatgtggaatttacctggggtgaaaaacaagagcaagcctttgctttgctcaaagaaaagcttactaaggcacctgttctagctcttcctgacttttctaaaacttttgagctagaatgtgatgcctctggagtgggagttggagctgtattgttacaaggtgggcaccctattgcttattttagtgaaaaacttcatagtgccaccctcaactaccccacctatg

SEQ ID NO: 9992 - DNA, 375 bp, Glycine max
cctcgaaggtaaactagatgccttggttaacctggtttcctttttggtcatgaatcaaaaatctgcacctgttgccagactctatggtttatgctcctctgccgaccaccacacagacctttgcccttctgtgcaacaatctgaagcaattgaacagcctgaagcttatgctgcaaacatctacaatagacctcctcaacttcagcagcaaaatcagccacaacagaacaattatgacctctccaacaacaggtacaacccctggtggaggaatcatcccaaccttagatggttgagtcctttacaacagcatcaacaacaacagccttatttccagaatgttgctggcccaagaagaccatacgttccttcacc

SEQ ID NO: 9993 - DNA, 258 bp, Glycine max
agcttcaagagatcatcccctcgatttctttattggtgatatctcaaaaggggtaacaactatacattctcttaaagatttatgcaataatatggcctttgtatctatgattgaacctaaaaatataaaagaagccatagtagatgataactggatcattgccatgcaagaagaactaaaccaatttgaaaaaaacaatgtgtggaaattaatagaaaaacctggaaattatcctggcatagggacaaaaagggtttt

SEQ ID NO: 9994 - DNA, 322 bp, Glycine max
gaattctcaagcttcaaacctgcaacaaaagagttgagcaggtaaaaaagattcctctttttactcttagaggggactttgagcgtctgtttatggaggagtctgactcaatctctgattatttttctcgagtattggcccgcctcaatcacacttaaaagaaatggtgaacatgttcttgatgtgaaggtcatggaaaaaatacttcgaactttaaatcctagttttgacttcattgttaccaacattgaagaagaccatgatttatagaccatgactattgagcaactcatgggttctttactagcgtactaagaaaaac

SEQ ID NO: 9995 - DNA, 365 bp, Glycine max
ccttaagctctcacaccatttgaaaaagactcttataaccatttcaattacactcttgtggagcatgtgcctccactattccccaccaacagtctaccatgacaccatcaacatgtactaatttcaacaccttcagctgctttagtagatcatccagatcaactagctcacatttaatattgatcacccctaactataaaacaatatacacagaatgttcctatataatggtagattcatatttaaagataatttcctaaagaaaattagagtgtttcctttcttatactaagaatatctctcaaactctaatttcattcgaggactatcattcactgatattgtgattctcattagtcaaatta

SEQ ID NO: 9996 - DNA, 297 bp, Glycine max
agcttgaaattgaacaacggaagctctttagaaactcaaatggtcataaattgtcacacggaagtccgattcaggcgcataatacatcgagacgctcgaaattgaacaacgaatgctctcgagaaattcaaatgatcataacttttcaaacggaagtctgattcaggtgcataatatatcgagacactctaaattaacaacgaaagctatcaagaaactcaaatggtcataaattgtcacacggaagtcctattcatgagcataataaatcgagacgctcgaaattgaacaacgaat

SEQ ID NO: 9997 - DNA, 501 bp, Glycine max
tgttaataattaaaaaacaccaaacctacaaatacattttcttttaaaaattaagaaaaataaacaacatggtaatgatagaaatgtgcataaatcaatgtcgattaatgaatatatcaaaaattaaaataaatttaataaagaacatctaatacttttgtttctctataaaattgaaaatataatacaattagaatatattaataaaaattaatgacacgtataataattaattgataatatctccttttaaaaaaaatctgaaagtagaataattcatcaatttctacatcaattatttattatataaacaaatataatgatcttgtatataaatagaacaaaaaaaaaatacaatgaaaaaaaattacttgttacgaataaaaataaaattaaagaaacaagtctcacgaaaaaagtgtatatgaatggaatgtgacaacaaaatatgcaacaaattgtattaaggcccaggtttttggaatgaaacaaaaaatgccc

SEQ ID NO: 9998 - DNA, 285 bp, Glycine max
tatgcagagaatatccaatgtatataccttcatctgacttaacatcaaatttttctaagttatcttttccattattcaatacaaaacatttacaaccaaagatatgaagatgtgagatgtttggttttctgccattgaacaattcatatggagttttctttaaaatgggtcttattaaagccctatttaaaatgtagcatgcagtgttaacggcttcagcccaaaagtattttggaagaggagtatcatgtttatgttcaatgacacacttttgagaataaatga

SEQ ID NO: 9999 - DNA, 505 bp, Glycine max
agcttatctttcagagtctgaaaagctttctagcattcatcatcaagcttgaagactgcctctttattcagcaagttgctcaatggtttgacgattttagagaagtccttgatgaacctctgatagaagcctgcgtattcgaggaaactcccgatacccttggcatttattggtggaggtaaattctcaatgacatcaattttggctttgtccaccttaatgcctcaggctgaaatcttgtggcccaatattattccttcttggaccatgaaatgacacttctccttattcagcaccagatttgcttcaactcatcttcgcaatacgagctctagattagtcaagaagtagtcaaaggaaagcccaaaaattgagaaattgtccatgaagacctttatgcacttttctaccatgttctgaaaaaatagctagcacgtacctcttaaaaggttgttgtgcattacataaccccgatgacatctttttgtatgcaaagaccccaaag

SEQ ID NO: 10000 - DNA, 351 bp, Glycine max
ctgggttcgatggccccaatgacatctatcccctacattttataaggccaaggggcggacataacattcagaggatgtggcggaacattgacattgtccgcgtatgcttgacatttatgacatttccttacatgggcgcagcaatcgctttccatagtgagccagtaataaccggccctaaggatcttcctggccatagcatgcccattggcatgtgtcccacatgaacccccgtggatttcctcaatcatgcagattgcctctttggcatctacgcatcgtatgagggtcatgttggggtttcgtttatacaggatggtaccacttacaaagaaaccaatatccaatctc

SEQ ID NO: 10001 - DNA, 361 bp, Glycine max
agcttgtgctattccaagttcattaattatacctttaagccagattgcttcgttcactccttcaactaaggccatgtattctgcttcagttgttgaaagggcaacaactgattgttgatttgcttttcaactgattgctgtaccaaacaaagtaaacacatatccagttaaggactttcttgtatctacgtttcctggaaaatctgcatctacatagcctgtgattgctgcttcatgtgttgtcttcttgtaccttaatccagctttcaaagatccatttagataccttagtgttcacttcacaactttccagtgtatgctgccaggatctcccatgaatatgcttataatacttacagca

SEQ ID NO: 10002 - DNA, 393 bp, Glycine max
ggcctaggatcttcttcatcaatgggatttcttttgtctcttggaagatgaatggcagcggaatggagaatgaatagagagaggagacgccacttctaggagaagatgagtttataaaaagctcaccaccataggaggtcatggataagagcctggaggaagaagatgaatgaagggagagggagagaagagcacgaaattttgtgctctaaaagagctctaaaatctgaagtttaatattcaaatgatcaaagttgaaaaaaatgaacacacatgacctttatttatagcctaagtgtcccacaaaattggagggaaatttgaatttcaattcaaatttcactagaatttgaaattgaatgtgtggatccaaaatttcactaagtatgatta

SEQ ID NO: 10003 - DNA, 457 bp, Glycine max
  unsure (1)..(457): unsure at all n locations
gcgatccttaacgcactgcggctgcagcttntgaaactggaatcatttatcctatctccatcagccaatgggtgagtcccgtccaggtagtcccgaagaagaccgacctcacagtgatcaaaaatgagaaggaggagctaattcctactcgggtgtagaacagttggagagtctgcattgactataggaggctgaaccaggttaccaaaaaggaccattttcccctgacattcattgaccagatgcttgaacgcttggcaggtaaatcccactactgtttccttgatggtttttctggttatatgcaaattactattgctcctgaggatcaggaaaagaccacattcatctgccccttcggcacttttgcttataggaggatgcctttcggcctgtgcaatgcccctggtaccttccagcggtgcatgattagtattttcaatgatattttagaaaa

SEQ ID NO: 10004 - DNA, 415 bp, Glycine max
  unsure (1)..(415): unsure at all n locations
agcttgccgccacggagnntttttactattctcttgtgnggnggaacaagctacaaaaggagagaacaagaaatgaagagccaatggttggtacatggatggagatgaaaaagatcatgaggaagcggtatgtgccggctagttactcaagggacttgaaattcaagctccaaaaactaacccaaggcaacaagggggttgaggagtatttcaaggaaatggatgtgctcatgattcaagcaaagattgaagaagatgaggtgatcaggatataaccaagggcaaggaccatgaagcacttgaagggcccatgaccagaggcagacttaaacaagcccaacacttcatagagacaaggctggtcatttgtatagctgccattgatgatgattgaaggcctaagtggagaaagatg

SEQ ID NO: 10005 - DNA, 431 bp, Glycine max
  unsure (1)..(431): unsure at all n locations
gcttccaagattattntgatgatgccatttattatttaatatccattcaaacaagattaaagaaatcaagaagattcaagagaagacttaagatatgtaagaacctcaagaaaagcatcaagataagtataaaaagaatttttcaaagaaaagattgaataacacaatttgtccaaaagaatttttcaaagaaaaatcttttaccagagtttttactctcttgtaatcgattaccataaggcagtaatcgattaccagaagcccaaaacagttttataactgttttacaaagtagtaatcgattaccaatgtttttgaacgttgaatttcaaatctcaagagtctcaacttgtgacaaaatattttcaaaacagtgtaatcgattacacaatatttgtaatcgattaccagtggtttttgaatgttggatt

SEQ ID NO: 10006 - DNA, 427 bp, Glycine max
  unsure (1)..(427): unsure at all n locations
agcttgaggcacaatggtagccacaaagctgattattctgcatagctgcngcatgggaagaagaggagaagaccaagtgttgtcttaggtaactcaaccttaatagtttcagtgcattgaataactattttcaataacttctgacacattttcaataaccttaattatcaatttgattctcaaatttttaaaaggttcaatttaatgctcaagtttttaaagatgaaatcaatttggtcttcaaattattttaaatattttaatttggtctttaagttcttaaaaatttgaaaatcatattgattcatttttaaaaatttgaaggttcaattgattcatttttaagaatttgaggactaaattaaaccttttaataatttgnggatcaaattaatttatttttaagaacttatgatcaaattgaacc

SEQ ID NO: 10007 - DNA, 406 bp, Glycine max
  unsure (1)..(406): unsure at all n locations
agcttgcattcgactaacccatattacaattctactagaaaatagtcttttaacatcggttgttttcgattttcaacatcgatgtttaaccgatgttgaaaccaccgacgttaacattatcaatgctaacattggttttcaaaaaaccgatgttaatatacactacacgacatcggtttttaagaaaaaaccgatgtcgtatagtacaaaatgtatgaaaaacaaatactacaataaacaacatcggttttagtcaaaatcgatgttgaattgcgtattctgaaacgcttactacatcggttatgaacaaaccgatgtagagagtacctttacaacatcgattattggaagaattgatgttaaatgtgcttatgatatcagntttagtacaaactgatgtagaaaa

SEQ ID NO: 10008 - DNA, 333 bp, Glycine max
  unsure (1)..(333): unsure at all n locations
agtctcacgatagtcacgtgcttttcttttangttagccgaggctatacgagacatacttgccaacaaagtcaggttaacgataactcacctatgctctttctttcattctatatgtagcaaagtcattgatccagtcatatttgatgagttggaaaatgaggccgcaattatactgtgccagttggagatgtatttcccccttgctttctttgacatcatgattcacttgattgttcatctggtcagagaagcagaagaagccattgaattttgttcagaatacttagagaaggctaaacctgttgggctttctgagtctcggcatgatgac

SEQ ID NO: 10009 - DNA, 368 bp, Glycine max
  unsure (1)..(368): unsure at all n locations
ttcccttattttcaggctaaactttcctctgtcctgaggacttatcgagatacactgactgctgatatgaagagtgctattaagactgctgttgctgagttgcttccggttcttgcttctcgaggttcagagtcagaattcttttctggagacagagctgtggatgcagatggtgagaatttcgctagcataaatgattatgtttgtctgtacgagaaaatatacttttaatatctttcttccatcgtggttttatgtgatctgttctactttcaactttctaatgctaaatagtaactcaggtggaggtgcatcacttgctancaagttgcggagcctatcatctgactgttttgcgcatcttctga

SEQ ID NO: 10010 - DNA, 411 bp, Glycine max
  unsure (1)..(411): unsure at all n locations
agcttggtggctagttcatggctttaattttccaatacttcaaaaagattgcccttaagctacttgcgcaaccttgttcatcttcttgttgtgaaaggaattggagtacatattcatttatccattctttaaagagaaacaagatggcaccacatagagctgaagatttagtatttgttcatagcaacctacgaattctctcaaggaatactccacaatatcatcaagaggaaactaaaatgtgagatgtaactggagatgattttgggtcacttgatgattgtggtattcttgaaattgctagtttgtctttagatgaaccagagttagagggtgtctttttcattgatgattgctagtttgtgaaattcgtgaagacttgaagttgttaattcatcatcttgctntata

SEQ ID NO: 10011 - DNA, 423 bp, Glycine max
  unsure (1)..(423): unsure at all n locations
agcttgactntctgaggatgacatacttatgtaagtttcttgttgtccctctccaccatgatagagtgtccaagcaaaaccatcaatttattattgacaaagttaatcaaaggttgagcaattggaaaacgtccaatttatccatagcatgtagagtaactttaacaaaagttgttattcaagccatgcatatctatgtgatacaaactactttattactgtcttcggtgtgtgaagaaattgaaaaaaatgttgtaattttgtttggggccacacaaatacctctagcaaaattcattggcgaaattgagattctctatgcattccaaaaagaaatggcgaccttggtctgaggaaaactagtgttatcaaccaagtttttttaatggaggtggggtggaaattatgtatgcgacctaatga

SEQ ID NO: 10012 - DNA, 421 bp, Glycine max
  unsure (1)..(421): unsure at all n locations
agctntntattttctgtagattaagatgattctgtggccacctcatggactcctctaagaacaatagcatcatttcttgcactgaattgttgggagttggaagccatcttctcaatcaaattcctagcctcagcatgagtcatatcaacaagggctccaccattggcagcatcaatcatactcctctccattttgctaagtccctcatagaaatattgaagaaggagttgctcagaaatctagtggtgagggaagcttgcacacaatttcttgaatctttcccaatactcatacaagctctctccactcagttgcctgatgcctaaaatgtcttttctgatggtagtggtcctagatgcagggaaaaatttctccaagaacacccttctaaggtcatcccagctgaaaatggacttgggag

SEQ ID NO: 10013 - DNA, 313 bp, Glycine max
  unsure (1)..(313): unsure at all n locations
gagtcccgtaatatatcgagacgctcgtaattgataacagaaactctgagcatattcgaacgacaataactcttgactcaaatgtccgcttgtgtcccttagtatatcgagacgctcgtaatagaaaagggaagctctaagaataatcaaacgacaataacttntaactcggatgttggatagagccccgtaaaatatcgagacgctcgaaattgaaaacagaagctctgagcaaattcaaacgacaataacttttgactcggatgtccgattgagtcccataatatatcgagacgctcgaaaatgaaaatag

SEQ ID NO: 10014 - DNA, 441 bp, Glycine max
  unsure (1)..(441): unsure at all n locations
cttgatgttgttagtcgntcattggatgtcgagagtgtcatcttgttggattctgagaagaagatcaataaaatcttggtcctctaattcagctccatcttcttttgcaattntgttcttttcttgatgctctctgatgatgttttccaggaccttgtcaacctgcttgtgcaacttcttcaatctggtcatctttccagttaggaaatataagaatggaattgaaggaaagacatcagcaaggtcgaatcctcccccggattctacgattnttcggatcaaagacacaacaaactcatcttgctccttgtatatgccaccgaatgctaccctggaaatagaggcacatatcaatgagaaaattctactggtgagattgataggcgaaccagcagattcgcgaatggagttgatanactntgctgcctcgtcttctctaat

SEQ ID NO: 10015 - DNA, 413 bp, Glycine max
agcttttcgagaaaatgaaataattatgtatgtgatctagagcaacttacttatttgaagttggtgatcaaagagacattcagggtacacccacctactcctttattgctccctagagaatgctctcaaccaaccatcattgatggctatgaaatacctgccaaaactaaagtcatggtaaatgcatacgcaatttgtaaggattcccaatattggattgatgctgataggtttgtccctgaaaggttcgagggtagttctatcgatttcaaagggaataactttaactatctcccttttgggggaggacgaagaatatgcccaggcatgacattgggtttagctagcattatgcttccactagctctactactgtatcacttcaactgggaactcccaaacaagatgaaacc

SEQ ID NO: 10016 - DNA, 303 bp, Glycine max
ctcagctgaacccattacgtaatctctcgggtgttgagggtactttttatggatttttcacgtatttcgtgaaagactactcttgctaacgaaatattatcgtgtagagcaccctgttgttgtaacatctcaatgatgtgccaagcaatagcttcttcctcacgatctggatccgatgcacgaataaggtgttctgctctgtcaaataacataaaatgaattaagcaggatacatgctgtcgaccacctatgatgcacgtatactttcaaaatggcagcatatacatactggacctgtgctac

SEQ ID NO: 10017 - DNA, 424 bp, Glycine max
  unsure (1)..(424): unsure at all n locations
agcttccagattggtataccatgccactgttgctcctgctaagctgnctngaaagaaatgcatcaacaacttttcgtccgtagaatatgcccccatctttcggcaatacatccgaagatgtccttttggacatgtcgtccctttgtatttatcaaaatctggtactttgaacttgggagggatgacgatgtcaggtaccaaacacagatccgccaaatctgagaacgggtagttgccgaggccttctagcgccctcagcctctcttcaagtaaatcaatctttcccttatcttttgcaaagggaacggattctttaacgggtgcgggtggagacgggacatggcggactatgtttggttggggcaattcatgggggggcggatccttgaggggcagtagagggcctagacgggcatcttcttca

SEQ ID NO: 10018 - DNA, 291 bp, Glycine max
  unsure (1)..(291): unsure at all n locations
tactagnggagcattagaactaacgaattccgtaataacttccttagaaaggactttctcccgaacaaaatgacaatcaatctcaatatgtttagttctctcatggaatactagattaaaagctatatgtagggttgcctgattatcacaacatagcttcgcttgttgagtatttccaaacttcaattcttaaagaaagtgtttaatccanatgagctcacaaggggctacaaccatagctctatattcagcctctgcactagacgttgcaacaacattttgcttcttact

SEQ ID NO: 10019 - DNA, 402 bp, Glycine max
  unsure (1)..(402): unsure at all n locations
agctcgacacagnncnnaccttataccaattgtaaatngcaagcactacaaaaaaaagcagaatgacttgccatgcaacttgggacattagcacaatgatagtcattaactagataagtgcaaacactagtccagctaatttgtatggtatgtctgtgtctacagtactttgatccgtttatggctataatcatcaacaaaagaatggttgaaatcttattaaagctgataataatcaaaagatagcagtaatctatcaaataaagaaataacagtgaaactgaccctactcgtaatttggcttgaaggtgtggtgtcaaaaaatgaaacatgtgcccttaanacaatccttcctagtatgaagatggtgccaccaaaagatagaagagcaaatgttcccat

SEQ ID NO: 10020 - DNA, 387 bp, Glycine max
  unsure (1)..(387): unsure at all n locations
tgtgggttggaagtccaagtagttatcgcttacattcntattttgattgcaaagnctgntattgaggctttgcctatctactctatggtgacaaataaaattccatggggaattatcaacaatattaagaaggatgagagatcttttatttgggaagatcaagtgggaagaaagaaaatgcatgctataggttggaacttgatggctcggcctaaagcttatggaggggtggctatgtgaaatctcaagcataagaattctgctagtttgatgaagttagggtggtttctcagaaatgatgtgaacaacttatggtgtcaggttcctaaagggaaatatgcgagacaagatttctctgcaacatgtttggtagccaagccacatgat

SEQ ID NO: 10021 - DNA, 414 bp, Glycine max
ctgcagctttctttttggcacatctattctttttttgtgtagaatgaagcttgacaggttcaggtgcaggtgatactactggtggaggcacttgaatttggttgtcagacctcaaggtgatggcactcacattttttggattctgcacagtttgtgaaggcaatttgtcagaattttgggactgagcttggttcatctgagtagccactgccctatctgatttgtcatactttgaatggaggctcttgtctcttgctgaaattgcatatcctggatgatcatttgcctcactaactcttctaaggaaggttgaggaggagcctcaactgcttgttgtctttgttgtgactactgctgttgttgctgctgtattggaggaggaacatatggcttgcttggaccaacaacattctg

SEQ ID NO: 10022 - DNA, 431 bp, Glycine max
agcttatgctgcaaacatttataatagacttctcttattatcataaccaacaacagcaaaataattatgacctttcaagcaatagatacaatccaggtttgaggaatcatccaaatctgagatggacaagtcctctataacaacaacagcatgtccctccttttcaaaatgttgttggtccaaacaagccatatgttcctcctccaatacagcagcagcaacagcaacagtcacaacaaagacaacaagcaactgaggctcctcctcaaccttccttagaagagttagtgaggcaaatgaccatccagaatatgcaatttcagcaagagacaagagcctccattaagagtctgacaaatcagatggggcagatggctactcagatgaaccaagctcagtcccaaaattctgacaaatttccttcacaaact

SEQ ID NO: 10023 - DNA, 367 bp, Glycine max
tgtctctcaatcaagttcctgtgaaaagaaagtttcttattggtgtgataaaaatactaagattatgttgaaagtgtgcatagaagaggtgaatgttggaaataaacctcacaaccacttcactaagcttggttgggcaaatattgcagaaaagttcaataagacaacaaatttgagatatgaatataagcaattcagaaataggttggattctttgaaaaaggaatggcaattatgggccaagcttattgggaaggacacaggtcttggctgggatggggagaagaaaaccattgcagctagtgatgaatggtgggaagccaaaattcaggtatgtgttattcaactgaaaccattgcagccttct

SEQ ID NO: 10024 - DNA, 424 bp, Glycine max
  unsure (1)..(424): unsure at all n locations
tcctcaagtccctccaccagtaggaaaatccctntttgtctcgttcttctggaactctgtccaacctccatatttggagttaatgattctagcccataaatgctgctgaccagaagctaaggcccatatccatttgcccaacaaagctacattgaatttagatatttatttaatccccagacccccttcagccttaggaaggcaaataaccttccattttacccacggaattttcttgtaatccttttctcccccctataaaaaattcctttgcaatgctaccaatctatgagctaccttttgaggaatcttgaagaaagataagaggtaaattggtaaagcattgaggacagaatttatcagagagacctttcctgccatggatatatntttttgtgcccacttggataatttagattcacat

SEQ ID NO: 10025 - DNA, 410 bp, Glycine max
  unsure (1)..(410): unsure at all n locations
agctttctctcatcattgctcattctntttgttatttcaacttgcacacgaaccaattgatcacccctcatattgtctttattcaggaagggaacacctttcttagccataacaagtgttgtgttcggttgtgtcccagcaggaattttcaaatcgaccgttccatctacagtaggaaccttaattgtagtccccaggattgcatcaatatacgaaaccttgcaggtgtataaaatgttggtgtcatcacgtttaaggatgggatctgggataacctcaataactacaaagaggtcaccaggggaaccacctttccttccagcattcccctcattccggacccttagacgactaccagagtccacaccagctggaaccttcagacttatccgttttgatttccttacccg

SEQ ID NO: 10026 - DNA, 440 bp, Glycine max
  unsure (1)..(440): unsure at all n locations
tcttggcaatcctcattccagcgatcagtntggtttttgcttaagagcttgaacagcggctcacaaatggcgatgagctgcgagatgaatctggcaatataattcaagcgtcccacgaaacctcggacttgcctctctgtacggagttctggcatctcaaggatagccttcacctttntggggtctacctctatccctttctggcttacaatgaaaccaagtaatttccctgatttgaccccaaaggtacacttagcggngttcaaccttaattgatatttcttaagcctttcgaacaacttccgcaggttgacaaggtgttcttcctcggatttagatntagcaattatgtcgtccacgtagacctcgatctcttgatgcatcatatcatggaaaaaagctaccatggcccgttgataagttgccccgacattcttgag

SEQ ID NO: 10027 - DNA, 418 bp, Glycine max
  unsure (1)..(418): unsure at all n locations
gtcttcgcttccatttgttttatggagaaacctgatgatggtattaatggacactggtagcnttcacaacatcatgcaaccaagattggccaaacatttgcaacttcccatttcaccgattaaaactttccctgttatgattggtgatggaaatcatttaatttgtaatggtcaatggactaacgtgcctcttttagtccaaaaccatttgtttactttaccattttatttgttacctatccagggagctgatttggtattgggtatggaacggttgagaactttgggccccattatttctgactntgtagtcccttgcacgactcttacttacaatgattgctccattactttaaaaggggaactattaaatcctcaatttaccacttttcagtaactctgccacctcatgcatact

SEQ ID NO: 10028 - DNA, 421 bp, Glycine max
agcttcttcaggtgttattccttccaatctctttatttggctcctattcaagatgaagacaactgtagacactacctctccccacaagtacttgggcagactcttgcctttcaacatgctccttaccatattcattatggttctattttttctttctgcagctccattatgttgaggtgtgtagggaggagtcacttcatgaattatgccttcttgatcacaaaattcttgaaattctacagaaacatattcaccaccaccatctgttctcaatatcttgatcaatgagccactttgcttttctgccatatttttgaacttctcaaagacttcaaagacatcactcttccttcttattaggtaaactcatactttcctagtcaattcatcaataaaggatatgaagtatctgtttccaccc

SEQ ID NO: 10029 - DNA, 403 bp, Glycine max
agcttatcctgaccccgagagttatatgtttcttgtgggaaaactcatttaccttaccattactagacctgatatctcctttgctgtgggagtggttagccaatttatgcagaatcctcatttggaccattggaatgctgttatgcgtattctgaggtatgttaagaaagctcctggacaagggttgttgtatgaagacaagggtagtacgcaactatcaggatattgtgatgctgattgggctggatgtcccatggataggagatctacatcacgttattgtgttttcattggaggaaatctaatctcttggaaaagcaagaaacaaactgttgtcgctcggtctagtgcagaagctgagtatcgatctatggctatggttacatgtgagctcatgtggatc

SEQ ID NO: 10030 - DNA, 288 bp, Glycine max
agcttttaactcggagggccgtattaagctcatattatatcgagacgctcgaaattaaccaacggaagctctcgagaaattcaaaggggcataacttttaactcggaggtccgatccaagctcataagatatcgagacgctcgacattgaacaacggaagctctcgagaaatacaaatgctcataactcttcacacggaggtctgaggcacgcgcataatatatctagaccctcaacattaaacagcgggagctctcgagaaattccaatgggcataacttttcactg

SEQ ID NO: 10031 - DNA, 452 bp, Glycine max
  unsure (1)..(452): unsure at all n locations
tctcattgacatacagtcgatgctttttgctgtcgatctccatgtcctccccatttctggtgcctatgtagtgttaagtgtccaatggcttaaatcattgggtccactactcacagattataacatcttgtgcatgcagttcttctatcagggacgcatggtggaactgaatggtgatcaggatgacactccgaacttcatcacactgtcacaattttggcgaatttcgcagacccaagctttaggactgtactaccacatcacacttctatcgaaggactcgcccaacccacaggaccttcacccagatattcagtccctcctgactaagttcgcacacttngttcaccaacccagcaccttgtcatcgaagtaggacaccgatcatcacattcatctcctccctcagttcactccggtcaacgtgagaccgtatcactacccacacttct

SEQ ID NO: 10032 - DNA, 428 bp, Glycine max
agcttctgctgcaaacatttataatagacttcctcatctcaaaaccaacaacaacagaataattatgacctttcaagcaaaagatacaatctaggttggaggaatcatccaaatctgagatggacaagtcctccacaacaacaacagcctgtccctcctttccagaatgttgttggttcaagcaagccatatgttcctcctccaatgcagcaacagcaataacagtcacaacaaagataacaagcaactgaggttcctcctcaaccttccttagaagagttagtgaggcaaatgaccatccagaatatgcaatttcagcagaagacaatagcctccattcagagtttgaaaaatcagatggggcagatggctactcaattgaaccaagctcagtcccaaaattttgacaaattgccttcacaaactgg

SEQ ID NO: 10033 - DNA, 327 bp, Glycine max
gccctgatgagactaatgaaggaggtatagatgttgaaattaagctaaaggagttagaacaaaagtcagctgaagtcagtaccgagtggagtattgtccctggacgtggagggcattccactctggtatttatttctgtctaattgaatttgtattctctttaacaaccgaggaatttttggcctgcccaattaatttgtttactttctatgttgactttgtgtaagcttcccttcagccaggtggcactggtagttttgaacatcggaatctgcaagggctgaatagatctattaacggttctataacaacaagcaacttcttgaa

SEQ ID NO: 10034 - DNA, 390 bp, Glycine max
  unsure (1)..(390): unsure at all n locations
aactaagctgctaatgaataatgacataccgcataagggttaggatagtctcatagcattgnggagtgaccaagctgaggccctgtggtcgacacacacggcaatgatcacgcattgaaagcttgccatgaaacacattaagccattgctcgtgtaatgagctggaaatgtcttgcttatgtctttctgaaaaacgtaatgatataataattctcttaaagaggaaaattaaactagttaagatagattgatgcttaattacttgaattatgaaccatgctgcccagacaagggtgctaagaattacgaccaaagggcctaggaacatgtttcctttgccagaagagctagttccttccaatttctcagcatatcttcagtgaatacttg

SEQ ID NO: 10035 - DNA, 407 bp, Glycine max
agcttctagaggctgggcttatttatcctatctctgacagcgcttggataagcccagtacaggtggtaccaaagaaagggggaatgatagtcatctggaacgagaagaacgacttgataccaacattgactgtcactggttggcgaatatacatcgacttcgactaccgcaagctaaatgaagccataaggaatgatcattttcctttacccttcatggatcagatgttggagaggcttgtaggtcaggcatatattgctttttggatggatattcaggttataaccagattgctgtggaccccaaagaccaagagaagacggccttcacatgcccttttggtttgcctatagacagatgtcatttgggttatgtaatgaatcagccacattccaaaggtgcatgct

SEQ ID NO: 10036 - DNA, 428 bp, Glycine max
  unsure (1)..(428): unsure at all n locations
tatgctgcanacatctacaacagacctcttcaacctcagctgcaatttcatccacaacaganaaattatgacctctccagcaacaggtacaatctcgggtggaggaatcatcccaaccttagatggtcgaatccttcacaacagcaacaacaacaacaatagccttattttcagaatgttgctggcccaagcagaccatacgttcctccactaatccagcagcaacaatagcaacagccccagaaacagcaaacagttgaggctccactgcaaccttcccctgaagaacttgtgaggcaaatgactatacaaaacatgtagtttctacaagagaccagagcctccattcaaagcttaactaatcagatgggacaattggctacacagttaaatcaacaacaatcctagaantttgacagaataccttc

SEQ ID NO: 10037 - DNA, 408 bp, Glycine max
agctttctccactaagttgcctgattcctgaaatgttttttcttatggcaatggtcctagatgcagggaagaatttctccaagaacaccctcttaaggtcatcccaattgaaaatagacctgtgagcaaggtagtatagccaatcttttgccactccctctagagaatgaggaaaaacctttagaaaaatatgatcttcttggacatcagggggcttcatggtggaacaaacaatatggaactccttaagatgcttatgaggatcttcacctgcaagaccatgaaacttgggcatcaaatgtattagtccaatgttgagaacatatggaacaccctcatcaggatattgattacacaagctttcataagtgaaatcaggtgcagccatctctctaagagtcctctcac

SEQ ID NO: 10038 - DNA, 561 bp, Glycine max
ccgcttcttagtttcagatgatgcagatgggtttgtagctattttatgcactcctctaatgactatggcatcatttctggcgctaaactgctgggagttggaggccatcttctcaattaaatttctggcttcagcaggagtcatgtctccaagggctccaccactggcagcatctatcatacttctctccatattactgagtccttcataaaaatattggagaagaagctgttctgaaatctgatggtgggggcaactggcacatagtttcttaaatctctcccagtactcatacaggctctctccactgagttgtctaatacctgagatatccttcctgatggctgtggtcctggaagcagggaaaaatttttctaagaatactctcttaaggtcatcccagctcgtgatggaccttggagcaaggtaatacagccagtcctttgccactccctctaatgaatgaggaaaagccttcagaaatatgtgatcctcttggacatctgggggtttcatggtggaacagaccatgtgaaattctttccaatgtttgtgcgggtc

SEQ ID NO: 10039 - DNA, 585 bp, Glycine max
ccgcttgtaggccttggatcttcttcatcaatggagtctttctcttcttaaagtttgatagcagcgtaatggagaaggagaagggtgattggagatgccacttcaaggagaagatgagtctagaagaagctcaccaccataggaagccatggataagagcttgaaggtaagagaagatgaatggagggagagggagaaagggagcatgaaatttagtgcctctaaagaagtttgaactttgaagtttaattctcaaatgatcaaagttgaaaaaatgcacacacatagcctctatttatagcctaagtgtcacacaaaattggagggaaatttgaatttctattcaaattttactagaatttgaaattgaaattgtggagccaaaatttcactaattatgattagtgaattttaactatggttcagcccactaatccaagatcaagttaaagattctccactaaatgtgcttaggtggcatgaggcatgtaaagcatgaaggacatgcacaaagtgtgactatatgatgtgacaatagggtgtagccagcaaatgctcacctcccctctaaaatttaattggatt

SEQ ID NO: 10040 - DNA, 521 bp, Glycine max
tcaaatggacatcacttcgtcttagtcgccatttgtttttcttcatcaaatgggtcaaagtagcttcatacgccaatgtgactaggagtgtggtgattagattcataaaaaaggagataatttgctgatatgggttgcccaggaaaattatcaccgattatgccaccaatttgaacaacaagatgatgaaggaaatgtgtgaggatttcaaaatccaacaccataattccacaccttacaggcctaagatgtatcgtgcagttgaggttgctaataaaaatatcaagaagatagtccagaagatgattgtgtcatactaggattggcatgagatgttcccctttgcgttgaatggttatcgaacttcgatgcgcacatctactgggcaacccctttttctttggtgtacgggatggaggctatgctcccgtttgaggtggaggttccttctttgagaatcctatccgagtcggggttggaaagattcgaatgggcccaagctcgctttttgatcagttgaa

SEQ ID NO: 10041 - DNA, 487 bp, Glycine max
ggaagccgaacagcggacgctctacgaaaactgcattttttataacttatcacacggaggtgcaattgaggcgcataatatgtccagacgctcgaaattaaacaacgaatactctcgagaaattcacatggccgtaacttatcgcacggaagtccgatttaggcgcataatacattgagacgctgaaaattgaaccacgaatgctctcaagaaattcaaatgggcatagctaatggaacgggaggccgatttatgcgcataatacattgagaagcttgaaattgaacatcggaagctatcaagaaactaaaatggttggaaactgttacacagaagtgcgactcaagcgcataatacatggagacgctcgaaattgaacaacgaattctctcgagaaattcgaatggtcataaaatttcaaacggaagtccgatttatgagcataatatagcgagaacgttgcaattgaaccacgaatgctctcgag

SEQ ID NO: 10042 - DNA, 469 bp, Glycine max
ttaaatactcagcttataattgcagcagccaatccttgaagtttcctgtttcttcctgtgaaataaaagaaaaaaagaaattaaacctaattttggtcaggtaaggaaaagtaggacaaacttacctaatgcaaaatggcaaggtaaaagtttgccaagtctcttcaatgtggtcatttcatcatctgttagtttaggattcacaccatatggaagaaagcgaaagggctttctataaccatgaataacagcaggcagaagatcagcatcaacaggcaaaggatcacctccccaccaatcagtaaatcgaggcccaagccctgttagcaaacagtctgtatcttctgcaaactctgcttcatctggcagttgaaatcgtactttattgtgagtaccaacacctattattaaagctggttttgctgtttcaccatttgaattttccacaccacatgcccctgaatttttt

SEQ ID NO: 10043 - DNA, 520 bp, Glycine max
tgttataaatgttgtcaacataagggcccttgagttatttagtgaacttgtttgcaagttggtcactaaagccgacaaagttggtgatgatttctcctgaaagcaccttctctctcacaaagtgacagtcaatctctatgtgtttagtccgttaatggaagagcgaatttgaagcaatgtgaatagcatattgattgtcacatattagtttagtatcttgagtgtctccaaattttagctgttggagaagtttcctaagccatgtaatctcacatccagctgctgccatagcacggtaatcagcttcagcactagatctaacaactgttttttgcttcttgctcctacaagggatcaagtttcctccaatgagaacacaatatcctaaagtggacttcctatttgatggtgatcctgcccaatcagcactagaatagcaaacgatgacagcatcacaatttgtatgacaacatttcaatgactatcacatgcaaatgtgatatctggtctagtgacaatg

SEQ ID NO: 10044 - DNA, 511 bp, Glycine max
tatcaggtataaactatttaaaatcgtaaggaatttctttttataagattgaactgaaaataaataaattttggtggataaaaatcgtaacaaattgtgaaatcgtaaactcaatgaacaaagagggactaaaagtaacttttcgaaaatttgagggactaataaaaataattttttttgagaactaaaaaatacttaccgaaatttgaaagattaaaaatatatttaagccttaaatcaatcttataaaatcagcttgtaagatgaaagatgtcccacacttatatacactaatttgactatatctctagacaatgtgatctcgaacacaacctctcatgtcaaagataggatatctcgtgcgtgaagtttgcaggattggaagtttatgggtagtgtgatagatgtccggtagagggtggcacaataggcctaacaatagattgctaggataaactttgatatcatcttaaaatgtgggtttgaacctaactcaaccttaaaaactagc

SEQ ID NO: 10045 - DNA, 579 bp, Glycine max
tttacctctcgttttaactctcagcatctcctgactttcaatgtcaaagataaggcaatgttgattttcaaaaaggatactttaaatcctttttctatcaactaacctacgctaagaaaattttggtcaatatcgagtacataaagaacatatgagattgtctttatacctgaacttgttgagattacgatggctccttttccttttgccgaaatataaccaccgttcccaattctgatttttgagactttagtaggcttcaaatccttgaagagtgttttgtcatatgtcatgtggtttgtacaaccactattaatcaaccagcattctgaactactccttgctgaaaaagatgttgccacaaacatttgatcttcttcatcttgctctatgacctgcgcattgacttcatgctgtagaaacttgcttttgcacataacaacttcatgtacaaactgattgcatttgctgcactttgcatctggacttctcccgcatttgaatggcgggttacccattttgccacaatggtgacaaagtgggtaattttttcttatacccttacctttactttgggca

SEQ ID NO: 10046 - DNA, 601 bp, Glycine max
  unsure (1)..(601): unsure at all n locations
tgagaatgtgcctatgaattggtttttagctatgtttataaaccagccctgagagaatatggcgagtgaaattccgaatgacagattctattagggcaccacaatgatcacggacatatttattaattgaaccaggatgaacatattccagataaatataaaaacggtgctcaacctgcaagcacatatgttaagggtttaatgctggtacagaataatgattattaatcttgagtagctaattatgaagtaggagattgcttactatttcactgccaaaatactgtacgatgtttgaatgttttagattnctaagaactttaatttcctggagaaaaagaataaactaataagaaggataaagaggatatacaaaataacatatcttcaaaactattacggaacgataaatatatataggcaagcagcccaagccattattaataaaaacaacctcatcaagtattcaactacagtggacactaaaaccaaatgannnacctcacttgcaaatatatgatatcggccaaggcctacaatatatatatatatatatagggaaattaatagactagttaatctgagctgaacatcttaactg

SEQ ID NO: 10047 - DNA, 613 bp, Glycine max
cgccaattttggtctagatctaaatagacaattaattttttttttatgatgttcctcaatttttatcaaatgctattttagtggatgtgagttatgttgctttttcgcagatttttaattgttttttgggggtaatttcccctccaattcacccaaaaaaatgttaattgttatggaactattaaatcaatgcaaaaatggcagaaaaattaatataaatagataaactaagaaagcataaatctaatatgaacaaaaaaatcaccaactaagtcgaaaatgctactcaaaagtgtgatgtgaacatgtgaattgcaacaccctgaaatggaataaaacaaagaacatctttcagcgttggatgttaaaagaacaaaataataagccaataaatgttgaaccatataatgataataaaaaaatgtttatgtctatgcactaatagtgtaaaataattttatattgttatccaatcacaaatcacccttttgaattactttaagataattactttaaaagtcaacaaatttcccatgcatggtgtcttatgacatgatgtctgggttaaacattttacattggcagtgtataaccctttttcttataaaaaaaa

SEQ ID NO: 10048 - DNA, 484 bp, Glycine max
tccttaagaagattcctaaagaagctagagcttatcttcacatacctctctaatagctaagcttacctccttgagatgagaagctagagcttagctacacacctcctataatagctaagctcaccccatgacaaaaaacatgaaaattcaaaaaaaaagtccttactacaaagactactcaatagaatggccaaaatacaaggcccagacgaaggaaaaacctattctaatatttacaaagataagcgggctcatacttagcccatgggcttgaaatctaccctaaggctcatgagaaccctcaggccttcccttggatctctagcccaatctacttggagtcttctacccaatgcccttgtggggtaggattgcatcattccctccaccttggaaaggatttgaccttaaatcccgaggttcttcatactctgggctccttccctcaacacctgtaaaaataacaaaaacatatgtattagtg

SEQ ID NO: 10049 - DNA, 619 bp, Glycine max
tcatgagagagtcaaagatcaaattgagaggaattttttaaactatgctaaacaagccaacaaagggagaaagaaggttgtcttcgaacccggagattgggtttgggtgcacatgagaaaagaaaggtttccggaacaaaggaaatcaaagcttcaaccaaggggagatggaccatttcaagtgcttgaaagaatcaatgacaatgcttacaaagttgagctgcccggtgagtataatgttagttccaccttcaatgtctctgatttacctctttttgatgcagatggagaattcgatttgaggacaaatccttctcatgagggagagaatgatgaggacatgaccaagagcaagggcaaggatccacttgaaggacttggaggacctatgacaagggctagagcaaggaaagccaaggaagctcttcaacaagtgctgtccatactatttgaatacaagcccaagtttcaaggagaaaagtccaaggttgtgagttgtatcatggcccaaatggaggaggactaaatgacaccactttgtttcaattttagagtggttagtttgtctaaataatggcccaatccttgtaaagttggctgacccaaaatatgttttggg

SEQ ID NO: 10050 - DNA, 595 bp, Glycine max
tctaagttctaatagggtgataaagagcagaattggtttatgtgaaccacaagtatagagttactataatacactaaagctccattaaaaactgaaccatgagtacataatatactacattgcaactgcattaaacatgttattgttattaaccaatttcaggacctagaggaccctttcccttatttgtgagaaaactagcttaatataatctagttctataattaactaaggagttaagagaagctatcccaaaaacgcaatatcaccttcttatgtttgttcacaaagttgaatttggaattaactaagtgataaggaagggattccacaaattcattcatcctctaaggtgcttcgacttttttgaattctcttttgtactacataatcaggacatagctttttcccatgatggattctgcacatttttcctttctgggggcttgaagcctgcattaattcttaatgggacttgtttttaaccaaatgggcatgtgcattcttactctactgctatctcatctatttttgggtatatttacgtaacgtaaactcatttaacttcaaaatttcatttcatggtggggaacat

SEQ ID NO: 10051 - DNA, 468 bp, Glycine max
ccttaagaagattcctaaagaagctagagcttatcttttttacctctctaatagctaagcttacctccttgagatgagaagctagagcttagctacacaccttctataatagctaagctcaccccatgacataaaacatgaaaattcaaaaaaaaagtccgttctacaaagactactcgatagaatggccaaaataccaggcccagacgaaggaaaaacctattctaatatttacaaagatgagcgggctcatacttagcccatgggcttgaaatctaccctaaggctcatgagaaccctcaggccttcccttggatctctagcccaatctacttggagtcttctacccaatgcccttgtgggggaggatggcatcattccctgcaccttggaaaggatttgaccctaaatcccgagggtcttcatactctgggggtctttcctctacacctgggaaaataacaaaaa

SEQ ID NO: 10052 - DNA, 589 bp, Glycine max
tcatgcttaactatgtatgtcaaaacttcattactgttgttcaagacatacaagtgagcttgtaacaaatcttctacacttggagtgatcatatgcagtcctcttgaacccttaccacccactctgtcatcatgccgagactcaggaagcccaacaggtttaggcttctctaagtattctgaacaaaattcaatggcttcttctgcaatgtacctctcaacaatagatgcttctggtcaatatagattctttgtatactcttttaagatcttcatgtatcgctcaaccgggtacatccaccgtagataaacaggaccacaacatttgatttctttgaccagatgcacaatcaagtgaatcatgatgtcaaagaaagcagggggaaatacatctccaactggcacagtataattgcggcctcattttccaactcatcaaacttgactggatcaatgactttgctacatatagcatggaagaaaaagcacaagtgagttatcgctaacctgactttgtttggcaagatgtctcgtatagccacggctaacaattgttgcatgagcacgtgacaatcgtgagactttaaccc

SEQ ID NO: 10053 - DNA, 463 bp, Glycine max
tataacaaatctaaaacacaaagtttgaaaccaatttgttgactaaaacctcgcctatcttttcctctttttaaaagaacaagaaaaatacagaggaagggaatccctggaggaaaccaggaagaacaaaaaactcagaattgaaagaacatgcaatggtcctcttgattgccccatatttcaagcgtaatatcgtttaactacatcggagttcacgggcgagggcaattcctcgccatccatgtgggtgagtatcaaagcacccccacaaaaggctcttttcaccatgaaaggtccttcataatttggggcccacttgcctcgtttatctttaacagcgcgggaaatcttttttaacacgatgtcccccttgttgaacttgcgcgggcgtacctttttgccgaatgcgggctttatcccttcgttgagacaaacgcccatggcttatggcagacaaaacgct

SEQ ID NO: 10054 - DNA, 563 bp, Glycine max
tttctttgtacacctacattcctatacacgataaactttctttgtatacacatgtatgaaaaactctttctctttatatcaacacggtctatataacaactctattcctgttcaaagacttctttttcgtttttcaacatacaaatcgtggtttatacaaaaacttctttatatacactcatggctcacacacaagaattttttttcacacattatttacacacacacaaaatctttccatacactttttacatataaaaaaatattttcttttctttatatatagacacgacatttgttcacaacccctctttctttttctctttttttttattcttggcgttatcatgattttttgttcgttatatttttaggacgacgttcctaaaggaaaactctacaaggtttaagaatttcaacaaacattatcaacaataacaaagtaagcattaacgcaacaggccaaacaaaatgtatgcacaaaacaaaagacaatcgaaaaaacaaaacaaacgttagtcccttcagtcatagaaacaagataacattccaatgataaatga

SEQ ID NO: 10055 - DNA, 517 bp, Glycine max
tcaagaaaaagatggcctcagcaaattccttatttctataaggaaattctatcaacagacctccaatctttaatggagagggttaccactactggaaaacccgaatgcaaatttttatcgaggcaatagatctaaatatctgggaagccatagaaatagggccttatatacccaccacagtagaaagagtttcaatagatggtagttcatcaagtgaaagcataaccatagaaaaacctagagatagatggtctgaagaggatagaaaacgagtacaatacaacctaaaagccaaaaacataataacatctgccctaggaatgggtgaatatttcagagtttcaaattgtaagagtgctaaggaaatgtgggacactcttcgattaacacatgaaggaactacagatgttaaaagatctaggataaatgcactaactcatgagtatgaattatttacaatgaatgcaaatgaaaatattcagagtatgcaaaagagatttacacatatagtaaatca

SEQ ID NO: 10056 - DNA, 530 bp, Glycine max
  unsure (1)..(530): unsure at all n locations
actctatagaacactcgcgcgttgagaaaaatcaaacgacaataacttttgactttttgtctgattgactcccgtaatatatcgagaccctcgtaattgaaaacagaagctctgagcaaattcaaacgacaataactttttactcggatgtccgattgagtcccgtaatatatggagacgctcgtaattgaaaacagaagctctgagnaaattcaaacgacaataactttttactcggatgtccgattgagtcccgtaatatatcgagacgctcgtaattgaaaatagaagctctgagcaaattcaaacgacaataacttttaactcgggtgtccgattgtgtctcgtagtatatcgagacgctcgtaattgaaaacagaagctctgagcaaattcaaacgacaataactttttactcggatgtccgattgagtcccgtaatatattgagacgctcgtaattgaaaacagaagctctgagcaaattcaaacgacaataactttttactcggatgtccgattgagtcccgt

SEQ ID NO: 10057 - DNA, 518 bp, Glycine max
cccttcacaaagagaatcatcttgatatgataactttttttgtcctctgacaaggctatgcttttgaagctttgagattaaccttaagctagcatgaccaagcttcttatgtcaaacccaataatgctctttgactgaaagtaggcatgaaacttttggactagacagatcaccaagtttaatcttatacagatttccttgtgtcttagcctagaagagtgaagagttttccttgttctcaatgatacacatatccttgttaaaagtgacattgtatccactatcacataatttacttatgctaagcaaattatgcttcaaccctttaacaagcaaaacattatctatagaaagataaggaggaatacatactttacctacaccaattatcagacctttctgattccgttcgaaagtgaccaccctactaaaaatagggcttagggattgaacatagacttttcacttatcatgtgtcgtgagcaacccctattcatgcaccacgactgatgtttctt

SEQ ID NO: 10058 - DNA, 510 bp, Glycine max
tcatgatgatgaaccatgcaattttgatgatgccaattgctctaactagttgattcaagattgattcaagacttcagaatacaatccaagattcaagattcaagagaagaaatcaagaaccaacaagtcaagacttcatataggataagtattaaaatattttttcaaaaaccaaatagcacagttttgttttacaaaagaattttctcaaattttctaagttaccagagtgattactctctggtaatcgattactagttggcagtaaagtttggttttcaaaatgttttcaaatggtttacaacgttccaaaatgattttcaaatagtgtaatcaattacactatattagtaatcgattacaagtgaatctgaacgttggaattcaaatccaattgtgaagaatcacaacttttcataaaatgaagtgtgtaattgattacacctttgtggtaatcgattaccagtgaacagttttgaagaagaagtgaagagttattactcttaacat

SEQ ID NO: 10059 - DNA, 633 bp, Glycine max
ccgcttcatgatgaatcaaaaatgattcaaaggtgttttgatgataacaatgatgacaacaaaagataatgacaaaggtgatgaacaaaaagctcaaaagatcaaagaacaactcaagtgaatcaaagaacatctcaagtgaatcaagaacaagtcaagagttcaagaatcaagaagaattcaagactcaagaagaaagcctacaatcaagattcaagattcaagatctcaagaatcaagatcaagattcaagactcaagattcaagaatgaataaaagactcaatcaagataagtattaaaaagttttttcaaaactttgaatagcacatgagtttttgataaaacctttaccaaagagtttttactctctggtaatcgattaccatattgttgtaatcgattaccactagcaaaatgagtttgaaaaagttttcaaactgaatttacaatgttccaaatattttcaaactgtaatcgattacaatgtttttggaatcgaataccagtgtccttgaacgttgaaattcaaatttaaatgtgaagaatcacattgtttcactcaaaagctttgtgtaatcgattacacttattttgtaatcgattaccagtgtttgtttctgaaaaatctaaa

SEQ ID NO: 10060 - DNA, 468 bp, Glycine max
caccttccatcaagtgcggaccctcaaggaaatccaccattttttccatttttcggagccccataaatgttattgcctagcgctattcatgtgtcctccaccttcgagtttggagctatgtttcatgattgcctaagtgcggaccctcaaggaaatcctccattctccccctttttcggagccccatgaatgttattgcctaacgctgttcatgtgtcctccaccttcgagtttggagctatgtttcatgattgcctaaaagcggaccctcaaggcaatcctccattctccccctttttcggagccccattaatgttattgcctaccgctgtccatgtgtcctccaccttcgagtttggagctattgttacatgattgcctaagtgtggaccctcaaggcaatcctacattctcccccttttttggagccccattaatgtgattgcctaccgttgtgcattggtcctc

SEQ ID NO: 10061 - DNA, 301 bp, Glycine max
tgagctgtcgagaagcataggccactacttgtccccgctgaataagcactccacccaaacgcatcttatatgcatcacagtacaccacaaagggttcacttgggttaggtaacactaaaactggtgcagtggccaacctttccttaagggtacggaaactattctcacattgggcatcccacacaaaaactagacccttacgagtaagcttagtcaaaggtgaggctagcgttaaaaagccctctatgaatatacggtagattcctgctataccacagaaactccttatctcaaacactga

SEQ ID NO: 10062 - DNA, 364 bp, Glycine max
ggtattgacaagcgtgctattgagaggtttgagaattaagctgctgagatgaacattatgtcattcaaatacgcctgggtgcttgacaagcttaaggctgagcgtgagagaggaattaccattgatattgcattatggaagtttgagaccaccaaatactactgcactgttattgatgctccacgacatcgtgatttcatcaagaacatgattactggaacttcccatgctgattgtgctgtccttatcattgattccacaactggtggttttgaagctggtatttccaaagatggacagactcgcgagcatgctctactttgccttacccttggtgtcaagcaaatgatctgttgctgtaaca

SEQ ID NO: 10063 - DNA, 391 bp, Glycine max
  unsure (1)..(391): unsure at all n locations
agcttgttaggagctgtcggtgaataaaggtcctcaccatccatttcaattttctccaactccctaccacatatggtaaaaataaacattaacttctatcaaagacacattgaaaatttaacataaaaatccacaataaaaataagccttcagacanttggccagtacctccggataccagctcggcgttcttctttagggagtggaaatagtacaccagagatggatgtaactttgtcaaagaaatcaaactctcttttaaatatgtcaagtgcctttggattaaaaccatcaattatacgctgccttaccgctggcagcaggtctagaaatgaaccattctgaaataaaaatacagagataaaatctataaagtatgatgtaaaaaaaa

SEQ ID NO: 10064 - DNA, 331 bp, Glycine max
tgtaccttggaaacacatcaaatattcacttattagctacattggattgggcttctaccaattcaattaaatttattttcaaccacacacatcaaatattcacttagtgcatgtgaaattacaaaactacccctaatacaaaaaactagtctaggtgccctaaaatacaagggctgaaaaatcctatatttctaaagtactctacctacattatggagccctaaatacaaggcccaaaaataatgaaaccttaatctaatatttacaaagataagtgggctcatacttagcccatgggcccaaaatctatcctaagactcataagaaccct

SEQ ID NO: 10065 - DNA, 376 bp, Glycine max
agctttggaatatttcaagcaagagtttggagtgcacattgaagttacaaagatgtggagagctatgaaagaagcaaagcaactagtggaagggaatgagaggaaacaatatgccaaagtatttgattatgcacatgaattattaaggagcaatcctggatcaacagttaagatcaacacagtgccaagtccagaaggtccaccacaattgcagaggctatatatttgtcttgctggctgtaagaaggggtttgttgctggatgtagaccattcataggtctagatggatgttttctaaagagtgcatttggaggaaactttctctctgatgttgggcttgatggaaataaccacatctttgttattgcttatgtt

SEQ ID NO: 10066 - DNA, 335 bp, Glycine max
aactttttactcggatgtccgatagattcccatcatatatcaacacgctcgaaattgaatgttgaagctctgagccaattcaaacgacaataactttttactcggatgtccgactgagtctcgtaatatatcgacacgctcgaaattgaatgtcgaagctctaagcctattcaaaccacaattaccttttactctgatgtctgattgagtgacgttatatatcgggacgctcgaaattgaatgttgaacctctgagccaactcaaacgacaataactttttactcggatgtctgattgagtcccgtaatatatcgagacgctcgaaattgaatgt

SEQ ID NO: 10067 - DNA, 380 bp, Glycine max
agcttaaacattcaatttcgagagtctcgttatattacgggactcaatcagacatccgagtaaaaagttattgtcgtatgaattggcttaaagcataaacattcaactttgagcctctcgatatattacgggactcaatcagacatccgagtaaaaagtcattgccgtttgaatttgctcagaggctcaaaattcaatttcgagcgtctcgatatattacgggactcaatcagacatccgagtaaaaagttattgtcttttgagttggctcagaggttcaacattcaatttcgagcgtcccgatatattacggcactgaatccgacatccgagtaaaaagttattgtcgtttgaaattgctctgatcttcaacattatat

SEQ ID NO: 10068 - DNA, 444 bp, Glycine max
gacgctgtaatgattatagcatgcacacacacacatatatatgtatatgaattgttttaataaattaggaattaatagttcaaataataaaattaaattgaaggaaattaatatattaagattcaatgataaatacttttaatgcatttttagtttaatcatttattaactctttttaatggaaaataatatagttcaatttaatatatgcatgttttgtgccatgtaaatattaatattgtgtgatgtgtatatgattcatgaggtgtgataacatgttgctttgggattataacattgcgattgaaattgaatgcatgtgataaattgagtatgtgttgaattgtaagatacatgtgtattgagatgttgtatgcattgagtagtgagttatgaattgtgcaatcacacaattgttagaccatttaacatgtagctttgggg

SEQ ID NO: 10069 - DNA, 371 bp, Glycine max
agcttgtcatcgattacacacatactgtaatcgattaccagtgtagattttcagaaaatattctcaattgtcacatcttttcatttggctctcgaatggctatcaaaggcctatatatatgtgacttgagacacgaatttgctaagagtttttcagaacaaaaaaaggtcttatcctcttaaaaagaaaaatcgttttatcctcttacaaattccttggccaaaacacttgtgattcaataaggaattatttgagtgctcaaattgttcaatctatctctttcaagagagattacttcttttcttcttctttattctgaaaaagaattaagagaccgagggtctcttgttgtaaagaaatctgaacacaaa

SEQ ID NO: 10070 - DNA, 371 bp, Glycine max
  unsure (1)..(371): unsure at all n locations
tcaagttttaagttctttctcaaactgtcctaagctaagttcccaaagtcctattaacaacttccgtttgcccatcggtttgtgggtgacaagcggttgaaaataacaatttagtgcccaacttgctccacaaagtcctccaaaaatgacttacgaacttagagtccctatcactaacaatgctccttggcaaaccatggagtctcacaatctccttgaaaaacaaatcagccacatgggaagcatcatcaacttttttacatggaataaaatgagccattntagaaaacctatcaacaaccacaaaaatggaatctctaccattgcttgtttttggcagccctcaaacaaaatccatggattaaataatt

SEQ ID NO: 10071 - DNA, 358 bp, Glycine max
agcttgaaattgaacaacggaagctctcgagaaaatcgagtggtcataaattttcacacagatgtccgattcggggaaataatatatcgagacgcacgaaattgaacaacggaagctctcgagaaatttgaatggtcataacatttcactcggatgttcgatccggggacataatttatcgagacgctcgaaattgaacaaccgaagctctcgacaaattataatggtcgtaactcttcacgcgaatgttcgattcggggacataactcatctagacgctcgaaattgaacaacggatgctctcgaaaaatttgaatggtcataagttttcacacggttgttcgattcgggaacataa

SEQ ID NO: 10072 - DNA, 336 bp, Glycine max
atttgagaagctagatccttatctatccacacccctctattaactaaaataactttcttaaaaataattacggatgaaaataacgcagcaaatattcaaacatcgacacataattactagtagcatataaatatatatatatcagggtgttacgactcttccagccttatagaaatttcgtcctcgaaatttaccttactcacacaaggatgggtgagcttctcacatctgactatgtaattcccatgtggcatcttctactgatgcacctccccagatcaccttgaccaacagaatctctttccctcttaggtgttatgttcgcctatcctcgat

SEQ ID NO: 10073 - DNA, 377 bp, Glycine max
  unsure (1)..(377): unsure at all n locations
ggccgccacggagttntccgactatgctcttgtgtggtgtaacaagctacaaaaggagagagcaagaaatgaagagccaatggttgatacatggacggagatgaaaaagatcatgacgaagcggtatgtgccggctagttactcaagggacttgaaattcaagctccaaaaactaacccaaggcaacaagggggttgaggagtatttcaaggaaatggatgtgctcatgattcaagcaaatattgaagaagatgaggaggtaactatggctcgatttcttaatggtttgactaatgatatccgtgatattgttgagttgcaagagtttgttgaaatggatgattcgcttcacaaaacaatccaagtggagcaacaat

SEQ ID NO: 10074 - DNA, 394 bp, Glycine max
agcttcggaattccatttcgagcaactcgatatattacgggactcaatcagacatttaagtgacaagttattgtcgtttgaatttgctcagagcttcagaattccatttcgagaaactcgatatattacaggactaaatcagacatccgagtaaaaaattattgtcgtttgaatttgctcagagcttcggaattccatttcgagcaactcgatatattacgggactcaatcagacatccgagtaaaaagttattgtcgtttgaatttgctcagagcttcggtattccatttcgagaaactcgatatattacaggactaaatcagacatccgagtaaaaaattattgtcgtttgaatttgctcagagcttcggaattccatttcgagaaactcga

SEQ ID NO: 10075 - DNA, 406 bp, Glycine max
ctacgtgataaaacctaaatgtaaataaaaataaaattatttttttataaaaaatctcatacattatatcattataattttttatggaaatcattatttttttttttgcaaaataaatattgaaacaaaattaagaaaatgaatgaaaaaatgtaaatttaataacacatactcaaacgattaaaagtcgatacaatattatacccatgttaatttgaagatgtcataaaagatttaattgaaattgagaatatttaaataattaaatccatatttactgactttcattgcttaaaataaataaattagtgtgagttaaatttggaatgaaaaaaaaaggtggacatcctttaactagcacggatactctcactcaacaactatcttttatataatatatgatctg

SEQ ID NO: 10076 - DNA, 395 bp, Glycine max
agcttcaccatcagatggatgacatatgatggtcaggtccctttgattctcactatgccatctcatgtgagatgtggtggccattgaagagtacaatctttgaagtcttggaattagaggaaaatatcacattttttaatcaaaattttcttttcaatccctttcattgtgatagtcatgtactgacccttttgatagacaaagcaatttgttatgcttttatctgggttttttttccagtagcatgtcacctacatattgagataccgttctgacatattataattagatttgaagcttatagcttccaaagtatctaacaattcttttttattctcacatccttcccatagaggtgtttgagaaacatcaagcatataaaagaattcttgagc

SEQ ID NO: 10077 - DNA, 391 bp, Glycine max
agcttccaagaatcaagatcaagatttaagaatcaagaaaagaattaatcaagatttgtatgaaaaagttttttcaaaaactgactagcacatggatttttctcaaaacatgtttaccaaagagtttttactctctagtaatcgattaccagattgttgtaatcgattaccagtagcaaaatggttttcaaaaagctttcaactgaatttacaacgttccaattgatttcaaaatgttgtaatcaattacaatgttttggtaatcgattaccagtgtgcttgaacgttgaaattcaaattcaaatgtgaagagtcacattctttcacaaaaaagctttgtgtaatcaattacactgatttggtaatcgattaccagtgatagtttctaaac

SEQ ID NO: 10078 - DNA, 453 bp, Glycine max
  unsure (1)..(453): unsure at all n locations
tccttaagaagattcctaaagaagctagagcttagctacacacacctctctaatagctaagctcacctcattgagatgagaagctagagcttagctacacaccccctataataactaagctcacccccatggcaaaatacatgaaaatacaaaaaaaaaatccctactacaaagactactcaaaatacctcgaaatacaatgctaaaaccctatactactagaatggccaaaatacaaggcccaaacaaaggaaaaacctattctaatatttacaaagataagcgggctcatacttagcccatggactcaaaatctaccctaaggctcatgagaaccctagggccttcccttggatctctggtccaatctacttggagtcttttatccaatgcccttgcggggtaggatngcatcattccctccaccttggaaaggatttgacctcaaatctt

SEQ ID NO: 10079 - DNA, 427 bp, Glycine max
  unsure (1)..(427): unsure at all n locations
ctgagccaattcaaacgacaataactttntactccgatgtctgattgagtcccttcatatatcgagacgctcgaaattgaatgttgaagctctgagccaattcaaacgacaataactttttactcggatgtctgattgagtcccgtaatatatcgagaccctcgaaattgaatgttgaagctctgagccaattcaaacgacaataacgttttactcggatgtctgattgagttccgcaatatatcgagaccctcgaaattgaatgttgaatctctgagccaattcaaacgacaataactttttactcggatgtctgattgagtcccgtaatatatcgagacgnctcgaaatgaatgttgaagctctgagccaattcaaacgacaataactatttactcggatgtctgattgagtcccgtaatatatc

SEQ ID NO: 10080 - DNA, 376 bp, Glycine max
agcttcaactttcaatttcgagcgtctcgatatatgacgggactcaatcagacattcgagtaaaaagttattgtcgtttgaattggctcagagcttcaacattcaatttcgagcgtctcgatatatgacgggactcaatcagacatccgagtaaaaagttattgtcgtttgaatcggctcacagcttcaacattcaatttcgagggtctcgatatattgcgggactcaatcagacatccgagtaaaaagttattgtcgatagaattggctcagagcttcaacattcaatttctagcgtcttgatatatgacgggactcaatcacacattcgagtcaaatgatattgtctgttgaatcggctcagagcttcaacatt

SEQ ID NO: 10081 - DNA, 333 bp, Glycine max
tgctgacccatggcagcttctactatctcccacactctgtgtggtggtccatactcgtatcgtcttgagcgtctcaagagccactgggaccccatttctaccaactacaaaacctgaaaaaactatattatctacacagcaaagtacacttctctatatttgcctatagggtgatgttcctaaggactgaaagaacttgactgagatgtactaactgatcatctaggctcctactatacactaaaatatcaccaaaatgtacttctaccaatctacctatgaaattccttaagacatgacccataagcctcataaaggagcttggtgcattac

SEQ ID NO: 10082 - DNA, 382 bp, Glycine max
agcttgacaagccggcttgtttaactaacaatattaataacaacaacaacaacaacaacaacaacaacaacaacaataataataataataataataataataataataataactttattttatcaaatcttatcttattcagattttattctatctagattttattttatcccaattttattccatctagattttatttcgtctcgattttatttcatccaatcttatcttatcttgtgcagattttattttatttcgtttatgatcttggacttaaaatagattagtgagctttgggactgatgacctatataacaacaccaaggttttagtttagggagtattttttcggagaggagaataattctaggattttagaatt

SEQ ID NO: 10083 - DNA, 423 bp, Glycine max
tgatcgtctcgatatattatgcgcctgaatcgcacatccgagttaaaagttatgaccttttgaatatctcgagagcttccattgttcaatttcgagcgtctcaatatattatgcgcctgaatctgacctccgtgtggaaagttatgaccatttgaatttctcgacagcttccattgttcaatttcgagcgtctcgatatattatgcgcctgaatcggacctccgagtgaaaagttatgaccatttgaatttctcgagagcttccgttgttcaatttcgagcgcctcgatatattatgcgcctgaatcggacatccgagtgaaaagttatgaccattttaattgctccagagctttcattgttcaattttgaacgtctcgatatattatgcgcctgaatctgaccttcgagtggaaagttatga

SEQ ID NO: 10084 - DNA, 370 bp, Glycine max
agcttttgagcaattcaaatggtcataacttttcactcggaggtccgattcaggcgcataatatatcgagacgcttgaaattgaacaacggaagctctcgagaaattcaaatggtcattacttttcactcggaggtccgattcaggcgcataatatatcgagacgcttgaaattgaacatacggaagctctcgagaaattcaaatggtcataactttcaactcggaggtccgattcaggcgcataatatatcgagacgcacgaaattgaacaacggaagctctcgagaaattcaaatggtcattacttttctcaccgaggtcagattcatgcgcataatatattgagacgctcgtatttaacaacggagc

SEQ ID NO: 10085 - DNA, 391 bp, Glycine max
agcttcaagaattatggcctcatcaaactacttgtttcccgagggaaattctataaacagacctcccatctttaatggagtgggttaccactactggaaaacctgcatgcaaatctttatagagacaatagatttaaatatttgggaagccatagaacaaggaccttatgttccctctataatagccggaagtgcaacaatagaaaaacctagagtagattggactaaggaagaaagaagattagtacaatataatttaaaggccaaaaatattattacatctgccttaggaataaatgaatactttagggtttcaaattgtaaaagtgctaaagatatgtgggatacactacaagtaacacatgaaggcacaacagatgttaatagatct

SEQ ID NO: 10086 - DNA, 456 bp, Glycine max
gctaataaattcatctatggattgaaacaagcctcttgctaatagtatctaaaatttcatgagatcatcaattcatttggtttttaaaagaacatcataaatcaatgtatataccaaaaggttagtgggagtaagatttgttttcttgtattatacgtgaatgatattttgcttgcaactaattataaggatttgctatatgaggtgaaacactttccttcatagaactttgatatgaaggatatgggagagacatcttatgtcaatggcattaagatccataggaaaagatctcgagacattttgggtttatctaagagacctatattaacaaagttttaaagagatttaacatgaaaaattgttcaccaagtgtagctcccattgtgaaaggtgacaaactcgatttgaattagtgcccgaaaaatgattgagtgagaacacatgaagaatatg

SEQ ID NO: 10087 - DNA, 424 bp, Glycine max
  unsure (1)..(424): unsure at all n locations
tctacattcaatttcgagcttttcgatatattacgggactcaatcggacatccgagtaaaaagttattgtagtttgaatttgctcagggcttcggtattccatttcgagcgtctcgatatattacgggactcaatcggacatccgagtaaaaagttattgttgtttgaatttgctcagagcttctgtattccatttcgagcatctcgatatattacgggactcaatcagacatccgagtaaaaagttattgtagattgaatttgctcagggcttcggaattccatttcgagcgtctcgatgtatgacgggactcaatcagacatccgagtaaaaagttattgtcgttagaatttgctcagagnctcaacattcaatttcgagcttttcgatatattacgggactcaatcagacatccgagtaaa

SEQ ID NO: 10088 - DNA, 381 bp, Glycine max
agcttgtatgttacagtgacaacgattgggctagagataaagatgatcggaaaagtaccaatggatttgtgtttttcatagggaacacaacgttcacttggatgtcaaaaaagtttccaatagtcactctttcgacttgtgaggcagaatacatagcagctgcttcatgtgttttccatgtagtttggctcaggaatttgttaaaagagttgggcatgtcacaagaagagacaaccaagatttttgtggataataagtcaaccattgctctagcaaagaatccagtgttccatgatcgaagcaaacatattgatacatgttaccactacataaggaagtgcatagcaagaaaggatgtacatatagaatatgtgaagtctc

SEQ ID NO: 10089 - DNA, 369 bp, Glycine max
agctttgaggggatttttgggcttaactggttactacaggaaatttgtgaaagattatgggaagattgctaaaccactcagtgatttgttgaagaaaggagcttttaattggagtgcagcggcaactgagtcctttaatgcacttaaggacgcattaacccactctccagttttgactttaccaaactttaaggaacctttttccattgaatgtgatgcttgcggaacagggatcggagctgtgttaacacaagggaaacgtccagttgcatatttcagcaaagggttagctacttcagttttaagtaaatctgtgtgggagaatgtggatgtgattcagaatctatttcctgaaattaaccttgagga

SEQ ID NO: 10090 - DNA, 403 bp, Glycine max
gagcaattcccttatgttatcaaacataaaaagggaaaaggtaatattgtagccgatgctctttctcggcgtcatgcattactttctatgcttgaaacaaaattgattggtcttgaatgtttgaaaagcatgtatgaaaatgatgaaacttttggagaaatttttaaaaattgtgaaaaattttcagaaaatggtttctttagacatgaaggctttcttttcaaagaaaacaaattgtgtgtgcctaaatgttctactagaaattttcttgtttgtgaagcacatgaaggaggtttaatggggcattttggggtccaaaagactctagaaacattacaagaacatttttattggcctcatatgaaaaaggatgtgtagaaattttgtgaacattgcattgtat

SEQ ID NO: 10091 - DNA, 395 bp, Glycine max
agcttgtcaaacattggtaaagcatctataattcattttaataaatcttactaaacttaactgagttttgtgccaacaactataagaaggaatgcaacttaaaaaagaaaaatgcagttcaatcattctttatccttgtgtttctttccgtccctcctaaaaacaccatatcacaaatgatgcaatcttaccccacaagggcattggatagaagactccaagaagattgggccagagatgcaagagaaggccctagggttctcatgagccttagggtagatttcagacccatggacaaagtatgagcccgcttatctttgtacatattagattaaggtttcattatttttttttccttgtatttagggctccataatataggtaaggtaccctag

SEQ ID NO: 10092 - DNA, 404 bp, Glycine max
  unsure (1)..(404): unsure at all n locations
ttttactcggatgtctgattgggtcccgtaanataacgaaacgctcgaaattgaatgtttaagctttgagccaattctaacgacaataactttttactcggatgtccgattgagtctagtaatatatcgacacgctcgaaattgaatgttgaagctctaagcctattcaaacaacaataacgttttactcggatgtccgattcagtgacgtaatatatcgggacgctcgaaattgaatgttgaacctctgagccaactcaaacgacaataacgttttactcggatgtctgattgagtcccgaaatatatcgagacgctcgaaattgaatgttgaagctctgagccaattcaaacgacaatatacttttactcggatgtctgattgagtcccgtgatatatcgag

SEQ ID NO: 10093 - DNA, 370 bp, Glycine max
agcttaaacattcaaatttgagcgtttcgttatattacaggtctcaatcagacatccgagtaaaaagttattgttctttgaattggctcagaggttcaacattcaattttgagcgtctcgatatattacgggactcaatcagacatccgagtaaaaagttattgatgttcgaattggctcacagcttcaacattcaatttcgagcgtcttaatatattacgggactcaatcagacatccgagtcaaaagctattgtcgtttgaattggctcacagggtcaacattcattttccagcgcctcgatatagtacgggactcaatccaacttccgattaaaaaggtattgtcgtttgattggctcaagctttat

SEQ ID NO: 10094 - DNA, 398 bp, Glycine max
agcttctaatgatgttgctatgttacatgatgtaaaaaagtgtccctctaataaatttgaaatgaaagatatggttgaggcatcctatgtgataggaatagaaatattccatgataggtcacaaggattgttgggattgtctcaaaaaggatataccaataaagtactaaagagattcaaattggaaaagtgctctacaaggattgttccaattcagaaaggggacaagtttagtcaaatgcaatgtcctagaaatgatttggaacgaaagaaaatggagtctatcccctatccatcagtggttgggagtttgatgtttgcccaaacgtgtacacgaccgaatattagttttgttgtaggaatgttgggtcgatatcaaagcaatcctggaatagaac

SEQ ID NO: 10095 - DNA, 425 bp, Glycine max
  unsure (1)..(425): unsure at all n locations
tcattcttagaatgaagtatgtagcgatacatatatcgtgaataatcatctataaagggtatgaagtatttcggactattngcatccatgtctggacaacatatgtctgtatgtatgatttctaataaattagaactcctctgtgcaccctctttagacttgttagtttgcttacccttaatgcaatctacacaagtcttaaaatcagcgaaatccaaagtactaagtactccttcatttactaatcgcttgattctttcaatagagatatgtcctaatctccggtgccacaacatagaggattctttattcacaatacatcgttttaacccaacagaaacgtgcatagaagtagcgtcatttttgcaattaatcgaataaagaccatcaaccaattgaccacaaccaattatttcagatttatt

SEQ ID NO: 10096 - DNA, 248 bp, Glycine max
  unsure (1)..(248): unsure at all n locations
tgcgcctgaatcagacttccgtttcttatgttatgaccatatgaatttctccactgtattccgggtgacaagtnatgaccatatgaatttctcgatagcattcattgttcaatttcgagcgtctcgatatattatgcgcctgaatcggacttccgtgtgacaagttatgaccatttgaatttctcgagggcttccgctgatcaatttcaagcttctcgatatattatgcgcctgaatcagacttccgt

SEQ ID NO: 10097 - DNA, 375 bp, Glycine max
catgcaagcttcttgatatattatgtgactgattcggacttccgttttataaagttataaccatttgaatctctcgacagctttggttgttcaatttcgagtgtctcgatatattatgcatcttaatcggacttccgcgtgacaagttatgaccatttttgttgctcgagagcttccgatgatcaatatccagcttctccatatattatgtgcctgaatcggacctccgtttgaaaagctatgactatttgaatttctcgagagcttaggttgttcaatttcgagcgtctcgatatattacgcacttgaatccgaaattagtgtgacaagttatgaccatttgattttctcgagaacattcggttgtaatttcca

SEQ ID NO: 10098 - DNA, 423 bp, Glycine max
  unsure (1)..(423): unsure at all n locations
ntctcaagagacttctttgagaagctagatccttatctatccacacccctctattaactaaattaatttccttaaaaataattacagatgaaaataacgcaacaaataatcaaacatcaaacataattactaataatatatagatatatatatatatcagggtgttacaattggaattgatcttggattagtgggctgaaccataactaaaattcactaatcataattactgaaattttggctccaaagtttggctccacaaattcaatttcaaattcaagtaaaatttgaattgaaattcaaatttccctctaattttgtgtgacacttaggctataaatagaggtcatatgtgcgcatttttttaactttgatcatttgaatattaaacttcagatttcaaagctcttntagagcacaaaa

SEQ ID NO: 10099 - DNA, 431 bp, Glycine max
gatccttaatgcaccgtggcatgcacgcttgaccagtaattactcgtatggtttgcacgttgaatccaggttgttcctggtgtggagatgatggtacagccggcgaaccacaagctgaaatttcttttggcgaggccgccatggaaaagcggagcgtttggaatgatttacctgatctcagagaattatcggaaaatgctgccgaaaacactaatgccatgctgatattaatttgaatgaagaatgtataggggcgtgtgaagcaaccgtcgaattcatcttggcttaacagtgaacgtgctattaatgttaactgattcgatagggcacggctcagattgcagtatctgctataattcctctagcaaacaaatgcccatcttgcccctcagttattcagactgatctgcatccaaagcctttgtgaaaat

SEQ ID NO: 10100 - DNA, 448 bp, Glycine max
  unsure (1)..(448): unsure at all n locations
gctggcttaaagatgtctctgattaattaattattttaaaactctagtgaaatactaactaaaaaaagaaacttataaaatttcatataaatattgtacaaatccaaaaataattgataaacaaaatcatattgaattcaagtcgttaaagcacaaagtataataaaagaaaataaaaagagcataatattaaaaaatgtatggattaggtcctcagcctcaaagcttacaaatctattttaagtctaagcccataaacgaaataaaataaaatctagacaaaataagataagattggatgaaataaaatctggatggaataaaatctggataaaataaaatctagatggaataagatatagataagataagatttgataaaataaagttattattattattagttaaacagaccgacttatncaagctcaacaaactttttttatag

SEQ ID NO: 10101 - DNA, 371 bp, Glycine max
agcttgctctgtgccaagctctggtcttgggccttcctcatttcaattctccctttgtcattaaaactgatgcttccgggattggtatgggggccatcctctcacagcatcatcatcctcttgccttttttcagcaaaccattttgctcgaaactgctccgcgcttctacttacgtctgagagattgctacaatcattgtcgcggttaagaaatggaggcagtacctcctagggcatcattttatgattctcacagatcatcagagcttaaaagagctcatggctcaagctgtgcaaactccagatcaacaaatttatttggcaggcttaatgggctttgattatacgattcaatatcgagccggaaaagc

SEQ ID NO: 10102 - DNA, 496 bp, Glycine max
  unsure (1)..(496): unsure at all n locations
cttctcgctgaccaaggagaattattntctgacccaagtagatattggagttaggcagatttctattctgatccaattgtaacaagaccaggcatcttttgttgtaagtgtggtcattagaatgcagatgtcagaattctgatatttcttagaggatcactagtaaaaggatggattagtgtttgagaacagagggcataaggagattattacctatacttaataggagatccacatatggatattgtgttctattaggagtgaatctctttcatggaaaacctcatgaagcaaaatgcggttgcaaagtccagagctgaagcagaatatcaagctatgactctcactacttgtgaactaatatgtctaaaaacaaataaatgactcattaaagagctaaaattntgtgaggtangaactgagactaatntgtgataatcatgcagctcttcatattacatctaacccagttttcgatgagcataccacacatata

SEQ ID NO: 10103 - DNA, 358 bp, Glycine max
  unsure (1)..(358): unsure at all n locations
agctntgaccattcgaattcgagagtgttcncttgttcaagntttatcgtctcgatattntatgtccacgaatcagacatccgagtgaaatgttatgaccattcgaatttgtcgagagcttccgttgttcaatttcgagcgtctcgatatattatgtccccgaatcgaacatctgagtgaaatgttattaccattcgaatttctcgatagcttctgttgttcaatttcgagcgtctagatgagttatgtacccgattcgaacatccgagtgaaatgttatgaccattcgaatttctcgagagcttccgttgttcaatttcgagcgcctagattattaatgtccccaaatcggacatct

SEQ ID NO: 10104 - DNA, 407 bp, Glycine max
  unsure (1)..(407): unsure at all n locations
agcttgaaagtggggttccccttangttcatctgttgtttggattgaactgcctattgtcatcttgccagatagaacatgaagaatgattactccaaatgtgtatatgtcacgtttctcagtaaagcatcttgtggtgatgtattcaggagctaagtatcccatggcaacactaacttttagagctaagaaaacaacttcatctgcaagaagcttaggtattctagcatctatgatcaataggttaaactatgctctaggagaacattttccactgaaatattctggtggactattgtaggtttactttcttatttgatatgaagatatccaatgcctggtcataaatgaataacaaataccaaacaaaaaaaagaagcagatattatctacaactattaatatttt

SEQ ID NO: 10105 - DNA, 360 bp, Glycine max
  unsure (1)..(360): unsure at all n locations
agctgagggtttaatttcacgatngtcacgtgctcatgcaacaattgttagtcgtggctatacgagacatcttgccaaacaaagtaaggttagcgataactcgcctgtgctttttttttccatgctatatgtagcaaagtcattgatcctgtcaagtttgatgagttggaaaatgaggccgcaattatactgtgccagttggagatgtattttccccctgctttctttgacatcatgattcacttgattgtgcatcacgtcagagaaatcaaatgttgtggtcctgtttatctacagtggatgtacccgattgagtgatacatgaagatcttaaaagggtatacaaagaatctatatcgt

SEQ ID NO: 10106 - DNA, 475 bp, Glycine max
  unsure (1)..(475): unsure at all n locations
ntgatgncaacattggagatgttaatgaaacaacgagattatgttctccatgagaggttggatcaaatggagaatagagatcataatgaagaagaaaggaggagaagagggaatgatggtgttcctagacaaaaccgaattgatggtattaaactcaacattcctccatttaaaggaaagaatgatccggaggcctacttggagtgggagatgaaaatagagcatgttttctcatgcaacaactatgaggaggaccaaaaggtgaagcttgccaccacggagttttccgactatgctcttgtgtggtggaacaagctacaaaaggagagagcaagaaatgaagagccaatggttgatacatggacggagatgaaaaagatcatgaggaagcggtatgtgccggctagttactcaagggactcgaaattcaagctccaaaaactaacccaaggcaacaagggggttgaggagtatt

SEQ ID NO: 10107 - DNA, 407 bp, Glycine max
  unsure (1)..(407): unsure at all n locations
gacactatgaaactcaagcttgaggatttcaaacgactttaactntntactcggnattctgatctagtcccgtaatatatcgagacgctctaaattgaatgttgaagctctgaccaaattcagacgacgataaattcttactcggatgtctgattgagtcctgtaatatatcgagactctcgaaattgaatgctgaagctctcagcaaattcaaacgacaataactttatactcggatgtctgaatgagtcccgtaatacatcgagacgctcgaaatttaatgtggaagctctcagcatattcaaacgacaattacattctactcctatgtctgatagaatcccgtaatacatcgagacgctcaaaattgaatgttgaagctctcagcaaattacaacgacaatagc

SEQ ID NO: 10108 - DNA, 403 bp, Glycine max
  unsure (1)..(403): unsure at all n locations
agcttcaacattcaatttcgaggttcntcgttatattacgggactcaancggacatccgagagaaaagnnataggcatncgcatccgctcagagcatcaacattcaatttcgagcgtgtcgatatattacgggactcaatccgacatccgagtaaaaagttattgtcgtttgaatttgctcagagcttccgcattcaatttcaagcgtctcgatatattacaggactcaatcagacatccgagtaaaaagttatggtcgtttgaatttgctcagagcatcaagattctatttcgagcgtgtcgatatattatgggactcaatcagacatccgagtaaaaagttattgtcgcttgaatatgctcagagcttccgtattcaaattcgagcgtctcgatatattac

SEQ ID NO: 10109 - DNA, 335 bp, Glycine max
  unsure (1)..(335): unsure at all n locations
ctgcagctngaatgttgctctttctatngttgtactgcatgttctgcatagtcatttgcctcacaagttcttcgagggaaggttgtggaggggcctcaactgttggttgtttctggggttgttgctgttgttggattggtggaggaatgtatggtctgcttgggccagcagcattttggaaggaaggagcangctgctgttgttgttgctgagggctggaccatctgaggttagggtgattcctccatccagggttatatctgttgctggagaggtcataattgttctgctgtggttgattttgctgctgaggttgaggaggtctattgtaaata

SEQ ID NO: 10110 - DNA, 455 bp, Glycine max
  unsure (1)..(455): unsure at all n locations
agcttgtaatcgattacacacatactgtattcgattttctgaagagttntttcagaaaacattctcaacagtcacatctttttgtgtggttcttgaatgagtatcataggcctataaatatgtgacttgagacacgaatttgataagagtttttcagaacaaaaaggtcttatcctcttataaagagaaatcgttttatcctcttacaaattccttggccaaattacttgtgattcaataaggaattatttgaatgctcaaattgttcaatctatctctttcaagagagatttcttcttctcttcttcttcattctgaaaagggattaagagaccgagggtctcttgttgtgaaagaattctaaacacaaaggaagggttgtctgtttttgtgtgtntagaaactcgaaaaggaattacaagatagtggaactctcaagcgggttgcttgggact

SEQ ID NO: 10111 - DNA, 430 bp, Glycine max
  unsure (1)..(430): unsure at all n locations
agcttccattttcaatttcgagcttctcgttatattacagttctgaataggacanccgagttaaaacttattgtcatttcattttactcagagcttccgttttcaattacgaacgtcacgataccgtacgggactcaatcggatatccgagtgaaaagttattgtcgtttgaatttactcagagcttctgttttcaattacgaacgacttgatatcctacgggacacaatcggacatccgagtcaaaaattattgtcgtttgacttttcttagagcttccgttttcaattttaagcgtctcgatatattagagagctcaatcggacatctgagttaaaagttattgtcgtttgacttttcttagaggttccgttttgaantcgagggtctcgatataatacagggctcaatccgacattccagntaaaag

SEQ ID NO: 10112 - DNA, 446 bp, Glycine max
  unsure (1)..(446): unsure at all n locations
tactcaagcttactacacttctgcgagtgtgattgagagctgtcataattcttattgatgcagntatgtgaatgtacagttagcaaagccgatacattctatcgtttgtttagttgagtgcattgatgtctatatcctaccatagctctgctttttatgacattcattatgatcatttgataggtttcttatgagattaacaaaagatgacagtgaggtcaacttagctaatggcgaagcagaacgtgaatgtgcataatggaaatgggcagaccctgaagaagttattgagcagagtgtgtggaaaaaaggagatttgaaataggtgtaatttttntccatttgaaagactaataatgaatgatgactgattacaggcagtggactacacgagaccaagctatgaagaagttatatgaaccttcaagccttactttcaagggagt

SEQ ID NO: 10113 - DNA, 465 bp, Glycine max
  unsure (1)..(465): unsure at all n locations
tcagggcttgaaactatgaaggaacagcctcttttgtgttataccagcatctctaggaaacattncttccctaataaatatcagctttggcaccaactntctcactggctggattcccagtgaattgggcaggctccatgatttgattgagcttgatctcagtctcaaccatctcaatgggactgttccacctgctatatacaacttatcttcccttgtcaactttgccttagcttcaaactctttctggggtgagattcctcangatgttggtcacaaacttccaaaactcatagttttctgtatctgcttcaattatttcacaggtagaattccagggtctttgcataacctcaccaacattcangtcattcgtatggcttccaaccatctggaaagatcagtgccacctggttttgggaaatctccatttctttgcacgtataacattcngtataactggat

SEQ ID NO: 10114 - DNA, 435 bp, Glycine max
  unsure (1)..(435): unsure at all n locations
agcttatggaatctagattaacatcngtgtaggcccaagtttgagaatgttctacaattagggctgctcaaaaaaactaattnttaaaaaataactataactagttataaaattataaccagttntatagttatttttatttcaaataactggtttttatttaaaaaaatacatatagttataaaactataactagttntatagaaatgattatttcaaataacttatttttattcattcatagccagttatgtaattgattttagatataaccggttataactagaattggaatgttgtgaagtagagaagaaggcactagaagcagagttccaaccagtacttgatcgaatatatgataaagagactgctngcaaggagacactangtaaaacacaggatgagtctgctagaatatctcanactatcagaaat

SEQ ID NO: 10115 - DNA, 488 bp, Glycine max
  unsure (1)..(488): unsure at all n locations
gcaattcttctagacttagagtgataacatgcagttctcttgatcccttatcttttactttctcgttatgccgagactccgaaaccacaacaagttttatcttttccatgtactcgaaacaaaactcagtagcttctttcgcaatgtacttttcaacaataaatgcttcaggacggtgtagattctttgtatacccttttaagatcttcatgtatcgctcaaccgggtacatccaccgcaaataaatgggaccacaacatttaatttccctcaccaaatgaacaattaagtgaaccgtgatgtcgaaaaatgaaggaggaaaatacatctccaactgacacaagataatagtagtctcattttccagctcatttaacttaagaggattaatgactntgctacatatggcattgaagaaaaaacacaggcaagttacggcatgcctgactntcttagaaaaaatgtctcttatcgccacaactaacaat

SEQ ID NO: 10116 - DNA, 479 bp, Glycine max
  unsure (1)..(479): unsure at all n locations
gaaaacggaacctctcaagacactcanatggngttatacttgtgacacggatgtctgattacggcgcataaaatatcgagacgctcttaattgaacaacgaatgctctcgagaaattcatatggtcataacttgtcacacaagagtccgattcatgcgcatagtatatcgagaagattgatattgaacaacggaagctctcgagacactcaaatggtcataacttattacacggaggtacgactgatgcacataataaatcgagacgctcgaatatgaataacgaatagtctccagacattcatatggtcataaatgttgaaacggaagttcgattcacgcgaatcatatatcgagaagcttgaaattgaataacggaagctctcgagacatgagatggtataacttgcacacggaagtccattcaggcgcatctatatcaagagctcgaaataacaatgaatgctctcagaattctat

SEQ ID NO: 10117 - DNA, 453 bp, Glycine max
tccatcacatggagtcctctatttaggtgcaacaatttgttggtctttgtgtgtcattggacttgatggtctctggatgacgatatggagactaaagtagtcttggtcgataggcattgagtcttcgacaaagagtgcagacgaccatgttggtctctatgatgtagctccattggagcttgtaggccatggatcttcttcatcaatggagtccattgcttcttgaattttaatggcagtggaatggagaagaagaagagttgagaggagacgcctcttcatgaagaagatgagtctagaagaacctcaccaccataggaagccatggataagagcttgaaagtatgagaagatgactggagggagagggagagaaggggcacgaaattttgtgcctcaaatgatgtctaaactttgaagtgtaattctcacatgatcaaagattgaaaaatg

SEQ ID NO: 10118 - DNA, 414 bp, Glycine max
  unsure (1)..(414): unsure at all n locations
agcttctntgagaaaacttccttgagaagttatagcttagctacacacacccctctcataactaagctcacctccttgagaagcttccttaagaagattcctaaagaagctagagcttagctacacacacctctctaatagctaagttcacccccatgaccaaaaaacatgaaaatacaaaaaaaaaagtccttactacaaagactattcaaaatgccctgaaatacaaggctaaaaccctatactactagaatggccaaaatacaaggcccagacgaaggaaaaacctattctaatatttacaaagataagcgggctcatacttagcccatgggctcgaaatctaccctaaggctcatgagaaccctagggccttcccttggatctctagcccaatctacttggagtcttcta

SEQ ID NO: 10119 - DNA, 386 bp, Glycine max
  unsure (1)..(386): unsure at all n locations
agcttgaaattgaacaacggaagctctctttaatttcttgtggcataaannntcacacagatgtccgattcggggaaataatatatcgagacgcacgaaattgaacaacggaagctctcgagaaattngaatggtcataacatttcactcggatgttcgatccggggacataatttatcgagacgctcgaaattgaacaaccgaagctctcgacaaattagaatggtcgtaacttttcacgcgaatgttcgattcggggacataactcatctagacgctcgaaattgaacaacggaagctctcgagaaattcgaatgggcataagttttcacacggatgtccgattcgggaacataatatatccagacgatcgaaattgaacaacg

SEQ ID NO: 10120 - DNA, 487 bp, Glycine max
  unsure (1)..(487): unsure at all n locations
tacagatctgttntaaatctaatcccataaataaaataatatctatataagataagatctagatgaaataatatctagatgagatcaaatctaaataatatctagataagataaaatntggtagaataaaatagtctgctctcttcaagtccaagcccaattgcttataattctcctgaaattaaattaaaaacacaaaattaatctagtaggcctaaatgataaaactgcataattaatttgataattaagactaatcagtaattaaaatggtgcaaaaagggttaagaaataggagaaaataatggcacatcagtgagacatgaaaaaagatcatggaactcacaaagcaagaagggggagaattagttctaaatcaaatcaaaccaaaaaatacgagtttgagaaactttctatccaaggatcgtatcacannattgtgctaanaagttctntaaacttcagcaaattgatcaagaatacaatg

SEQ ID NO: 10121 - DNA, 503 bp, Glycine max
  unsure (1)..(503): unsure at all n locations
gcttcatgcttaactatgtatggcaaaactccattactgttgttatgacatacaagtgagtttgtaacaaatcttctacacttggagtgatcacctgcagtcctcttgaacccttaccacccactctgtcatcatgccaagactcaggaagcccaacagctttagccttctctaagtattctgaacaaaattcaatggcttcttctgcaatgtacctctcaacaatagatgcttctggacgatatagattctttgtatacccttttaagatcttcatgtatcgctcaaccgggtacatccaccgtagataaacaggaccacaacatttgatttctctgaccagatgcacaaccaagtgaatcatgatgtcaaagaaagcagggggaaaatacatctccaactagcacagtataattgcggcctcatttcccaactcatcaaacatgactggattaatgactntgctacatatagaatggaagaaaaagcacaggcgagttatc

SEQ ID NO: 10122 - DNA, 407 bp, Glycine max
tatagaaactaagctgtcacaaaccaacaattatattgattcttcccgtttgcttttctcattctctatctcccttagctataatacatgttgatatttggggtccctgttcaaccacttctatacatggtcataaatattttcttactattgttgatgatcatactagatttgtttgggttataccaatgtcttctatagctgaaactcaatctcttttacaaggttttattaaatctgctgaaaggcaatttgatacaaaagttaaagttatttgctcaaataatggtgatgaatttatcattagtcatttctttcaagccactggtattattcatcaaacaacatgtgttgaatactcccaacaaaatgggattggcgacaaataacatcaacatctacttaat

SEQ ID NO: 10123 - DNA, 416 bp, Glycine max
  unsure (1)..(416): unsure at all n locations
agcttattntagtccatatattgttttctttattttacacactatattttcctctcctgtagaaacaaaccctttgagttgattcatataaacttcttcttctaagtcaccattcagaaaaggcggtctttagatccatttggtgaagctccaaatcaaatgagccactaaagccaacacaagccacaaagagtccttcttagaaacagaagagatagtctctttgtagttgatgcaatcctatcccgcaagggcattggatagaagactccaagtagattgggccagagatgtaagagaaggccctagggttctcatgagccttatgatagatttcggacccatgggctaagtatgtgcccacttatctttatacatatttgattaagatttcattatttttgggccttatattt

SEQ ID NO: 10124 - DNA, 454 bp, Glycine max
agcttaagaaaaagcgatgatttggggccttgacttatactactcttttcctaaatataaacaaaattaactaacttttatgctaattaagttagtaaatatcatctaattccactaattacatttaagaaacaaacttttttcctaaaatacccttcaatggaacctaatatcaaggacaaaaggagtcattggaaatagaatctgaattaattgaagggtatttttgagatagtatcattaaatagggtggaagtagttaggatttacttatatgtgtcaaaaaaggtttttttttttgttgcttaaaattgatccggagggagtaatacttattctaaggacttcatcattgtatttgaaaagaacaatataaagaatccctaccgtcggtggttctggtaatagatatcaagttgggtctggtaatagttatcaagttgataatagatat

SEQ ID NO: 10125 - DNA, 365 bp, Glycine max
  unsure (1)..(365): unsure at all n locations
ctgaggcgtgcaagcttaggagaacgatcttggaagagggccttaaatgntttatgagtatccacctgggagcgactaagatgtactacgaccttatgcagatgttttggtggccgggtatgaagagagaagttaatgagtttgtccttgcgtgcctaatgtgtcagacagctaagatagaacaccaaaagcctttagggtagctgcaacctttagagatacttgagtggaaatgggataacatcttcatggatttcatggcggggttgcctaggacccccaaaggtttagattccatttgggttattgtagacaggttgacgaaatctgcttacttcatcctaattaacatcatatattcctta

SEQ ID NO: 10126 - DNA, 332 bp, Glycine max
  unsure (1)..(332): unsure at all n locations
agctttcagaattcgaaggttttcgttttacacagatgnccaanncgggggcataatatatcgagacgctcgaaattgaacaacggaagctctcgagaaaatcgaatggtcataacttttcacacgaatgttcgattcggggacataactcatctagacgctcgacattgaacaatggatgctctcgagaaattcgaatggtcataagttttaacacggatgtccgattcgtggacgtattatatcgagacgctcgaaattgaacaacggaagctcccgagaaatttgaatggtcataacatttcactcggatgccccaattcggaacataa

SEQ ID NO: 10127 - DNA, 453 bp, Glycine max
  unsure (1)..(453): unsure at all n locations
acctgcggcatgcaagcttctcanagaagcctctcaaggaagcttctcatacttatctacctaaacctatttcggtaaaattgttctcccggattcgttaaccgttggatcatcttaaaatcttttctggaggttcctaggacaactgtccacagtttgactgttgcgatttgcaatataacatttggtgtgtgagatatgaattttttacggaagcaaaaaatttgagtgttgcaggctttaaattagtgagattgtcagattaaccgccttgtatatttatgagattgtcagattacatggtgtgccatctagcatagtgtctgatagagatcctaggtttacctctagattntgggagagcctgaacagagcattgggaaccaagcttagactacgttcaacttaccatcctcagattgatggccaaactgaacggaccattcagtcact

SEQ ID NO: 10128 - DNA, 399 bp, Glycine max
  unsure (1)..(399): unsure at all n locations
ntgngctcaatagctccaataacgtctattccctatatatattacggccaaggcactgccaagatgttcaaaggtacaagcgaagcattgacattatcaacgaaggcctggcacttgtggcactttctcacacaacaatcattttccatagtgagccagtaataccctgccctcangatcttccgggccatggcatgtccgttggcatgtgttccaaaggatcccttatgcacttccattagcatctgctcagcctccctggcatcaacacatcggagcaaaaccaaatcatggttcctcttgtacaggatatttccacttangaaaaagtcggctgccaacctctgcaacgttctcttgtcattgtcgttggcatgtgttccaaaggatcccttatgc

SEQ ID NO: 10129 - DNA, 403 bp, Glycine max
  unsure (1)..(403): unsure at all n locations
cttcaatcaatctttggctatctacattagtgcaactactcncatcaataaccaaagagcatatcttcctcatgatcatgcacctaggatgataaatgtcctccctctgagttgcgtctctatccttacacacactccccattaacctcctaaccatcaaaagatcaccttccaggggctgtacatcacattcactttcactctcactagaacaactagaagagctagaagaagatgcactagtgatatccccattacccaacacaaccatagtccttttgttaggaaattgggaggcaatatgaccctatcctaaatacttaaaacatctaatagaactcacctttaaagaagtgggagtaggggtagaattatntgtaccaagggcaatactgatttcatg

SEQ ID NO: 10130 - DNA, 224 bp, Glycine max
cacacacacaaacacacgcacacgcgcatactctcactgacgcacacacacatacacagtcacacagtgagacggacacactcacacacacggtggaagaagaatgatggtttcgatctggataccgagaaatgacctgcagatgtcagactgggactatgcagagatagaaggaatacacatggctctttaagcactcaacacagttcatgagccgttctact

SEQ ID NO: 10131 - DNA, 298 bp, Glycine max
ttacaaagcattcattgtagttcctacgtatattatttttatctttttggatattacactctaaattgatatagactgataaacaaattaaaaatagtatttatattatgagacctattcttaaatggatagattaaaaggtgcaatgtatatatacaactatgaagatgatatcaataatttaatcatatttatatgtaacattgatcatgtctatttgattcataattaattgaatatctcgaagaatggtcatgattagttgataactatagcgaggtaaccaatattattaaat

SEQ ID NO: 10132 - DNA, 429 bp, Glycine max
  unsure (1)..(429): unsure at all n locations
ntccttgccccttgatatatttgagggactcatggtcactatgaatgacaaattccttgggataaaggtagtgttgccatgttttcaaagcccgtactaaggcatacaactccttatcataagttgaatagttaagggtagggaccacttaacttttcactaaaataagcaatgggatggcttcttggattaacacagccccaatcccaacatttgaagcatcacactcaatttcaaaagatttttgaaagtttggcaacgcaagtatgggggcattagttagcttttgcttaagaacattgaaagcttcttcttgtttctctccccatttgaaaccaacattnttcttgagcacttcattgagaggtgctgccaatgtgctaaaatccttcacaaatcgtctataaaaacttgctaagccatgaaaac

SEQ ID NO: 10133 - DNA, 318 bp, Glycine max
agcttctgtttcaataacgagcgtcttttatattactggcctcaatccgacatcggagtaaaatgttattgtcgttagaatttgctcagagcttctgttctgtaatttgagagtctcgatatactacggaacacaatcggacatctcagtaaaaagttattgtcgtttgaatttgctcagagcttctgttcttaattacgagagtctcgatatattacgggattcattcggacatccaagtataaaagtattgccgtttgaattgctcaaagcattctttgtcaattacgagcgtttagatatattaccggattcatt

SEQ ID NO: 10134 - DNA, 481 bp, Glycine max
  unsure (1)..(481): unsure at all n locations
tacgcgacactatgaaactcagcttaaggcaatccttctctgctgatgtccactactgtatctgttccaaatgttgagtttcctacttcagctgctactgtcaataatacttctaatattgtttcaaattctaatgttaccttttctagtagtgttaatctttggcatgctaggttaggacatcctaatgatcatgtaatgaaaattgttctcaaatagtataatatttctcaactgaataaaaacatcacagagttttgttcctcttgttgtatgggtcaagctcataggttacccaaagaaatttgattataatttaattcgtggcgatcataagttgaaagttcatattcttcggtcattgataaacaatttgttggacaatattcaataccatgttacctcaactttngtttattcatctttagaactcattntcactaacctatggngaaccctccatgtacctcttatgttgcta

SEQ ID NO: 10135 - DNA, 326 bp, Glycine max
agcttgatattaaacaacggaagttgtctataaattctaacggtcataacttatgacacggaagtccgatttagtagcataatatatctaaacgctcgaaattgcacaacggaagctctcgacaaattaaaatggtcataacttggcacacggatgtccgattgtggcgcatgatataccgagacgctcgaaattgaacaacgaaggctgtcgagaaagttaaatggtcataacttgtcacacggaagtactatatcgacgcaaaacatactgagacacgtgcaatttaacaacggaaactggtcagaaattcaaatggccataac

SEQ ID NO: 10136 - DNA, 419 bp, Glycine max
  unsure (1)..(419): unsure at all n locations
agcttaacagcaataaaaagcatcaaagttattcaaagatttactcacattaactaccacaagcacgattgacagtgaaaaatcataagatttgatttaatgcctaattgcacacctgacatccagtagatcaactctaactcatgatgataagaaaggaaacatgcacaacaacaatttcattaccttcctctaatgaaagctgaattgatctcttctctaactcaacagcatgcttgctaagttcaactgaggacagggagcgaagcactgccaaaggatgagatatcagctatataanatatcaagaacttcataagaaagctttgagggattatttaagggtcctgacatactttgatatatcttcttgtctgattggcccaattctcaaaacatctgcaattgttggatcgctc

SEQ ID NO: 10137 - DNA, 445 bp, Glycine max
agcttcattctacacctgaaaaagaggtttagttatttgcacaaaagagaaagcttcctaacaaaaaatttcatgcagatggaccttcttctagtaattctgacttacaatagcctcatatccttcttccattcccacctagagcgattccaaacaaaaagatggaagaagtggaaaaggagatctttgagaccttcaggaaagtagaggtgaacatacctctattagatgccatcaagcagattccaagatatgccaagtttctaaaggagttgtgcacccacaaaaggaagctcaaaggcaatgaacagattagcatggacagaaatgtgttagcattgataggtaaatctgttcctcacattcctgagaaatgtaaggacccaggtactttttgtataccttgcattattgggaatagtaaatttgagaatgccatgctaga

SEQ ID NO: 10138 - DNA, 390 bp, Glycine max
tgagaatggagaattgcactaagcaatcactacgcatagcttcattctcgaaggtggaggacacatgaacgaaaacgcaattcatgggtctccgaaaagattgagaatggagaattgcactaagcaatcactacgcatagctccaaactcgatggtggaggacacatgaatgaaaacgcaattcatggggctccgaaaagatggagaatggagaattgcactaagcaatcactacgcatagctccaaactcgaaggtggaggacacatgaacgataacgcaattcatggggctccgaaaagatggagaatggagaatggcactaagcaatcactacgcatagctccaaactcgaatgtggaggacacatgaacgataacgcaattcatgg

SEQ ID NO: 10139 - DNA, 418 bp, Glycine max
gattatgccctgagctgtagacttgtgacactacattaatatttcataattaattaaaattatattttgaaaaattctataatgcgcttaagttcgatactgattacttaactttagaaaattaatctgataagacattctgacgtgcttttttttcacgagtcttataataactataatcttcagaactaatgtaagtcaagtataaaaataatagattatataaatatgatttagataaattatttatgattcaaaatcaattatttaactaccaattaatctaattaggtcaattttacaactctactcctaatggaccaatattaactatattatctataattaaccaatttctataaaatattatgtcttgatatctgaaccaatttattacaactcaaactaatattttaat

SEQ ID NO: 10140 - DNA, 416 bp, Glycine max
  unsure (1)..(416): unsure at all n locations
tgtgtcacactntcaattgtcgaagctgaatacatttcttcttgaagttgttgtgctcaaagtctttggatgaagcaacaatgatgtaagctccattggagcttgtaggcctatgatcttcttcatcaatggattcctttgcttcttggaagatgaatggcagcggaatggagaaaggaagagagagaggagacgccacttcaaggagaagatgagtctagaagaagctcaccaccataggaggccatggataagagcttggaggaagaaggagatgaatgaagggagagggagagaagagcacgannatttgtgctctaaatgagctctgagatctgaagtttaatattcaaatgatcaaagttgaaaaaaatgcacacacatgacctctattatagcctaagtgtcacacaaat

SEQ ID NO: 10141 - DNA, 432 bp, Glycine max
aagcttcttatttagatgatgctattgtttgtagctacctcatgcactcctctaatgactatggcatcatttctggcgctaaactgctgggagttggaggccatcttctcaattaaatttctggcttcagcaggagtcatgtctccaagggctccaccactggcagcatctatcatacttctctccatattactgagtccttcataaaaatgttggagaagaagctgttctgaaatctgatggtgagggcaactggcacatagtttcttaaatcgctcccagtactcatacaggctctctccactgagttgtctaatacctgagatatctttcctgatggctgtggtcctggaagcagggaaaaaattttctaagaatactctcttaaggtcatcccagctcgtgatggaccttggagcaaggtaatacaac

SEQ ID NO: 10142 - DNA, 299 bp, Glycine max
  unsure (1)..(299): unsure at all n locations
gatctctaagtcacgctgctgcagcttgccaaaaggttttgtttcttttctttnanagccaaagatgctgttgccacttctatgccctgagagcttctacaccttgacttgtttggaccaaccacaactgcatttttttctggacacacatattgtctggtcatattggacgattacaccaaatggacatgggtcaattttctaacctacaaggatgagtattttgataccttttataaattacgtaaaaatattgaacatgaaagaaataattgtattttttcaatcaaaagtgatca

SEQ ID NO: 10143 - DNA, 406 bp, Glycine max
  unsure (1)..(406): unsure at all n locations
actcaagcttagaatgcagaagaagcaacaacaatcaatttaanattgttctataaacatgcaaggcaaaaatgatggcaataacataaatgagataagggaagagagaatgcaaacacttatttatactggttcggccacttcccgtgcctacatccagtactcaagcaacccacttgagatatccactaacttgtaaattccttttacaagtactaaacacacaaggacaacccttcctttgtgtttagagattctttacaacatgagactcacagtctcttaatcccttagagaatgagaagaagaatatgaaccaatctctctacaagagatggatgtacatatgagcactcaattatttcttatgaattcaattgaatggccaacgaattttaaaggataa

SEQ ID NO: 10144 - DNA, 400 bp, Glycine max
  unsure (1)..(400): unsure at all n locations
cactatacgaaactcaagctntaggctctgcagtntatcttattaatagagngcctttatttgtgnnaatctttaagagacctcttgataccctttctcatcatttcacccttaattttgtcaatcatttaccaccctatattttttgttgtgccatatatgtgcatttgcatcctcaccagcggaaaaaattagaatctagagtaatgaaatgtgtttttgtgggatacaacaccactcaaaagaagtattaggccaatcatccatctacaaaaaaaaattgcatcaatggatgttacatttcatgagcatgaattgatttttcccttgaatacacttcattcttcaccataaagcgagggggatgggggtgaggtgttttcctaagaaaaatacaatg

SEQ ID NO: 10145 - DNA, 413 bp, Glycine max
  unsure (1)..(413): unsure at all n locations
ctttgtnntttggagtgtaagagggcatgaaaatgatagcttgttggtgaggttccctctttaggccaacatttggtgagggttgtaccatgttgattcttcgcacctagatgatgtgaaaatattgttcaccatgtatgtgtgtatatatatagcatgaaattgactgtcaagtgtgtatatatagcaaaaaaaatgccacccaaaatagagtaaatgtaggtagcaaaaataccttgccaatttgtatatgtgtttagataggtagcaaataccttataaatatgtatgtatgttgatataggtagcaaaatacctggaaaatatgcatgtgtgttgatatangtagtgaaaatgtcttgcanatatgtaggtatgttcataaaatgtttctcttcaagaaaaaaatgtgt

SEQ ID NO: 10146 - DNA, 442 bp, Glycine max
  unsure (1)..(442): unsure at all n locations
gctgaagttgtacatgaccaatctttagtaatcgctttactttttgcagtttttgtattcgnttaaaatgcatgaagatagatcagtaggagaacaattggatttgtttaataaactgattctagatcttgaaaatattgatgtcactattgatgatgaggatcaagctttgttattgttgtgctatttgcctaagagttactctcatttcaaagagactttattgtttggaagagattctgtttctcttgatgaagtgcagactgctctgaattcaaaggaattgaatgaaagaaaggaaaagaagtcctctgcaagtggtgaatggctgacagcaagaggcaagaccttcaagaaagatagtngaattgataagaagaagcanaagccagaanatcagaagaatggtgaatgaaacatcttcaaaatcagatgttatcac

SEQ ID NO: 10147 - DNA, 431 bp, Glycine max
  unsure (1)..(431): unsure at all n locations
agcttatgaactccnagaagttatatgttactaatgtaaaaaaagggatctaaatcgaagatgcttaacccattatgatttctgaatgtcatgctcatccacacctacacaatcccatgcaatcgcagcttaaaaatatatagtaactatgttgacttttaattctacgaaattctatttttttattagaaaacagtaccaaaagtacttaaggaaatgcatgtaagttatgtcttttatgaattttgattaaaaactctctttatttcaaagacattccttatttaccaattaattatatgacatccctagttgccatggccaatatgtcagcacttgaaaccttattctggcagcgaggtacactgtcaaccgcagcattggctttgatcacagtgtcaaacccatcaccagctagcaccacagaagca

SEQ ID NO: 10148 - DNA, 440 bp, Glycine max
agcttatagaatatataataaatttctttgacttttgaaaagtctatacatgtttcctttgatgagtctaatgtcattctttcaaggaaggattttttagataatatttcaaattccttagaagatacacatatttatggaaatgactctaaagaaaaagatgaaggaagcaatgaggattctcaagataatggggctagaggaaataatgaacttccaagagaatggaaagcctcaagagatcatcccctcgacaacattattggtgatatatcaaaaggggtaacaactagacattctcttaaagatttatgcaataatatgacttttgtatctatgattgaacctaaaaatataaaagaagccatagtagatgataactggataattgccatgcaagaagaactgaatcaatttgaaagaaataatgtgtggaaact

SEQ ID NO: 10149 - DNA, 445 bp, Glycine max
  unsure (1)..(445): unsure at all n locations
actcagctngacaaccggcttgtttaagtaataataataataatatattactattatctataccattnttatgacattatgaatgacttcatgaattgagataaagtgcttaaagaattcacttgcatgtgaaaaattttcaaaaagaaaaagactcaagttaaaaggataatgcaaccagattaatactttcaaagaaaaaaatgttttgtaaagacattttcagacaatttaaatatttttatttgactatattagtataaatcatctctaatccatgtattttttaatattatactctctttttcattttcttttgatatactntgtgtttaaataacttgaattcaatatgattntggttatcaattattnttgaattggatattacttatacgaaaatntataagtttcttttttaagtagtatttactaggtntataaa

SEQ ID NO: 10150 - DNA, 427 bp, Glycine max
gagctttcacctcctacattgagaacaactaccttctctttatagctgcttaatttagggaagaactccttcttatcagaaatcagataaataataatgctgccatcatcagtattactccatccaggcataacctcgcttacagaatcatttaagatgaagcaatcaagtgagtccaaactagcaattttttgaagaacacttgccttgtcatatggaaggccaacaccataagaaattccactatgcgttctggacaggaagagtgttcggatgagagactcagctactggccggagtaaagaaacagttttatcatcaccactttcagccaagagtactgattcatccaataacacccccctcactatacccatctgagagtggatgcagcactaccaaaacagagaatgagacagttatcatt

SEQ ID NO: 10151 - DNA, 444 bp, Glycine max
  unsure (1)..(444): unsure at all n locations
catgcaagctaattataacttacttgctgttaatatataacaattatcaaaatttaaatattactttaactatatgcacaaaaaattggtgaacaaaaatcattcaaaattattatatatgtacttgtcataattgagaaagaattgtaataaatgcatagaaagaaaaaagagcttttaatttcatttagacatagtttgcaagaaggcggaaaataaatgatgcaaacttaaggatattcatcatttagttactggcttttcatgtataaaatccaaccttggaatagaatatcatacattacacgcataggaatttaattaatacagcacaaaatgtacataacaacaaaagaaattgacatgctaacaagaaaactatgatnatattggtggcaacagtatataagtatgacatactacatataagaccttctattttat

SEQ ID NO: 10152 - DNA, 379 bp, Glycine max
  unsure (1)..(379): unsure at all n locations
agctttgaaaaacactttntattttaaatcacttggccaaacctttgctaattcaattaggaattcccttcctaatattctagtgatcatcttgatgttgtgacttgtaatcttgaagtattgtcttgaattttaatcttgaaaagcccatttgcatcaattgcaacacatcatcatgatcatcatcaaaacatcaaagccaattgcatctacacatgtgtcctccaccttcgagattggagctatgtttcacgattgcctaagtgcggaccctcaaggcaatccgccattctccctttttttttcggagacccatgaatgttattgcctagcgctattcatgtgccctccaccttcgaggttggagctatgtttcatg

SEQ ID NO: 10153 - DNA, 385 bp, Glycine max
gcttcatggcttactgaggatggagaagtgcaagtattgaattctgtggagttggatatttccattagaaagtataatgataaggtgttttatgatgttgttcctatggaggccagccacttactcttgaggggaccatggcaatttgataagagggttaatcatgatggtttcaccaacaagatctctttcacgtatcaaggcaaaaagatagtgctcaaaccattgagtccacaagaagtatgtaaggataaaaaaaaatgagagaaaattcttcaagaaaagagagaaaaataaaaagagagtcaaacacttgagatttaaaaagtgaagacaaaaagagggaaacacaagagagagaaaagatgagtgaaacactttgagt

SEQ ID NO: 10154 - DNA, 442 bp, Glycine max
  unsure (1)..(442): unsure at all n locations
ntntattgtaatcttgaaattcaggacaacactctgatttctgaaatttttgggataaaaatggtcattgatcattcccttctctctgactaaaccaaattacccagtgacggtgtaccatttgaaggtacactgaatgacgactggaaatttgatttctctgcccatgatgcccgccagttggtttgcaccaacaatgtggatatgaccggacgtcttcttgccgggtcattggcttttgaaagccgcatccttcactatttaattgtgcgtattttgcttccacggtcttccaaccttgcccaggtttctgaggaagatctaattatcatgtgggcctttcatacagggagtcaacttgactgggcacacttagtcaaatatcgcatgcatatggcattgcgaataaatgcttcattaccatatccacagcttgtcactc

SEQ ID NO: 10155 - DNA, 206 bp, Glycine max
  unsure (1)..(206): unsure at all n locations
tatgcagtgcactttctgagtatggtgttcttggatttgaattgcgctactccatggccaatcccagttcatcgatgatgtgcgaggctcagctaggtgattntgctaatggtgctcatggcatatttgacaatttcttggcttctggtgaggctaagtggctccgtcacactgggcgtgatgtgttacttcctcatgtgtatgat

SEQ ID NO: 10156 - DNA, 429 bp, Glycine max
atgaaaggaaaagactcttgcagttggttggaacatatatcgacaagtttattgtttgtcaaacgaacaagagtattactttcttgtaaatgtgtgagaaaatttttggaaagattcaaatgagcaagatatccaagttgcgaaatccagttaggtattggtccttcgatcccgttgtcagatagatcaagatatattaatatggactgatttatcaagaaactaggaattcgtctcaacttacaggaagccaacattatatgcgtcatatgaggaaagggtgacaggtcatgatcatccctaaagtttatatcaactgacaaattgttatgtgagaggcctagttcaattaaattactcagcttgcgaatcttgtccaattgtattgtgccattaaacttatttgacttaagctgaatgacacgaagt

SEQ ID NO: 10157 - DNA, 440 bp, Glycine max
agcttaggactcaatgaagtttattctttttctgattattatgatagtttatatactgtttttcccttttctcatagttttcacagcagcagaaacttcatccatcacacaatcccagtccctcagttacagaaagaccctagtttccccaagtggaatcttcgaactcggtttcttcaatcttggaaatccgaacaaaatctaccttggaatttggtacaagaatattccacttcaaaacatagtttgggttgcaaacggtggtagtccaatcaaggattcttcttccatcttgaaactagacagttctggcaatttggtccttacacacaacaacacagttgtttggagcacaagttctccagaaaaggcacagaatccggtggcagagctcttggattctggcaatcttgtgataagagatgagaatggaggaaatg

SEQ ID NO: 10158 - DNA, 359 bp, Glycine max
gacaagtggactcagatatcttaagaaggggggggcagaattaacatatcacaaactattccccaattaaaaattctacttttaatttaacccaacaacccaagattccttttaaacaagaactcctaaataataatgcaaattaatcttactaaataaaaataataagcactaaatactcaagaagtttaagggaagagaaaatgcacactcatatttatactggttcggccactcccttgagcccaaatccagtccccaagcaacccacttgagagttccactatcttgcaaaatccctttacaagttctgaaccacacaatgacgacccttcctttgtgttcaaattttgttacaa

SEQ ID NO: 10159 - DNA, 392 bp, Glycine max
  unsure (1)..(392): unsure at all n locations
tagtacttggaatttggactcactgtcgtttagcctgtttatgcaaaggcaaanggnatctatcttaggacacaccctattgagatttgtgtagttggtgcacattctccatttaccgttggcctttttgactatgacaacattggtgagccaaggagagtaactaacttctctgataagttgggccttgaggaacttgtccacctcctccttgactgccttgcgatgctcttctactatctatctcttcttctgtgacactggtttggcctacgggcagatggcatgcttatggcttataatgccagggtgaatactcgacatgttagatggctaccatgcacataggaatgcatttctgtgtgggacattagctatgcgtttatgcctat

SEQ ID NO: 10160 - DNA, 411 bp, Glycine max
agctattcttcaacaaacaaatcaaaatttattttctgatcttcaaaacctagctccagcttcctcttccccatatcaactatgcagcttgtggtcaacatgaatggttttcccaatattacagggatgtcagtatcttcagagatatccattaccataaagtctgtcgggaagataaaatgttttactctgaccaacacatcttcaattactccatatggccgggtaatggagcagtcagctaattgtcaagacattcgagtgggcattatttccaactctccgaatcttctgcacatggagagtggcatcaaattgatactagctcccaaggcaataagagcttttcccacattgactctgtcaattgaacaaggaatagttacactcctacgaactttatgcttgggt

SEQ ID NO: 10161 - DNA, 250 bp, Glycine max
  unsure (1)..(250): unsure at all n locations
tctcaattaagtaggagtgggagtgaccttangctttggtcncttcctcttcttctcgaagctaacacctctcgcctttgcctgaaaatcgcgaacatcgcgaaggtaaatcctgaccgcgcgtgcgccgaatgggttggtctccgggcggccgccgttcttctcgtaggcggcgccgaagcggtcgatgacggcgtcgaagctgccccaggcttggcggagcgggcagggacatggggcaagtgggttg

SEQ ID NO: 10162 - DNA, 417 bp, Glycine max
gcacctgcagcatgcagctagtgagagattaacgatttttttaattttatggcaagcgcactctgatttcactagagcaggctctttgggtatcaatcttcatgcagctaatcgagttggtatagttgatgggtcttggaatccaacatatgatcttcaggccatctatcgatcatggaggttagagcctgttactttatcccttaatcaaaataagttgccttctgatttaaaaattatctataaaacataaagtttagaatgcgatgcgactgtctcctttacggagaattcttcattgagcacgatcttagctcattgcctttttagaggggtttcccttatttctaacaataagacgtgatagttgagaccttcactccttattacgcgaccgccacattctctttattcttg

SEQ ID NO: 10163 - DNA, 364 bp, Glycine max
  unsure (1)..(364): unsure at all n locations
agaaactcagcttaacattcacttcgagcgtacgttatattatatgacttattagacatccgcgtaaaaagttattggcgnttgagttggctcagagcttcaacattcaatttcaagcgtctcgatatatgacgggactcaatcagacatccgagtaaaaagttattgtcatttgaattggctgagagcttcaacattcaatttcgagcgtctcgatatgtaacgggactcaatcagacatccgagtaaaaagatattgtcgtatgaaattgctcagagcatcaacattcaatttcgagcatctatatatgtgacgggactcaatcaggcatccgcgtaaaaagttattgtcatttgattggct

SEQ ID NO: 10164 - DNA, 372 bp, Glycine max
tgtgtgcattcaatatcctgatgagggtgttccatatgtttttatgactggactttacatctgttgcccaagtttcatggtcttgcaggtgaagatcctcataagcatcttaaggagttccatattttttgttccaccatgaagccccctgatgtccaagaaaatcatatctttctaaaggcttttcctcatttctggagggagtggcaaaagattggttgtactaccttgctcccagatccatctccagctgggatgaccttaagagagtgttcttggagaaattcttccctgcatctaggaccactaccatcagaatagacatttcaagcatcaagcaacttaatggagagagcttgtatgagtactggg

SEQ ID NO: 10165 - DNA, 350 bp, Glycine max
  unsure (1)..(350): unsure at all n locations
ctaagcttactgcacatanaatatataacttgatattagtcttgttttcattaaaactaaaaataaattaagcataatgtttgaatgtggctcaaatcaagatcggctaacactttactataactgaaatgtgaaagacaccgtaccctaccaaaaacgaagacacgttataaacatagaccctttcaaggaatacattttcacttgaagcacttggcatccaaaagagcctcgccctcaaaacgatcataatcttcaatcatctgattgacacgctccttttgagcttcatcatagatgtcaaccttagtccattcggatagctccatgtcatagcattcatcactcac

SEQ ID NO: 10166 - DNA, 350 bp, Glycine max
  unsure (1)..(350): unsure at all n locations
cacgaaattntatgcctcaagtgaggtctaaaatctgaagtgtggttctcaaatgatcaaagttgaatgacaagctcacacatgacctctatttatagcctcagggtgacacaaaataagaggggaatttgaatttctattctaatttcacttgaatttgaatttaaataggtggagccaaatttggagccacaatttcactacttatgattagtgaattttagctatgattcaacccactaattccagatcaagtccaagattcttcactaagtgtgcttatgtgtcatgaggcatgtgaaacatgacagatatgcacaaagtgtgactatatgatgttgtaatgggga

SEQ ID NO: 10167 - DNA, 371 bp, Glycine max
  unsure (1)..(371): unsure at all n locations
cttgatgaanagttggctcactcgttgttttctatagcaatatgtagaatctcaaatttaaagaaagcctttttgagttgagtagccatatggtagtaccttgtcatctgtggatccttgatatgatattctccattcaacttaccagtgataagcttggagtcgctccaacactttagatatttagctcctacttctttagctaatctcaggccagctaagagagctttgtgctcggcttggttattcttggtttcaaactcgaaccttagggactgctctaggattacttcatctgggttttttgagataaccgtagctcaactccctttttcattggatgaactatctacttacaacttccaccactc

SEQ ID NO: 10168 - DNA, 399 bp, Glycine max
  unsure (1)..(399): unsure at all n locations
tcagcattcaattntcagcgtctcgatatattactgtactctatcagacatgagagtaaanagttattgtcgtttgaatttgcaacgaccatcaacattcaatttttagcgtgttgatatattacgcgactcaatcagacatccgagtaaaaagttattgtgatttgaattggctgagagcttcaacattcaatttcgagtgtttcgatatattctgggactcaatcggacatccaagtaaatagttattgttgtttgaatttgcttagagctttggtattcaattntgaacgtctcgatatattacgggactcaatcaaacatccgagttaaaagttattgtcgtttgaatttgctcagagcatcaacattcaatttcgagcgtgtcgatatattacg

SEQ ID NO: 10169 - DNA, 435 bp, Glycine max
agcttctgttataattgcgagcgtctctatatattactggcctcaatccgacatcggagttaaaagttattgtcgctagaatttgctcacagcttctgttctgaattttgagagtctcgatatactacggaacacaatcggacatttcagtaaaaagttattgtcgattgaatttgctcagagcttctgttcttaattacgagagtctcgatatattacgggattcattcggacatccaagtgaaaagatattgccgtttgaatttgctcaaagcattcgttggcaattacgagcgtctagatatattacgggattcattcggacatccgagtaaaaaggtattgtctttttattgtgctcagagcttctgttttcaatttcgagcatctagatatattacaggactcaatcggacattcgagtcaaaagttatt

SEQ ID NO: 10170 - DNA, 380 bp, Glycine max
  unsure (1)..(380): unsure at all n locations
agcttactaaggcacctgttctttctctttctgacttttctaaaacttttgagctagaatgtgatgcctctggagtgggagttggagctgtattgttacaaggagggcaccctattgcttattttagtgaaaaacttcatagtgccaccctcaactaccccacctatgataaagagctttatgccttaataagagccctccaaacttgggaacattaccttgtttccaaggaatttgtcattcatagtgatcatcaatcacttaagtacattagagggcaaagaaagttaaacaagaggcatgcaaaatgggtagagtacctagagcaattttcatatgttatcaaatacacanagggaaaaacaaatgtggtagctgat

SEQ ID NO: 10171 - DNA, 433 bp, Glycine max
agcttattgtcgagtttgagacatatacgtataatagaaactctgcttcaggggttgaccgagtgggaattggtggagttgcaagaaatgtcttgaacttaaaaaacatcttttcacattgctcactcgattgaaaatgttttcgtttcttcagtacttgaagaaaagctttgctttttctgccatttttggtaaaaaaaaaatgggataaggatgctaacatgcctgttaacttttgcacctccttcaaattgtgtggactcctcatggcaactacgacctcacacttatctgggttagcttcaatacctctataggcgatcttgaaacctaatattttccctctcccttactccaaaagtgcatttctctgggttgagtcgcatgttgtgcttcctcagctatgcaaaaatagctaaatcttttggataat

SEQ ID NO: 10172 - DNA, 431 bp, Glycine max
  unsure (1)..(431): unsure at all n locations
agcttcagcaccgaaatttagttaggctacttggtttctgcttggaaggaaatgaaaggcttcttgtctatgaatatgttcctaataaaagccttgattatttcatatttggtacgtctctgaatcactgcatagttagactgcttctctatatttcactagtggttcaagacaaagcctaactattcacacaaaattaaaactgatggatgtatatgcagatccaaacatgaaggcacaattggattgggaaagtcgttacaaaatcattcgaggtataactcgaggccttctataccttcatgaagactctcgagtgcgtgttatacatcgtgatctcaaagcaagcaacattctcttagatgaagagatgaatccgaagatagcagattntggcatggcaagactgtttttggtggatcanactcatg

SEQ ID NO: 10173 - DNA, 363 bp, Glycine max
  unsure (1)..(363): unsure at all n locations
ttgaatgcactattcaatggagttgacaagaacatcttcagactgatcaacacttgcacagtggccaaagatgcatgggagatcctgaagatcactcatgaaggaacctccacagtgaagatgtccagattgcaactcttggctacaaaattcgaatatctgaagatgaaggaggaagagtgtattcatgacttccacatgaacattcttgaaattgccaatgcttgcactgccttgngagagaggataacagatgaaaagctggtgagaaagatcctcagatccttgcctaagagattngacatganagtcactgcaatagacgaggcccaagacacttgcaacatgagagttgatgaactc

SEQ ID NO: 10174 - DNA, 259 bp, Glycine max
atgatttcctttgttccggaaacctttcttttctcatgtgcacccaaacccaatctccgggttcgaagacaaccttctttctccctttgttggcttgtgtagcatagcttttatatttcctctcaattagatctttgactctctcatgaaacttcttcacatagtccgcctctgcttgaccttcttaatgcgtacaaacagaaacattttgcatatgcaaaagatcaaaacgagttagtgtgctaaaaccataaacaac

SEQ ID NO: 10175 - DNA, 339 bp, Glycine max
tgaaacctcaattcctctaatatatgaagttggagcttcctgtgttcaccagctgcatttagatcaaaattcaaaaacttcaatgcttaataagctttgtgtttcaactcaacaggtaagtgacaagatttgccatagaccaattagaagggagttcctcttataagagctctgtatgttgttctatatgcccacagagcttcatctaatatttgagaccaatccttccttaaatgagcaactgttttctttaggatcttcttgacttcattgttagaaattccagcttgcccattggtctgtggatggtaaggtgaggctaccttgtgtctaacacta

SEQ ID NO: 10176 - DNA, 414 bp, Glycine max
  unsure (1)..(414): unsure at all n locations
agcttgtcaagcagtctctctcctatttgtttantatatatgcattcgaacgatataaaaaaaagcaactgagggaaaaagcttctctcctcacatattcaaaacttcaagtattctgtttgttaatatttttaaaataataggttacctacataagtattgtaagtttaggttaattaagattaatacgcattgtaaggttaggttagttattattattaataaattaataagtatgctgttatttgttattaatttttatgtactaacagatatttgaagagtaggttaggttaggttacttagtataaaaatattatttagtttgtagtatatcattttagatttgtagtatatatttgaaggttaagttgtataacaataagtatgttgttattagtttgtagtatatat

SEQ ID NO: 10177 - DNA, 316 bp, Glycine max
  unsure (1)..(316): unsure at all n locations
taccaccataggaagccatggataagagcttgaatgtaggagaagatgagtggagggagagggagagaangagcacgaaattttgtgcctcaaatgaggtctgaactttgaagtgtaattctcaaatgatcaaagttccaaaaaaatgcacacacatgacctctatttagagcctaagtgtaaccncctgaaatattattagtaattatatttgatgttngattatatttgttgggtatttgtgtgctattacacttactcactattgtgttctatagctataaagtttgattgtgaatcatattgaattgttttc

SEQ ID NO: 10178 - DNA, 366 bp, Glycine max
gagatcgtccccttgacaacattatcggtgttatctcaaaaggtgtaacaactagacatgctcttaaagatttatgcaataatatgactttcgcgtctatgactgagcctataaatttatgatgaagccatgatagatgatcattggatagttgctatgcaagacgaactaaatcagtttgagagaaacaatgtgcgggaactagctgagacacctgaaaactaccccatcataagaacaaaatgggtatctaggaataagttagatgaacatggcatactcattaggaacaaggcatgattacttgctaaaggatataatccagaagagggaatcgattactaataaacatatgctccagttgca

SEQ ID NO: 10179 - DNA, 168 bp, Glycine max
  unsure (1)..(168): unsure at all n locations
agctgatgaccatttttatgtctcgagagtttntgctgttcaatttcgagcgtctagatgagatatgtacccgaatcggacatctgagtgaaaagctatgaccattcgaatttgcctagagctttcgttgttcaatttcaagagtctcgatatattatgtgcccaaat

SEQ ID NO: 10180 - DNA, 425 bp, Glycine max
  unsure (1)..(425): unsure at all n locations
agcttgtaaactntatacaagaatgaagctctgataccacttgttggagaagtggcctcagatatcttacgaaggggggttgaattaagatatcacaaactatttccccaattaaaattttattttactttctattcaagttataaattcccttaaaaatgaacttcttaaatattgattcaaatagagcaatttgaatatgaatataaaacaataataaataaaggagtttaagggaagagagattgcaaactcagatttatactggttcggtcacacccttgtgcctacgtccagtccccaagcaacccgcttgagagttccactatcttgtaaaagcctattacaagatctgaaccacacaaggacaacccttcctttgtgttagatttctttacaacaagagaccctcggtctcttaatcc

SEQ ID NO: 10181 - DNA, 434 bp, Glycine max
agcttttatccatggcctcctatggtggtgttcttcttctagactcatcttttccttgaagtggcgtctcctctctctcttccttctccattccgctgccattcatcttccaagaagcaaaggaatccattgatgaagaagatcttaggcctacaagctccaatggagcttacatcagcctctgactctggcttgctttggtgaagggccctcagagctgtataagtttgcatagaactctttcaccaaagccaaatctatgctcccatcaaccaaattggtgaggcgtttatggaaattacacctctccaacttagtcttaaaatcatccaactcggtgtggtagagctccaccttcctctctgacaagatgtttctcgccaggacattatccatgtactggttccaagcatctaaggagtgaaatctccttt

SEQ ID NO: 10182 - DNA, 280 bp, Glycine max
ggcatttttggacaaagtatgacaagcagggggcatgcaaattctcttcccatcaaaccttggatgcaactgagatcgtatccccatctcagctagatcttgacgggtattcaagccatccttcatcttgccttgaatgttaaggagcatcctaatcacattgtcacatacatttttctccacatgcataacatcaagacaatgtctaacgtctagatcagaccagtacgaaagatcaaagaaaatggaactcttcttccatatgcaagtcttactttta

SEQ ID NO: 10183 - DNA, 438 bp, Glycine max
  unsure (1)..(438): unsure at all n locations
agcttccaagagttgaagaggcgantgaattcagctccaatgttaattttgcccgaccctaagagaaccattgaagtgtattgcgatgcgagcgggcaagtcttaaggtgtgtattgatgcaagagggaagggtagtggcttatgcttcacgtcaattgcgtcctcatgaagttaactatccgacctatgatttggaactagcagcttgatggaagcttgcttgtggggcttctatgaaggctggatctttgagcttctatgaggtcctttaatggtgattttccaccatggagatgcagcggaagacaaatgagaataggtgagaggaggcgccatccactatggaataagccttggaagaaggagcatcaccaccaagatgagccttggataaaaagcttggagaggatgcttcaatggaagaaaagaaagaggga

SEQ ID NO: 10184 - DNA, 351 bp, Glycine max
  unsure (1)..(351): unsure at all n locations
tttgttgaaactaaattggaaaacaaaaaattctggcagacaaaaatggatggaaaaatttctccttataccttattttattttatattgttaattaattataatttatattgttaattataatgaagatcaaactttntatattattttaatttatgataaataaaaatttctttcacatcatttaagttcattatatttttataatagtaaataaagatcatactttttaaattattataattataattactatgacctaagtatctacaaaatcgtatgcctatttttagaatngaccatatttactatttgtaccaaatattaaagatgcattattatttttgaatt

SEQ ID NO: 10185 - DNA, 396 bp, Glycine max
gatgcctttaaagtttttaaggctgaagttgagaaacaatgtggtaaacaaattaagatcgtgagatcagatagaggtggggagtactatggtagatacacagaggatggacaacccccaggtcaatttgcgaaattttttcagaaccatggaatggtggccacatcccctatgcctggttctccggatcagaatggggtggcagaacgaagaaatcgaaccttattaaacatggtgagaagcatgaggagtaatgtaaagctccctcaatttttgtggattgatgctcttaagacggctgcgtatatattaaaccgagttccaaccaaggctgtctcaaagacaccttttgaattattcaagggttggaaaccaagtttgcgacatatacgcgtt

SEQ ID NO: 10186 - DNA, 395 bp, Glycine max
ctatcaggacctataaaactcagcttgttgagagattaatgagccttttaataagagggttaagtgcactctgatttcaactagagcaggctctttgggtattaatcttcatgcagctaatcgtgttgttatagttgatggttcttggaatccaacatatgatctccaggccatctatcgatcatggaggtaagatcctgttaatttttcccttaatcaagataagttttcttctgattaaaaaattatttataaaatataaagtttagaatttgatgtgactgtctcctttacggagaattctttcagtgagcagtatcttagctcattggtcttttagaggggtttcccttatatctaacaataagatgtgaaattgagacttacactcttat

SEQ ID NO: 10187 - DNA, 387 bp, Glycine max
  unsure (1)..(387): unsure at all n locations
agcttcccaatcaatcttcgatatctnttatgatcagaataaggctccccctgattgggtagcaattntttatttggatccatgggactatcaattggtctacaatctgacataacagtttctttaagtatgtctaatgcatacttcctttgtgagatgataatcccattttttgactgagcaacttcaattccaataaaatatttaagttttcccaaatccttaatctaaaaatgactaaataaatgttccttccgttgagcaattttttcttggtcatttcctatgatgactatatcatctactcgatgaggtatgacaataaaaaactgaatggtctgcttcactttgtttcatcccaaaagcctgaacatctgagctgaattt

SEQ ID NO: 10188 - DNA, 425 bp, Glycine max
agcttctcatcaatacttgaaagaaaacattataaaaaggtaaaatgaatcaaaattccccaaaaactagcttatgcaattcaactattttagaagttccctcgtttaacttctccaaaaactgaagtgtataagctaattttaactggtaggaaaagttttattcactttacctattcattttcttctataaaatgcttcttgaattttatttccaaactgaacctaaatttgtatatttattacctttccgggtccgagttcatagcttttcttcagacccttggttagaagagtctgcactgttgtttcccattgaacaggtgaggtaacctgccaaatgcataacaggtgcaattatttcccattcatgtcttcttgttagattgaaacaagtatcagtaacatacctggcatgccaatat

SEQ ID NO: 10189 - DNA, 416 bp, Glycine max
agcttcaacattgaatttagagcgtctcgttatattacctgacttattcagacatacaagtaaaaagttattatcgtttgaaaatcctcagagcttcggtattcaatttcgagcgtctcgatatattacgggactcaatcagacatccgtgtaaaaagttattgtcgtttgaattagctctgaggttcagaattcaatttcgagcgtctcaatagattacgggactcaatcagacatccgagcaaaaagttattgtcgtttgaattagctcagagcttcagaattcaatttcgatcgtctcaatatattacaggactcaatcagacatctgagtaaaaacgttattatcgttagaatttggtcagagcttcaacattcaatttcgagcgtgtcgatgtattacgggacttaatcag

SEQ ID NO: 10190 - DNA, 370 bp, Glycine max
  unsure (1)..(370): unsure at all n locations
tttactcgaggaggtgctctaggcccagttaatatagcctattctggtgtttatcagtggtggtatacaatcggtttacgtactaatggggatctttatactggagctctttttctattatttctttctactatatctttaatagcgggttggttacacttgcaaccaaaatggaaaccaagcgtttcgtggtttaaaaatgccgaatcccgcctcaatcatcattngtcaggattattcggagtcagttccttggcttggacaaggcatttagtccatgtcgctattccgggatccaggggggaatacgttcgatggaaataattaattagtatattgcctcaccccgaaagatagggccatttttcac

SEQ ID NO: 10191 - DNA, 430 bp, Glycine max
  unsure (1)..(430): unsure at all n locations
agcttatgctgcaaatatttacaatagaccttctcaacctcagcagcaaaatcaaccacagcagaaaaattatgacctctccagcaacagatacaaccctggatggaggaatcaccctaacctcagatggtccagccctcagcaacaacaacagcagcctgctccttccttccaaaatgctgctggcccaagcagaccatacattcctccaccaatccaacaacagcaacaaccccagaaacaaccaacagttgaggcccctccacaaccttcccttgaagaacttgtgaggcaaatgactatgcagaacatgcagtttcagcaagagaccagagcctccattcagagcttaaccaatcagatgggacaattggctacccaatngaatcaacaacagtcccagaattctgacaagctgccttctcaagct

SEQ ID NO: 10192 - DNA, 419 bp, Glycine max
agcttgtagggttaaagtctcacgattgttacgtgctcatgcttcagttgttagccatggctatacgagacatcttgccaaacaaagtcaggttagcgataactcacctgtgctttttcttccatgctatatgtagcaaagtcattgatcctgtcaagtttgatgagttggaaaatgaggccgcaattatactatgccagttggagatgtattttccccctgctttctttgacatcatgattcacttgattgtgcatctggtcagagaaatcaaatgttgtggtcctgtttatctatggtggatgtacccgattgagcgataaattgcaaaagaagccattgaatttttttcagaatacttagagaatgctaaacctgttggccttcctgagtctcggcatgatgacaaagtggggggt

SEQ ID NO: 10193 - DNA, 306 bp, Glycine max
tcggttttcaatttcgatcatctcgatacattatgttcccaaatcaaacatccgtgagaaaagttatgaccattcgaatttctcgacagcttccattgttcaatttcgagcgtctagatatattatgtcccaaaatcggacatcggtgtgaaatgttatgaccattcgaatttctcgagagcttctgttgttcaatttcgagcgtttcgatatattatgtccccaaatcggaatttcgtgcacaaagttctgaccattcaaatttctctagagcttgcgctgttcaatttccagcgtctcgatata

SEQ ID NO: 10194 - DNA, 355 bp, Glycine max
  unsure (1)..(355): unsure at all n locations
agctttntcttaagcttttgctacaacctttttctccccctnttgtgcaacatcaaaaaagctcaaaagaaaactcgggaannatcaaaccacccagttattaaacaatgggagtnagcaaagatataaagtatcaagagtattaaaatacaaataagccaaaactcataatcaataaaaataatcaaccagaagtcaaataacataaaatgtcaacaaccacaaaatatccaagactgaaacacaagaaaaataagcaaagtacttagcataataatgtagattctaagaaactaaaagccaaaatacacggcttataaaagataaataagcagaatctaaaatctaagaagac

SEQ ID NO: 10195 - DNA, 360 bp, Glycine max
  unsure (1)..(360): unsure at all n locations
tgaaggagtttattgcatcagggaacaatttcactttaaaagtgggttctaattggattcctaattttcaacttacctatttggatgtgacatcatggcagataggtcccaactttccatcgtggattcaatcacaaaacaaacttcaatatattggactgtctaacacggngattttagattctattcccacttggttctgggaaccacactctcaggttttgcatttaaacctctctcataatcatatccatggtgagcttgtgactacattacaaaatccaatatctatccaaactgttgatctaagcacaaatcacttatgtggtaaattaccctatctttcanatgatgtgtatg

SEQ ID NO: 10196 - DNA, 301 bp, Glycine max
atggaggctctggtctcttgttgaaactgcatgttctgcatagtcatttgcctcaaaagttcttcgagggaaagttgtggaggggtctcaactgtcggctgtttctacggcttgcgctgttgttggattggtggaagaatgtattgtctgcttgggccaacatcattttggatagaacgaacacgctgctgttgttgttgctgagggctagaccatctgagattacggtgactcctccatccatggttgtatctgctgctggagaggtcataactgttctgttgcggctgattatgctgct

SEQ ID NO: 10197 - DNA, 384 bp, Glycine max
agcttataatatattatacactcgaaattaaacatcagaagctctcgagaaattcaaatggtcataacttttcacccggatgtccgattatggcgaatcacatatcgagacgctcaaaattgaacaacggaagctcttgagaaattctaatggtcataacttttaactcggatgtccgactcaggcgcatcacatatagaggcgctcgaaaaggaacaacggaagctctcgagaaattcagatggtcataactttccacactgaggtccgattcaggattataatatatcaagacgctcgaaattaaacatcgaaagctctcaagaaattcaattggtcatcacttttcacacggatgtgcgattcgggcgcataatatgtcga

SEQ ID NO: 10198 - DNA, 407 bp, Glycine max
  unsure (1)..(407): unsure at all n locations
agctntagaaaaaaatgttaactaaaatattattgcctagtttcactcaccaattatgtaatagccctgatgctcatgcagatcctttaaaaaccaaattaccgttggatccgttcttcacttataatntatgntaatttatgaaatcttggaggtgagatgtatgattgaattttataagagtataataaatgaacacattattaaccatttttagactattataattaaaataatgtttccagtataaaaaaatatttctggctaccttactgcagaagattgttactgctaaatggaagactgctacagcagaagagaagaagccttatgaggggatataccatgcggngaaagaagcttatttgcaggtgattgcaaaggaaaaacgtgaaactgactcaatg

SEQ ID NO: 10199 - DNA, 410 bp, Glycine max
gcttgatacatgctgaggttgctccttatcttcaaaacaaggtggttgcttcacttatacttcttcattaatgaatccattcaaaaaagcactcttgacatccatctggtatatcttgatatctttgtgtgtagcataggccagaagtattctaatggcctttagtcttgctactgatgcaaaagtttttcattgtcgatcccttcatgttgattatatccttgagccactagtctttccttgttactaactactttatcttcattgagatttctcttaaagacccatttggttctgccataccctaattctgttcggggaccatcgtttgatggcatgcaacctttgcttgaccgcttcgaggtatctggcacccatctgtgcacaatacataaagttccataacgtgc

SEQ ID NO: 10200 - DNA, 384 bp, Glycine max
  unsure (1)..(384): unsure at all n locations
ctaagcttctatgaaggttcgttcctaatttctctacaattgcatcacctctcaataagctagtgaagaagaatgtggcatttacctgnggtgaaaaacaagagcaagcctttgctttgctcaaagaaaagcttactaaggcacctgctctagctcttcctgacttttctaaaacttttgagctagaatgtgatgcctctagagtgggagttggagctgtattgttacaaggtgggcaccctattgcttattttaatgaaaaacttcatagtgccaccctcaactaccccacctatgataaagagctttacgccttaataagagccctccaaactttggaccattaccttgtttcccaggaatttgtcattcatagtgatcatc

SEQ ID NO: 10201 - DNA, 435 bp, Glycine max
  unsure (1)..(435): unsure at all n locations
agcttgtatacatgctgaggtttctccttatcttcaaaacaatgtggtttcttcacacatacttcttcattaatgaatccattcaaaaaagcactcttgacatccatctggtatatcttgatatctttgngtggaacataagccaaaagtattctaatggcctttaatcttgctactgatgcaaaggtttttcattgtcgatcccttcatggtgattatatccttgaacccactagtctttccttgtttctaactactttatcttcattgagatttctcttaaagacccatttggttctgccataccctaattttgttcggggaccattgtttgatggcatgcaacctttgcttgaccgcttcgaggtatttggcacccattgttgcacaatacataaagttccataacgtgccagaagtcaaaagagagcattg

SEQ ID NO: 10202 - DNA, 403 bp, Glycine max
  unsure (1)..(403): unsure at all n locations
ntatactaggatgtttgattgagtcccgtaatatattgagacgctctaaattgaatgttgaagctttgagcaaattcaaacgacaacaactttttactcggatgtctgattgagtcccgtaatatatcgagacgctcgaaattgaatgttgaacctctgagccaattcaaacgacaatcactttttactcggatgtctgattgagtcccgcaatatattgagacgctataaattgaatgttgaagctttgagcaaattcaaacaacaataactttttactcagatgtctgattgcgtcccgtaatatatcgagacgctcgaaattgaatgttgaagctctgagccaattcacacgacaaataacttttactcggatgaatgattgagtcccggaatataacaa

SEQ ID NO: 10203 - DNA, 425 bp, Glycine max
agcttcaacattcaacttcgagcgtctcgttatattacaggattctattagacatccgagtaaaaagttattgttgtttgaatttgctcaaagcttcaacattcaatttcgagcgtctccatatattacgggactcaatcagacatccgagtaaaaagttattgtcgtttgaatttgctcaaagcttcaacattcaaattcgagcgtctcgttatattataggactcagtcagacatccgagtaaaaagttattgacgtttgaatttgctcagagcttcaacattcaatttcgagcgtgtcgctatattacgggactatatcagacatccgagtaaaaagttattgtccgttgaatatgctcagagcttcaacattcaatttcgagcgtcttcatatattacgggactcaatcagacatccgagt

SEQ ID NO: 10204 - DNA, 396 bp, Glycine max
  unsure (1)..(396): unsure at all n locations
agcttaaactattaatctcttaacagatatacttcatgtgtggctgtgatcgttccgagtggtgaaattacggttntgtccttttccttttctgatgcaggtacttcttgaacgtgattntcaacattcttaacaagaagatctacaattacttcccctatccatagtaagttatagcgattatgcgtattttcaactttgtgtggtgttagctcatgaatatcatgtcttgatgttaattgagattggatccgtgaaatgttatgcgcagacatgtgtctctgtcctttgttaacgtcggatggtaagtgaataaggtttttttttattttttattctgaattgtgaataaggttaattaaaggaaatatctcgattcgcgtttctggattatta

SEQ ID NO: 10205 - DNA, 400 bp, Glycine max
acacttaaactcaagcttgagcattcaatggcataatgcactctttgtccgattcatgcacataatttatcgagacgctctaaattgaacaacggaagctctcagaaaatttaaatgctcataacttttaactcggaggtccgattcaagcggataatatatcgagacgctccaaattgaacaatggaagctgttgagcaattcaaatggtcataaatagtcactcggaggtccgattcaggcacataatatatcgagacgctcgaaattgaacaacggaagctctcaagaaattcaaatggtcataacttttaactcggaggtccgattcacgcacataatatatcgagacgatcgaaattgaacaaccgaaactcttaagcaattcaaaagggcataa

SEQ ID NO: 10206 - DNA, 394 bp, Glycine max
cgctttaattgaagtgaaacactttagttaacgaggttctctttcttgtttatagctaccgtgaatttttattctgacaacaacaactaaaactaatcggccatgcatggggtagaaagaacgaagctcttgaaatttatactaatttggcccaagtacgaaataataataagaagataaaaacacttaccggaaaaagtaaatctaatgattccctggctgcatgtcgaacggctctagtgggatacattggaccaccaggagaagtaaagctatacaaacaagttttcaatctcgtactagtagtcattctcaattccaagcctgtgccgttaacataaacacaagaatggcatagttaagtcatgagatattaatagtccctgtccaaata

SEQ ID NO: 10207 - DNA, 336 bp, Glycine max
  unsure (1)..(336): unsure at all n locations
ttcaattggagcagtatgtgggctgtcatggccagttgacagatttatatttcaggttcttgatgactcaacaaatcaatccttaaaggtatccaattaatccagtaaagcttcattgcagattccatatgcatctgttgggtgcaaatttacagtaattaagtgttttcaaacatgcaagaatgtgtccaaatggagtgtcaaagatggatacaaaaaggcgtgaatgtcaaatatgaaacaaggacaaatcgcaatggttacaaggcaagtgccatgaaggacggtttggagaatgaatatngtcatgattgcgagaatgtaacaatatttgat

SEQ ID NO: 10208 - DNA, 256 bp, Glycine max
ttggtcaatttcagactgccatattttttgacatgttgtgtgcgattgaggcacatgatatatcaagacgctcggaattaataaacaaaggttctaaagaaattaaaacggtcataacattgcagttggatgtccgattcatgcacataatatattgagacgctcaatactgaacattaaagctctagtccaattagacggtcataactttttgacatgggagtgcgattgaggcacatgatatatacagacgctc

SEQ ID NO: 10209 - DNA, 394 bp, Glycine max
  unsure (1)..(394): unsure at all n locations
tacattatgtgcctgatttcttttccttcatttgatgataaaggaacaattaatgtgttatcatggcaaggtcccatttgctcgtctctctaaaaagtgttcacaggagatgcttaattataataatggtcaatgggtattaataatatctaataaatactgataaaaaaagtatctaataaatctttaaatatattaaaagataaacaacaaattttatattttaataaatacattctattaatgtatttggtttgttaactaacactctaaagaaaatggtcataatactctcttgaaaaanatatatttatgtttattggaattaatatatatcaactcatgtatttttctattagtagtataaagtgaaacacataagagtaaatcatac

SEQ ID NO: 10210 - DNA, 308 bp, Glycine max
  unsure (1)..(308): unsure at all n locations
ttatcaaatggatgttaaaagtgattttctaaagggcttaattataatgaagtatatgnngaacaaccaccaggttttgaaatattggataagccaaatcatgtttataaattgaaaaaggctttatatggcttgaaacaagcccctagggcttggtacgagcgtctaagtaagttccttttagaaaaggacttttctagaggaaaagtggatactattctttttataaagagaaaatcacatgatattttactagttcaaatttatgttgatgacattatttttggatccactaacaaattgttgtg

SEQ ID NO: 10211 - DNA, 402 bp, Glycine max
  unsure (1)..(402): unsure at all n locations
ntcaaattcttacctaccacgtaccttagaagttgttatagagtttgatttaccagaatgacggcatagcacatgggctcaagatttctctcacccatcctttttccatcaagctctccgctttcctttggatctcttttgtctcttccaaattgcttctatatgctggcttatttggtaaggaagctcctagaatgagatcaatttggtgctctatccctctcaaaaaatgtaacccatgagggttgtctttagggaagacatccccaaactccttcaataatccttccatacctataggcaaagcaatagaataaaaacaataatcatggggcattagtaaatacataggtagcctagctagtatcactctctccacctctttctctctcatgaacaagc

SEQ ID NO: 10212 - DNA, 359 bp, Glycine max
  unsure (1)..(359): unsure at all n locations
agcttagctacactttcctctctaatagtttatttcacctncttgagatgagaagctagagcttagctacacacccccttataatagctaagctcacccccatgacaaaatacatgaaaatacaaaaaaagtccctactacaaagactactcaaaatgcctcgaaatacaaggctaaaaccctatacaactagaatggccaaaatacaaggcctaaacgaaggaaaaaaaacctattctaatatttacaaagataagcgggctcatacttagcccatgggctcaaaatctatcctaaggctcatgagaaccctagggccttcccttggatctctggcccaatctacttggagtcttcta

SEQ ID NO: 10213 - DNA, 392 bp, Glycine max
tgtaaattaaattgagtctaatagaaaaaagaatttcgttttataaactataaataacatttttacactctcatacttgatgaaagattcaagtaaaaaaaatgcttattgtaaagcattatagttaaattagacccatgaataatatttaggaaaaattgcaattgcaatggcacttttaatttataaaaaacattcacctccttttgaatgatttttttaagattatgattttttaaatgacgagtcagtaaaaaataattgtgtatgatttttaaaaaatttaaaaatcaacaaacttttattataattcgtaatttgatatcattgcatatactaatagacatttatattttattatgaaaaatttattaaaaacaatcaaataaata

SEQ ID NO: 10214 - DNA, 408 bp, Glycine max
  unsure (1)..(408): unsure at all n locations
taagtcacctgcggcgtgcagctcaactttatacccttccattgttttgttctacttacatggacttgatggggcctatgcaagttgaaagccttggaggaaagaggtatgcctatgttgttgtggatgatttctccagatatacctgggtcaactttatcagagagaaatcagacacctttgaagtattcaaagagttgagtctaacacttcaaagagaaaaagactgtgtcatcaagagaattaggagtgaccatggcagagagtttgaaaacagcaggtttactgaattctgcacatctgaaggcatcactcatgagttctctgcaggcatcacaccacaacagaatggcatagttgacaggaaaaacaggactntgcangaagctgctatggtcatgcttcatg

SEQ ID NO: 10215 - DNA, 470 bp, Glycine max
  unsure (1)..(470): unsure at all n locations
gcaagcttagtcctagaagggacggaccttnttgtgtttagagaggatctataacaatgcctatagattggacctcccagaagagtatggagtcagcaccacttttcacatttctgatttaattccttttgcaggtggagctgatattgaggaggaggaacaaacagatttgaggtcaaatcctcttcaaggggaagggtatgatgctatcctccctaggaagggaccagtcactagagccatgagcaagaggctccaagaggctagagttgctgaataaggccctagggttctcatgaatctcaaggtagatttctgagcccatgggccaaggttgggtctgttagtgcttagctntactaagctntaaaagattggctaagaatttgttaaaacataagcacttanacaatgatggaaagctggagttgctgcacatgatgtccaacgttatgtcaaagaataagatc

SEQ ID NO: 10216 - DNA, 416 bp, Glycine max
  unsure (1)..(416): unsure at all n locations
tctcgggctctngcacacctattttaaagtccttcttatgcttttgacctttctctttaggggctacattttgttcaccaacttttttcttgaaacagaagaacactactaagagacctggaagaaacagcaatgtgacaccccccaaaactattgctattgttgctcccttgctcattttcctgtttgatagatcacttggtctttgagagactgttggtggagacaatgtggtcttaggggaaactgaataacattgtttcaaaggtgctccacataacatcaaattccctctatatgaggaggcaggaaacttatggagacctgaaggaatagatccattcaagtagttgaagctcanatccaaatccttaaggctaggaagggtaacatcaggaatacgtcctgtgagagag

SEQ ID NO: 10217 - DNA, 324 bp, Glycine max
  unsure (1)..(324): unsure at all n locations
ctcctcatcaaagagnttatcatccacattaaacaattggcttactagttgattgaacttgttgatgtggccatggagatctccttccatctctattttgagttgatacaactccatcttcaaacaaaggcaattggtaagcgactttgatgcatagatattctcgagcttctcccacaaagtcttcggtgttgtctccttcaacacattgtgttgtatctcgggagcaatgactaacggaatcgtgctcacaaccctcctttggatcttagtccactcagtttcatttatagaagccagcctatcatcttctaacgcctgatc

SEQ ID NO: 10218 - DNA, 422 bp, Glycine max
  unsure (1)..(422): unsure at all n locations
ccttatctttatcagtaacaagcacatttccattcacaggtttagcgacatcaacatcatcacttgagccctcactttcaatgtttccattatccagtaatatcatgcctcttttatttggacattgagaagcaatatgaccaactccttgatacctgaaacatttgatatcatgggatctagaagatgaattaatttccattttacctttaggtgcagcaaatgaatttttggacttagcttcatcttttgactttgtcatagattttttgttttgccaatttgacttccatgaataagtggaatcaaatttggaagtactcttagctntcaattgcctctccacttgaatagatntatgcagcaagtcctctatctccacataatgatgcaattctaccacattagttatctcctccttt

SEQ ID NO: 10219 - DNA, 447 bp, Glycine max
  unsure (1)..(447): unsure at all n locations
catgcaagcttccttaagaagattcctaaagaagctatatcttagctatacacttctctctaatagctaagctcacctcattgagatgagaagctagagcttagctacacacccnctataataactaagctcacccctatggcaaaatacatgaaaatacaaaaaaaatctctactacaaaagactactcaaaatacctcgaaatacaaggctaaaaccctatactactagaatggccaaaatacaaggcccaaacgaaggaaaaacctattctaatatttacaaagataagcgggctcatacttagcccatgggctcaaaatctaccctaaggctcatgagaaccctagggccttcccttggatctctggcccaatctacttggagtcttctatccaatgcccttgcggngtaggaatgcatcactaagtctccagcattggtttc

SEQ ID NO: 10220 - DNA, 491 bp, Glycine max
  unsure (1)..(491): unsure at all n locations
agtcacctgcggcatgcaagctctccctctntgaacaaatacccctcttccaaatagaatccttcttgtgcctttttcccacaactctcataaatgggagagaaatgttcatctaaagcatacaagtccctactattatcaaatcctaaaatttgagctcctagggagcaaaacaatgtgtgtctcctagagagggcatcagctaccacatttgtttttcccttnttgtatttgataacatatggaaattgctctaggtactctacccattttgcatgcctcttgtttaacttgctttgccctctaatgtacttaagtgattgatgatcactatgaatgacaaattccttggaaacaaggtaatgttcccaagtttggagggctcttattaaggcataaagctctntatcataggtggngtagttgagggtggcactatcaagtttttcactanaataagaaatagggtgcccaccttgtaacaatacagc

SEQ ID NO: 10221 - DNA, 267 bp, Glycine max
ctaagttaaactgaggttcatctgtagatccctcatgtaagactagactcagctcaagtagcttactaaagtttagcctaatttagcctaagcttcgtctgcgatggtgtaatttttacgaggaggtggctcgcggtggtggcggtggacagttctgatgatgagggtgaagaaactgacgaggaatgcatacacaacgagagtgccacgtgtctaaatgaagacctaacgactaacaatgatgcagcccagatatatggaccttta

SEQ ID NO: 10222 - DNA, 436 bp, Glycine max
  unsure (1)..(436): unsure at all n locations
agcttctntgcacttttttcatttgaatttcttaattagntntggacattactttgtttgacataggaagatgccatgtttcatttgcttgacttgaagtccaaggaagaaggacaattctcccatcatagacatctcaaattctttntgcataaagttggaaaattccttacacaaagcttcattaatagcaccaaagattatgtcttcaacataaatttgcacaatcaacaactcattatttgatctcttgataaacaatgttttgtcaacttgacctcttacaaaagatttcctaattaggaaattgctcaatctttcaaaccaagatgtaggttcttgttttaaacaataccgagccattttcagcttgtaacatgattagatgtgtgaagctacaaacctagaggtggctacatatatctttcttcatgat

SEQ ID NO: 10223 - DNA, 369 bp, Glycine max
tagactaagttcagcctaccatcctcagactgattttctactgaacagacaattcaatcgtcggaggaccttttgagggcatgtgtcttagaacaaaaggggagttgggagagttatttgtcgttgatagagttcacctataaagacctatatggtataaggtgtaggacacccctacgctagcttgagcccaaagagaacctcaccttagtgcctgaagtggtaccataaactactgagaaggttaagttaatccaagagaggatggtgactgctcagagtaggcagaaaagctatcagggcaagaggaggaaagtcctggaattcaaggttggtgatcatgtattcttaagagtcactctatggact

SEQ ID NO: 10224 - DNA, 380 bp, Glycine max
  unsure (1)..(380): unsure at all n locations
gaacttaaatctcagcttaacactcgtttgatgggtgcaccatcttgcttgttgggtgcgtgnaacaaagccccattatggaatggacatacatcaactaccatagaatggactgaacttagtttattgggaccgataataatagtcgcttacaacacttgtcgtaaacttgtaaaaacagatgtaatgaattttgtagggagataattacattatttcaaaaattaatatataagtatattttccttgaattatacattgtcgtatatgataaaactgttgattttaataataattatagtaaaatcatattgatgatatatcttattaatcaataatgcggataaaaatatatatttacttaacttacatttaaaaga

SEQ ID NO: 10225 - DNA, 343 bp, Glycine max
  unsure (1)..(343): unsure at all n locations
ttgagaaaattcaaacgacaatttctnntttctcgtttgtcngacngagtcccgtaatatatcgagacgctcgaaatggaataccgaagccctgagcaaattcaaacaacaataactttttactcggatgtctgattgagtcccgtaatatatcgagacgctcgaaatggaatgctgaagctctgagcaaattcaaacgacaataactgtttactcggatgtctgattgagtcccgtaatatatcgagatgctcgaaatggaatgcagaagctctgagcaaattcaaacgacaataactttttactcggatgtctgattgagtcccgtaatatatcgagacgc

SEQ ID NO: 10226 - DNA, 384 bp, Glycine max
  unsure (1)..(384): unsure at all n locations
accgagcagntctaataagaacgggaattttaatattcnttcgccnngcagacanataacgggacattttaggattccatttttttagtaccgcggccaaaatgaactcctgcttccatcatctcttccaagattatgtttcaatatctttttgtcatgtatatttattcccacacttttctttcatttcaaaatcgagattctatatattttttgaactgaaagaaagagaccccatataatgaaatggaaataagtgttccaaaggaacctcctctttaaatgatcgggccaagcatatgagcatgagtagtaggtaaaatatattacttctcattcgtataaaaattaacagataccgatatgtgtgaatcaataatattc

SEQ ID NO: 10227 - DNA, 392 bp, Glycine max
  unsure (1)..(392): unsure at all n locations
aactcaagcttcttagtttcagatgatgcagatgggtttggagctttctcatgcattctctctaatgactatggcatcatttctggcgctaaactgctgggagttggaggccatcttctcaattaaatttctggcttcagcaggagtcatgtctccaagggctccaccactggcagcatctatcatacttctctccatattactgagtccttcataaaaatattggagaagaaactgttctgaaatctgatggtgggggcaactggcacatagtttcttaaatctctcccagtactcatacaggctctctccactgagttgtctaatacctgagatatccttcctgatggctgtggtcctggaatcanggaaaattttttctaagaatactc

SEQ ID NO: 10228 - DNA, 394 bp, Glycine max
tcaagaaaaagatggcctcagcaaatttcttatttttttattggaattctatcaatagacctccaatctttaatggagagggttaccactactggaaaacccgaatgcaaatttttatcgaggcaatagatctaaatatctgggaagccattgaaatagggccttatatacccaccacagtagaaagagtttcaatagatggtagttcatcaagtgaaagcataaccatagaaaaacctagagatagatggtctgaagaggatagaaaacgagtacaatacaacctaaaagccaaaaacataataacatctgccctaggaatggatgaatatttcagagtttcaaattgcaagagtgctaaggaaatgtgggacactcttcgattaacacatga

SEQ ID NO: 10229 - DNA, 465 bp, Glycine max
  unsure (1)..(465): unsure at all n locations
gcttcctcaggagtcacaatcttcattcttcttgtaagacatctttttatcgcatatacattagtggatattgcctctccctagtagcaatgaggcaatcctattcctttcaacatacatcttgccatatcaagcaaagttttgtttctcctctctactaacccattgtgttgaggagtatatggggttgtcacttcatgttcaatgtcttttatcttacaaaactcatgaaaactccttagaattatattctccccctccatcagtccttagaatctttaattcatgaccactttgtctttcaaccagtgcacaaaaattcacaaatactgaaaacacttcactcttttcattaagcaagtacaaccacacctttctagttaattcatcaacanaggtngtgaaatacctgtttcccccaatgatggagtcttaattggaccacacacctatgaatgaaccact

SEQ ID NO: 10230 - DNA, 411 bp, Glycine max
acactcaagcttggttatctccttcttcactacaacaagaatcaccgggttgagtcttctttgtggctgtcttactggtttagctccatcctctaaatttatttgatgcatacatgtggatgggctaataccaggaatgtccgtcagggtccaacctatagccttcttatgcttcttgagaactgacaacaacttctcctcttgctcatcagcaagggaggcagatataatcactagaaaactcttgctatcatccaagtaagcgtattttaaatttgatggcagagacttcaattctggtgtggtcggctggacagtggtagaaggagatggtttctcagcctttacctcataaagaaagtcagaggtatgtgtacttcccgaaacatggttagtcctatctgactctat

SEQ ID NO: 10231 - DNA, 430 bp, Glycine max
  unsure (1)..(430): unsure at all n locations
agcttcttattcatattttgttggtacatattgcttnttattcacataacaccaatagtattccatttataagcagagattgacgattcaaattacatatttataagagaccaaccaaacacaaagcaaccacagcttataacacccgtaacaaatcctagaacatttgaatttgcaaaggcgggccatgaccactttattctaaaacttcaaacacaacacatacttattatttattgatacatgtattacagctatctctgcttgaaggttatgcatgttgatctcacttgcagctgcatgggtcgcaagtgcagtttgatccacagttgcagccaccgttctcagctgcaacacccatttcagcaccctcgaattgggccttcaccggcccaacacccaaaactagagtctcatttgtgatcttctc

SEQ ID NO: 10232 - DNA, 429 bp, Glycine max
  unsure (1)..(429): unsure at all n locations
agcttatgacaatttgaaattctcgagagttttctatgattaattntgagcgtctcgatatattataagtctgaatcggacctacgtgtgaaaagttatgaccatttgaattttttgagagattccgttgttcaatttcgagcgtctcgatatattatgcgcctgaatttgacttgcctgtgaaaggttatgaccatttgaatttctcaagagcatgcgttattcaatttcgagcttctctatatgtgatgcgcctaaatcagacatccgggttaaaagttatgaccatttgaatttctcaaaagcttcggtagttcaatttcgagcatctcgatatattatgcgcctgaatctgacatccgtgtaaaaagttatgaccactttagtttatcgggagctttccgttttcaattgctagcgtctctatat

SEQ ID NO: 10233 - DNA, 405 bp, Glycine max
cttacttagtcatatggagatcccaaatgcacaaggttgagacatccttatatacgccttcttccaaatcaatgccaactttggcatttccagatgcatgttctgcatacagagaagatatgatctccattgcattgaacccagcattctcagccaaagttctaggaatcatttgaaaacttttagcaaattttgctataacatattgatccaacctgcagggccattgaaaatgtttagtccatcccattcccgtgtcaaataccaaataagcattgaacaaaataaattaagtccaatgaatagagacaataagtatttccaaataatacacagtaatggtgccgggttaaaaagcatctagtgaatagagatagtaactatttccaaatattacacagtaat

SEQ ID NO: 10234 - DNA, 390 bp, Glycine max
tggaggacaaaacaaagtagtgtacaagttcttggttctatggcataccgtgctcctcagcatttgtctcggtgtctccctaagattgttcccaaattggctgaggtataacatgaagcaaacattatttttcacttctaaattccttttaagctatagattgcattaccttaacccatctcagtatttgaaggttttgactgatacacatcctaaagtccagtcagctgggcaaatggcccttcaacacgttagtcttgacttacgaactattctatccatttgattcctgcttgcttctgtgattaatgtttttaattttcatgttttttccaggtagggaatgtgatagagtccagaaatatctggtcttgtccctactctacttaa

SEQ ID NO: 10235 - DNA, 454 bp, Glycine max
  unsure (1)..(454): unsure at all n locations
tgcaagcttgaggcgtgaacccaccatttttagtattataacacctgttatgtgtctactatcattgtaatcatctccttctccaccatttgnggcactacttgagctgccaggtccttccacctctgggcgtattcctggaatgactcatgccccttcttgcacaagttctatagttgcactctatccggagccatattagaattatagtgatattgcctaacgaacgcaaccattaggtccttccaagaatggactcgagaaggttttatattagtataccaagtgacaaatgctgattcatggggcaagtagtccccttatacttatcaaagtccaagaccttaaacttcagaggaatgatgacatcaggcactagtcacaactccgcctccttcaatggccctcagcctntcctctatatgatgcaaatttccgctttctaccatagcaa

SEQ ID NO: 10236 - DNA, 454 bp, Glycine max
  unsure (1)..(454): unsure at all n locations
agtctcacgattgttttatgttgatgcaactatttgttagccgggctatacgagacatcttgccaaacaaagtcaggttagccataactcgcctgtgctttttcttccatgccatatgtagcaaagtcgttgatcctgtcaagtttaatgagctggaaaatgaggctgcaattatattgtgccagttggagatgtattttccccctgccttctttgacatcatgattcacttgattgtgcatctcgtcagagaaatcaaatgttgtggtcctatttatttgcagtggatgtacccagttgagtgatacatgaagatcttaaaagggtatacgaataatctatatcatccaaaagcatctattgttgagaggtacattgcagaagaagccattgaatcttgttcagaactacattgaaaggctaaancctgtggccttcctgagtcttgacatga

SEQ ID NO: 10237 - DNA, 446 bp, Glycine max
  unsure (1)..(446): unsure at all n locations
agctngacatctatatctataatttgttttatttatttaaaatttagtgttcaaatagtataaaaatggatttatatttctaatattaatagtttaattcgctttctcgtttatattttcatgttactattatccttgtatattgaattntaaaattgtattagaaaaaattatttaatatttcacattctaggtttatactaccatcaaataatgtttaatttactataatataatttatagtgattttaaataacagctagtgtacttaatgtttgaagtcccagtatatcaacattgttgtctcaacaactacatttcatatttgtttatgaatgtatctgatgaaagagtctgtcttatatatgtgagaacaagagaataactaatgactattaaattctattatcagtagttgagattagaaacaatctagctaaatgact

SEQ ID NO: 10238 - DNA, 343 bp, Glycine max
tcaagcttgctcgtcttgctgatatttatcatgcagacttttctgatgatgttcgatatcaattagggatcaacttgaaacttatgtgcttcaagtgagaagaaatgcttctttttccacttgtgaagatgttcaaagtttggctatgaagatggttcaaactgagaaacatttggtatttccattggtttataaacttattgagctagctttgatattgccggtgtcgacaacatccgttgaaagagctttttcagcaatgaagattatcaagtctaaattgcgcaataagatcaacgatgtgtggttcaatgacttgatggtatgctacaccgagcgggag

SEQ ID NO: 10239 - DNA, 353 bp, Glycine max
  unsure (1)..(353): unsure at all n locations
gagaattgcactaagcaatcactacgcatggctccaagctccacggtgaaggacgcatgaactaaatcgccattcatggggctcccgaaaagggttgaggatggcgaattgcactaagcaatcactatgcaatgctccaacctcctgcgtggaggacgcatgaactgaaacgcaattcatggcgctcccaaaaagggttgaggatggagaattgcactaagcaatcacttcgcatggctccaagctcgtgggtggaggacgcatgaacgaaaacgcaactcatggngctccgaaataggattgagaatggagaattgcactaagcacattacggcacatggctccaaactcat

SEQ ID NO: 10240 - DNA, 410 bp, Glycine max
  unsure (1)..(410): unsure at all n locations
ntccatgaagaagaagtttggaggtataggattntgtaatctctatggattcaacctagccatgttaggaaagcagggttggaatttgattaataacccacatactacaatttataaaattctcaaaaataaatattatccaaatgttggattcttagatgccaaactagggcataaaccaagctatacatcatatagtatttttgcttcacatatattggtcgaagaaagcaattagtgcagaaaaagtgatggtagctctataaacgtttggacccaaccttgggtgtgagcatcaacaagcccatatatcacttcatcaaccctgctcgatcttgatgatctcaaagtcagttcactcatcgacaaccaacaacgatgttggcgtcaagatgtgctacaacaaattt

SEQ ID NO: 10241 - DNA, 418 bp, Glycine max
  unsure (1)..(418): unsure at all n locations
gctcgccgccacggagttnttcgactatgttcttgtgtggnggttctatctacaaaaggagagagcaagaaatgaagagccaatggttgatacatgggtagagatgaaaaggatcatgaggaagcggtatgtgctggctagttactcaagggacttgaaattcaagctccaaaaactaacctaaggcaacaagggggttgaggagtatttcaaggaaatggatgtgcttatgattcaagcaaagattgaagaagatgaggaggtaactatggctcgatttcttaatggtttgactaatgatatctgtgatattgttgagttgcaggagtttgttgaaatgggtgatttgcttcacaaagcaatccaagtagagcaacaattaaaaaggaaaggagtggctaagaggagttctaccaac

SEQ ID NO: 10242 - DNA, 352 bp, Glycine max
  unsure (1)..(352): unsure at all n locations
aaactcacgcttagatgttctaaatttntttattatgtgatattatttcccattttctatactatgctagcaaacatgaatttaatgtattgtttaaaatataatatttatatttttgaaaaatctcaatgtacttatatttatattattttgatttagatgtttataatgtttatgtggaaaaccttttttttagagtatacattttcattgtaatttcatttgtaatcttgtttagtttctctgtaacagttagtttttcatttatgatttagtttcttgctgactcagcagttagacacttattttttttaaatatttatattattggatcagtaatttgaaacacaag

SEQ ID NO: 10243 - DNA, 410 bp, Glycine max
atctggtccctaaaaaggatgggacatggctgtataagcaagcttcatgatgatgaatcaagatcgagtcatggagttttgatgatgccaaagaatcaagagtcaagcaaattccaaagattcaagaatgaagctccaagaatcaagatcaagattcaagactcaagattcaataatcaagagaggactcaattaagataagtattaaaaagttttttcacaaactgagtagcacatgaatttttctcaaaaccttttaccaaagagtttttactctctggtaatcgattactagattattgcaatcgattaccagtagcaaaatggttttcaaaaagcttactaactgaatttataacgttccaattaatatcaaaatgctgtaatcgattacaagtattttgtaatcg

SEQ ID NO: 10244 - DNA, 246 bp, Glycine max
  unsure (1)..(246): unsure at all n locations
gcttctgggctgagctnggaatngacattgttattgaggtttattccccatttcttgacttatttcaaacacgatccaatattgtttacttattgaagagctcctaaaaagaacaatgagtgagattttgttcacggaaccggagtgtttgtggatggccctgtggctggcgaacacatccaagcacgtgctaaaaaggttatcatcactgctccagcaaagggtgctgatattccaacttatgtt

SEQ ID NO: 10245 - DNA, 417 bp, Glycine max
  unsure (1)..(417): unsure at all n locations
catacttcatatggatcaactttcacngttattgttttggatcgccaaaaaaaaaacaatttataatataatttattctaattcatgtataaataaaaataactatttttataatgtttaagagaattaattgaaataatttaattttgttaatctgaagtaaaatataaaattattcctaaaatgtcattatttgaaatttgatatcatgaataaaataaaaattttgaaaatacaattgtaattaaacaaagaatgttttaagaatcatattattaattatggacaaaattatttgagtccaacatacaaattaaaataactgttttgcttatatataaatgcaaaaaactacaaactaaattaaatcaaaccaaacaaattaaatataactattttggatttaattttattttt

SEQ ID NO: 10246 - DNA, 422 bp, Glycine max
  unsure (1)..(422): unsure at all n locations
ntatgcaagtcaattntcaggaggcatctcggagagaatctttntcggacttatntgcgcaaaatctcttgaactaggaagatgttgtccatcatctttctgttcttaatgaaagcagtttgagtttccccaataatagtctcaagcactggggctatgcggttggccagaattttagacacaatcttgtataacaaattacagcaagatatgggtctaaaatggttaacctgngaggcctgatcatgcttaggaataagcgcaataatagcatggttgagctactttagaatttttccagttgtaaagaattcattaaccgctgcaaagatatcatcaccaatgatattccaagccttcttgaagaataaaacattgaaaccatctggcccaggagctntattgttattcatcacagaaat

SEQ ID NO: 10247 - DNA, 419 bp, Glycine max
  unsure (1)..(419): unsure at all n locations
gcttatatatataaaaagatatatcctttacttatttaaaccaaanacaattttgatatgtgttggtttatgtaattttgaaataaaaatatatagaaagataaaacttgaaaggttatatatagaaagttcataaagtcgtaaaagatgaatatataaaaatgcgtcaaaagtacatgatgaagatagggtgaacagaagttgggttaagtgaatntttgacaacggaaaccaaaataataaaataaaaaaaaaaagaaaaaagctatggaaaacttgcgtgtccccaaagctatggtttgtagtctgatgcagagctgctgagataaggatcatcagatcgaatatcttcctccatactgccttcttctctgactatatggattccaattgctntaatgactgagctctctaactct

SEQ ID NO: 10248 - DNA, 401 bp, Glycine max
  unsure (1)..(401): unsure at all n locations
agcttgtgctaagaangctttatccatttcatcatattnnaagaaaattgaatgtcatgatccatcacttctctgcatatatatttagtattaagatgtgtaccaacaatcctaaaatgttctgtgcagatattttccattgaaagacactacacaagattagagactccgaaattaattttgttttatgccaattgctattatgctttgttgtgtcttgctaaatgcatatttaatttgaagcaacttcattatttttgtgttatctgttaatggtttaattggataatagtttacaagccacgtaatatataatttacatatatgtgcagagatgtaatattgtcatgtaaattttaatatttaattattgttatgttagagtatgtgcatgcaattgt

SEQ ID NO: 10249 - DNA, 457 bp, Glycine max
  unsure (1)..(457): unsure at all n locations
actcagctagcctagaattaacaaggaatgttatcatatattcaattttcattaagtaggaataatacttgcaaatgaaccacacctgcataactgatgaagagctgaggttcttaaaaggtaagcttttgaaagggttgggtttacttctatcgcagcatttagatcatcaagtgcctatatataatctttcacttttatgttctgtgatgcctgctcaaacaactcagcaacattatcaggttttcgatctaatcacatccaaaaaaacaaaacaaatacagttcaggcctcgaagaggcgtangaggtgcatgttgcangtgttgccctcgtaccacaccgaggagacgccaacctgcgacttggccatgttgtcctcggagagacccacaccatggagcatggcctgngaagtgccctangacttgnngctcgtgatgcggaagttgtacctg

SEQ ID NO: 10250 - DNA, 422 bp, Glycine max
  unsure (1)..(422): unsure at all n locations
tctaagtcacctgcggcatgcaagcttcaggcaatcctacnncagagaatttcacttttacatctattccaaangctgagntttctacttcaaatgctactgtcaataatacttctaatattgtttcaaattctgatgttacctcttccagtagtgctaatctttggcatgctaagttaggtcatcctaatgagcatgtaatgaaaattattctcgaatagtgtaatatttctcaactgaataaaaacatcacagagttttgttcctcttattgtatgggtaaagctcataggttaccctctcacggctcaacttctgtttattcacctttagaattcattntcactgacctatggngaccctgccatgttacctcttatgttggctatacatatgatgtttccttcattgatgctctctct

SEQ ID NO: 10251 - DNA, 418 bp, Glycine max
  unsure (1)..(418): unsure at all n locations
agcttgaccaataaagacagtatcatattatactgttgganatnaataggctctttctgttttcccaccaagtagcttttatacagatttttcgaaatggcctctctcatcaatccagtgagaccttcacccacaatattaaagagcaaaggggctagagggtccccttgtctcagacctcgagtaggggcaaattcattagtagggctaccattcactaaaatggaaatagttgctgattgaaggcatgcagcaatccattgcctctatttagtgcagaagcctaatcttgacagcatatagtccaagaaagaccaagatacagaatcatagcagatttacctgggttagtttactaaagggtaaatttcaagtgctatccttagtacagaatttcatagctnttgttgaaagacag

SEQ ID NO: 10252 - DNA, 412 bp, Glycine max
  unsure (1)..(412): unsure at all n locations
agctttntgctttacgctatatgaacattttttgcttccaacaatgagaaggtgaattcgtggttcttgcactttctcatgatttcgtggttctcgtgaaaggtaaggcacaagcaataaagggacaattagagtcttatacagggacggggtaatattaactgagaagtgttagaaatatattatttttaatagattaaaatttattgaaaaatataaattttttgtattattaaatatgactagttaagatacccatgtaatgtaaattttttgtattattaaattgaattatatgttttcaaaaaatagttaaatactattgaataaaagaaaattattaccgatgtaagagaaccattgtcaatgttaaactattaaacaaatgtaatataagaaatgttattctagt

SEQ ID NO: 10253 - DNA, 421 bp, Glycine max
  unsure (1)..(421): unsure at all n locations
agcttccgttgttcaatttcgagcatcttatatgtgtatacattagaancggaaatccgagtgaaaagttatgaccatttgaatttcttcatagcttccgttgttcaatttcgtacgtctcgatatgtgaagtgcctgaatcggacatccgagtgaaaagttatgaccatttgaatatctcgagagcttccattgataaatttcgagcatctcgatatgtgatacaccagaatcggacatccgagtgaaaagttatgaccatttgaatttcttcatagcttccgttgttcaatttcgtgcatctccatatgtgaagcgcctgaatcggacatctgagggaaaagttatgaccatttgaatatctcgagagcttccattgatcaatttcaagcgtctcgatatatgattcgcctgaatcgga

SEQ ID NO: 10254 - DNA, 481 bp, Glycine max
  unsure (1)..(481): unsure at all n locations
tcaattggagtcttgtcttttacagacttatttagacatctgtngagtatgtaaacagcagtgtagactgcttcagcccagaatgtgttaggtagtcccttatccttgagcatcgatctagccatttctataactgtgcgattctttctcttggacactccattttgttgaggagaatatgcgactgtaagttgtcgctcaataccttcatcctcacaaaatctttcaaactagcgagaggtgtactctntgccgcgatcacatcttagtacttttatccattttccactttgattttcagcaagggccttgaactttntgaatactccaaagacttctgatttttcttttagaaaatatacccatgtcattctagagaagtcatcaatgaagagtatgaagtacctgttgttctcatgtgatggcgtcctcaatggtccacacatgttcgtatgtatcagctctaatagaattttcgctc

SEQ ID NO: 10255 - DNA, 289 bp, Glycine max
accacattcaatgttcccatcaaaacactcactatcctacggaaagattgcctaacagtattacacacaaatggaagcttggtaacctattgtatgctctcaacacaatttcaatgaaaggcctttctggtacaaaacttgaaacctatgactgtacgtacatggctgattacaaaattacaaaacggtccttaatactggtggctcttctttctttggggactcactcaaacactagtgcttgtgactccaatatttcttgatgtggacggaccctttcttcttgact

SEQ ID NO: 10256 - DNA, 392 bp, Glycine max
cgcataaaatatcgagacgctcgaaattgaacaacgaatgctcttgagaaattcaaatggtcataacttgtcacacggatgtccgattcagctacataatatatccagacggtcgaaattgaacatcggaagctctcgacaaattccaatggtcataacttttcacaaggaagcccgattctagcgcatcacgtatcgagatgctctgaattgaaaaccggaagctctcaagaaattcaaatggtcataacttgtcacacggaagtccgattcagacgcataatatatcaagatgctcgaaattgaacaacgaatgctctcgagatatcaaatggtcataacttgtcacacggaagtccgattcatgtgcataacatatcgacacgctcgaa

SEQ ID NO: 10257 - DNA, 410 bp, Glycine max
  unsure (1)..(410): unsure at all n locations
agcttcccgcatgtattaagagacggagtaattggaattgncaagagaaagctctcggtaaccacactgccaaaagaaattagtagtatcatttatcagaaatgatcgtttgaaaacaattagatcatattagccttatttttatttaatgaaaaatataactattaatatagatattgtgaatttatacattaagattatgacatattatattaacaaacaatttagttaatataaaatattgatacattattaatatcaaatatttgtataatatgtcatattattaatgtaaatcttcatagtctatattacttattaattaatttaatttttcataggcataaaaatacaaataattaaagtaattctaacgtctgacaaatattaattatctattagtaaatcac

SEQ ID NO: 10258 - DNA, 329 bp, Glycine max
  unsure (1)..(329): unsure at all n locations
agcttgaaatttaacaacggaagccgngtgatatttttaggttataacnaancacacggaggtccgatactggcgtatagtatatcgagaagctcataattgaacaaggagagctctcaagaaattcaaatggtcataactcttcacacggaagttcgattcacgcgcataatatatggagaagcttgaaattgaacaacggaggctctcgagaaattaaatggtcataatttatcacacggaagatcgattcaggcgcataatataccgagacgctcgatattgaacaacggaagctctcgacaaaatcagatggacataacttatca

SEQ ID NO: 10259 - DNA, 399 bp, Glycine max
  unsure (1)..(399): unsure at all n locations
agcttaacagtagaattgtttatctggataatcaaaccatcagtcacaaggccgcatgccaaagtacagacattaggttggaaaccaactgaatcagtcacatcagtaaaacttaagccaactgacaatattctggtttcctcaacaaatgatagaaccagaaaagaatggtgtgaatccgtaactctcattcggaccgtccaagtaccagttaccccttgatatatagaagcagtcctatgtagattttccacattaataccatttcgaataatccttaatgacccctctggtgccacaccacagcaagcaaacatttgatcttgcttctcatcatgataatctacaacttccatatccaagaatggtgcaatgttttgaatanggtttatatagcac

SEQ ID NO: 10260 - DNA, 354 bp, Glycine max
gagcgagagctataccgagccaccctccttcaccacgaacttcgtcacgctggggtgaatatccatcgagtgcgccctaacgtcgccaaattagtcagtcttcgccacgaaccggaagaaggtaggggcctactccaatggcacatcggcgtcagagcggaaaggaaactccatcacacaactgaacacgtgcgggagtcactgaagcattttgccagcgatacccaacagtggctgaacatacgacaatggattgcccacgtcgccaccgaattggatatagattttgaatggtttaggaacaacgaggaacttatgatattgtgccaccatgggacgctacagagaaatgca

SEQ ID NO: 10261 - DNA, 410 bp, Glycine max
  unsure (1)..(410): unsure at all n locations
agcttcggccgcgttgattccggcaactttaacctgtatatattgagcnccagctagacgagcgagagctctaccgagccaccctccttcaccacgatcttcgtcacgctggggtgaatatccatcgtgtgcgccctcacgtcgccaatttcgtcagtctccgccacgaaccggaagaagttaggggcctcctccactgccacatcggcgtcggagcggaagggaagctccagcacacagctgaacacgtgcgggagtcactgaagcttcttcccagcgatccccagcagtgcctgagcatccgacattggattcctcccgtcgccaccgaattggatagagaatttgaattttcgaggaacaaggtggaccttcatgattntgttcccaccatggaacgctacagagaa

SEQ ID NO: 10262 - DNA, 368 bp, Glycine max
cccataaggggtctccaacatcgcaccaggccctaagaaggatgggaaggtgcgaatgtgcatagattatctggacctgaatcaagctagtcccaaggacaatattcctctgacacccatcgatatactcatggataatacggccaatttcgctgtgatatccttcatggatgggttctccggatacaatcagataaaaatggtgccagatgatatgcaaaagactacctttttcaccctgcgggggacgctctattataaagcgatgtcctttagactcaagactgccggtgcaacttatcaacgggctatgagagcttcgttcacgatatgatgcacccagaaatcgacgtctatgtggaccacat

SEQ ID NO: 10263 - DNA, 432 bp, Glycine max
ccaaccgagtacaatcttttgttatgttgcaattttatatattcttgattatgctaattcttaaaaaatatggtatttgacaaaacaagacaaacaacacaggataaaaaaacaacacaaaacatataagttacaagatagattttttatcttgtatatcgcttgataaataattgacaagtaaaataatataaaatctattaaaatacttcatattagttatcttaatataacttaagttatatttaaagtgtttactaaaatatttcttgtattttttcattcttaaaattagagatattaaaataaaaagaatctgatgttctttttaaataattacgttagttattaattttttggttataaagaaaataaaaatgatatcgcccccaattttttaaataaacataaaatattgcctatataatttta

SEQ ID NO: 10264 - DNA, 454 bp, Glycine max
  unsure (1)..(454): unsure at all n locations
ngagaacatccttgaaataaaagaagaggtaaagaaacaatttgacgctggttntttggctgtcactcggtacccagaatgggtcgccaacattgtaccagtccctaagaaggatgggaaggtgcgaatgtgcatagattatcgggacctgaatcaagctagtcccaaggacaattttcctctgccacccatcgatatcctcatggataatacggccaatttcgctttgttttccttcatggatgggttctccggttacaatcagataaaaatggtgccagaggatatggaaaagactacctttttcaccctgtgggggacgttctattataaggtgatgtcctttagactcaagactgccggngcaacttatcaacgggctatggtagctntgttccacgatatgatgcaccgagaaatcgaggtctatgtggacgacataatttccaagtct

SEQ ID NO: 10265 - DNA, 412 bp, Glycine max
  unsure (1)..(412): unsure at all n locations
agcttagagggaacataaagagcctcattttttgggtaatgggangcagngcangcctcatttcaattgatcttgctaaggaccttctccaagtccaccccaattcttatgcattggttgttagcaccgagaacatcactttgaattggtactctgggaatgacctatcgaagcttgtttccaattgtttgttccgtatgggaggggctgccattctgctttctaacaaaggctctgataggaggagatcaaaataccagctggttgacaccgttcgcactaataagggttctgatgacaagtgctatggctgcgttgtccaagaagaagaatccagtggcaagaatggtgttactttgtcaagagatttgatggcagttgctggtcatgctttgaaaaccaacatcaccac

SEQ ID NO: 10266 - DNA, 402 bp, Glycine max
agctggtacaattaaacagtttttattataatctgatccaaactaatcctaaaacttgaattgtgtagaacaaatcaacagtcatagaaacacaaatgatgagttggcattcggcaaccacatcataacatgagatgagtaatgagttgtttctattggaatgttcacaagaagaaaagcatagaatttgagggaattgaagcaaaagaaagaaagaagaaagattaaattaaaaataaccttatcataggcaaggcgtgcatttgggtcagagagaatggaataagcttcgttgagtatgatggccatgtcatggccagcagggccagcaatgtcagggtggcagcgcttctgaagagagcgatacgccactttgacctgtgactgatcacaagagctgtc

SEQ ID NO: 10267 - DNA, 370 bp, Glycine max
  unsure (1)..(370): unsure at all n locations
agctntaccctttatttacattaaccactttttataacaacagcacacactcctctgctagtgtccacaacagtctccttagtccaaaagaaatacataatactgttgtatctagttcttttaaactttggcatcaaagactaggccatcctaacaaggatgcactagcaattgtactanataaatgtaatataccctctatcaataaaactagcagtgatttttgtaattcttgctctatagccaaatctcacaaactaccctcttctccctctnttactgtttatactgcacctcttgaattagtattctttgatgtttggcggccctcttcagtagagacatcttgtggattcttgtattatctaac

SEQ ID NO: 10268 - DNA, 419 bp, Glycine max
agcttcctatataaattgaaatgaatattaattgtatggaacaatctagtggtaataaaagtaaaataaaggaatgctactctaacaaaaacgcgtggtttgaaagacattaagaaagaaaaagatatacctctcccaggtctgcgtccatgtcgcaattcaaaccgtgctgcctcttctagcttcttacaaggttcacaaatacgcacaggtgaatcaccttgtccgcgtaaaaccattctttgtcgagtacaactgccgcaaaagattcccccacacctcctacagtgatgctgaaaaataaaataaaattgcaaaaaaagtaaataaaaaaattttggacaaagaattcagtttgagttcaatcagattcattcttatactgtaaccaaaaaaaattcattcttataagcaaacgt

SEQ ID NO: 10269 - DNA, 304 bp, Glycine max
  unsure (1)..(304): unsure at all n locations
cagatagagcctctagagacactgataagacatcttccatggtaataattccaacggcttcttcttcttcagggagctttggaaggggacttccatctatctccaaaatatccgagtacatattttttgaccattttctgctccgagaacccctatttgatgacttgtttgtatttggaaagctnttccacttgtggagtggcatcttgggtttcaaagctttctctttgggaggcttttcaccatcaatatccaccttaacatctctcaccgagtctatttcagaggcgtgagacacggagca

SEQ ID NO: 10270 - DNA, 468 bp, Glycine max
  unsure (1)..(468): unsure at all n locations
agcacctctnttctcacctcttccttctattttgggttttgtcgtctctggngttgttagactggcctgttattgtcttccatcattatcctatgtatgcagtaagcagggctaattcctttgagattcaatatatgccatccaatcgcttccttatgtttcttcagaatgtctaccaacctattttcttcttcttttgttagtgcattactgatcactatagttntagcgtcatcttcctccaggaacacatacttcagatgattaggcaatatttttagctctaccttctttttttcggacggaggctccttctttagtgtctcaaaaccggcttctccctcaggaatactttcttgtcgatccaagtccctccaggcagtctagcgcatttaccatggctntntccagcgaagtctgtggtgtctcgagaatactgacgtcttctctatcaatctcctgcactct

SEQ ID NO: 10271 - DNA, 423 bp, Glycine max
  unsure (1)..(423): unsure at all n locations
ntacaacagatgccactctatgctaaatttctgaaagacattctaactaagaagaacaagtatatccacagtgacaccatagtcatggagggaaactacaacactgttattcaacgtatccttccactgaagcataaggatccgagcagtgtcactatactttgttctataggtgaagttttagtaggcaaggctcttattgatttaagagccagtattaatttgatgtcgctctccatgtgcaggagacttggagagctggagataatgcctactcggatgaccttacagttggctgatcactccgtcactagaccctatggagtgattgaatatgttctggttaaagtcaagcatcttatctttcttgcagatnntgtggttacggatatagaggaggatcctaaaattccccataatttt

SEQ ID NO: 10272 - DNA, 412 bp, Glycine max
  unsure (1)..(412): unsure at all n locations
agctngagcgatgtggaagatattgaaatgggttnaggtaactgatcgcgtggggggaaaatggattttggggtcttaagttatgaataagacaacatcggtttcttaaacaaaaccgatgttaactttacaatgttaacatcggttttttcaaaaaccgatgttaactttctacagttaacatcggtttttcaataaccgatgttaagatattaatgttaacatcgagttttggaaaaatcgatgttaacatcaacttgttaacattggttttttcaaaaccgatgttaattaagtcaacttatttaccaaaatgccaccgtgcttttatttacatcgcttttgcgaaaaactgatgttaagcttgcgatgttaaatcaataatttgtagtagtgatttaccacagtattt

SEQ ID NO: 10273 - DNA, 262 bp, Glycine max
agcttccacacatcatttttctggaattgcttctgaatagccatttagcacctactgctttctttccttgaggttctagagttgtaaactctataggccttagatattttaaagtatccaagtattattccattatcacacttagagtcaaactttcccaagttgtctttaatatttagaatgaaacattgacatctgaaaggatggaaatatgaaatgttgggctttcatcctttccacagttcatgtggagtccttttca

SEQ ID NO: 10274 - DNA, 261 bp, Glycine max
agcttgttcaataaagacagtatcatcagcatactgaaggatattaataggctctttctgttttcccaccaagtagcttttatacagatttttcgaaatggcctctctcatcaatccagtgagaccttcacccacaatattaaagagcaaaggggctagagggtccccttgtctcagacctcgagtaggggcaaattcattagtagggctaccattcactaaaatggaaatagttgctgattgaaggcatgcagcaatcca

SEQ ID NO: 10275 - DNA, 264 bp, Glycine max
agctttgtatgcactattcaatggagttgacaagaacatcttcagactgatcaacacttgcacagtggccaaagatgcatgggagatcctgaaaatcactcatgaaggaacctccaaagtgaagatttccagattgcaactcttggctacaaaattcgaaaatctgaagatgaaggaggaagagtgtattcatgacttccacatgaacattcttgaaattgccaatgcctgcactgccttgggagagaggataacagatgaaaa

SEQ ID NO: 10276 - DNA, 262 bp, Glycine max
agctttttactgaatttgcatcgttccaattgatttcaaaatggtgtaatcgattacaagatattggtaatcgattaccagtgtatctgaacattgaaattcaaaatcaattgtgaagagtcacatcctttcataaaatgctttgtgtaatcgattacatggttttggtaatcgattaccagtgacaagttttgaataaaaaagtcaagagatgtaacttttctaatggttttcaggtttttcttaagattataactcttcc

SEQ ID NO: 10277 - DNA, 263 bp, Glycine max
catgcaagctttttgtttcttgaataattcaaaccccttaaacagttacgacggctaatttgcttagctggtagctgcctggccgcacagataatgagaataagaactactggaacacccggatcaaaaggtgtcaaagggctgggttgccactttatcctccaaaagagagtttgcaagctttgcaagagagccaacatagccaaagctctggtggacttaatggtggcgaaaaaatgcatcctgatttcttgcagaaaaac

SEQ ID NO: 10278 - DNA, 259 bp, Glycine max
agcttttttatcaagttaccaaatgcatttcgaagcccgcgaggaagagcattcattatcttatccagctcagtttttgaatcataaacaatttttggaccccactctctcataaattgcaaccattgaggctctctgacaacatctcctagatactcggctgcaacaagctcgtattgaatgctagaatccacatacaaatgactacgagtagcatcattcctaatgccaatcccaagttttgaagacccttggagat

SEQ ID NO: 10279 - DNA, 260 bp, Glycine max
agctttgaactgatattcttattattcaatgcattcctcatcttgtaaacatagtcatccaaagcattcattgtattagccttcttcatgaacttcctatcatcaacctgataattctcagcttcatgaatcattcttataatctcctcagctgaaagccttttttggtcattggttatggtaatctcattcctataaccagtggttgtttcttccacagaaacagatagaaggtcgtttacatctatagtaaagctaca

SEQ ID NO: 10280 - DNA, 263 bp, Glycine max
agcttatttttttaggctccgtaaaaaaaggaaaatagcataaagagacaatggggtagagaatttttgaaatgcttagttacccttttggataatatgataagtatcttcagcagctgatcgcgtggctgcgacctgaaattggaagtgaaaaaaataaataaatagggcaattaattaaggaaagagaaagagaagagaaaataacttacagctccgatcttaaggaaaccatcaacagtgagattgagaaatggattacc

SEQ ID NO: 10281 - DNA, 348 bp, Glycine max
tggtctgaactgttcactcggatctctgatttaggcacatcacatatatagacgctcgaaattgaacaacggaagctctcgagatattcaaatggtcataactctaacttggaggactgagacaggcacataatatatcgcgacgccccgaattcaacaacagaagcacttgagataatcaaatggtcattacttttaactcagatgtacgtgtcccgcgcatcacgtgtcgatactctctaaattgaaccaccgacgctctcgagataatctaatgggcaaacttcccactctgggaccgaatcacgagcatcaacatcgagacgctcgtaattgaacaatggaagc

SEQ ID NO: 10282 - DNA, 367 bp, Glycine max
  unsure (1)..(367): unsure at all n locations
atgtctctnggtgatggtattgagatgcccgatctntttagtgttggccagtttggagagcaagtctactctagtgttgntctcccttggtatgtggaacaactcatagcaatcaaagtcatcaatgatggtttttgcaacatgatagtacttgaaccttggcttgatatntgtttgcaacttgcccttaaacaaggtatgagtcagtgtaacaccttatctttttggctttaacttcttttgctagctttaggcatgttataagtgcctcatatttagcttgattgtttgatgctttgaaattgagcttgagagcttgctctaaagtaacattgtcgagcccttcaaggatgatgctngtccctac

SEQ ID NO: 10283 - DNA, 435 bp, Glycine max
  unsure (1)..(435): unsure at all n locations
agcttctacattcaatntcgagctnttcgatatattacggtactcaatcggacatccgagtaaaaagttattgtagtttgaatttgctcagggcttcggtattccatttcgagcgtctcgatatattacgggactcaatcggacatcagagtaaaaagttattgttgtttgaatttgctcagagcttcagtattccatttcgagcatctcgatatattacgggactcaatcagacatcggagtaaaaagttattgtagtttgaatttgctcagggcttcggtattccatttcgagcgtctcgatgtattacgggactcaatcagacatccgagtaataaagtattgtcgtttgaatctgctcagagcttctacattcaatttcgagcttctcgatatattacgggactcaatcacacatccgagtaaaaagttat

SEQ ID NO: 10284 - DNA, 451 bp, Glycine max
agcttgaaccaggataacagtttatatctatatcaattagagtttatcgaagtagaagataccacaccatggcaagctaatgtaacttgctccaagggcaaagtttccaatccatccattttgttttaactagaaagaaatgtagaacttggtcaaatgatcaaaataagcaagagaaatagaaaatataaagaaaaaatcaggacaattaaaaaaaaactacctttaaaggaggcgcagaatatatataagacagtatggctccacccactgcaaggtaaaatactatagggaaatcatgccctgcctgtaaaagagaatacttttaccaatcaagcttctgataaaaaacgaccatgagactattgtgtattgtacccacccatatgtccaatataccagccagagaaagaccaccaagcagcaacacccatatttgagtgattacctg

SEQ ID NO: 10285 - DNA, 428 bp, Glycine max
  unsure (1)..(428): unsure at all n locations
agctntatctaanattntgcattntgtatgatagatgttctctctttggcattgagatagatcacaagattgacctccaaggagccttctaaccattaggaggtcaccttcttcatgggggtagacttcctcactagactctttcaccccttacttcatcttcacttccactagaggaagaggaagaagtagtctcctcttgactactataaatgtcttgacccctcataatcatggttttctttatggggcattgagaggcaatgtgacctctcccaagacatttgaagcatttaatgtttcttgttctttcttgggaactagtcttaggggtggatttctctattgtgttacccttatcttccttgggttntgaaagtgcagcccccaaaattccttggagtttgtccttccttggataagagtga

SEQ ID NO: 10286 - DNA, 455 bp, Glycine max
  unsure (1)..(455): unsure at all n locations
agctntaatcaagacaaagaaattaaagatattcaagatggatgatcaagacagtctctagagtcttaggaagggtatattaaataggaagagaattcctaactgaagtagcaaaaggtttggccaagtaatttaagttaaaaagtgtttttcaagagatttactctctggtaatcgattaccagaggatgtaatcgattaccagtgaccaaaaatgatttacaacagctattaaaatttgaattcaaaatttgcattgtgtaatcgattacacatatatgataatcgattaccagcagttattgaacgttntaattcaaattntaaagcttgtaatcgattacacacatactgtaatcgattaccagagaagattttcanaaaatattctcaacagtcacatcttttcattttgttcttgatggccatcacaggcttacatatatgtgatatga

SEQ ID NO: 10287 - DNA, 477 bp, Glycine max
agcttctcgatatgtgatgtgcctgaatcgaacatccgagttaaaagttatggcgatttgaatttcccgagagcttccggtatttaattttgagcatctcgacacatgatgcgcatgaataggacatccgtgtgaaaagttatgaccactataatttctcgagagcttcgttgttcaatttccagcgactcgatatgtaatgcgcctgaatcggacatccgagtgaaaagttatgaccatttgcatttctcgagagctctcgtcgttcaatttcaagcgtctcgatatattatgcgcctgaatctgaccagcgtgtgaaaagttatgacaatttgaatttctcgagaacttcgctttcaatttcgagcgtctcgatatgtgatgcgcctgaatcggacatctgagtgacaagtgatgaccatatcaatttctcgagagcttgctgtagtcaatatcgagcatctcgatatctaattc

SEQ ID NO: 10288 - DNA, 136 bp, Glycine max
tgaatcggacatccgtgtgaaaagttatgtccacttgaatttctcaagagcttccgtagttcaatttcgagcttctcgacatattatgcgcccgaataagacatccgtgtgaagagttatgaccattttaatatct

SEQ ID NO: 10289 - DNA, 405 bp, Glycine max
agcttataatatatcgatacgctctaaattaatctttggaaactctcgagaaattcagatgatcatgacttttcacacggatgtccgattcgggtgcataatatgtcgagaggctcgaaattgaacaacggaagctcttgagatattcaaatggtcataactattcacacgaatgtccgattcgatcccataatatgccgataggctcgagattgaacaacagaatctcttgagaaattcaaatggtcataacatttaactcggatgtccaatttaggcgcatcacatatagagatgctcgaaattgaacaacggaagctctcgtcagattcaaatgagcataactgttcacactgatgtccgattcacggttatcatatattgatacgctcgagatataacatc

SEQ ID NO: 10290 - DNA, 229 bp, Glycine max
  unsure (1)..(229): unsure at all n locations
tggagtntccaagtgccaattcgtcttcttctttagtccattcttcttctggcttcaattcatcaatgggctttccttctgtgtccagcatctcgagatgttcccagcctttgatgacagctttccaggttctgctatccaatgatttgaggaatgccaccatccttgctttccagtattctaatttggttccatccataatttgnggtctattcactggtcctccttc

SEQ ID NO: 10291 - DNA, 472 bp, Glycine max
  unsure (1)..(472): unsure at all n locations
agcttgagaaggttgattntcgtctcanagtctgtgatgaaattgtgatataattgtattaaagcatcaccagcctgaaaatttataggaagaaccgtttgtcaaacaaataaatntaaactataataagaatatgcacatcagagtatgaatattgtttcaatagaagtcaacanaagttctatcagaagcaaaagaaagtaacaatactcacaaattgtgcaacataatgaatggaatcaaacataataggtaattgttaagtagaagcattagaaaaataatgactaaaatacaataaagttacttatagtttctcaaactacgcatcttgatactgaagtcaattgatgacgtggattgatgcttcaccacattgaataataacaaagataacaaagactttccaagtgcaatttgatgcctcanatggcaaaagaatccttgtattaaatggatgatagaatattac

SEQ ID NO: 10292 - DNA, 251 bp, Glycine max
tatgtctggtcaagtataaatctgagcatacataatacttcctaacattccagttgcaagcaagatatcatcaacataaagaattagaaaaataaccttactcacactgacattcaaatatatacaccgatcaatattatttttcttaaatccaaagtaaacaatggtatcattaaacttcaaataccattggcgggaagcttgcttaatatcgtatattgatttctttaattgcacataatatattccta

SEQ ID NO: 10293 - DNA, 474 bp, Glycine max
  unsure (1)..(474): unsure at all n locations
agctngcttagccgatgtagcagattctatcttggcaaagttttgaggatccacacactggtgaataaggaaacgagccttacaattcattttcttggattctctgaacgtactcttttgtgcttcccctgcatctttctccaattcttgaagtccaatcgtgacaaactcaagaacatcctacattccaaagatgattttcatttgaatgcaccatgcatcgtagttctttccatcaaggattggaaaatgcgctggaaactcgttcccattcatctctacaacaatgaagcttcaaagatcccacactaaaaccaatcaagactctcccaacatcgatggaacctgaagctcgtgataccactgtcgaacccgattgctcgctgtacaagcaaaccagaaacttgacaaatttggatgaagttgagtcttgaatgatgaagacaagagagaaagatagttatgaagagaatg

SEQ ID NO: 10294 - DNA, 475 bp, Glycine max
  unsure (1)..(475): unsure at all n locations
agcttgatcatccactgcacaaggttcaagctgttgcgcatgaagatgacagtggaaacatcttgagtgtatattttcaggtggatttgtacacaaagattcccagcattcctcgcactggaagtgctgctaattgggctgatgcagntgctgaagtcaagggagaataattgatcactactaaaaaagtatgatcaaattcaaacttggtgtaaaaataactaaaaatgtcctagtaattctgtttgtagatgcatgtctaatgaagggaagaagtgagcactccccatttcatccccaagtaataaggttcagagttcaggcactgcaaaaaccttgtacttgaagttgtttggtagaaatgtatgttacttctatgttaaaaaggactttttcagcagaatcattcttgttgtaactntataagcaatactcgtttctttaattcttctccctctnnttcgttccataaatc

SEQ ID NO: 10295 - DNA, 383 bp, Glycine max
tgatgccaacattggagaggttaatgaaacaacgagatgatgcgctccatgagaggttggatcaaatggagaatagagatcataatgaagaataaaggaggagaagagggaatgatggtattcctagacaaaaccgaattgatggtattaaactcaacattcctccatttaaaggaaagaatgatccggaggcctacttggagtgggagatgaaaatagagcatgttttctcatgcaacaactatgaggaggaccaaaaggtgaagcttgccgccacggagttttccgactatgctcttgtgtggtggaacaagctacaaaaggagagagcaagatatgaagaggcaatggttgatacatggacggagatgaaaaagatcatg

SEQ ID NO: 10296 - DNA, 234 bp, Glycine max
tttccaacctctatacatattatgctcccgatatcaacatccttgttaatacctatgaccattaaaatatcaccatatttttcgacttataatttccatcgtatcattatattattatccccaatcgaaactccttattaaaacttatgaccattttaatttcaccatatctttctttgttacatcttcgatcgtctatttttatgattctccttattctatcatccgaattaa

SEQ ID NO: 10297 - DNA, 444 bp, Glycine max
  unsure (1)..(444): unsure at all n locations
agcttataatatattgataagctcgaaattaatcatcggaaactctcgagaaattcaaatggtcataacttttcacacggatgtccgattcgatcgcataggatgtcgagaggctcgaatttgaacaacggaaggtcttgagaaattcaaatggtcataacttttcacacagaggtccgatncnggctttatttatatcgatacgctcgaaattaaacatcggaaacactcaagaaattcaaatggtcataacttttcacacggatgtccgattcaggcttataatatatcgatacgctcgaaattaaacatgaaaaactctcgcgaaaatcaaatggtcataactnttcacacggatgtccgatccaggcgaatcacatatcgagacgctcagattgagcaacagaagctcttgagaaatatcaatggtcattacttttcaca

SEQ ID NO: 10298 - DNA, 478 bp, Glycine max
  unsure (1)..(478): unsure at all n locations
agcttatattctcgaccaatctcttttgttttcgtttgtccgggatttaatttattttgttcattcctattctttggattttttttttggtatagtatcatactgtacagcttgtacaggaatgatgtaaatccttctttaatatataaaatcttgtctttgtcttttttaaaaaattactctctttgcatttttttcccatttgacgcatgttttctctgataattttctgagttcaaattttatttaagacatgtttggataaattattttggaaggatttttaggaataaaaaataagaagacaaaaaaaaaccttttttattgactaaaattaatttatgcataaacaaatgtgtagaaattntatcatattaatatctctaaaaaatgatttttcatttatacataaattaattttaactcataaaaaattctttcactttttctttttattgtctcttttaggagtatatct

SEQ ID NO: 10299 - DNA, 429 bp, Glycine max
agctcgaatatcttcatttgagttatgcaaacctatccaaagcatttcattggctacacactctccaatctcttccttctttgacccacctagatttgtcaggatgcacactccctcactataatgaaccatccttgctcaacttctcatctctgcaaactctccatctttccttcactagtttttcccctgccatttcttttgtccccaagtggatattcaaattgaaaaaacttgtttctcttcaattatggggtaatgaaaaccaaggtccgattcctggcggtattcgaaacctcacacttcttcaaaatcttgacttgtctggaaattcattctcatcttctatacctgactgcttatatgggcttcatcgtctcaagttcctcaacctaagggacaaccacttgcatgggactatatctgatg

SEQ ID NO: 10300 - DNA, 367 bp, Glycine max
  unsure (1)..(367): unsure at all n locations
cttcttctgttcagataggtacccttttgagcttggactatgctcgaaatgcttttggtgatgatgatggaaacatggcctccttgttcatgtataactgtcttattagaggttatgcttcagcagggttgggtgaccaagcaatcttgctttacgttcagatgctggtgatgggcattgtgcctgacaagtacactttcccttttttgctgagtgcgtgttctaagattttggcgctttctgagggtgttcaagttcatggggcggttcttaagatgggtttggagggagatatatttgtcagcaactctttgatacatttctatgcggagtgcgggaaggttgacttgngacgaaagctgtttga

SEQ ID NO: 10301 - DNA, 456 bp, Glycine max
  unsure (1)..(456): unsure at all n locations
agctgtatctatctgcccagccttacaatgactcatcaattaaagctgtatatgtaacaacatttggcttggaaccttcaagcaacatcatctcaaatagtttatttgcatcaaacacctttcttgctttcaggtatgcatgaataagagaagtataagtcaccacatttggggtgcaattgtctcttaacatttcatcaaaccaattgcgagcctgttgaataaggccagctntgcaaaagctatcaattaaaatagtatatgtatacacactgngaacaatgccattctttttcatttcttcgaataacananaagccttctctaccttggaggcatcacaaagaaaaccaatcactttagaatacgtactatcatcgggaacaaaacccttgctcatcatttcgcatataatctcaaaggctntatcaaactttccagctccacagagacacc

SEQ ID NO: 10302 - DNA, 474 bp, Glycine max
  unsure (1)..(474): unsure at all n locations
agcttgtgagagcncctatggtgacctgtgactgaggcttgctggcgaggtctgagacgaaccatgaccaagtctccaattttaaattcaatatccctgcgccttttatctgctgagtgtttcataattacttgggccttcggaagcttcttctttaagtcttgaaaaatggactccctattagtcagaaactcgtcaacagcttccacttttgaggtacctgtaacatatgatggcaaatctggtggcctccggacaaaggtgacctcgaagggggagacaccagttcctgaatggtgggaggtattgtangaccattcggcccagggaaggaacttaccccacgaagaaggtttcttgtggacaaaagctcgaaggtactactcaagcacccggttcagcacctccgtttggccgtctgtttgggggtgataagctgagctcatcctcagttgtgtgccacttaaccgaaac

SEQ ID NO: 10303 - DNA, 386 bp, Glycine max
  unsure (1)..(386): unsure at all n locations
tcagcttgcatacaagattctccttgcctggcacttcanaaccttcttgttgggtcatatagatgtcttcctctaaatccccatgcaagaatgcagttttaacatctaactgctccaagtgaagattctctgcagctactatgctcagaataactctgatggtagtcatctttacaactggagagaagatctctgtgaaatcaattccttgtttctgctgaaaccctttcaccacaagtctcgccttgtatcttcttctaccgtcagattcttcctttagcctatagacccacctattctgtaatgccttctttccttctggcaatttagttaaagaccacgtcttattcttctgaagggatgtcatctcatctttcatcgctagc

SEQ ID NO: 10304 - DNA, 445 bp, Glycine max
  unsure (1)..(445): unsure at all n locations
agcttaacaatcaatttcgagcgtctcgttatatacgggactcaatcagacatccaagtaaaaagttatcatcgtttgaattggctcagagcttcaacattcaatttcgaacgactcgatatatgatgggactcaatcagacatccgagtaaaaagttattgtcctttgaaatggctcagagattccacattcaatttcgagcgtctcaatatattacgggactcaatcagacatccgagaaaaaaattattgtcgtttgcatatgctcaaaggttcaacattcaatttcgagcgtcttgatatattacgggactctatcagacttccgagntaaaagtattgtcgtttgaataggctcatagattcaacattcaatttcgagcgtctcgatatatgacgagactcaatcagacatccgagtaaaaagtgattgtcgtttgaata

SEQ ID NO: 10305 - DNA, 469 bp, Glycine max
  unsure (1)..(469): unsure at all n locations
agctngaatgaggaagtgtagaatggtagaatcagtnntgaaaactgaggggcaagctgggcatttgtctgctagaggaattatagcagctactgctatctgaacgtgctcaaacgtctcacttaacattaatagcacgttcactactgagccaaaacaaattcgaccgttgcttcacacgtccctctacattcctcattcaaacttatattttcgtggtaatctcgttttcagcataccccaacagctctcagagatttacgaaatcattccaaacgctctgcttctccatggctacctcaccaaaagaaacttcagctcctggttcaccctctgtaccatcatctccatcatccaccanagcaccatcaaaccaggaacgacctgaattcaatatccagcccatacagatgattcctggtcaagcccctgttcctgaanaactggttcccaaacgacaacagggagt

SEQ ID NO: 10306 - DNA, 434 bp, Glycine max
  unsure (1)..(434): unsure at all n locations
agcttgtgtcacactttcaactgccgaagctaaatatattgccgcatgaagttgttgtgctcaaagtctctagatgaagcaacaactacaagactttagagtaaaccttgatcacattcctctaaaatgggacaacacaagtgttatcaatctaaccaaaaaccctgtcatgcattttaggactaagcacatagaaattaggcatattaaatgcatcaagcatagaataacattctgtttgtacaagtatgtgattcacattgctattcatatcattttttttgtttagtttgtgtcttagttattgatttatgtgcatactcattagtttgtttgaatatcacatgtttttcttagtaatttcgtgatttctctttgttttaattgattatgcttggttntaatcaatttttgtatgatatctgtttggtaag

SEQ ID NO: 10307 - DNA, 472 bp, Glycine max
  unsure (1)..(472): unsure at all n locations
agcttgtgcatccaataccctgatgaggatgtcccatatgttcttaaaactggactgantccattgcttccaaagtttcatggccttgcaggtgaagatccgcacaaacatctgaaagaatttcatattgtctgctccaccatgaaacccccagatgtccaacaggatcacatatttctgaaggcttttcctcattctttagagggagtggcaaaagactggttgtattaccttgctccaaggtccatcatcagttgggatgaccttaagggagtattcttagaaaaaaaatttcctgcttccaggaccacgaccatcaggaaggatatctcangtattagacaactcagtggagagagcctatatgaatactgggagagattataaaattatgtgccagttgccctcaccatcagatttcggagcagcttcttctccaatatntttatgaaggactcagtaatatggagag

SEQ ID NO: 10308 - DNA, 177 bp, Glycine max
tctgtgaacacctttccttcattaccaccccaatctcccatacatcttctatctatcttccagccaccccttcatcaccaataaattgcctgcatatcatatgatccccaccacaaacactctcattcactcgatttgctccacacttagaaacaaaaactcctgacgaatcatatt

SEQ ID NO: 10309 - DNA, 459 bp, Glycine max
  unsure (1)..(459): unsure at all n locations
agctngatggtcagccagagttgttcattcacattatttctgacaagaccaacaacacattgtctatcattgacaatggtattggcatgactaaggctggtaaggttaaatatttggtaagtctttgtgagattatcgccaactgtgcttgttagttagtctattttctctaatgcttgtgcgtttgatgttccagatttggtcaataacctcggtactattgcctctcttataacaatttttcactggcatgcaccatctgaactgatcaaaaccaaaagataatatatatatatatatatatatatatatatatatatatatatatattacgaaaaaatagttcacatgacaatattatggacaatatatattttaactaggaaatcatctatcatgtgtgtcatgatatgcagcgagtaaattntcacaacctcatcaacctcaaaaccacaatcc

SEQ ID NO: 10310 - DNA, 469 bp, Glycine max
  unsure (1)..(469): unsure at all n locations
agctngaatgctcatttgagcttatatgcatgttatttacacacaaagggaaagggagagataactgaccaaatcttttcatggctattcttccagaagaacgctcccctgatgtagtttcgtttatagcttggaccatctcatttttgctgacatatccatccttgttcttgtctaagaatacaaatgtatcaaccaaagtctcaaatgtgccctccagctttggcatcccaattcgtgatttctagggaagtcatggaaaaaaatttgaagatgtagcaaaacatggaaattcaaggtttattgttatcaatgcaagcatgatgaaattctaggctgccctgaagaaatgcatgaaatgtccataaaataaaataaaaaaggaatgaacatatagaattgaattgttcataaagtacaaacatcttctgaattatagaaatgataggcgcataagctgcanaaagac

SEQ ID NO: 10311 - DNA, 474 bp, Glycine max
  unsure (1)..(474): unsure at all n locations
agctntacgatcaacaaagtntgtcaattcatctctaatcccttagacactcattgggtggcagttaaacgtattctaaggtacctcaaagggtccatttctcatggtcttcatctcaaacctacaatttcaggaagacctctctccattcgagctctctgttatgttgattgggtctttgatgttgatgatcatagatcaacatcacaagtggcaatttatttgggccctaatttggtgtcttggtggtccataaaacaagttgtgacaaggtcaagcactggagcagaataccgtagcttaactcaggctacacataaaactttatgaattcaaacacttctcacaaaactgggagttcctttcaccgtaccagtcattttttgtgatatccaaagtgttgtagcactaacatataatcctgttctttgtactcaaaccaagcacatatgagataatgttttctatgttcga

SEQ ID NO: 10312 - DNA, 265 bp, Glycine max
agcccaagaacttgagttgcaacctagacaggtagccgtattgttccaaaaccgtcgagccagatggaaaaccaaacaattggagagagattatggtgtactcaaagccaattatgatgctcttaagcttaactttgacaccctcgatcaggacaacgaatccttacgaaagcaggtagaataatactccttccaaaatataaacaaatttcgattatttatctgacttattaatgatattttctccaaattatattgtatttaa

SEQ ID NO: 10313 - DNA, 427 bp, Glycine max
  unsure (1)..(427): unsure at all n locations
agctntgaatnggtctctggtcttaagataaactacaataagagaaaanttgggtgtttgggcaaatccgaggactggtgtaaggaggcagcatcttctctcaattgtagtcaaatggatattccattgtcttaccttggaattcctgtaggggtcagctctaaaaataggtctgtgtggcagcccattattagcaaatgcgaggctaaacttacaaaatggaagcaaagaaatctatcaatggggggtagaataaccctcattaattcagtcttaacagccttacccatttatttgctatccttcttcaagattcctaagcttgtggtgcaaaagattacatctataccaaaggaattttgatggngcagcctccaagactccattaagattccttgngtgaggtgggacatagtctgcctaccta

SEQ ID NO: 10314 - DNA, 471 bp, Glycine max
  unsure (1)..(471): unsure at all n locations
agctnggacttcctgtgttgtgggaacctctccttcctcaggtgtacccaaacccaatcacctggttcaagcacgactttctttctgcttttgttggcttgccttgcatagctcgcatttttcttttcaatttgaaccttcacttgctcatgcaacttcttcacatactcagctttagcctgtgcatccttatgcttaaacatagcaatgttaggcataggcaacaaatcaagaggagtcaaaggattaaatccatacactatctcaaatggtgaacaattagttgtgctatggacagcccgattataagcaaactcaacatgaggcaaacaggcttcccaagatttaagatttttctttaaaacagtcctaagcagtgtgcctaaagtcctattgactacctcagtttgaccatcagttngtgggtgacaagtagtagaaaacaacaatntagtaccaatcttaccccac

SEQ ID NO: 10315 - DNA, 361 bp, Glycine max
atgaagcaatcaccaagtcaatggtacaagagacttaatgagttcattgtctctcacgggtacatcagaagtccctatgactcatgtgtttatcatagtaaggtgaaagacgattctcacatctatctattgctctatggggacgacatgctcaaagcatctcaaaatttgttggaaattcagaaggtgaagtcactactcaatagtgaatttgagatgaaagacttgggagttgttgaaaagattttgggcacggagatcaagagggataaagtccaaaagaagttctttatgcataagaaggaattcattcaaaaagtactaactcattctgggatggcatctgcaaagcaagtatgta

SEQ ID NO: 10316 - DNA, 327 bp, Glycine max
tatgctacatatatctacaacagacctcctcaagctcagcagctaaatcaacaacaatagaacaattatgacctctccagcaacaggtacaatcctgggtggaggaatcatcccaaccttagatggtcgaatccttcacaacagcagcaacaacaacaaccttattttcaaaatgctgctggcctaagcagaccatacgttcgtccaccaatccagcagcaacaacagctacagccccagaaatagaaaacagttgatgctcctccgcaaccttcccttgaagaacttgtgatgcaaatgactatgcaaaacatgcagtttcaacaa

SEQ ID NO: 10317 - DNA, 462 bp, Glycine max
  unsure (1)..(462): unsure at all n locations
agcttttggaaaaggaataagaagaagaagatgttcanaaagatgttcaaaaagttatgaaaaaagttattaaaattcaagtcaaggtcttgcttttatagactcttcatgtctggtcaagaaaaccattagaagagttataaccttgaaaaaaacctgaaaacaattggaagagttatatctcttgactttttattcaaaacttgtcattggtaatcaattaccaaaatcatgtaatcgattacacaaagcattttatgaaaagatatgactcttcacaattgaatttgaatttcaatattcagatacactggtaatcgattaccaatatattgtaatcgattacaccatttaaaaattaattggaacgttgcaaattcagttaanaacttttgaaatcaaactttgccactggtaatcgattacaggtaattggtaatcgattaccagagaataaaaact

SEQ ID NO: 10318 - DNA, 363 bp, Glycine max
tctgtccctgagatactggttcccagaagacaacatggagtgtagattgctgaataccctagccctgctacaattcctatggaagtatacacggagatggacaagataatccgcggtattgtgagtagcattctgaatgatgcttctgtgcctgatgctgagaaagatgttccaacatcttccaccccagatgtttctgtgcctgatgtcaataaagatgttccaacatcctccgctccaaatgctgaagccctcccttcacccagtgaagaggaatcaacagatgatgaggatcaagtctcagaggagacccctgcaccaatggcaccagaacctgctccatgtaacctcattgacttggaa

SEQ ID NO: 10319 - DNA, 467 bp, Glycine max
  unsure (1)..(467): unsure at all n locations
caagctttggcanaggaagaggagaggaagaagttcaaaanaatgttcaaagagattcaaaggttgtaaaagtatatatgaaaagttatatcaagtttttaaaatgcaagtcaaggtcttgcttttatagactcttcatgtcaggtcaagaaaaccattggaagagttataatcttgagaaaatcttgagaaaaccattggaagagttacatctcttgatttttattcaaaacttgtcactggtaatcgattaccagaaccatgtaatcgattacacaaagcattttatgaaaagatgtgactcttcacaattgaatttgaatttcaacgttcagatacaccggtaatcgattaccaatatattataatctattaaaccatttaaaaatcaattggaacattgcaaattcagttaaaagctttngaaatcaaactttgccacttggtaatcgatacaggaaactggt

SEQ ID NO: 10320 - DNA, 394 bp, Glycine max
ctcagcttaagaataatggcctcagcaaacttcttattcccagaaggaaactctataaataggcctcctatttttaatggggagggttaccactactggaaaactcgaatgcaaattttcattgaggcaatagacttaaacatttgagaagccatagaagttggaccttatgtacccaccatggtggctggtaatacaacaatagagaaacatagagaagagtggtctgaagaagaaagaagattagtacaatacaatttaaaggctaaaaacatcattacttctgccttaggaatggatgaatattttagggtgtcaaattgtaagagtgctaaggatatgtgggacactctacaagttacacatgagggaacaactgatgtcaaaagatcag

SEQ ID NO: 10321 - DNA, 480 bp, Glycine max
  unsure (1)..(480): unsure at all n locations
agcttgcctaattaacctanaattgagagagaatgattattaaacacataaaacgaaaatactaagtatttattacctttacttaacagaaaatacttataacattacaaaataaccataaattgggagagtttgatacaatttatacaagttttatacacaaaagttagtcgttttctccgactaacacttatggtatattcctagtactcaaaacttgggatgaatcataagaatgtgttaaggaggtgttgatgatgagttaccaacttttaattaaaaattgaaattttaactaatttaatagtttttttttttgctttaatcatatatgtttttatcttttttctttagttcattctatcaattttaaaaccattagaaattgtaatttaattntttaaatcaatactgaagaatttaaaaactatcataaatcatttntaaaaaaattcaaatgtcaccttgacacttaataga

SEQ ID NO: 10322 - DNA, 342 bp, Glycine max
gcttaacattcaatgtctatcgttccgatatattacgggactctatcgaacatccgagtaaaaatatattggttgttgaatttgctcagagattcggtcttcaatttcgagcgcttcgatatattactggactcaattgaacatacgagtaaaaacttattgtcgttgaatatttgctcagagcttcggtattcaatttcgagcgtctcgatatattacgggactgaatcagacattcgagtaaaaagttatcgtccgttgaatttgcacagaacttcggattccattctgagcaactcgagtatattacgtgactcaattagacattcgagtaacaagtta

SEQ ID NO: 10323 - DNA, 469 bp, Glycine max
agcttgtttaccccatgttgtaattgcttacaatagagctgttcatagcaccactaattgttctccttttgaagttgtttatggttttaacccactaactcctcttgatcttttgcctatgcctaatgtttctgtttttaagcataaagaaggtcaagcaaaggcggactatgtgaagaagcttcatgagagagtcaaagatcaaattgagaggaaaaataaaagctatgctaaacaagccaacaaagggagaaagaaggttgtcttcgaacccggagattgtgtttgggtgcacatgagaaaagaaaggtttccggaacaaaggaaatcaaagcttcaaccaaggtgagatggaccatttcaagtgcttgaaagaatcaatgacaatgcttacaaagttgagctgcccagtgagtataatgttagttccaccttcaatgtctctgatttatctctttttgatgcagat

SEQ ID NO: 10324 - DNA, 468 bp, Glycine max
  unsure (1)..(468): unsure at all n locations
agcttcaacatcagaccacttccagggtgctggaactacttcacatggacttgatggggcctatgcaagttgaaagccttggaggaaagaggtatgcctatgttgttgtggatgatttctccagatttacctgngtcaactttatcagagagaaatcagacacctttgaagtattcaaagagttgagtccaagacttcaaagagaaaaagactgtgtcatcaagagaattaggagtgaccatggcagagagtttgaaaacagcaagtttactgaattctgcacatctgaaggcatcactcatgagttctctgcagccatcacaccacaacaaaatggcatagttgaaaggaaaaacaggactttgcaagaagctgctagggtcatgcttcatgccaaagaacttccctataatttctgggctgaagccatgaacacagcatgctatatccacaacagagtcacactta

SEQ ID NO: 10325 - DNA, 338 bp, Glycine max
cacacctctctaatagctaagttcacctcatttagatgagaagctagagcttagctacacaccccctataatagctaagctcacccatatgccaaaaaacatgaaaatacaaaaaaagtccctactacaaagactactcaaaatgccccgaaatacaaggctaaaaccctatactactagaatggccaaaatacaaggccaaaacaaaggaaaaacctattctaatatttacaaagataagcgagctcatacttagcccatggactcgaaatctaccataaggctcatgagaaacctatggccttcccttggatctctagcccaatctacttggagtc

SEQ ID NO: 10326 - DNA, 263 bp, Glycine max
tcggatagccgagcaaaatgttattgacgtctgaatatgctcagagctgcggtattcaatttcgagcgtctcgatatattaagggactgaatcagacattcgagtaaaaagttatggtcgtttgaatttgctcagaacttgggtattccattatgagcaactcgatatattacgggagctcaatagacattcgagtaacaagttatcgtcctttgaatgtggtcagagcttctatgatcaatttcgagcgaattaatatatta

SEQ ID NO: 10327 - DNA, 351 bp, Glycine max
  unsure (1)..(351): unsure at all n locations
tagagcaattcccttatgttatcaaacataaaaagggaaaaggtaatattgtagccgatgctctttctcggcgtcatgcattactttctatgcttgaaacaaaattgattggtcttgaatgtttgaaaagcatgtatgaaaatgatgaaacttttggagaaattttaaaaaattgtgaaaaattttcagaaaatggtttctttagacatgaaggctntcttttcaaagaaaacaaattgtgtgtgcctaaatgttctactagaaatttgcttgtttctgaagcacatgaangatgtttaatggggcattttggggtccaaaagactctataaacattacaagaacattttt

SEQ ID NO: 10328 - DNA, 396 bp, Glycine max
  unsure (1)..(396): unsure at all n locations
agcttcttcaagccaaaacttgaatgattagaaatgaaactattatttccataactaagcanttgttgcaactgccaatctgtctgtatacccaacacaaatggttctgaacctgagttatcttgaaaatagaaaacatgcttctgatgccgctgaacccatatctttacactgcattcatcattttcgtgtagctcatgtgaagaattacgaactgtcctttccatgttacgcacatcatttcgagtgagaaaatcatcacggttttgggggccaccttgcttctgcatcccctctgcatggtgctggattatcttgtccaacgatattccaacataaagcatagacatcactttctggcgtaactcatccgaaattcgcggagcatacatagct

SEQ ID NO: 10329 - DNA, 334 bp, Glycine max
tgatgcctaaaatgtcttttcttatggcattggtcctagatgtgttgaataatttttccaagaacacccttttaaggtcatcccaactgaaaatggacctgggagcaaagtagtatagccaatcttttgccactccctccaaagaatgaagaaaagcctttagaaatatatgatcttcctggacatcaaggggcttcatgatggaacaaacaatatggaactccttaagatgcttataaggatcttcacctgcaagaccatggaacttgggcaacaaatgtattagtcttgttttgagaacatatggaacaccctcatcaggatattgaatgca

SEQ ID NO: 10330 - DNA, 369 bp, Glycine max
gctattacgtgaccttagaatactctcgcttctctgatgcctatgtgtggaccctcaagtgcaatcctccattctccacttttttcggaaccccatgaatgtcattgcctagcgctattcatgtgtcctccaccttcgagtctggagccccacgaatgtcattgcctagcactgttcgctaattctccattctccacttttattctgagccccatgaatgtcattgcctagcgctgttcatgtgtcctccaccttcaagtttggagctatgcttcattattgcctaagtgtggaccctctatagcaatcctccattctccacttttttctgagccccatgaatgtcattgcctaccgctgttcatgtgt

SEQ ID NO: 10331 - DNA, 274 bp, Glycine max
aagctggagttgctgcacatgatgtccaacgttatgtcaaggaataagatccggctgcacaatgtacaaggcaagataaaatggcaaatgaagaattgaagttgcaggatccacgatgtcggatacaatgtcctgacatcctgcccgagaatactggagttgctgtacaatgcaagataaaagtcaagtgcagaagtgaagctgcaagatccacgatgtcggacacgatgtcctgacatccggcccgataatactggacatataaatctggtat

SEQ ID NO: 10332 - DNA, 304 bp, Glycine max
  unsure (1)..(304): unsure at all n locations
cgcttaagaaaagagctntgagggttatgttctcaacaattatttaataatctcgaaactgtttatccatatatcttcattctgatttgtagtttattgactctgttctgatgactatcatgtgaacaggtgattggagagtttttgtctttaaaaaaagctgctggaataaaaaaaggattccagctaatggatacaagcaataaaggcaagactaacattgatgaactgcgagtaggggtgcataaactangtcaccanatatctgatggggatgttcaaatacttatggatgctgtgagta

SEQ ID NO: 10333 - DNA, 390 bp, Glycine max
  unsure (1)..(390): unsure at all n locations
ttgagccaattcaaacgacaataactttntacatggatgtctgattgagtcctgtcatatatcgagacgctcgaaattgaatgttgaatctctgagccaatccaaacgacaataacttattactcggatgtctgattgtgtcccgtaatataacgagactctcaaaattgaatgttgaaactctgagctaattcatacgacaataactttttactcggatgtttgattgagtcctgtcatacatcgagacgctccaaattgaatgttgaagctttgagccaattcaaacgacaataactntttactcggatgtctgaatgactctcgtcacatatcgagacgctcgaaattgaatgttgaagctctgagccaattcaacgacaataactt

SEQ ID NO: 10334 - DNA, 406 bp, Glycine max
agcttcaacattcaatctcgagcgtctctatatatgacaggactcaatcaaacatccgagaaaaaagttaatgtcgtttgaatttgctcagaggttcaacattcaatttcgagcgtctcgttatattacaggactcaatcagacatccgagtaaaaagatattgtcacctgaattggctcagagcttcaacattcaatttcgagcgtctcgatatatgacgggactcaatcagacatccgagtaaaaagttattgtcgtttgaatttgctcagagcttcaacattcaatttcgagcgtctcgatgtatgacgggactcaatcagacatccgagtaaaaagttattggcgtttgaatttgctcagagcttcaacatttaatttcgagcgtctcgatatattacgaga

SEQ ID NO: 10335 - DNA, 434 bp, Glycine max
agcttaactaatcaaatgggacaattggctacacagttaaatcaacagcagccccagaattctgacagattaccttctcaatctgtctagaatcccaaaaatgggagttccattacattgagatcgggaaagcaatgtcaaggacctcaaccagcaacatcttcctcatctgcaaatgaacctgcccaacctcactctactccagaaaaagatgatgacaaaaatttaaagagtaagttacctaacaatttctatgaaggtgaatcttccactggtaattctgatttacaaaagcagcatatccctcttccattccctccaagagcaatttccaacaaaaaaatggaagaggcggagaaggagatcttggaaacatttagaaaagtagaggtaaacatacctctgctggatgcaataaagcaaattccaagata

SEQ ID NO: 10336 - DNA, 430 bp, Glycine max
tcatctttgtcctcaaggcctcatgtatactcgtccaaatcgcgaagtgaaccttggatccctgtcagatacaatactagaaggaattccatgcaaccttactacttccttgatgtacaactccactagcttttccattctatacttcatattcaccggaataaaatgagcagatttggtgagtcgatctactatgacccacacggcatcatgcccacgactagtcttgggtaaactagatacaaaatccatagatatgctctcccatttccattccggaatctccaatggcttcaattctcccgatggtcgctggtgctcaaccttagccttttgacatgtcaaacatcttgctacatattcggctacatctttcttcatgccatgccaccaaaaacttctctcaaatcttggacatcttatcattcct

SEQ ID NO: 10337 - DNA, 373 bp, Glycine max
tactcggatgtctgattgagtcccgtaatataacgagacgctcgaaattgaatgtttaagctctgagccaattctaacgataataactatttactcggatgtccgattgagtctcgtaatatatcgacacgctcgaaattgaatgttgaagctctaagcctattcaaacgacaataacgttttactcggatgtccgaatcagtgacgtaatatatcgggacgctcgaaattgaatgttgaacctctgagccaactcaaacgacaataactttttactcggatgtctgattgagtcccgtattatatcgagacgctcgaaattgaatggtgaacctctgagccaattcaaacgacaataactttttactcggat

SEQ ID NO: 10338 - DNA, 411 bp, Glycine max
  unsure (1)..(411): unsure at all n locations
agcttgtaggccttgtatcttcttcatcaatggagtcctntgcttcttgaagatcaatggcagcaaaatgaaataggtggaaaggtgattggagacgccacttcaaggagaagatgagtcaagaacaagctcaccaccataggaagccatggataagagcttgaaggtaggaaaagatgagtggaaagagagggagagaggggaggcatgaaatttatgtctgaaataaggtctgaaatttgaagtgtaattctcaaatgatcaaagttgaaaaatacacacacaaggcctctatttatagcttaagtgtcacacaaaattggaggggaaattgaatttctattcaaatttcacttgaatntgaatttatggagccaaatgtggagccaaaatttcactaattatgattag

SEQ ID NO: 10339 - DNA, 412 bp, Glycine max
tagctttattaaaaatgataataaaaaattaaaaaataacatttaaaatgactaagtgaataaaattaatatcaatttattttttgctttatcttttacaactatttacattcatcttatcaaaaaaattatgttgtgcgacaagatctatttttttatgggagtaaaaaaatatttattctatatattcaattaaaaatatttagaacatgttatgaactaaataacatgtatgaattaaactcaaaattcaaaagataggttaagaatgacaataatacatgaacaaatatatctagaattcaatcaaaaaaataaaaattcaacacagacttagaacataatatgacaattattatgactaaacatgaactctagacaacatggattaagtgaattacacttagatttt

SEQ ID NO: 10340 - DNA, 412 bp, Glycine max
tggatccaacccgaatgttacctatgatagcaccatagtgcatgtcagcatatggctcctctccagtcaagagttcccacatcacaataccaaatgaaaacacatcaacctaaaatgacaaatatcaaaacaaaagcctcaaacttacatagtgacaaaatatcaaggtaccattaacacatcaacaattcagcagttccggagccatccatggtagagttcctctcaccaccagaaatcagcgtctgacattttcctttggacagacccaagtcgccaacctgatatcagatgcaaaagtgtaaaaggtaaagaaactactgaaggatcaactaatcaattgctccgtgctacaagtagagttgtgctgactagaaagcaagtattgatgatcaaaaatcatttagcagaa

SEQ ID NO: 10341 - DNA, 394 bp, Glycine max
agcttttgacctcccaaacagtgccctgtaattccacagatgaagaaatgttgttcatatttgttgagggtcactctcgcaggtggagtggtgaaagtggcaataggagaggctgagctgcaagcatcgaagttggcctttgtaacctcctctacgttgtgtgtatttgatgcgtagttgaacactgcaaaacacaccaatgatttagtccaattgatcccaagcttttaaacaattcaagtagtttattttgtacgatgtgagacttaccaaggacgtctccaaccctgaagtttttgccagaggcccaagctgtgtaaaaggaagcgttgccaggaacaatccagccagcggtttctccaacaatgaaagtagctggttcagaggatggacc

SEQ ID NO: 10342 - DNA, 426 bp, Glycine max
tcgtacccgggatccttagtggcaccttcggcatgcaagcttgttagagcctagtattctttgtcctaccaatccattgttggctttgtacatatcaaacaaaattgttgtttgtttgcacaatgactaactcataatcatcttacagacaaatatgtaattttatcacttagtcttttctctctgatgcaatcctaccccccaaggcattgataaaagactccaagaagattgggtcagagatgcaggagaaggccctagggttctgatgagccttaggatagattttgagctcatgggctaaatatgagcccacttatctttgtacatattatatttgagtttcattatttttgggccttgtatttagggctccatagtgtagggagtgtatcctagtaatgtagaatttttcagcccttgtat

SEQ ID NO: 10343 - DNA, 301 bp, Glycine max
  unsure (1)..(301): unsure at all n locations
taatattatggtcgntatcacttatccctggactggtgagtactttcagaagctattttagatgcataatttatagcgataaacttgcagtgcacaaaatcgccatgtttcattaacttggatatttttatgattttagtttactatgtgggaccaaatggatggaaaaaactgtctggtgatgatgttggggaacttcattaccattactacccagttaccccaagcaccgtggaacaagaaatggttgaggctactggtgcttgatgaagtaactcgtggatgtctttttaagttttct

SEQ ID NO: 10344 - DNA, 316 bp, Glycine max
  unsure (1)..(316): unsure at all n locations
tagcttgaatcggacctcagtgtgaaaatgtttgaccatttcaatttctcgagagctttcgttgttcaatgtcgagcatctcgacatgttatgcgctcgaatcggacatccgtgtgaaaagttatgaccatttgagtttctcgagagcttccgtggttcaatttcgagcatctcgtcatattatgtgcccgaatctgaccttcgtgtgaaaaagtatgaccatntgaatttctcgagagcttccgatgtttaatttcgagcgtctcaatatattgtaagcctgaatcggagctcagtgtgaaaaagtatgaccatt

SEQ ID NO: 10345 - DNA, 247 bp, Glycine max
actcgtgcgagtcctttacgacgaaactatggcgagtttggctccacgacacaatggggttggtgtgagggtactccaccatttcaaacgtcttcttcatgaacggaggggggcccacctcgtgcaaccctatcatcggtttgggcgaagtcgactactactatgaccacttagcggagccgtcatccatctgttctttcactgcgtgagccgtcgtcactcccgagtccttgctctcgctcaaaac

SEQ ID NO: 10346 - DNA, 425 bp, Glycine max
agcttgtaattgattacataagtcttgttatcaattaccagaggagattttcagattattatttccaagggtcacaacttttcaaatggtttttacatggccatcaaaggtatatttatatgtgacttggaacatgaatttgcttagagtttttcagaacaaaaagtcttatcctctcaaaaagcaaaatcattttatcctcttaagaattccttggccaatacacttgcaattcaataaggaattaattgagtgcttaaattgttcaatctatctctttcaagagagatttcttcttctctactttctatttctaaaaggggattaagagaccaagggtctctcgttgtaaagaaatctgaacacaaaaaaaggattgtccttgtgtggttcagaactgcaaggtagtggaactctcaagcggg

SEQ ID NO: 10347 - DNA, 423 bp, Glycine max
tccgcttattagtgcacagctccttcaagaatttagcatatcttggaatttgctttattgcatccagcagaggtatgtttacctctacttttttaaatgtttcctagatctctttctctgcctcttccatttttttgttgggaactgctcttggagggaatgcaagagggatatgttgcttctacaaatcaaaattaccagtggaagattcacctgcacggaaattgttaggtaacttactctttaaatttttgtcatcatctttttctggagtatagtgaagttgggcaagtgcatttgcggatgatgaaggtgctactggttgaggtccttgacactgctttcgcgacctcaatgaaatggcactcacatttttgggattctggacagattgagaaggcagcttgtcagaattctatgact

SEQ ID NO: 10348 - DNA, 407 bp, Glycine max
  unsure (1)..(407): unsure at all n locations
agctntaaccgtctgagatctttgccttatcacattggagggtacatcctttgtggtataagtagagggtacatctacttgggtttgactgagaacaagagagggtacatctcttgtggatcagttctagtggagggtacatccactagggtttcgaagagaacaagggagggtacatcccttgtggatctttgcttgtaaaaggatttttacaaggttgaaagaaatctcaaggaccgcangtctcttggggattggatgtaggcatgggttgttgccgaaccagtataaaaactcttgtgtgtttgtctccttcttccctactcttttaatttttgctgtgcatttaatttccgcttttactttctggtaagtttctcttatactccttattctcttaacaactt

SEQ ID NO: 10349 - DNA, 355 bp, Glycine max
  unsure (1)..(355): unsure at all n locations
tttgtaactacctcatgcactcctctaatgactatttcatcatttctggcactaaactgctgggagttggaggccatcttctcaattaaatntctggcttcaacaagagtcatgtctccaaaggctccaccactggcagcatctatcatacttctctccatattactgagtccttcataaaaatattggagaagaaactgttctgaaatctgatggtgggggcaactggcacatagtctcttaaatctctcccagtactcatacaggctctctacactgagttgtctaatacctgagatatacttcctgatggctgtggtccctgaagcanggaaaatattttctaataatactc

SEQ ID NO: 10350 - DNA, 405 bp, Glycine max
gcattgagaagaatattagctctttgtgatcttgacatggatgaagcccttaatgtctcagaactaaatgagtttcaggcttttgttgattttggattcttttaaatctccttttttttatttaatatgctgtgaatatttattgttttcaagtgtggcctatttattcaaaatgtgcaaatatatcaacaggttagatgcgttaatgcaccattgctatcctctgaaatagcatgagtcacaagggttgtacagcagaaagtacctgaaggattcaactcacatggtcttacttgttctggatttatttatgtccacaatatgttcctcaaaagaaggcgtccaaagacattatgggctgttctaagatactttggatatgataataatttgcaactcatggat

SEQ ID NO: 10351 - DNA, 382 bp, Glycine max
agcttgtagggttaaagtctcacgattgtcacatgctcatgcaacaattgttaaccgtggctataagagacatcttgccaaacaaagtcaagttagccataactcacctgtgctttttcttcaatgctatatgtagcaaagtcattgatcctgtcaagtttgatgagttggaaaatgaggccgcaattatactgtgccagttggagatgtattttccccctgctttctttgacatcatgattcacttgattgtgcatctagtcagagaaatcaaatgttgtggtcctatttatctacggtggatgtacccggttgagctatacatgaagatcttaaaagggtatacaaagaatctttatcgtccagaagcatctattgttga

SEQ ID NO: 10352 - DNA, 403 bp, Glycine max
tgctaccccatgcaagctcctaatatctcccacactttttatggtgggccattcttggatgtccttgattttctcagggcccacttggaccccatttctaccaactacaaaacctaagaaaactatattatctacacaaaaggtacacttctatatatttgcatagaaggtgtttttcttaaggactgaaagaactttcctgagatgtcctaagtgatcatctaggctcctactgtatactaaaatatcatcaaaataaacaacgacaaatctacctatgaaatcctttaagacatgatgcataagcctcataaaggtgcttggtgcattagtgagcccaaaaggcatcactagccattcatacaaaccaaacttggtcttgaaagcagttttccactcatca

SEQ ID NO: 10353 - DNA, 354 bp, Glycine max
tcacctcattgagaattacaattccatgaaggatgtgtctgtctttgatgaaggctggttgtctctcatcaataaggtcagatataacattcctcaatctatttgctaataacttagctatcaccttgtacatacacccaatcaaagagattggtctgtaatcatcaaaggtctgagggtgtttaactttgggaattagggccaagaaggaagcattactgcctctaaggaagcagccatgcacatgaaattcgtctataaatcttctaaagtcagttttcaacactccccaaaattctttaatgaaaatgaagttgaaaccatccggtccagggcatttgtcccaccacaact

SEQ ID NO: 10354 - DNA, 186 bp, Glycine max
tctctacaattgcatcacctctcaatgagctggtgaataagaatgaggcatttacctggggtgaaaaacaaaagcaagcctttgctttgctcaaagaaaagcttactaaagcacctggtctagctctatctgacttttctataacttttgagctagaatgtgatgcctctggagtgggagttggag

SEQ ID NO: 10355 - DNA, 305 bp, Glycine max
  unsure (1)..(305): unsure at all n locations
agcttccgttattcaatctctagcgtctctatatattatttcaccgaatcagacatccgagtgaaatgttatgaccattcgaatttgtcgagagcttccgttgtttaatttcgagcgtctagatgagttatgtcaccgaatccgacatctgtatgaagaggtatgaccattcgaatttctcgacatcttccgttggtcaatttcgagcgtctcgatatattatgtncccgaatctgacttctttgtgaaaagtttggaccattcgaatttctggacagcttccgttgatcaatttcgagcgtctc

SEQ ID NO: 10356 - DNA, 434 bp, Glycine max
tacgcttgaatgctctattcaatggagttgacaagaatatcttcagactaatcaacacatgtacagtggccaaggatgcttgggagatcctgaaaaccacacatgaaggaacctccaaagtgaagatgtccagattgcaactcttggccacaaaattcgaaaatctgaagatgaaggaggaagaatgtattcatgacttccacatgaacattcttgaaattgccaatgcttgcactgccttgggagagaggatgacagatgaaaagctggtgagaaagatcctcagatccttgcctaagagatttgacatgaaagtcactgcaatagaggaggcccaagacatttgcaacatgagagtagatgagctcattggttcccttcaaacctttgagctatgactctcggatagggctgaaaagagaagcagaacttgg

SEQ ID NO: 10357 - DNA, 343 bp, Glycine max
cctattaacacacccggccatgaatcacatatctgaacctgtcagcagtctctgtggtttatgcttctttggcgaccaccacagatacctttgcctctttgtgcggcgaattgaagcaatcgaacagctcgaagcttatgctgccaacatctacaatagacctcctcaaccgagcatggaaatcagtcacaacagaacagaacagtgatgacctctccagcaacaggtacaatctcgggtggaggaatcatcccgaacttagatggtcgaatccgttgccacagcaacaacaacaacaacatccttattttcacaatactaatggcccaagcataccatacgt

SEQ ID NO: 10358 - DNA, 401 bp, Glycine max
agcttgcgaaccataccactatccacgtatatgctagctccatcatatccttggcctctaactttttgaatgataagattatcatgagatagtattgaacaaactccttgcttaagagtagatgatgtacaatctatcacatgtgagatatctaaaaaatgttctaacatatcagcacttatcaacaaatctaatattaggagtaatttgttttcttctagattcatcatgagcttcacctacaattcaccagaattttgcattatcaatctctttttgaatttcattttgcaacttcctagcaaagacgtgtagaatttctttttgaataatgggtgaagtgtatcttgcattctaagggacattttccaagacaacttcatctatttgcttattataag

SEQ ID NO: 10359 - DNA, 311 bp, Glycine max
actccgagggccgaatctggcgaataatatagcgagacgctcgacagtgaacaactaaagctctcgagaaattcaaatggtcatgactcttcactcaggtatccgattcacgcgcataatatactaagacactcgaaattgaacaacagaagctctcgagaaattcatattgtgctgactcttcactcagatgtccgatccacgcgcataatatatcgggacgctcgacattgaacaatggaagctctcaagacactgaaatggtcataacgtttcacacagatgtctgattcctggaaataatatatcga

SEQ ID NO: 10360 - DNA, 329 bp, Glycine max
tcatccgtgggtcaagaatcttagcaattgaaagaatgacattatagtcactccaatacttgccaaacttttccatcatcaacactgccatattttgcaatactggatcatcacacttcagtgtttcccgcaacaaccattcaattttccatacttgcatgaagtattcattggaagttggataagatgtacctaaaaaaaattcaaataagataattaaactataaatataaatctgaaactatttattataattatgaaatttgaaaaaatatacctgaaatcaaattagtcatattataaaatggcttcaaaaattcacacaattt

SEQ ID NO: 10361 - DNA, 316 bp, Glycine max
taaacattcaatttcgagcctctcgatatattacgggactcaatcaaacatccgaaaaaaacgttattgtcgtttgaattcgcacagaggttcaacattcaatttcgagcgtctcgatatattacgggactcaatcagacatccgagtaaaacgttattgtcgtttgaattggctcagaggttcaacattcaatttcgagcgtctcgatataatacgggactcaatcagacatccgagtaaaaagtcattgtcgtttgaataggctctgaggttcaacattcaatttcgagcgtctcgatatattacgggactcaa

SEQ ID NO: 10362 - DNA, 406 bp, Glycine max
  unsure (1)..(406): unsure at all n locations
agcttccatcaggatgtcttattgagtcccgtaatatatctagacgctcgaaattgaatgttgaacctctgagcatattcaaacgacaataactgtttactcggatgtctgattgagtcccgtaatatatcgagacgctctaaattgaatgttgaacctcttagccaattcaaacgacaataactttntaatcggatgtctgattgagtcccgtaaatatatcgagaccctctaaattgaatgttgaagctctgagccaattcaaacgacaataactttttactcggatgtctgattgagtcccgtaatataacgagacgctcgaaattgatatgtgtaactctgagccaattcaaacgacaataactatttacttcgatgtctgagtgagtcccgccatatatcg

SEQ ID NO: 10363 - DNA, 432 bp, Glycine max
  unsure (1)..(432): unsure at all n locations
agctnggctttggccatcagaaccatctcattctctacttcatccatcttgcaacanatattccagtcaagtgagtgtttctctgcatcaaacaaatcanatgtgatcttccaatcatctattcccatttctagattacctttccccatatccaccacacaattggcagttagcatgaagggacgacccacaatcagagggatttcagcatcctcttcaatgtccatgatcacaaagtctgtagggaaagtgaactgtcgcaccttgaccaanacatcttcaaccacgccataaggtcttgtaatggaatgatctgccaacaacaatgtcattcttgttggcataatttccagctctccaattcttctgcacatggagagcgacatcaaattaatgctagctcccacataatgaaagctttccaactgacac

SEQ ID NO: 10364 - DNA, 332 bp, Glycine max
tcctttacaacaaagagaagtgatgtaagctccattggagcttgtaggcctaggatcttcttcattaatggattcctttacttcttggaagatgaatggcagcggaatggtgaaaggaagagagagaggaggcgccacttcaaggagaagatgagtctagaagaagctcaccaccataagaggccatggataagagcttggaggaagaaggagatgaatgaggggagagggagagaagagcacgaaattttgtgctctaaatgagctttcaaatctgaattttaatattctaatgatcaaagttgaaaaaaatgcacacacatgacctctat

SEQ ID NO: 10365 - DNA, 325 bp, Glycine max
  unsure (1)..(325): unsure at all n locations
agctggccttgaatcagaaanttgtaccagtcgcaagagtctgtggtttatgctcctctgctgaccaccatacagacctctgcccttccatgcaacaacctggagcaattgagcagcctgaagcttatgctgcatacatttacaatagacctcctcaacctcagcagcaaaatcaaccacagcacaacaattatgacctctctagcaacagatacaaccctggatggaggaatcaccctaatctcagatggtctagccctcaacaacaacaacagctactgtgccaagcagaccgtacatttcttcaccgatccaacaatagcaa

SEQ ID NO: 10366 - DNA, 325 bp, Glycine max
tatatgttttttagttgccttgtaccatgctcacctaatccaaaggtcggtattgatgtttatctagagcctttgattgatgatttggagaagttatggagtcgtgttttgacacatgatgtgtcaaggaagcaaaatttgatgaggactattaatgacttccctacttatggcatgttgtctggttgtggaactcatgataaatttttttgtccgcattgcatggagcataagaagttgtttacattacaatatgagaggaaaagttgttcatttgactcgcatcgtaggttcttacccagcattcattcatttaggactaaca

SEQ ID NO: 10367 - DNA, 330 bp, Glycine max
tatgctgcaaacatttataatagacctcctcagcagcaaaaccaacaacaacagaataattatgacctttcgagcaatagatacaatctaggttggaggaatcatccaaatatgagatggacaagtccttcacaacaacaatagtttgtccctcctttccagaatgttgctggtccaagcaagccgtatgttcctcctccaatacagcagcagcaacaacagtagtcacaacaaagacaacaagcaactaaggctcctcctcaaaattccttagaagagttagtgaggcaaatgaccatccagaatatgcaatttcagcaagagacaaga

SEQ ID NO: 10368 - DNA, 335 bp, Glycine max
  unsure (1)..(335): unsure at all n locations
agcctttcctcattctctggagggagtggcaaaagaatggctatactacctcgctcccatgtccattntcagttgggatgaccttaagagggtgttcttggagaaattattccctgcatctaggaccactgccatcagaaaagacatttcaggcatcacgcaacttattggagaaagcttgtatgagtactgtgaaagattcaagaaattgtgtgcaagctgtcctcaccaccagatttctgagcaactcattcttcaatatttctatgagggacttaacaacatggagaggagtatgattgatgctgctagtggtggagctctcggtgatatga

SEQ ID NO: 10369 - DNA, 340 bp, Glycine max
taataatctatggcttgaaacaagcctcccgccaatggtatctaaagtttcatgatgtcatcacttcatttgactttgaagagaacatcatggatcaatgtatataccaaaaggtcagtgagagtaagatttgctttctgtgttaaacgtggatgacattttgcttgcaactaatgataagggtttgctatatgaggtgaaacaatttctctcgaagaactttgatatgaaggatatgggagaggcatctcatgtaattggcattaagatccatagggcaagatctcgaggcattttgggtttgtctcaagagacttatattaacaaagttttagagaga

SEQ ID NO: 10370 - DNA, 327 bp, Glycine max
  unsure (1)..(327): unsure at all n locations
agctnntagatgccttanagttttaaggctgaagttgagaaacaatgtggaaaacaaattaagatcgtgagatcagatagaggtggggagtactatggtagatacacagaggatggacaagcaccacgttcatttgcaaattntnttcaagaacatgggattgttgcccaatacactatgtctggttctccggatcagaatggtgtggcagaacgaagaaatcaaaccttattagacgtggtgagaagcatgaggagtaatgtaaagctttctcaatttttgtggattgatgctcttaagacggctgcgtatatattaaaccgagtt

SEQ ID NO: 10371 - DNA, 333 bp, Glycine max
tgtagggttaaagtctcacgattgtcacgtgctcatgcaacaattgttagccgtggctatacgagacatctttccaaacaaagtcaggttagccataactcgcctgtgctttttcttccatgctatatgtagctaagtcattgatcctgtgaagtttgatgagctggaaaatgaggccgcaattatactgtgccagttggagatgtattttccccctgctttctttgacatcatgattcacttgattgtgcatctagtcagagaaatcaaatgttgtggtccagtttatctacggtggatgtacccggttgagcgatacatgaagatcttaaa

SEQ ID NO: 10372 - DNA, 336 bp, Glycine max
ttgagaaaattcaaacgacaataactttttactcggatgtctgattgagtcccgaaatatatcgagacgctcgaaattgaataccgaagcgctaagcaaattcaaacgacaaaaactttttactcggatgtctgattgagtcccgtaatatatcgaaaagctcgaatgtgaatgtagaagctctgagcaaattcaaacaacaataactttttactcggatgtctgattgagtcccgtaatatatcgagatgctcgaaatggaataccgaagctcggagcaaattcaaacaataataactttttactcggatgtccgattgagtcccgtaatatatc

SEQ ID NO: 10373 - DNA, 331 bp, Glycine max
tcaacctagaggagacgaaccattccaagtgttggagaagatcaacgacaatgcctacaagattgacttgcctagtgagtataatgtaagtgccactttcaatgtgtctgatctatctctttttgatgcagatggaggagccttggatttgaggacaaatccttttcaaggagggagtgatgaggacataaccaagggcaaggaccatgaagcacttgaaggtcccatgaccagaggcagacttaaacaagcccaacacatcatagagacaaggctggtcatttgtatagctgtcattgatgatgattgaaagcccaagtggagaaagatg

SEQ ID NO: 10374 - DNA, 331 bp, Glycine max
tctcagatccagtcatggaaagacttggcaactgccttcattaggcaataccaatacaacacggatatggctcctgatcgaaaccaacttcagagcatgaccaagcgggaacatgagtccattaaagaatatgctcaaaggtggagagacctagcggcccaagtcgtcccgtcgatgactgaaagggaaatgatcacgactatggtagatacgttgcctacgttctactatgagaagctgataggatatatgccggctaactttgcagacctcgtcttcgccggagaaagaatcgagtccggactgagaaaaggcaagtttgaatatgcct

SEQ ID NO: 10375 - DNA, 349 bp, Glycine max
  unsure (1)..(349): unsure at all n locations
agcttcttatccaaggagattctnggtggtgaagctccttcttccttggcttattccctagtggatggtgtctcccctctccacttctcctttaccttccgctgcatctccatggtgtaaaatcaccattgaaggacctcattgaagctcanagatccagcctncatagaagctccacaagcaagcttccatcattaaggtttcattatttttgggccttgtatttagggttcataatataggtaaggtatcctagaaatgtagaatttntaagcccttgtattntatggcacctagactagcttttgtattaggggtagtttcgaatttcacatgcattaagtgaata

SEQ ID NO: 10376 - DNA, 330 bp, Glycine max
tttcctttggttgctctgataagctttccaaacgttagagagaaggagaagagattgaagccttcattccactgtctgcatgaaatgagtatttctccctccctagacattattttccacatctcaacggttaaaatgtgcgggacttaatttcaaacctggtgtccaaatttcacaatgatccaacggttaatatgtccaggattgtagttttattgggacaagttttgggtctccgctggaaatggaaaagctatgacgtgaagggaaattctttcaaatcctagtgctcaaattccaaccctgagaatgttcagaaatgagttccaa

SEQ ID NO: 10377 - DNA, 305 bp, Glycine max
ttgagacaattcaaacgacaacaactttttactcggatatctgattgattcccgttatataacgagacgctcgaaattgaatgtttaagctttgatccaattcaaatgacaataaattttttctcagatgtctgattgagtccaataatataacgagacgctcgaaattgaatgttgaagctctaagccaattcaaacgacaataactttttactatgatgtctgattgcgtaccgtaacatatcgagacgctctaaattgaatgttgaagctctgagacaattgaaacgacaacaactttttac

SEQ ID NO: 10378 - DNA, 389 bp, Glycine max
  unsure (1)..(389): unsure at all n locations
agcttcaacattcaatgtcaagcgtctcgatatattatgggactcaatcacacatccgagtaaaaagttattgtcgtttgaattggctcggagcttcaacattctaattcgagggtctcgatatattactaggactcaatccgacatccgagataaaaattattgtcgttcgaattggctcagaggttcaacattcaattntgagcgtctcgatatgttaccggactctatcaacatccgagtaaaaagctattgtcgttttgaattgctcagagactcaacattcaatttctagggtctcgatatattacgggactcaatcatacatccgcagtaaaagttatcgtccgttgaatatgctcagaagatcaacattctatttcgagcgt

SEQ ID NO: 10379 - DNA, 338 bp, Glycine max
tcttgaagttggaatgatatatgccatttccgatagttcatgggtaagccctgtgcaagtagtccctaaaaagggtggaataacactgataaagaatgacaagaatgagctgattcccacaaggaccatgaccggttggagaatgtgtatcaattatcgccttctcaacaaggcaacaaggaaacaccattttcctctccccttcatagatcaaatacttgagaggttagccggccaagccttctatttctttcttgatagatactcaaggtataattaaattcttgttaatccgaaggatcaagagaaaacaaccttcaattgcccatttggagtct

SEQ ID NO: 10380 - DNA, 333 bp, Glycine max
tgtgttaagaggaagagtgatgtgattgatgtattcaagaaattcaaagtttcagtggagaaacagtgtggaaaaaatttagagatattaagaacggatggtgggggtgaatatgtatctgttgagtttgctgaattttgtgagaaagaaggcatcacacatgaagtaacacctccatacactcctcaacataatggagtagttgagaggaagaatagaactttgttgaacatggtgaggagcatgttaaagagcaagaaactaccaaaatatttgtggggagaagctgtgaacattgctgcatacatcttgagcagaagcccaactaggaaa

SEQ ID NO: 10381 - DNA, 333 bp, Glycine max
tctaaactttatacaagaatgaagctctgataccacttgttagacaagtggcctcagatatcttaagaagggggaggttgaattaagatattacaaactatttccccaattaaaattctatcaagttataaattcccttaataataaacttcttaaatattgactcaaatagaacaatttgaatatgaatataaaacaataataaataaaggagtttaagggaagagaaagtgcaaactcagatttatactggttcggccacacccttgtgcctacgtccagtccccaagcaacccgcttaagagttccaccatcttgtaaattccttttaca

SEQ ID NO: 10382 - DNA, 326 bp, Glycine max
tctagaattatggcctcatcaaactacttgtttcccgagggaaattctataaatagacctcccatctttaatggagtgggttaccattattggaaaacccgcatgcaaatttttatagaggcaatagatttaaatatttgggaagccatagaacaaggaccttatgttccctctataatggccggaagtgcaacaataggaaaacctagagcagattggactgaggaagaaagaagattagtacaatataatttaaaggccaaaaatattattacatctgccctaggaatagatgaatactttaaggtttcaaattgtaaaagtgc

SEQ ID NO: 10383 - DNA, 334 bp, Glycine max
  unsure (1)..(334): unsure at all n locations
agcttctcgattattatgcaccttaatctgacttccgtttganaagttatgacaacttgaatttctggagagcttccgttgtgcaatttcgagcgtcttgatatattatgcgcctgaattggacttctgtgtcataagttatgaccatntcaatttctcgagagcttccgttgttcaatttcaagcttctcgatatattatgcacctgaattggacttccgtgtgacaagttatgaccattctaatttcttgagagcattcggtgttcaatttcgagcgtctcgatatattatgcatctgaatcggacttgcgtgtgataagtatgaccatttg

SEQ ID NO: 10384 - DNA, 327 bp, Glycine max
tcaagagatcgtccccttgacaacattattggtgatatctcaaaaggggtaacaactagacattctcttaaagatttatgcaataatatgacttttgtgtctatgattgaacctaaaaatttagatgaagccataatagatgatcattggatagttgctatgcaagaagaactaaatcagtttgagagaaacaatgtgcgggaactagtagagaaacctgaaaactaccccatcataggaacaaaatgggtatttaggaataagttagatgaacatggcataatcattaggaacaaggcaagattacttgcaaaaggatataatcaa

SEQ ID NO: 10385 - DNA, 339 bp, Glycine max
ttaaaagattggctaagattttgttaaaacataagcacttagacaatgaaggaaagctggagttgctgcacatgatgtccaacgttatgtcaaggaataagatcgggctgcactatgcacaaggcaagataaaatgtcaaatgaagaattgaagctgcaggatccacgatgtcggatacaatgtccaggacatcctgcccgagaatactggagttgctgtacaatgcaagataaaagtcaagtagtgaagctgcaggatccacgatgtcggatacgatgtcctgacatctggcccgataatactggacatataattctgttatatctttaacagattat

SEQ ID NO: 10386 - DNA, 328 bp, Glycine max
tccagaaatcatcctcttaacgacattattggtgatatctctaaagggataacaactagacactctctcaaagatttatgcaataacatggaatttgtttctatgatagaacctaaaaacttaaaagaagccataatagatgatcaatggatagttgctatgcaagaagagttaaatcaatttgagagaaataatgtttgggaactagttgagaaatcacataactaccccattataggaagaaaatgagtatttaggaataagttagatgaacatggcatagtcattagaaataaggctaggttagttgcaaaaggatataatcaag

SEQ ID NO: 10387 - DNA, 454 bp, Glycine max
  unsure (1)..(454): unsure at all n locations
agcttctntgagaaaacttccttgagaagctagagcttatctacacacacccctctcataactaagctcacctccttgagaagcttccttaagaagattcctaaagaagcttgagcttagctacacatacctctctaatagctaagctcacctccttgagatgagaagctagagcttagctacacaccccctataatagctaagctcacccccatgacaaataacatgaaaatacaaaaaaagtccttactacaaagactactcaaaatgccncaaaatacaaggctaaaaccctatactactagaatggccataatacaaggcccagacgaaggaaatacctattctaatatctacanagataagcgggctcatacttagcccatgggcttgaaatctaccctaatgctcatgagaaccctanggccttcccttggatcgctagccaatctac

SEQ ID NO: 10388 - DNA, 332 bp, Glycine max
ttctgcagggaagctaagtgtgaagtatgcaatcttgcataggattggcactgccaactgggtacccaccaatcatacttccactgttgccacaggtttgggtaaatttctgtatgctgttggaaccaagtccaaatttaattttggaaactatatttttgatcaaactattaagcattcagaatcttttgctgtcaaattacccattgcctttccaactgtattgtgtggcattatgttgagtcaacatcccaatattttaaacaacattgactctgtgaagaagagagaatctcctctatccctgcattacaaactgtttgaggggacac

SEQ ID NO: 10389 - DNA, 492 bp, Glycine max
  unsure (1)..(492): unsure at all n locations
cacctgcggctgcagcttaagaaccaaaaataaaaatattatcttattagggagataacacactattaaaaatctattagaaaagaaagtacatctaaatatttattaaagagtaaaatatatttaaacctttaaaatattcttactaaaaagaacactcggctagtaatactcgagtaacaaagaaagttatgatatgggtatttagtaattataactatcttgtaaacattacttaaatnttttaataatttatatacaggactttaattgttgttgtcaaaataataacatttattttgtaaaacatattcatatgtataacatattatatgcttgttgaatataggatatacatttcttaaaaaaatatgtataaacaatgataatatactccaattgaaaatacttgtatatatatataactccttagaatacgtttagtcatctgcatcgcaatagagaagaaatcataatatgatttacttagta

SEQ ID NO: 10390 - DNA, 401 bp, Glycine max
agcttctatagaaagttcgttgctaatatctctacaattgcatcacctttcaatgagctggtgaagaagaatgtggcatctacctcgggtgaaaaacaagagcaagcctctgctttgctcatagaagagcttactaatgcacctgttctagctcttcctgacttttctaaaacttttgagctagaatgtgatgcctctggagtgggagttggagttgtattgttacaatgtgggcaccctattgcttattttagtgaaagagaattcatagtgccactctcaactactccacctatgataaagagctttatgtcataataagagccctccaaacttgggaacattacctcgtttccaaagaaattgtcattcatagtgatcatcaatcacttacgtacatt

SEQ ID NO: 10391 - DNA, 366 bp, Glycine max
  unsure (1)..(366): unsure at all n locations
agcttattaagaggcttcctccagaagcttcctcgtggcttctttgagaagctntctcaagaggcttctttgagaagctagatccttatctatccacacccctctattaactaaattaacttccttaaaaataattacggatgataataacgcaacanatattcaaacatcaaacataattactaatagtatatagatatatatatatcagggtgttacaactctcccacccttttagaaatttcgtcctcgaagattaccttactcaaacaaggatgggtgagcttctcacatctgactntctaattcccatgtggcatcttctcctgatgcacctncccagatcaccttgaccaacagaatctc

SEQ ID NO: 10392 - DNA, 319 bp, Glycine max
tgatgaatcatgtatcgtagttaggaacaaggctagattgattgctaaaggatacaaccaagaggaaggcattgactatgatgagacctatgcctttggtgcaaggttggaagctattaggctattgcttgcttttggttgtattatgaatttcaggttatatcaaatggatgtgaaaagtgcttttctcaatggatacattgaagaagagatatatatagaccagcctccaagttttgtagactttgaacatcctaatcatgtttacaagttgaaaaagacactgtgtggtttaaaaaaagcacctagattttggtat

SEQ ID NO: 10393 - DNA, 326 bp, Glycine max
tgtgaaaccttgcaagctccaaacaccccatttgaaaatctttctggattaaacttgtgagcatcaggcccccagagttgagggtcttgttgcagcactgagattggaatctgaatattcattccttttggaattaggatgccttttaaattaacaccttggagagctgttctaacaacaaaggctgctggcgaataaagcctcaaagtctcttgaatcaccatggtcaactgcaagtgtaacatttttatatatggccttcacagatcagtaagaatgctcatgaaacttggaaatgatcaactataattacaataaaatttgag

SEQ ID NO: 10394 - DNA, 497 bp, Glycine max
  unsure (1)..(497): unsure at all n locations
agcttcaagaataatggcctcaacatacttcttattcccagaaggaaattcaataaataggcaaagtaattaagatacattgtataatgaaacgtataataaagaataatggcctcaacaaacttctaatgctgatggttttctgtttggttntccaacaacatttggatccatggtttctcaatttaaagcatttntagaagacactataagcctgttgtggcttacacaggcactagcaggaaaacctgtagggttcttctctagcactagttctcaaggaggtggacaagaagagaccccatgagttatattaattattactgaattcttcaatattcatgattaaggtttccatcaattaatggttattttgtatatatccactcaacatgggagaagtcagagcanactattagtcactactttgtattattattactggtacgaagtatctaccaaccaatgagtcagcttgtcacgatgggatgatacat

SEQ ID NO: 10395 - DNA, 311 bp, Glycine max
caaatacctttcagaggcacatcaacttcaaagtgaagaggaacttgggtaacacacaattcactagtaacagaagacaagacacgatattcagcttcagtggatgattttgaaacagtgggttgtttcttagaacgccaagaaagaatgatatttcccataaagacacaaaagccagaagtggatcttctggtatcaacacagctggcccaatcagcatccgcaaaggcagggaggctgagagagttctgagcaaggaaaaacaaaccttgtctatgagcagatttgatatactacagaagatgatgaac

SEQ ID NO: 10396 - DNA, 261 bp, Glycine max
  unsure (1)..(261): unsure at all n locations
gaacatcacatatcgagacgctcaaaactgaacaacgaaagctctcaagaaacagaaatggtcataacctttcactcggatgtccgaatcaggcacataatatatcgagacgctcgagaatgaacaacggaagctctcgagaaattcaaatgaggataacatttcactcggatgttcgattcatgcgcatcatatatcgagacgctcgaaattaaacaattgaagctctcgagaaaattaaantgtcataactctttactc

SEQ ID NO: 10397 - DNA, 462 bp, Glycine max
  unsure (1)..(462): unsure at all n locations
tgcaagctcaagaatatggcctcatcaaactacttgnttctcgagggtatattctataaatagacctcctatctttaatggagtgggttgccactactggaaaacccgcatgcaaatctttatagaggcaatagatntaaatatttgggaagccatagaacaaggaccttatgttccctctataatggccggaagtgcaacaatagaaaaacctaaagcagattggactgaggaagaaagaagaatagtacaatataatttacaggccaaaaatattattacatctgccctatgaatagatgaatactctagggtttcaaatggtaaaagtgttaaggatatgtgggatacactacaagtaacacatgaaggcacaacagatgttaaaagatctaggatacacactttaactcgtaaatatgaactggttaggatgaatgtaaatgaaaatatacangacat

SEQ ID NO: 10398 - DNA, 375 bp, Glycine max
  unsure (1)..(375): unsure at all n locations
ctatggagaactnttcttaactgnaatttttacacacgttcacctatagtgggaattgatgaacaccttgataattcacagcttgcttcacctcaggtcgcaagccatttagaaacatcacacattntgagctttcaccatcccttccttggtaatgaggaanatacctcactagctcttcanacttggctgcgtattcagctacagtcgtgttcccttgcttgagttcaaggaattccatctccttcttgttcctaacatcttcagggaagtatttctccagaaataccctcttgaaggtttcccaagtcatagcttgaccttcagcctcccagcatnggtgagtgttctcccaccaatactcagtttcttcta

SEQ ID NO: 10399 - DNA, 398 bp, Glycine max
  unsure (1)..(398): unsure at all n locations
ttcttccttcaccagtaacccccaatccaaggtaaataaattgagtttaatttctatccacttttagtataattattatcttacactctccatttatactggtaatcaatcagaaatcatatatgaaaacaactcttaagtaactttatataaaagttaacaaacttattatatgtaccatacataaactgcttactcataaattactatttttnttaggaaatgttttagctttgttaattatctataagctatgtgtatctttcccagcattattctgctatactattagaatgttcaatatgttaaccaaactagtggttgttttgttaattattggacgatacttgaacagaagggaaaaacatgatacatatgaagaacaatggtgggttgaa

SEQ ID NO: 10400 - DNA, 382 bp, Glycine max
  unsure (1)..(382): unsure at all n locations
cagcagaacaattatgacctttccagcaacagatacaaccctggatggaggaatcaccctaaccttagatggtccagccctcagcaacaacaatagcagcctgcgtcttcctttcaaaatgctgttggcccaagcagaccatacattccttcaccaatccaacaacagcaacaaccccagaaacagccaacagttgaggcccctccacaaccttccctcgaagaacttgtgaggcaaatgactatgcagaacatgcagtntcagcaagagaccagagccttcattcagagcttaaccaatcagatgggacaattagctacccaattgaatcaacaacagtcccagaattctgacaagctggcttctcaagctgtccaaaatc

SEQ ID NO: 10401 - DNA, 310 bp, Glycine max
  unsure (1)..(310): unsure at all n locations
agtttcataatgtggtctccaaatatggattggaggaaaatgttgtaagccaatgcatgtatcttaaagtgtgtgggagtaagtttattttcttagtcctatatgtatatgatattttacttgcaagtagtgacttgggtcttttgcatgataccaaaaatttcctctcacaaaactttgatatgaaggatacgggtgaagccttctatgtcattagaatagaaattcatagagatagatctctaagaacatcgagattatctcanaaggcttacatagaanaagttttgaaaagatttaatatgcagaa

SEQ ID NO: 10402 - DNA, 368 bp, Glycine max
aacataaattataggccatcataatagatggatacaaggatgcaaaatctaaagtagcaattggtttttcataaaatccagcccttgcctccaatacctgcaagttgtaaagttcaaaatgcatgcatcaaaaggcaacacagcttgacaagtgaaacgtccaaaaggcaaatacaggaaaaggtgtagaacattaactccaataatattatgtagatctccatacataaagatacttgaaatttgagaattctttcaatttttcatttattaactgaagaacaagagggcatttaagattgagcttgattcaggcctaacatgctgttagagattcccaaacatcaatagttactaatcagagtaaa

SEQ ID NO: 10403 - DNA, 452 bp, Glycine max
  unsure (1)..(452): unsure at all n locations
cttcttcataagggtgnctctttgattcttacagatcaatggcagtggaatggagaaggaagaaagatgattggagatgccacttcaaggaaaagatgagtcaagaacaagcccaccaccataggaagccatggataataagttgaagatacgacaagatgattggagggagagggagagaatgagcacgacattttgtgcctcaaatgaggtctgaactttgaagtgaaattctcaaatgatcaaagttgaaaaaatgcacacacatggcctctatttatagcataagtgtcacacaacaatagagggaatattgaatttctattcaaatatcactcgaatttgnaatcgaattcgtggagccaaattgattagtgaattctagctactggtcaacccactaatccaagatcaagttcaagatgctccactaagtgtgcttacgtgtcatg

SEQ ID NO: 10404 - DNA, 517 bp, Glycine max
  unsure (1)..(517): unsure at all n locations
gccaaagcctctgtgattgattcaagacttcaagatcaagcatcaagaatccaatccaagattcaagattaaagagaagaaatcaagaagcaacaagtcaagacttcatatgggataagtattaaaagattttttcaaaaaaacaaatagcagagttntgttttacaaaagaattttctcanactttcaaagttaccagagtgattactctctggtaatcgattaccagttggctgtaatcaattaccagtgaccaatttggttttcaaaatgttttcaaatggtttgcaatgttccaaaatgattntcaaatagtgtaatcgattacactatattagtaattgattacaagtgaatctgaacgttggaattcanatccaattgtgaagagtcacaacttttcataanatgcattgtgtaatcgattacacctttgtgggaatcaattatcagtaaacagttttgaagaaaaagtaagagttatactcttacatggtctcaaatgcatactcttcat

SEQ ID NO: 10405 - DNA, 480 bp, Glycine max
  unsure (1)..(480): unsure at all n locations
tgatgcagctgagttttgttctacctcatgcactcctcattgactatggcatcatttctggcgctaaactgctgagagttggaagccatcttctcaattaaatttctggcttcagcaagagtcatgtctccaagggctccaccactggcagcatctatcatacttttctccatattactgagtccttcataaaaatattggagaagaagctgttttgaaatctgatggtgggggcaactggcacatagtttcttaaatctctcccagtactcatacaggctctctccactgagttgtctaatacctgagatatccttcctgatggctgtggtcctggaagcagggaaatatttttctaataatactctcttaaggtcatcccagctcgtgatggaccttggagcaaggaatacagccagtcctttgccactccctcttatgaatgangaaaagccttcagaaatatgtgatcctcttgga

SEQ ID NO: 10406 - DNA, 360 bp, Glycine max
  unsure (1)..(360): unsure at all n locations
tcaccaagttcttgtaagcttcccaaccaatcaggtattcttccactcaacccgttgttattcatcaacatgtgttccatnttcttggagtatgagagttgaggtggcacttctcctgttaaattgttgaatgataaatcaagacagttgagaacagtaaggtggccaaattcagaaggaatgctttctgtgagataattctctccaagtctgagacggctgangtttctagaattggttagagtggaagggatgggacctgagaagctgttgttagtcaccgccataaaggcatggaatttgaccagtgagaggaaagaactttcctgaacttgtggtgaaagtatgatttgagctttt

SEQ ID NO: 10407 - DNA, 511 bp, Glycine max
  unsure (1)..(511): unsure at all n locations
tgcaagcttcagtttgcccnctgcgtctaatcacatgccggttctgtggagatatggttcaagctgggaggtctgccatggacgtccgtgacagattaagaggattgtctgagcgttctgtgatgttgaaggacatggatattcaccagatttctgttcatcaaagtggctagttgatagcagtgtagcagcaacagcaacatcagagaaaacagggaaagtaaacaacaatgcaggagtacaattagcaaaagcaaagaggagagttaccaggccagcatatctcagagattatgcctgaaatgcaatgcaaatgatgaggagatgagctggcagtgcaggatttgctagcttctagttgtcccctgctaggatgcatccataaccaattctgttatgcaaatattcctagaagatatggataattcctttagcagtaggcattatatatgcatatgtaaataactagcanaatcaataagaaccaattacactcctctcattccttccc

SEQ ID NO: 10408 - DNA, 238 bp, Glycine max
atattctaaattgtaattagagtgactttaaaatttttaatattatgagaaacgatagattgggtaaatagtcactttggtccctgaaagtgtaactcgctgacaatttggtccctgaatcgagataaattgcaaaataatccctgaaacgtgcatctgttagtcactaccgtgaatggagtagttacctccgtcatttatctctgatgtggttcgtttaatgccacacacacatgat

SEQ ID NO: 10409 - DNA, 323 bp, Glycine max
ctgatgaagatgaatttgtggctacttcatgcactcctctaatgacaatagcatcacttctggcactaaattgctgggagtttgaagtcatcttctcaattaaatttatggcttcagcaggggtcatgtctccaagggctccaccactggcagcatctatcatacttctctccatgttactgagtccttcataaaaatattggaggagaagctgctcagaaatctagtggtgaggacaactggcacatagtttcttaaatctctcccagtattcatataagctctctccactgagttgcctaattcctgaaatatcttttctg

SEQ ID NO: 10410 - DNA, 461 bp, Glycine max
aagaaagagttatatggtaagccttggtacttctatcataaacttatgcataaaaacaaggaatacccgtaggaggcctctgacaacgacaacgaaggttggtggccagcttcttcctgagtgggaatatcctatacaagaggaaccatgacatggtactgcttcgatgtgtggatgccagagaggctaagcaaatgctggtagaggtgtatgaaggatcctttagcacgcatgccaatggacatgccttggcccgaaaaattctgagagtggggtattactggctcactatggagagcgattgttgcatccatgtgaggaaatgccataagttccaggccttcgctgataatgttaatgctccacccataccttttaacgtcttgtgtagcaccttggccattctctatgtgtggaatagacgtgatcagagccattgagcctaaagattcaaacggaca

SEQ ID NO: 10411 - DNA, 371 bp, Glycine max
  unsure (1)..(371): unsure at all n locations
aaggaaattngaatttctattcagatttcactcgaatttgaaattgaatttgtggagccaaaatttcattaattatcattagtgaattttagctatggtttagcccactaatccaagatcaagactaagattctccactaagtgtgcttaggtgtcatgactcatgaggcatgtaaaacatgaaagacatgcacaaagtatgactatatgatgtggcaatgaggtgtagcaagcaaatgctcacctccccctctaaaatttaattggattgggcttctcccaattcaattaaatttatttcccaacacacacatgtacaatgttcctattgaaaaataaaggtttaattgcacttcttactccctaacttt

SEQ ID NO: 10412 - DNA, 443 bp, Glycine max
  unsure (1)..(443): unsure at all n locations
aaggtgtaggacacccctatgttggttagagcccganatanttctcaccttatgaccaaaagtggtacaacataccactgagaaagttaagttaattgaagaaaggatgagaactgctcagagtaggcagaaaagttatcatgataagaggaggaaagatctggaattcgaggttggtgatcatgtattcttgagagtcactccgtggactggggctggtcgagcattgaaatcccgaaaactaacaccgcgctntattggtccttttcaaattcttaagagagttggccctctggcataccaaattgcattacccccgtctctttctaatcttcacaatgtctttcatgtgtctcaagtccgtaagtatatccgtgatccatcccatgtgattgaattggatgatgtacaagtgaacgagaatctgacatatgaaacattac

SEQ ID NO: 10413 - DNA, 125 bp, Glycine max
acacatgaatgacaacgccactcattcatggggctccgaaaaagggtaaaaatggaggatctgcctgaaggtcctctcttaagcaatcatggaacacaactccatactcgaaagtggaggaccca

SEQ ID NO: 10414 - DNA, 471 bp, Glycine max
  unsure (1)..(471): unsure at all n locations
tgccttggtaacttgttaacccagctggccttgaataagaaatctgtacctgtcgcaagagtctgtggtttatgctcctttgtcgaccaccatacagatcttttcccttttatgcagcaacttggagcaattgagcagcctgaagcttatgtctgcaaacattacaacaaacctcctccacctcagcagcaaaatcaaccacagcagaacaattatgacctctccagcaacagatacaatctcggatggaggaatcaccctaatctcagatggtctagccctcaacagcaacaacaacagcctgctccttccttccaaaatgttgttggtccaagtagaccatacgttcctcctccaatacaacaacaacaacaacaacaacagccccagaaacaacanacagntgaggccccnntcgcaccttccttgagaacttgtgagganatgactatgcaaacatgcagttcaaca

SEQ ID NO: 10415 - DNA, 346 bp, Glycine max
gcatgcaagcttgactttcgttcgctcagatagtattctttctggatctcattctatctccattagaaaagaggaggaactaagcaaaatgaagacatgggaagccacatccacttcaacatctaaatcaattggcactggcctatccttacttgaagatttatatatttgcttggaagatcttcttaatgtggcatcaacgcaaaaagtgatttctaaccatcaaggtgagaaatgcatggaagaatagcttgatggttcagcgggaattctggatatttgtggcattacaaggaacaccatgccacaagttaatggaaatgttcaagcacttcattctgctctt

SEQ ID NO: 10416 - DNA, 358 bp, Glycine max
  unsure (1)..(358): unsure at all n locations
actaagctatgctganatatttataatagacccctcagcagcaaaactctcaacttcagaantaatatgaactttcaagcaacaaatacaatccaggttggaggaatcatccaaatctgagatgggcaagtcctccataataacaacagcctgtccctcatttccagaatgctgctagtccaagcaagccatatgttcctcctccaatgcagtagcagcagcaacaacaacaacaaagacaacaagcaactgaggctccttttcaaccttccttagaggagttagtgaggcaaatgaccatccagaatatgcaatttcaacaatagacaagagcctncattcagagtctgacaaatca

SEQ ID NO: 10417 - DNA, 460 bp, Glycine max
  unsure (1)..(460): unsure at all n locations
tataatactcaagctntgaatgctctattcaatggagttgacaagaatatcttcagattgatcaacacatgctttgtggccaaagatgcatgggagatcctgaaaaccactcatgaaggaaccttcaaagtgaagatgtccagattgcaactattggctacaaaattcgaaaatctgaagatgaaggaggaagagtgtattcatgacttccacatgaacattcttgaaattgccaatgcttgcactgccttgggagaaagaatgacagatgataagctggtgagaaagatcctcagatcctcgcctaagagatttgacatgaaagtcactgcaatagaggaggcccaagacatttgcaacatgagagtggatgaactcattggttcccttcaaaccttngagctangactctcggatagggctgaaaagagagcaagaacttgcgttcgtgtcaatgatg

SEQ ID NO: 10418 - DNA, 392 bp, Glycine max
  unsure (1)..(392): unsure at all n locations
ctcagcatcataatcaaccacaacagaacaattatgacctctccagcaacagatacaaccctggatggaggaatcaccctaatctcagatggtctaaccctcagcaacaacaacagcagcctgctccttccttccaaaatggtgttggcccaagcagaccatacattcctccaccaatccaacaacagcaacagccccagaaacaaccaacagttgaggctcctccgcaaccttccctcaaagaacttgtgaggcaaatgaccatgcagaacatgcagtttcaacaagagaccagaccctncattcagagcttaaccaattagatgggacaatnggctacaccaataaatcaacaacagtcccagaattctgacaagctgccttctcaatct

SEQ ID NO: 10419 - DNA, 318 bp, Glycine max
  unsure (1)..(318): unsure at all n locations
gtcccgtaatatatcgagacgctcganattgaatgttgatggtcgntgcaaattgaaacgacaataactttttactctgatgtctgattgagtcccgtaatatatcgagacgcttcgaattgaatcttgatgctctgagcaaattcaaacgacaataacttnttactcggatgtctgattgagtcctgtaatatatcgagacgctctgaaattaatacgaaagctatgagcaaattcaaacgacaataatttttactcggatgtctgantgagtctcgtaatatatcgacacgctcgaaattgaatgttgatgctctg

SEQ ID NO: 10420 - DNA, 458 bp, Glycine max
  unsure (1)..(458): unsure at all n locations
aaagacacacgcctgtttaccatttcttttcctgattacactccagattatttttcaaattcagcaaaggtgatgtttcgagtagactaactggttgacccaaagcactgtatgcagcttcagaaattgcacaggcagaaatagccccaactgattcaccacctaaagcatactgctggaaacctttattgcatgaagagtcctcttcaatatcataagaaaactgaataagttgattaccatataaatttctcaccgttccatcatatgcatcatacaaatcacgcatgaagaacataagtctacgtgtcagtgtaccaggaaggtccgcatggtcactgaaagagctatcacgatttgtcactgaatgaacaaaacattcaagtggattcaacccagttaaataagaactntcaactacagcatatggaatgtatgactgaacagaaatcagggta

SEQ ID NO: 10421 - DNA, 378 bp, Glycine max
  unsure (1)..(378): unsure at all n locations
actcctaccatgtgccacaggatgcttagctaaatcaattgctgatttgttatccatcaacaaccttataggactgcaatttctcaagtttagttcttccattaaagcttccagccataaagcttgacaggctgccatagcaacaacaatatattctgcttcacatgttgacaaagcaactacactctgcttctttgagcaccaagagattggtgatgttccaaatttgaaaacatacccagcagtgtttntcctatcatctttatcaccacaccaatctaaatcactataaccaaacacttctccttctatanttctttgattgaaggatataaaatgccaagatccaatgttcctttcacatacctcagaatcctc

SEQ ID NO: 10422 - DNA, 274 bp, Glycine max
cgcttgatgtgacgacattttaatatgtgaatgtccattaatttgatgcatgactaacgagaaccacccttacaactacgtagactcataaccggagataggcttgaggtcaagatctaatctagttaattagttggtagatgttcacaccaagcttgaactttcattctaaaccctttatctgaccagtaatataattgatcggtatctagcagataagacatttccaaggttgtgaatgtaattggtcggcatcaatgtcttgctgatggca

SEQ ID NO: 10423 - DNA, 372 bp, Glycine max
  unsure (1)..(372): unsure at all n locations
ccaacaacactacaaagaacaagaatggcaccatcaaggacacgcaaagccctctcaacctcgatggtaaaatgaacgtgaccaggcgtgtcaataatgttaatctgcaacaacacatttcccaggatattaaacatataaatatatgaagacaaaattacttacaacacgataattaaccacaattcactcagataataaaaatagtaacagcagaagcattcaaatctcaattccccctttatatttcttgattcctattggttcaaaattcaattcaatttaaaatcaaccaacataacaaactcttcaactctgtccaatttatggcacttcaaaaacacatagcagtaatgattnttacatacactc

SEQ ID NO: 10424 - DNA, 451 bp, Glycine max
  unsure (1)..(451): unsure at all n locations
tgtaatcgattacacacatactgtaatcgattaccagagtgagttttcaganaacattctcaacagtcacatctttttctctgattcttaagtggccatcaaaggcttatatatatatgactagagacacaaatttaacaagagttttgaagaacaaaaaggtcttatcctcttaacaagcaaaattgttttatcctcttacaaattccttggccaaaacacttgtgattcaataaggaattatttgagtgctcaaattgttcaatctatctctttcaagagagatttcttcttctcttcttctttattctgaaaagggattaagaggccgatggtctcttggtgtgaaaggattctaaacacaaaggaaggattgtccttgtgtgtttagaacttgaaaaggaattgcaagatagtggaactctcaagcgggttgcttgggactggacgt

SEQ ID NO: 10425 - DNA, 394 bp, Glycine max
  unsure (1)..(394): unsure at all n locations
ntatgtgatgaacattggttaatggcaatgcatgaagagctgaatcagttaaagagaaatgatgtatgggatttagttcctaaaccaacctctcacaagccaatcgaaaacaaatgggtgttttgaaacaaacttgatgaatctggcatcatagtgaggaataaagaaagattggctgcnaaaggatataactaagaagaaggaattgaatatgatgaaacctatgctctagttgcaaggttagaagctataagattgctacttacatttgcttgtattatgaatttcagactttttcagatggatgtaaaaagtgtcttcctcaatggatgcattgaataagaagtgtatgtagaccaaccactangatttgtggatcatgaacatcctgact

SEQ ID NO: 10426 - DNA, 438 bp, Glycine max
tattcggagacccatgaattgattgcctagcgcagattatgcgtcctccaccatcgagtctaaagccccatggattgattgcctagcgttgttcgtctatcctccaccctcaaatcttattcggagacccatgaattgattgcctagcgcagttcatgcgtccccaaccatcaagtctggagccccacgaattgattgcctagcgttgttcatctatcctccaccctcaaatcttattcggagtcccatgacttcattgccttgctcggttcatgcgtcctacaccatcgagtctggagccccacgaattgattgcctagcgttgttcccctatactccaccctcaaatctaattcggagacccatgaattgattacctagcgctgttcatgcgtccacaaccattgagtctggagccctacgaattgattgcctagc

SEQ ID NO: 10427 - DNA, 456 bp, Glycine max
  unsure (1)..(456): unsure at all n locations
tactaatgctcctgttctagctcttcctgacttttctaaaacttttgagctaaaatgtgatgcctctggagtgggagttggagttgtattgttacaaggtgggcaccctattccttattttagtgaaaaacttcatagtgccaccctcaactaccccacctatgataaagagctttatgccttaataagagccctccaaacttgggaacattaccttgtttccaaggaatntgtcattcatagtgatcatcaatcacttaagtacatcagagggcaaagcaagttaaacaagaggcatgcaaaatgggtagagtacctagagcaatttccatatgttatcaaatacaaaaagggaaaaacaaatgtggtagatgatgccctttctaggagacacacatngttntgctccctangagcntcaaatttatgatttgataatattagggacttgtatgc

SEQ ID NO: 10428 - DNA, 435 bp, Glycine max
tgtaatcgattacacacatactgtaatcgattaccagatgagtttttcagaaaacattctcaacagtcacatctttttctctgattcttaagtggccatcaaaggcttatatatatatgactagagacacaaatttaacaagagttttgaagaacaaaaaggtcttatcctcttaacaagcaaaattgttttatcctcttacaaattccttggccaaaacacttgtgattcaataaggaattatttgagtgctcaaattgttcaatctatctctttcaagagagatttcttcttctcttcttctttattctgaaaagggattaagaggccgatggtctcttgttgtgaaaggattctaaacacaaaggaaggattgtccttgtgtgtttagaacttgtaaaaggaattgacaagatagtggaactctcaagcggg

SEQ ID NO: 10429 - DNA, 392 bp, Glycine max
  unsure (1)..(392): unsure at all n locations
agcttgcacctgctagcccacggaattagtgggtcgacccatataaaaaatttttattaaaaaattaaattttaaaacgtaaaagttggaaaccatttaagaactatgaaatatcaaataaaaaattatttgtccaaaataattacaataattacatctcaagtcacctaaaaaaagtattnttttcatatcatatntacttaatttgtaattctatattaaatcaaaattatcaccattcaccanaccattgaaaaatatataaagtacttacattctatatgttttttaaaagttatttttttcttaanttatgccccttatttattagtatcatatatgttatattannaatataaaagtctgtcagtaaaacttgtttaaacacgcag

SEQ ID NO: 10430 - DNA, 458 bp, Glycine max
  unsure (1)..(458): unsure at all n locations
tatgctgcacacatctacaacagacctcctcaacctcattatcaaatcagccacaatagaacaattatgacctctccaacaataggtacaatcctgggtggaggaatcatcccaaccttagatggtcaaatcctttacaacagcagcaacaacaaccttattttcaaaatgttgctggcccaagcagaccatacgttcctccaccaatccagcaacaacagcaacagccccagaaacaacaaacaattgagactcctctgcaaccttcccttgaagagcttgtgaggcaaatgactatgcaaaacatgcagtttcaacaagagaccagagccttcatttagagcttaactaatcagatgggacaattggctacacagttaaatcaacaacaatcccagaattgtgatagaataccttctcaatctgtccagaatcccnaaaatgtgagtgtcattaca

SEQ ID NO: 10431 - DNA, 467 bp, Glycine max
  unsure (1)..(467): unsure at all n locations
tgttggagataaaggtgntgtggaggcagccctcgctataggaagtgaagttagacatttgcaacgcgaaacttttgaaggggctcaaacattgatgtcaaattttactgaattcgccacggtggggaagcatatgacaatacttgcaggctcaccaaagcttgaagtgtatcaaactgactttgggtggggaaaacccaagaggagtgaagtagttcatgtagataattcaggaacaatctccctttctgactgtagagacaaagaaggtcgaattgaagttgggttagcactgcaaaagattcaaatgaatcaattcagtaccactttggaagagcacctcacagaaattggagttcttgactgaaaatctccactcacagaatatggttgcacaatgcacacttgcacagttcaactcctaccaaccgtacgcgtagaatgataatgatattaactgttacata

SEQ ID NO: 10432 - DNA, 402 bp, Glycine max
taagaggtctggcagtgctaatggatgtttcccttgattggagaaggtagaaatattgtctaagatggagtgctcttttgatatcaccttttgttgcagaacaatttttcttcttaacaatcttgttagaggaatcattttcctctttatccttccccttagactttgaagacaaggccttactatacttctttgtcttttgtgtttcttcctcatccctcttatctttcatagttagttgatcttttgccacctgtgaaggtgtttaaggatgcaacacaaattttgtgccaagatacgtgacggtaatctcattggttaggcaattgcaaacgatcttcctatcaaattgccatggccttcctaaaagaatatgtcctgcctgcacgggaactatatcac

SEQ ID NO: 10433 - DNA, 366 bp, Glycine max
  unsure (1)..(366): unsure at all n locations
tatgtgtgggatacctagtgtgagcatagtttccaaactcttaaggaaaagttgacgaccgctactatgttagttttgcctaacatgagagaaccctttcaggtgtattgtgatgcaccaaagatgggtttaggaggagtattgatgtaaaatggctaagtagtggcctacgcttctagacaactccagactcatgagaggaattatcccactcatgatctagagtaggctactgtagttttttcccttaagatatggaggcattacctctttggccccaagtttgaggtgtttagtgattataagagccttaagtacttgtttatgttggatcgagtggcctcagaataattaagaaggnggggg

SEQ ID NO: 10434 - DNA, 306 bp, Glycine max
  unsure (1)..(306): unsure at all n locations
agcttaagctccttcaactgcacaaggcttttaatatttgaagagtatncttgtggaaacctcacccgacnaaagaccactgacaacttatctttctctttctggacaaagtatggcagggctggggcaagtaaaatttctttccatcaaaccttggatgcaactgtgatcgtatgcccatataagctaaatcttgacgggtattcaagccatccttcgtcttgccttgaatgttaaagagcgttccaatcacactgtcacaaacatttttctccacatccataacatcaatacaatgtctaacgt

SEQ ID NO: 10435 - DNA, 422 bp, Glycine max
  unsure (1)..(422): unsure at all n locations
ttttagtagatgaagatgaatttgtggctacctcatggactcctctaaggacaatagcatgctttcttgcactgaattgttgggagttggaagccatcttctcaatcaaattcctagcttcagcaagggtcatatcaccaagatcttcaccattggtagtatcaatcatactcctctccatgttgctaagtccctcatagaaatattgaagaaggagttgcttagaaatctggtggtggggacaacttgcacacaatttcttgaatctttcccagtactcatacaagctttctccactaagttgcctgatgcctaaaatgtcttttctgatggcagtggtcctagatgcagggaagaatttctccaagaacaccctcttaaggtcatcccagctganaatggacctgngagcaaggtagtat

SEQ ID NO: 10436 - DNA, 467 bp, Glycine max
  unsure (1)..(467): unsure at all n locations
tgtcagcttcttctggcaatggttggaccagggtcatttttgaaaagncctttggtcgtgattcagattcttcagctgcattaactagatcactcaagcagtatctgacagaggatcaaattttcaggttttctaactaaaactgataatcttcaattcaactttaagattgtaaagtacattttataaaatgggaaatattatacaggattgaccactatcttgggaaagagcttgtggaaaatctttctgttctccgattctcaaatctcatctttgaaccattatggtcaaggcaatatataagaaatgtacagttgatattctcagaagattttggcactgaagggcgtggcgggtaacctttattccttaacagctttcacactttctgttcttataatggggattcttatacattttcatatctgtaccatgtgtaggtactctgaccattatggtatcat

SEQ ID NO: 10437 - DNA, 413 bp, Glycine max
  unsure (1)..(413): unsure at all n locations
tgaagganaacttgatgtcttgctcaacctagtaactcatcttgtcataaattagaaatctacacatgttgcaagagtctgtggtctatgttcttctgcagatcaccatacagatctatgtccttccttgcagcaatctagagtcaatgagcaacctgaagcttatgctacaaacatttataatagacctcctcagtagcaaaaccaacaacaacagaataattatgatctttcaagcaacaaatacaatccaggttggaggaatcatccaaatctgagatggacaagtcctccataacaacaacaacagattgtcccttcttttcagaatgctgctggtccgagcaagccatatgttcctcctctaatgcagcaacattagcagcagtttgaacaaagataaccagcaactg

SEQ ID NO: 10438 - DNA, 271 bp, Glycine max
  unsure (1)..(271): unsure at all n locations
agcttcaatggctcaatgagcaaggggatttgatagtcaatcaacaagtaaagatacctttttctataagagactatngcgatgaagtttatgttatatactccctanggaagcaaggcacattttgntgggtagagtatggcaatatgacaagaaagcaatccacaatggtctcaccaatgaaataaccttcacccatggaagcaaaanagtaaaacttgttcccttgacaccttcaaaagtggttggggatcaagtacaaataaaactc

SEQ ID NO: 10439 - DNA, 467 bp, Glycine max
ttatgcgggcatcgtataataacaccataacatgatgggtttggtttaatttcattttggaacacttgccgctatctttgctcttagatccttgcgcaagattttgcctgacggtgacttgggaattgcatcaatgaagaatactcggtttattcttttgtaaaacaccacctgcacaattccacaactcattacattccttattttgtggctaagaaaggtacagtacacatcataaacctgtaaaaaacgcatttatatctgaaagtgacccagacatttagaattaggtgggaagaagcggtgtgggtcagttataagaaaaaatgagaaattatattaatacggcatgaatgagattatttttaaaatgaatatatattagatcaagtgaaaattaatagcaaagtaattataacgtgttttatttatttattaagaaagtattaaataatagtgaatatatg

SEQ ID NO: 10440 - DNA, 458 bp, Glycine max
  unsure (1)..(458): unsure at all n locations
ntntattcacagaaggaaattcaataaataggcttcctattttaatggagaggggttaccactactggaaaacacaaatgcaaatcgtcattgaggcaattgacttaaacatttgggaagccatagaaataagaccttatgtacccactgtggtggctggaaatacaacaatagaaaagcctanggaaaattggagtgaggaagaaagaagacgagtacaatataacttcaaagccaaaaacataattacttcttggataaatactttaactcatgagtatgaattgtttaggatgaagacaaatganagtatataagatatgcagaanagattcacacatatagttaatcatcttgcatcattaggaagaatattcccaaacgaggatctcataaataaagtgttaagatgtctaagtagaaaatggcaaccaaaggtaacagccatcatagaatct

SEQ ID NO: 10441 - DNA, 265 bp, Glycine max
  unsure (1)..(265): unsure at all n locations
tctcgatatattatgtccncgaatcagacatctgggggtagagttatgaccatttgaatttctcgagagctaccgtagttcaatttcgagtatctcgatatactattttcccaaatcggatatgccttgcataagctatgacccattcaatgtctcgagatcttcggctgttcacattcaagcgtgtcgatatattatgtcctctaatcacacatccgagtgaaatagtatgagtagtcgattttctcgagagattccggtgttc

SEQ ID NO: 10442 - DNA, 408 bp, Glycine max
  unsure (1)..(408): unsure at all n locations
ntgagccaattcagacaacaataactttttactcggatgtcttattgagtcccgcaatatatcgagacgctcgaaattgaatgttgaacctctgagcaaactcaaacgacaataactttttactcggatgtctgattgagtcccgtcatatatcgagacgctcgaaattgaatgttgaacctcatagcgaattcaaaccacaataactttatactcggatgtctgattgagtcccgtaatatatcgagacgctcgaagttgaatgttgaagctctcagccatttcaaacgacaataactttttactcggatgtctgattgagtcccgtaatatatcgagacgctcgaaatcgaatgttgaagctctgaactaattcaaacgaacaataacttttactcggatgtctga

SEQ ID NO: 10443 - DNA, 226 bp, Glycine max
cgacaataccttgtgacacggatgtctgattgagtcacgctttatctcgagacgcttgaaattgaataccgaagctctgagcaggtacagacaacaataactttttactcggatgtcggattgagtcacgtaatatgtcgagacgctcgcaatagaataccgaagctctgatcagatccagacgacaatacctattgactcggatgtcggattgagtcacgtaata

SEQ ID NO: 10444 - DNA, 370 bp, Glycine max
tatgaggagaagcataagattaagcaagagatcaccattctactcttcaagttgcaactgaaggagaaggaagaaagtcaaggaaatgaaagaagtcattgatgccgaggtagaggttgaggtcacggtcgaggataggttggaggtggcaatagtgtacgaggttcaaatttcatcaacaatagttacgagaaatgaaaaagctcaagagaatgtggaaaaggctatacaagcacaaggtatgataaatctcaaactcgatgttataaatgtcaaaagattggccactatgcttcaaaatgtagattcgccaagaatagagttgaggaggagactaactatgtggagcaaaaggatgagaagttcaaat

SEQ ID NO: 10445 - DNA, 454 bp, Glycine max
  unsure (1)..(454): unsure at all n locations
caagctgtttaccccatgttgagtntgcttacaatatagctgttcatagcactactaattgttctccttttgaagttgtttatgtttttaacccactaacttctcttgatcttttgcctatgcctaatgtttctatttttaagcataaagaaggtcaagtaaaggcggtctatgtgaagaagcttcatgagagagtcaaagatcaaattgacaggaaaaataaaagctatgctaaacaagccaacaaagggagaaagaaggttgtcttcgaacctggagattgggtttgggtgcacatgagaaaagaaaggtttatggaacaaatgatatcaaagcttcaaccaaggggagatggaccattttaagtgcttgaaagaatcaatgacaatgcttacaaagttgagctacccagtgagtataatgttagttccaccttcaatgtctctgacttatc

SEQ ID NO: 10446 - DNA, 407 bp, Glycine max
tatacatgagtatgattttatgatcctatttctataatgttgagaaacatagacttcctcttcaatgtatccgtttagaaaagaactttcccatccatttggtacagatttaaatctataatgcaagcaaatgcaaccaacaatctcacaacttctaatctaactatcggagcataggtttcaccaaagtctatatcttgttgttggttataacccttgactactagcctcgctatgttactagttattaagccatgttcatctagcttattttttaaaacccattttgcacctataatgtttgtcttactaggcctaggtactagttcccaaaattcatttctcttagactaattaagttcatcatgcatagctataacccaatgttcataacaagtgcctattca

SEQ ID NO: 10447 - DNA, 326 bp, Glycine max
agcttgaaggtaaactagatgccttggtttacctggtaacccaactggccttgaatcagaaatttgtacctatcgtaagattctgtggtttatgctcctctaccgaccaccatacaaacctttgcccttctatgcagcaatctggagcaattgagcagcctgaagcttatgctgcaaaaatttacaatagacctcctcaaccttagcagcaaaatcaaccacagcagaacaattatgacctctctagtaacagatacaatcccggatggaggaatcaccctaatctcagatggtctagccctcaacaacaacaacaacaacaacct

SEQ ID NO: 10448 - DNA, 412 bp, Glycine max
tttgcagctggaatcatttatcctatctcctatagcttatgggtgagtcccgtccaggtagtcccgaagaagactagcctcacagtgatcagaaatgagaaggaggagctgattcctattcgggtgcagaacagttggagagtctgcattgactataggaggctgaaccaggttaccaaaaagaaccattttcccctgccattcattgaccagatgcttgaacgcctggcaggtaaatcccactactgtttccttgatggtttttctggttatatgcaaattactattgctcctgaggatcaggaaaagaccacattcacctgccccttcggcactttggcttataggaggatgcctttcggcctgtgcaatgcccctggtaccttccagcggtgcatgattatatatttca

SEQ ID NO: 10449 - DNA, 227 bp, Glycine max
attatttcctaataactgtcgttcttggtgtgatacatacgagataatattccattagcagaatatatgatcagacattgctatactgttcatttaaaccacgttgaaattgcatcgctctatcttcgagttttctttttgcaatgatagcaagagtagaacaggtacatcgcacagtacaagaacaaataggatctggcctaaaattctctatttcatcccataca

SEQ ID NO: 10450 - DNA, 393 bp, Glycine max
cgccttgaagttggactcggtccttcggttagagggtcattctatatgtaaatagtcccaaaaccagaaatggacgccttaagaggctcaacaattttcatagcagtcgggtgttcccccattatgttgttatggaaataaaagtggagctgggtgagtctttccacgggttttgtggatagagacataggacactcttttgtaaacacttcactatttgctggtaaggaacctgacatgataaccatgaaatgcaacgaaaaaaggagacacacaagtgaagccatatcggtacaatttttaggtatgttagccaacggttgcaaacagctatatatataggctaccagaagatataggtaccttgtggtggataactttattagctacttt

SEQ ID NO: 10451 - DNA, 420 bp, Glycine max
ggacacttgaaactcagctagtacatatagttgcaacctgaggtcctttatagacttattaaaaatatcagccaagtgctacgagatctatctttatgtgtttaggatgttcatggaagactaaattacatgcaacgtgaatagagcaactcgattgtcacatataagcttagtgtcttgagtgtttgcaaactttaattgctgtacaaggtgcctaagccatgtaatttctcatgcaacttctgttatggtatagcattcaactacagcgctggatctcgcagctatattttgcttattgcttctccatgagatcaaattccctacgagcagaacacaatagcctgaggtataactcctgtcgcatcagcactagactaacaaacaatattgacattgtcttcgccttcatatacaaat

SEQ ID NO: 10452 - DNA, 416 bp, Glycine max
  unsure (1)..(416): unsure at all n locations
tctaaactntgtacaagaatgaagctctgataccacttgttagacaagtggcctcagatatcttaagaagggggggttgaattaagatattccaaacttttctcctaattaaaaatctatcttactttttacttaaagttatgaattcccttaatgacaatcttcttaaatattaattcaaatgaagcaacttgaattatgaatataaagcaataataaataaaggagattaagggaagagaaaatgcaaactcagttttatactggttcggccacacccttgtgcctacgtccagtccccaagcaacccgcttgagagttccactaacttgtaaattccttttacaagttctaaacacacaaggacaacccttcctttgtgtttagagattctttacaacaagagactcacagtc

SEQ ID NO: 10453 - DNA, 386 bp, Glycine max
ctcagcttctcaagatttaagttcttcctaacactgtttattcttagtcccaagtcctataacaacttgcatttgcccatcgagtttgcgggtgacaagtggttgaaaataacaaattaatgcccaacttgctccacagagtcctccaaataaggcttaggaacttaaagtccctatcactaacaatgctccttggcaaaccatggagtctcacaatctccttgaaaaacaaatcagccacatgggaagcatcatcaatttttttacatggaataaaatgagccattttagagaacctatcaacaaccacagaaatggaatctctaccatagcttgtttttggcagccccataacaaaatccatggataaatcaatcctaggatac

SEQ ID NO: 10454 - DNA, 401 bp, Glycine max
tgtaggccttggatcttcttcatcaatggagtcctttgtttcttgaagatcaatgacagtggaatgcagaaggaggaaaggtgattggagatgccacttcaaggagaagagagtcaagaacaagttcaccaccatatgaagccatggataagagcttgaaggttggagaagatgagtggagggagagggagagaaggggcacgaaatttatgcctcgaatgaggtctaaaatttgaagtgtaatttctcaaatgatcaaagtagaaataatgcacacaaaaggcctctatttatagcctaagtgtcacatgaaattggagggaaatttgaattttattcaaatttcacttgaatttaaattcgtggagctaaatttggagcctaaagttcactaactatga

SEQ ID NO: 10455 - DNA, 410 bp, Glycine max
acccagctggccttgaatcagaaatctgtacctgtcgcaagggtttgcggtttgcgctcctctgctgaccaccatacagacctttgccataccatgcagcaacctggagcaattgagcagcctgaagcttatgctgcaaatagttacaatagacctcctcaacctcagcagcaaaatcaaccacagcagagcaattatgacctctccagcaacaaatacaaccctggatggaggaatcaccctaacctcagatggtccagccctcagcaacaacaacagcagcctgctccttccttccagaatgctactggtccaagcagaccatacattcctccaccaatccacaacagcaacaactccagatacagtcaacagttgaagtcctccacaaccttcctcgaagacatgtg

SEQ ID NO: 10456 - DNA, 390 bp, Glycine max
  unsure (1)..(390): unsure at all n locations
agctggtagggntaaagtctcatgattgtctcttgctcatgcaacaattgatagccgnggctatacgagacatcttgccaaacaaagtcaggttagcgataactcgcctgtgctntttattccatgctatatgtagcaaagtcattgatcctgtcaagtttgatgagttggaaaatgaggccgcaattatactgtgccagttggagatgtattttccccctgctttctttgacatcatgattcacttgattgtgcatctggtcagagaaatcaaatgttgtggtcctgtttatctacggtggatgtaccccggtgagcgagtcatgatgatcttaaaagggtatacaaagaatctatttcatccagaagcctctattggtgagagggaca

SEQ ID NO: 10457 - DNA, 420 bp, Glycine max
  unsure (1)..(420): unsure at all n locations
ctcacctattaggcttaaattctganatatacccccctccttacctctccctttgatgctntacatggagtacttgaaggaagtggaaggaaaaactgtgcatgattatcttgaggtaaagatgggtaaaatgacaaagccaataggtgtggaaggaccagtgatagtgggtgctggtccatcagggcttgctgcagcagcatgtcttaaacagaaaggcattccaagcctaatccttgaaagggatgattgcttggcttcaatgtggcagctcaagacttatgaccgactatgccttcatctacctaagcaattctgccaactccctctaatgcctttcccccaaaacttttcctcttatccaaccaaacaacaattcttggnctattttaaagcctatgctgaccattttgacataaa

SEQ ID NO: 10458 - DNA, 295 bp, Glycine max
cacatagaaatgagagcgatctaggtcctttatatcatattatcgttttaatcaatctatagtttttagaaattcttcacgagttctaataatagttataatatctacttaaacaacaattatgaaaaatctattttcatattttgtttcttcatgaaaatacatggacaaataggatcgattttatattcttcctttaggaaatactcactaagtgtatcatactacatgcgacttgattgatttagcctatatgaagtactcttcttgagaatatgtattatttggcaaatta

SEQ ID NO: 10459 - DNA, 417 bp, Glycine max
taagaaatctatatatggtttaaaacaagcctttcgttattggtgccttaagtttcatgggataatttcttcatttggttttgatgaaaaccccatggatcaatacatataccacagggtcagtgggagtaaaatatgttttcttgttttatatgtagatgatattttacttacagccaatgaccggggtttgctacatgaggtgaaataatttctttctaagaattttgacatgaaggatatgggtgatgcatcttatgtcattggcattaagattcataaagatagacttcaaggtattttatgtctatcacaggaagcctatattaataaaattatagagagatttcagatgacagattgttcaccaagtgtcgctctcattgtgaagggtgataggtttaatctgaatcaata

SEQ ID NO: 10460 - DNA, 382 bp, Glycine max
  unsure (1)..(382): unsure at all n locations
agctcaacacaaggcatgcgaagagggtggattttctanagcaattcccttatgttatcaaacataatatgggaaatggtaatattgcatccgatgctctttctcggcgccatgcattactttctatgctcgaaacaaaattgattggtcttgaatgttcgaaaagcatgtatgaaaatgatgaaactcttggagaaatttttaaaaattgcgaaaaactctcagaaaactggttctttatacatgaatgctttcttttaaaaaaaacaaactgtgcgtgcctaaatgttctactagaaatatgcttgtttgcgaagcacttgaaggaggtctaatggggcattttggtgttcacaagactctataaacatttcaagaacac

SEQ ID NO: 10461 - DNA, 433 bp, Glycine max
acggacactatgaaactaagcttgattcttaagaatgtccttatttatattatacacattgttttgctcatcatttacaacttgctcttgttgcttctgctaaagtagttgatgtacattttttttttcaaaacttgaatatgattgtaaatgttatgtgttcttgtaaacgcaatgatgagttacaagtttcttatgtaactaaaattgctcatttggttgcaaatgtggatattgagactagaaggagagctaatcaaattggcacactatagagacctagagatagtagatgaagttcttatttctattcaatttgtagtcttttacgcatgtataactatttcagttcttgaagatttagctgttaaaggatctacttttgctcaataaggtgatgctactatgcctcgaaagaattgatttcatttga

SEQ ID NO: 10462 - DNA, 411 bp, Glycine max
  unsure (1)..(411): unsure at all n locations
actaagctacacagaatcggatgtatattctgtgagcatattttactactctaactggaagaacccctttggtgctagttagagatatgaaatgtgcattggaaaaggaaaattttaaagcaatcttggacttttcatctggtgaatggccgctntttcaaaccgaacagctggcatatttagcattgaggtgttgtgaaaagacttggttgaaccggccagaccttgtgtcagaaatctggagtgttcttgaaccattcaaagctacttgcattgacacgtcatcacatttgatttctaagaagcttcgtcgtgttccttcccattntgtgtgccccattgtccaggtgaagatcttaatttttcacattcattctttttaaaaaaactggtctttattgtatggaaaat

SEQ ID NO: 10463 - DNA, 417 bp, Glycine max
  unsure (1)..(417): unsure at all n locations
ctcagcttttatccaggctcatcttggtggtgaagctctnttttccatggcttattccttaatggatggcgcctcctctcacctcttctcctttgtcttccgctgcatctccatggtgaaaaatcaccattgaaggacctcattgaagctcaaagatccagcctccatagaagctccacaagcaagcttccatcaaaatggctcgaagcggcttcctacaccaatgtcacgaggagtgtagtggtcagattcatcaagagggaactgatttgtcggtacggactccctaggaagatcattaccgacaatggtaccaatctgaataacaagatgatgtaggaaatgtgcgcggatttcaaaatccagcatcacaattccacgccctatcgaccaaagatgaacagagctgtggaagca

SEQ ID NO: 10464 - DNA, 419 bp, Glycine max
  unsure (1)..(419): unsure at all n locations
tgccaatgctctattggctaatgagtcggtccatcctctcgaattccaatcgaatcatgagtcatcacataaataactccagcttcacacagtgcagaaatccatatggcaactctcacgtagtcagtgaagacaaagggcatttagattttgctgaaacaaatttcttgtagcatctgcagggctttttggagtgtatgtatgaaagctgaaatttaattagaagggtagtcaataatccagaaaaaatgatggaagtcaagttttatttatcttaaaactttgaaggctatacatgcatgaagcaaaaagatggatgatgagtaaagatgcaatgtacttaatatgaattntaattgtaattaggaaagttaatgaatataacaaaccatggaaatgaatcaccatcattcagtaaa

SEQ ID NO: 10465 - DNA, 446 bp, Glycine max
ttaagcaccgcagctgcagctctcatccacagcattccatctgtgttcttattagtaaatctgatgcacttgccacaattactaatgattccaaattatcatgattcctcactagttcagatatcaattttacaatccgctgattgattctccacaacttctgacctagattgtcatctttggcaatccatggctgcaattccttctcggcctgacaagcaacaagtcatgggatgaaaaatgaaatattttaaaaaaatctacaaaatggaagctgatttggaacacaggttagatgagctcttctgcataagatatttaaactttctatacattaaaagctatgtctcatgtgggaatataatatggtaattcaaaaattctgtagcctcgcgcgataattcctaacaattcttgactaacaaaacacgtggcctacccatatt

SEQ ID NO: 10466 - DNA, 226 bp, Glycine max
gcattctgagagatgcttctgagcctgacgctgagagagatgttcaacatcttccccccagaagtttctgtggctgatggcataagaatgtccaacatcctccgctccaatgctgaagccctccctcacccagtgaagaggaatcaacggaagaagaggatcaagccgcataggagacccctgcaccaatggcaccagaacctgctccaggagacctcattgacct

SEQ ID NO: 10467 - DNA, 401 bp, Glycine max
  unsure (1)..(401): unsure at all n locations
tgcagctggattcctttagtagggaatctatccttcctaagatggagccaaacccagtcacccttattaagaactagctctnttcttcctctattgcctttagttaaatacaccttgtttggttctctatntggttcttaaccctctcatgcaacttctttacaaactctgacctagattccncttctttatgtataaaagaagtgtctagtgggaggggaatgaggtctaacgagttaggggattgaacccatagacatcctcaaaaggggactgcttggtggttctatgaacccncctgttgtaggcaaattctacatgaggaagatactcatcccaagacttatggtngcctttcagatgaacccttaaaagggtggataaagacctattcactacct

SEQ ID NO: 10468 - DNA, 378 bp, Glycine max
ttagcaactctatgcacaaccccatacttctggtgcaaggatgacaatgacctgttacaaaagtggctctcctagtcactgataatggctctaggcacaccaaacttgcaaaaaatgttcgatctcacaaaatccacaacaactttagaatcattagttatggtggccttagcttcaacccacctagaaacataatcaacaacaagcaagatatatgaaaaaccatgagaaataggaaaaagacctataaaatcaacactcgaaaccagcgaggctgacagttgctccaaaatagctttgtcgaccctctccatcatggtcaatagatccttgtcaaaatacttgaacttggtggggtcagactgctattagaacgag

SEQ ID NO: 10469 - DNA, 366 bp, Glycine max
tcttagtttcagatgatgcagttgagtttgtagctacctcatgcactcctctaatgactatagcatcatttttggcgctaaactgctgggagttggaagccatcttctcaattaaatttctggcttcggcaggagtcatgtctccaagggctccaccactggcagcatctatcatacttctctccatattactgagtccttcataaaaatattggagaagaagctgctccgaaatctgattgtgagggcaactggcacatatttttttaaatctctcccagtactcatacaggctctctccactgagttgtctaatacctgagatatccttcctgatggctgtggtcctagaagcagggaaatttt

SEQ ID NO: 10470 - DNA, 374 bp, Glycine max
cttcctattttcagctgatgaagattattttatggctactacatgcactcctctaatgacaatagcatcatttctggcactcaattgcttggacatagagacagtgtgggggacacaaacactggctgcagcaaaggtcatgtctccaagggctccaccactggcagcatctatcatgcttctctccatgttactgagtccttcataaaaatattggagaacaagctactccgaaatccgatggtgagggcaaccggcacatagctttctgaatctctcccagtattcatataggctctccccactgagttgcctaatgcctaaaatatcctttctgacggctgcggtcctggaagcaacgaaaattttttcta

SEQ ID NO: 10471 - DNA, 380 bp, Glycine max
taactccaataaaaatgatgagtctaagtgatatttataccaggcgcaattattgttttgtggaaccagaaaattttgaagaagcaattaagaaagatgcttgggggaaggcaatgcaagaggaaatagatgcacttgaaaagaacaagacatgagaaactggttgagaagccaaaagacaaagaagttattggagtgaaatgggtctacaaggtgaagcataatccagatggtttcagtccaaaagaacaaagaaaaacttgttgcaaagggctattctcaacagcccagtgttgattatgaaaaaggttgttgcaaacttgttgtccacatttgtaagagaatgtaatattttataataaatcatcaattaagtccat

SEQ ID NO: 10472 - DNA, 456 bp, Glycine max
  unsure (1)..(456): unsure at all n locations
cttcactacatcaagaatcaccttgttgagtcttctctgnggctgtcttactgggttagctccatcctctanatatattcgatgcatacatgtggatgggctaataccangaatgtccgccagggtccagcctatagccttcttattcttcttgagaacagacaacaacttctcctcttgctcatcagcgagggaggcagatataatcactggaaaacttntgctatcatccaagtaagcgtatttcaaatttgatggcagaggcttcaattctggtgtggtcggctggatagtggtagaaggagatggtttctcaccctgtacctcatatagaaagtcagaggtatgtgtacttccctaaatatggttagtcctatctgactctatnaaatcaatctcaagaggtaaaacaccaccaccagacatgcaatcaatatcacttctagaatcactctc

SEQ ID NO: 10473 - DNA, 291 bp, Glycine max
  unsure (1)..(291): unsure at all n locations
gcgtctccatatattactgtctctaatcctacatcgtagtaaaaagttattgtcgttagaatgtgctcagagcttctgttctgaatattgagagtctcgatatactacggaacacaatcggacatctcagtaaaaagttattgtcgtttgaatttgctcagagcttctgttcttaattacgagagtctcgatatattacgnggattcattcggacatccaagtaagaagttattgccgtttgaatatgctcaaagcattcgttgtcaattacgagcgtctagatatattac

SEQ ID NO: 10474 - DNA, 445 bp, Glycine max
  unsure (1)..(445): unsure at all n locations
ctgcagctaacnagacatgctgttctgcatatgaaggttatatgcagggcattctnnttggattatgatggaacagtattgccttccgttgttaaaactccgagtcctgatatcattgatgttctaaatattctttgcagtgaccctaagaacactgtgtttatagtaactggcaggggacaaccacgctgagtgaatggtatgatcagtgtgagactcttggtatagcagctgagcatggttattatctaaagtgagatattcctctcctcaattctgctgataatgataatgcacatcctctatttatattttacaagaatgagaaggaagggaaccatatgagggagaaggaatagatatgtaggttttcatacatcgacgatgcatatatttgcatcatatgtagtggattagttatctatacattctattggtaagttct

SEQ ID NO: 10475 - DNA, 439 bp, Glycine max
  unsure (1)..(439): unsure at all n locations
agcttncatcactaaccctcaggagactaaggagatagatctcatgttatagaattgttggagaagggctgngtccaagagagcctaagcccatgtgctatgccgatgtagttggtgctccaaaaggatggtacgtggagaatgtgtacagattgcatggccatcaacaacatcacgataaagtataggcaccccattcctagactagatgatttgctngatgagttgcatggtgccaatatctnttcataatatgatcttataagtggctatcaccaaatcaggatgaaatagggtgattgttagtgtttagctctactgagctttaagagattggctaagattntgttaatacataagcacttagacaatgaatgaaagctggagttgctgcacatgatgtccaacgttatgtcaaggaataagatctggctgcaca

SEQ ID NO: 10476 - DNA, 266 bp, Glycine max
  unsure (1)..(266): unsure at all n locations
tcggtcttcaatttcgagcgtctcgacttattnctgttctcaatcagacatccgagtaaaaagttattgtcatttgaatttgctcagagctaaggcattcaagtccgagggtctcgatatattacaggactcaatcagacattcgagtaaaaaacttattgccgcttgaatttgctcagagctttggtattcaatttcgaacttctggatatattacgggtctcaatcagacatccgagtaaaaaagttattgctgtttgaatttg

SEQ ID NO: 10477 - DNA, 326 bp, Glycine max
  unsure (1)..(326): unsure at all n locations
taatgtgtctactatcnattgtcatcgtntgtttgtcattgaggtgccacttgagctgacaggtctctccacctttgggcgtattctatgaaagatctgtgcccctttgtacacgttctattgttgcatcctatcccgaaccatatcanaattgtactgatactgcctaatgaaggcaaccattangtccttccaagagtggactcgagaatgttccatgttagtgtaccaggtaacagctaccccagtaagattntcttggaaggaatgtatcagcagttcctcatctttttcgcatgcncncatcttccgataatacatcttta

SEQ ID NO: 10478 - DNA, 371 bp, Glycine max
taaacattcaatttcgagcgtctcgatatattacaggactcttatcagacatccgagtaaaaagatattgtcgtttgaattggctcacaggctcaacattcaattttgagcgtctcaatatattacgagactcaatcagacatccgagtaaaaagttattgtcgtttgaattggctcagaactttaacattaaatttcgagcgtctcgatatattacgggactcaatcagacatccgagtaaaaagatattgtcttttgaattggctcagaggttcaacattcaatttcgagcgtctcaatatattatgggactcaatcagacatccgagtaaaaagttattgtcgcttgaattggctcataggttgaaca

SEQ ID NO: 10479 - DNA, 370 bp, Glycine max
  unsure (1)..(370): unsure at all n locations
gtctaatcgagtccattatatatcgagacgctcgaaactgaatgttgaaactctgagctgattcaaacgacaataactntatactcggatgtccgattgagtgacgtaatatatcgggtcgctcgtaattgaatgttgaacctctgagccaattcaaacgacaataactctttatctcggatgtctgagtgagttccgaaatatatcgagatggtcgaaattgaatgtcgaacctctgaggcaattcaaacgacaataactatttactcggatgtctgattgagtcccgtaatatatcgagacgctcaaaaatgaatgtagaacctctgagccaagtcaaacgacaataactctgtactcggatgtctga

SEQ ID NO: 10480 - DNA, 368 bp, Glycine max
tttactcggatgtccgattgagttctgttatatatcgagatgctccaaattgaaaatagtagctcctagcaaattcaaaccataataactttttactcggatgtccgattgtgtcccgtagtatatcgtgatgctcgaaattgaaaacataaggtctgagcaaattcaaacgacaataactttttactcagatgtccgattgagtcccgtaatatatcgagatgctccaaattgaaaatagaagctcctagcgaattcaaaacataataactttttactcggatgtccgattgagtcccgcagtatatctagacgcttgaaattgaaatagaagctctgagcacaatcaaacgacattaacttttttc

SEQ ID NO: 10481 - DNA, 450 bp, Glycine max
  unsure (1)..(450): unsure at all n locations
ttctctacaattgcatcacctctcaatgagctggtgaagaagaatgtggcatttacctgtggtgaaaaacaagagcaagtctttgctttgctcaaagaatagcttactaaagcacctgttctagctcttcctgactattctaaaacttttgagctagaatgtgatgcctctggagtgggagttggagctgtattgttacaaggtgggcaccctattgcttattttagtgaaaaacttcatagtgccaccctcaactaccccacctatgataaagagctntatgccttaataagagccctccatacttgngaacattaccttgtttccaaggaattngtcattcatagtgatcatcaatcacttaagtacattagagggcaaagcaagttaaacaagaggcatgcaaaatgtgtagagtacctatagcaatttccatatgntatcaaatac

SEQ ID NO: 10482 - DNA, 175 bp, Glycine max
  unsure (1)..(175): unsure at all n locations
aaataacaatttagtgcccaacttgctccacanagtcctccaaaaatggcttatgaacctagagtccctatcactaacaatgctccttggctaaccatggagtctcacaatctccttgaaaacatatcagccacatgggaagcatcatcaactcttttacatggaataaaatgag

SEQ ID NO: 10483 - DNA, 365 bp, Glycine max
  unsure (1)..(365): unsure at all n locations
taatccaattaaattntatatggggaggtgagcatttgcttatttcaccccattgtcacatcatatagtcacactttgtacatgtccttcatgctttatatgcctcatgacacctaagcacacttagtggagaattttggaattgatcttggattagtcggctgaaccataactaaaattcactaatcataattagtgaaattttgactccaaagtttggttccacaaattcaagtaaaatttgaattgaaattcaaatttccctccaatttttgtgacacttaggctataaatagaggtcatgtgtgtgcatttttttgaactttgatcatttgaatattgaactttagatttcagagctcttt

SEQ ID NO: 10484 - DNA, 375 bp, Glycine max
tgccgccacggagttttccgactatgctcttgtgtggtggaacaagctacaaaaggagagagcaagaaatgaagagccaatggttgatacatggacggagatgaaaaagatcatgaggaagcggtatgtgccggctagttactcaagggacttgaaattcaagctccaaaaactaacccaaggcaacaagggggttgaggagtatttcaaggaaatggatgtgctcatgattcaagcaaatattgaagaagatgaggaggtaactatggctcgatttcttaatggtttgactaatgatatctgtgatagctgcaggagtttgttgaaatggatgatttgcttcacaaagcaatccaagtggagcaacaattaaaa

SEQ ID NO: 10485 - DNA, 367 bp, Glycine max
ttgaatgctctattcaatggagttgtactttaatatcttcagactaatcaacacttgcacagtggccaaagatgcatgggagatcctgaaaaccactcatgaaggaacctccaaagttaagatgtccagattgcaactcttggctacaaaattcgaaaatctgaagatgaaggaggaagagtgtattcatgacttccacatgaacattcttgaaattgccaatgcttgcactgccttgggagagaggataacagatgaaaagctggtgagaaagatcctcagatccttgcctaagagatttgacatgaaagtcactgcaatagaggaggcccaagacatttgcaacatgagagtggatgaactcatt

SEQ ID NO: 10486 - DNA, 358 bp, Glycine max
  unsure (1)..(358): unsure at all n locations
tgctctganccggctnccttattcgattgttctatcattgggnntagtttcctattcaagtttcactattcttgaaagatggccagcacaatcaagatcgagaagttcacaaggaagaacaatttcaatcagtggcaaatcaagatgcgagctctgttgaaggaacagggcatctgggcaccactctccagcagatcctccaacctagaagcatcctttctggagcaacaagaagaaaaggctcactcgctgattcttctgtctctctcagatgaagttctctacgaggtggctgaagaacaaactgttgttgggttgtggctgaagctggagaaactctacatgacgaagtccatct

SEQ ID NO: 10487 - DNA, 331 bp, Glycine max
  unsure (1)..(331): unsure at all n locations
aaatctaagctggatcacattggggcaaggttttttttatttggctgcaaacaagtctgacatagttctgctatccacgatgaaatctatgatgtctggatgagtgggaaccactctcngacatgctcacatctattgctgaggcagatgtggttttcaccaacacagcatcagagaatccattgatcttgacggaggatgtaaaggaccttcctcctgccaccaatgaagttggtggccgccgcctgtacaccaagatttctgttcctagaaatgtcggatcatgtctctcacaccttgagtctgtgagagggtacattgttgatgacct

SEQ ID NO: 10488 - DNA, 349 bp, Glycine max
  unsure (1)..(349): unsure at all n locations
gcttatgctgcanatatgtacaatagaccttctcttctatcagcagaatcaaccacagcagagcaattatgaccgttccagcaacagatacaaccctggatggaggaatcaccctaacctcatatggtccagccctcatcaacaacaacaacagcctgctcctttcttccaatatgctgctggcccatattgaccatacattcctccaccaatccaacatcatcatctactccagatacaaccaacagatgatgcccctccacaaccttccctcgaagaacttgtgaggcgaatgactatgcagaacatgcagnntcagcaagagaccagagcctccattcagagctta

SEQ ID NO: 10489 - DNA, 369 bp, Glycine max
tctcgatatattatgtgcccgaatcggtctttcgtttgaaaaattattaccatttgaatttctcgagagctttggctgttcagtttccagtgtctcgatatattatgcgcctgaatcggacttttgtgtgacaagttatgaacatttgaatttctcgagacctttcggttttcaattaagatcgtctcgatatgtgatgcgccagaatcggacttccgtgtgacaagttatgaccattggaatttatcgagaccttccgatcttcaatttcgagggtctcgatatattatgtgcctgaatcggactttcgtgtgacaagttatgaacattggaatttctcgagaccatacgttgtcaatttcgagcgtc

SEQ ID NO: 10490 - DNA, 327 bp, Glycine max
  unsure (1)..(327): unsure at all n locations
agcttctagatatattatgcgccggaatcagacttccgtttcataagttatggccatatgaatntctcgagagcattcgntgctcaatttcgagcgtctcgatatagtctgcgcgtttatcggacttccgtgtgacaagttatgaccatctgagattctcgagggcttccgatcttcaatttcaagcttttcgatatattatgcgcctgaatcagactttctgtacacaagttatgaccatatgaatatctcgagagccttcgttgttcaatttcgagcgtctcgatataatatgcgcctgaatcggacttncgtgtgatagagtat

SEQ ID NO: 10491 - DNA, 166 bp, Glycine max
ttatcttttagatctttaagtgcagattttcatgtataatgatagatctcatccagcgcaagttgttgcagcccagatacgcacactgctatataaacatgaaagctgcacgagttttccaccaagtccgggattgaagagttattttgtgagttttgggacttga

SEQ ID NO: 10492 - DNA, 422 bp, Glycine max
agcttcctcgtggcttctttgagaagctttctcaagaggcttctttgagaagctagatccttatctatccacacccctctattaactaaattaacttccttaaaaataattacggatgaaaataacgcaacaaatattcaaacatcaaacataattactaatagtatatagatatatatatatcagggtgttacaactctcccacccttttagaaatttcgtcctcgaaatttaccttactcaaacaaggatgggtgagcttctcacatctgactttctaattcccatgtggcatcttctcctgatgcacctccccagatcaccttgaccaacagaatctctttccctcttaggtgttttgtttgcctatcctcgatcctcaaatgcaatgtttcatatgtcaaattctccttcacttgtac

SEQ ID NO: 10493 - DNA, 414 bp, Glycine max
agcttctatctttccatgacttttttgtcattcctgtaaaaagcaatcttctcccgctgatcttcatcaaagattctacacatgttggtcaactgtgcaaagttatgaataccgtgataatttaccatcatctttacttctggtcgaaggccattgacaaatttcacgcatttggacctctccccagcttccccctgataatgaggaaaataccttacaaggttctcaaacctcgccgcacactctgccaccgtcatactttcatgtttcagctcaagaaactccatctccttcctattcttcacatcttctggaaaatacttctccacaaaagtttgtctgaaagtctcccattggacaacaacaccacctgctccctctaaacgtgggcgagtgttctcccaccagtactcc

SEQ ID NO: 10494 - DNA, 409 bp, Glycine max
agctttgagccaattcaaacgacttatactttttactcggatatctgattgagtcccgtaatataatgagaccctcgaaattgaatgttgaagctcttagattcaaacgtcaataagtatttactccgatgtctgattttgtcccgtcatatatcgagacactcgaaattgaatgttgaagctctgatccaattcagacgacaataactttttactccgatgtctgattgagtcccgtaatatatcgagacgatcgaaattgaatgttgaatctctgaccaaattctaacgacaacatctttttactcggatgactgattgggtctcgtaacatatcgagacgctcgaaattgaatgttgaacctccgggccaattcaaacgacaataacattttactcggatgtctga

SEQ ID NO: 10495 - DNA, 418 bp, Glycine max
agctttgtacgttgacgtaggtgttattgaacaaatataacacatcccaaaacatgaggtggtaaataaaccctgtaaggaaggatacaatgaccagacaatacatctagaggccttctaaagttaagcacactagaaggggttcaattaatcaaataaactgcagatctcacagcctcaccccataaatgagatgggacattatcatctatcaaaagtgatcttgtcacctctaatatatgtctatttttcctctcagtcactccatttttttgtggtgaataaagacatgtggtttgatgcaagattccattagagatcataaactctattaattcagtcttaaaatattccccctcattatctgatctaatgaccttagtatatgtgttaaaatatatagctatcatctgatgaa

SEQ ID NO: 10496 - DNA, 352 bp, Glycine max
  unsure (1)..(352): unsure at all n locations
tcaacatcagaccacttccagggtgatggaacttcttcacatggacttgatggggcctatgcaagttgaaagccttggaggaaagaggtatgcctatgtggttgtggatgatttctccagatttacctgngtcaactttatcagagaaaaatcagacacctttgaagtatttaaggagttgagtctaagacttcaaagagaaaaagactgtgtgatcaagagaatcaggagtgaccatggcagagagtttgagaacagcaagtttactgaatactgcacatctgaaggcatcactcatgagttctctgcagccattacaccacaacaaaatggcatagttgaaaggaaaaac

SEQ ID NO: 10497 - DNA, 313 bp, Glycine max
tgagggtgtaacagatgcctggggtaacctggttacccatctgtccttgaatcagaagtctgtacctgtcgcaagactctgtggtttatgctcctctgccaaccaccacacaaacctttgcccttctatgcaacaatctgaagcaattgaatagcctgaagcttatgctgcaaacatctacaatagacctcctcaacctcagcagccaaatcagccacaacagaacaattatgacctctcccgccacaagaacaatcccgggtggaggaatcatcccaaccttaaatggtcgaatccttccaacagcaacaac

SEQ ID NO: 10498 - DNA, 391 bp, Glycine max
  unsure (1)..(391): unsure at all n locations
agcttntanaatttatatcaaattatctatgangattaaagaatctatccatgttgctttagatgagactaaccctataaggccaagaaaggaaacacttgatgatattataggttcattagaagacatgcacattgatgagaaagggctcaaaggcgcaggaaatggaaatgaagaagactgtcaaattgatgaaaataaaacaaatatagatcttccaagagagtggagaacttcaagacatcatcctcttgataatatcattggtgacatctcaaaaggggtaacaactcgacactctctcaaagatgcatgcaataatatggcttttgtttccttaattgaacctaaaaatttaaatgaaatcataattgatgaacattggattatt

SEQ ID NO: 10499 - DNA, 405 bp, Glycine max
agcttgagggaaaacttgatgccttggtcttcctagtaactcagcttgccatgaataggaaatctgctcctgttgcaagagtctgtggtctatgttcttctgtagatcaccataaagatctttgtccttctttgcagcaatttggagtcaatgagcaacctgaagcttatgctgcaaacatttataatagaccccctcagcagcaaaaccaacaacagtagaataattatgatctttcaagcaacagatacaatctaggttagagaaatcatccaaatctgagatgggcaagtcctccacaacaacaatagcatgtccctcttttccagaatgttgctggtccaagcaagccatatgttcctcctccaatacagcagcagtcacaacaaagacaacaagcaactg

SEQ ID NO: 10500 - DNA, 422 bp, Glycine max
agcttatcgttagtttaatggttttattttacatcttataaaattttggtttaccctgattttataagatctttaaagttatatatttttcctaatgtttggcaaagaacattatccaacttttgagattgagtaaggttatgtgaaaaagtaaactgtcatcgtgtctcatacagccttttatatcttatctcggtttatcatcttatccagccttttgtatattaatttaaatttaaatatgaattatttttaaatcaactaaaatactatactattttttgttgttagacttctcaaccttcatttatatgtgtaacaacctatattgaattaaggattaggatttttgttcatctggatatgatgatattgaatccattcttgtcctcgagataaaatatctagaattgatagttgtg

SEQ ID NO: 10501 - DNA, 355 bp, Glycine max
  unsure (1)..(355): unsure at all n locations
tgntgngtgtgtatgataatgtccctaatgtattcctctatgattgtttgcatgacaccaacaatagcaatgttgttgttcccttgtcatggaaacgaagactccacatctgcattggggtggctcgtgtactacatacactacatctattttggaaccaacatacctatcatactccatacagtgaaatcaagcaacattcttttggccctgaatttggtgcctagtggcagattttgagttttgcaagaagtccccaagggattcaatgccaaaaccaccaagagttgagttgagggagaacttaataacttttgggtggtgtaactgattctgaatcctaactttggtcctg

SEQ ID NO: 10502 - DNA, 368 bp, Glycine max
tttgagcaattcaaatggtcataacttttccttcggggtcagattcaggcgcataatatatcgagacgcaagaaattgaacaacggaagctctcgagaaattcaaatgctcataacttttaacacggaagtccgattcaggcgcataatatatcgagactcacgaaattgaataacggatgctctcgagaaattcaaatggtaataacctttcactcggatgtcagattcaggtgcataatatatcgagacgctcaaaatttaacaatggaagctatcgagcaattcaaatggtcataacttttcacttggaggtccgattctggcgcataatatatctagacgcacaaaatttaactacggaagcta

SEQ ID NO: 10503 - DNA, 425 bp, Glycine max
agcttaacaatcagtgtcatacttttgtttataacaaagcaggtataaatatgcaatactagactcaaaatatgcaacaaacactagacctaaatcagtgtcacagaaattggaagaaaatattttatccaagcacagacttcaagccttattccatgtattggggggaagttatggctggccatatgggtagaggtgtcatagaagagcaggtatggaggaagggaccttggactgctgaagaggacaggttgcttgttgagtatgtcaggttgcatggtgaaagcagatggaactctgttgctaggcttgcaagtaagaaacaccaaacttttttcactgttttgtttcttaatatatatgattggattttcacatttataagtgacaatatagcaaaaaaacaactgaaattgttttcaact

SEQ ID NO: 10504 - DNA, 415 bp, Glycine max
agcttagccctagaggggatggttcttttcatgttttggagaggatcaataacaatgcctataggttggacctcccagaagagtatggagtcagcaccacttttaacatttctgatttaactccttttgcaggtggagctgatattgaggaggaggaactaacagatttgaggtcaaatcctcttcaaggggaaggggatgatgcaatcctccctaggaagggaccaatcactagaaccatgagcaagaggctccaagaagattgggctagagctgctgaagaaggccctagggttctcatgaaccttagggtagatttctgagcccatgggccaaggttgggtccaattatctttgtacatattagactaagatgtcattatatttggtccttgtatatagggctccatattgt

SEQ ID NO: 10505 - DNA, 377 bp, Glycine max
aactaattgataacccgatgaagagcatttttggggccgttctcttcttacaggttcccatagacactttataactgatgttgccatgattacatttggcatacatatcaatcaaggcagtttccacaatgacctcagactcgagcttttgccttattgcccatgcatgcaggcacttgccatatttgaaataaaccaaactgccacatgctgatagaaaagaagctatgcttaccgaatcaggtttaactccttcacactgactcctacgaaaagcatcagatcacttctatcatccccattcaaaattatccattaatcaaagtagtccatgtaaccacatctttctcatccatcctcttcgctagcaaccatgc

SEQ ID NO: 10506 - DNA, 418 bp, Glycine max
agctttcgcctcccgatttttcttttatgagccccgcaagggcgccgacatcctcgtggaggcgctggagcggcagggcgtgacggacgtcttcgcctaccccggaggcgcctccatggagatccaccaggcgctcactcgctcatcctccatccgcaacgtcctccctcgccacgaacagggcggcgtcttcgccgccgagggctacgcccgctcttccggcctccccggcgtctgcatcgccacctccggccccggcgccaccaacctcgtctccggcctcgccgacgccttgcttgacagcgtccccctcgtcgccatcaccggccaggtcccccgccgcatgatcggcacagacgccttccaagaaacccccatcgtcgaggtaacacgttccatcactaagcataactatctc

SEQ ID NO: 10507 - DNA, 308 bp, Glycine max
tttgagcaattcaaatggtcataacttttcacttttaggtccgattcaggcgcataatatatcgagacgctcgaaattgaacaatggaagctcttgagcaattcaaatggtcataactttttactcagatgtcctattcaggcacataatatatcgagacgctcaaaattgaacaacagaagctctcgagaaattcaaatggtcataacttttaactcggaggtctgattgaggcgcattatatatcaagacgctcgaaattgaacaatggaagctcttgagcaattcaaatggtcataacttttcac

SEQ ID NO: 10508 - DNA, 414 bp, Glycine max
agcttccattgttcaatttcgaggttctcgatatattatgcgtttgaatgagacctccgagtgaaaagttatgaccatttgaattgctcaagagcttccattgttcaatttcgagcgtctcgatatattatgcgcctcaatcggacctccgagtcaaaagttatgaccatttgaatttctcgagagcttccgttgttcaatttcgagcgtctcgatatattatgcgcctcaatcggacctccaaaataaaagttatgaccatttgaattgctcaagagcttccattgctcaatatcgagcgtctcgatatattatgcgcctgaatcggacctccgagtgaaaagttatgactatttgaattgcttaagagcttccattgttcaatttcgagcgtctcgatatattatgcgcctg

SEQ ID NO: 10509 - DNA, 266 bp, Glycine max
tctacggttctgcatccagagagatgaatgaattttgatctatgagtacatgcctaacaagagcttaaacttctacctatttgtttggcttttggcttatcttctgtcaaaggaaaaatgtctacatgtagcatatttacagggccaccttactttgaaacagattcacctagaaagaatttgctagagtgagaaaaacagttgaacatcattggaggaattgctcaataacttctataccttccaagtattcaagactaaaagtg

SEQ ID NO: 10510 - DNA, 352 bp, Glycine max
taaatatcgagcgcactcgatatataacgagactattaggacttccgagtgaaatgttattgtcgttcgactttgctacgagcttaggttttaaaattcgagcgtcacgatatattacgggactcaatcagacttccgagtgaaatgttattgtcgttcgaatttgctacgagcttcggttttaaaattcgagcgtctcgatatattacgggactcaatcggacttccgagtgaaatgttattgtcgttcgactttgctacgagcttcggttttaaaattcgagcgccacgatatattacgggactcaatcagacttccgagtgaaatgttattgtcggtcagaattgctac

SEQ ID NO: 10511 - DNA, 308 bp, Glycine max
taagcctatagaaggcaagcatatggccttcttgatccacacgcgacaatatcagaaacgagtgaagaacacttttgacaagaaggtacgcccgtgccggttcatcgaatgggactcggcgctgaagaaagtctcccaagctttgaaagatatcagaagaaagtgtgccccaaactatgatgggcctttcattgtaaaaagggctttctcccgaggggccctggtgctcgccaacatggattactaggagctaccttttcccgtgaacttcgacgttgtcaatcgatactacgcttaacatctggggc

SEQ ID NO: 10512 - DNA, 415 bp, Glycine max
agcttgcatcctgagactttctttttgatatatacacatgttgcttatgagtacatggctaatggttcattggataaatggatattcaacaagaacaaagaggaatttcagggggattgggatacaaggtataacatagcacttggaatagcaaaaggactcgcttatctacatgaagattgtgactcaaacattattcattgtgacattaaaccagaaaacgtgctcctagatgataatttcagggttaaggtttctaattttggtttggctaagctcatgaaacgtgaacaaagacatgttttcacaacacttagacgcactatagggtatcttgcacctgagtggatcacaaactgtgccatatcagagaaaaatgatgttgatagctatggtatggtgttgctagagatca

SEQ ID NO: 10513 - DNA, 334 bp, Glycine max
tgttacatatgttctcaacaccaaaacgtttgttgtatctagtaagcatgtctgcaagttggtcaccggagttgacaaagtcaatgatgatttctcctgagagcaccttttctctcacaaagtgacaggcaatttctatttggttagtctgctcatggaagatcggatttgatgcaaccgggagagcaacttgattgtcgcataatatcttgagtgtctccaattttagctggtggagaatttgcctagccatgtaaccttggatgcaatagctgccatagcatgacacttagctttaacactggatatagcaaatggattctgcttgttactc

SEQ ID NO: 10514 - DNA, 419 bp, Glycine max
  unsure (1)..(419): unsure at all n locations
agcttagtgtctngagtgtttccttactttaattgntggagaagttgcctaagccatgtaatttcgcatgcaacttctgtcatggtatagtattcaacttcagcgctggatctcgcaactatattttgcttcttgcttctccatgagatcaaattccctccaagcagaacacaatagcctgaggtagaactcctgtccaatcagcactagagtaacaaacaattttgacattgtcttcgtcttcatatagaaatccgtggcctggtgcgttcttgatatatctgagaatgcgcatgacaacattccaatggctatcacaaggggcattgagcaattgacttaacactctgcaaaagtgatgtctggtctggtgacactgaggtaactgagtctgccaacaagtttgtgatatcttcttg

SEQ ID NO: 10515 - DNA, 355 bp, Glycine max
tttgcccaattcgctgttgatctcgataatgcttctcaaaatcaattagcaagaggtcaacgattgcgcgagttgcttaaacaatcccaatcagctcctcttaccggggaagaacagataataactatttatactggaacgaatggttatcttgattcattagaaattggacaggtaaggaaatttcttgttgagttacgtgcttacttaaacacgaataaacctcaattcaaagaaatcatatcttctaccaagacattcactggggaagcagaagtccttttgaaggaagctattcaagaacagatggaactctgtttactacaggaacaagtcgaaaaaaattgattaatca

SEQ ID NO: 10516 - DNA, 351 bp, Glycine max
gcgggggaacgctagctccgatagaaaagttatgaccatttggattgcccaatagctgtcatagaacaatttccagcgtttggaaatgatatgcgccttgatcggacctccgagggaaaagttttgaccacttgaattgctctagagccttcgttgatcaatttcgagcggcttgagatattatgcgcctgaattggacctcctaattaaagctttgaccatttgcaatgctcatgagcgttgatagtccaatcacccgcattttataagtgtatgcacctgaattggatccccgagtgagaagtttggaccattggaattgaagaaaaggaatcactgcttgatcttcga

SEQ ID NO: 10517 - DNA, 226 bp, Glycine max
ttgcctcacaagttctctcagggaaggttgcgcaggggtctcaactgctggttgttttcggggctgttgtcgttgctggattggcggaggaatgtatggtctgcttgggccatcacccatttggaaggaacgaccctgctactcgtgttgctgtcgagggctataccatctgagattagggtgattcctccccccaacgctgcttctattgctggagaggtgataa

SEQ ID NO: 10518 - DNA, 362 bp, Glycine max
ctggacttcctgtgttttgggaacctctccttcctcaggtgtacccaaacccaatcacctggttcaagcatgactttctttctgcttttggtggcttgccttgcatagctcgcatttttcttttcaatttgggccttcacttgctcatgcaacttcttcacatactcagctttagcctgggcatccttatgcttaaacatagcaatgttaggcataggcaacaaatcaagaggagtcaaaggattaaatccatacactatctcaaatggtgaacaattagttgtgctatggacagcccgattataagcaaactcaacatgaggcaaacaggcttcccaagatttaagatttttctttaaaac

SEQ ID NO: 10519 - DNA, 424 bp, Glycine max
agcttcaagaattatggcctcatttaactacttgtttctcgagggaaattctataaacagacctcccatctttaatggactgggttaccactactagaaaacccgcatgcaaatctttatagaggcaatagatttaaatatttgggaagccatagaacaaggaccttatgttccctctataatagccggaagtgcaacaatagaaaaacctagagcagattggactgaggaagaaagaagattagtacaatataatttaaaggccaaaaatattattacatctgccttaggaatagatgaatactttagggtttcaaattgtaaaagtgctaaggatatgtgggatacactacaagtaacacatgaaggcacaacagatgttaaaagatctaggataaacactttaattcgtgaatatgaactt

SEQ ID NO: 10520 - DNA, 413 bp, Glycine max
agctttgaatggaggctctggtcttttgcagaaactgcatgttctgcatagtcatttgcctcacaagttcttcgagggaaggttgtggaggggtctcaactgttggttgtttttggggctgttgttgttgttggattggtggaggaatgtatggtctgcttgggccagcagcattttggaaggaaggagcaggctactgttgttgctgttgagggctagaccatctgagattagggtgattcctccatccaaggttgtatctattgctggagaggtgataattgttttgctgaggttggttttgctgttgaggttgaggaggtctattgtaaatgtttgcagcataagcttcaggcttctcaattgctccaggttgctgcatggaagggcaaaggtctgtatggcggtcagca

SEQ ID NO: 10521 - DNA, 258 bp, Glycine max
tgtgcctcttcacgtctggaatatgaatgtattttatagatccaaagacccttaggtgctttgctgatggcttcctcccgttccaagcttcaattggagtcttgtcttttacagacttagttggacatcagttgagtatgtaaacagcagtgtaaactgctttagcccagaatgtgttatgtacttgagcatcgatctacccatctccataactgagcaattctttctctctgacactccattttgttgaggaggata

SEQ ID NO: 10522 - DNA, 344 bp, Glycine max
  unsure (1)..(344): unsure at all n locations
taacaaaaggcatgtgaagcgggtggaatttctagagcaattcccttatgttatcaaacataaaaagggaaaaggtaatattgtagccgatgctctttctcggcgtcatgcattactttctatgcttgaaacaaaattgattggtcttgaatgtttgaaaagcatgtatgaaaatgatgaaacttttggagaaatttttaaaaattgtgaaaaattttcagaaaatggtttctttagacatgaaggctttcttttcaaagaaaacaaattgtgtgtgcctaaatgttctactagaaatntgcttgtttgggaagcacatgaaggaggtttaatggggcattttg

SEQ ID NO: 10523 - DNA, 306 bp, Glycine max
tataccaaattcaaacgacaataactttatttttgatgtccgattgagtcccgtaatatatcgagacgctaaaaattggaaacggaagctcgtagacaattcaaacgacaataacattttactcgaatgtcctacagagtccacgaatatattgagacgctccaaattgaaaacagatgctcgtaccaaattcaaacgacaataactctttactcggatgtctgatagagtcccttaatatatagagatgctccaaattgaaaacagaggctcgtggcaaatttaatagacaataactttctactc

SEQ ID NO: 10524 - DNA, 482 bp, Glycine max
  unsure (1)..(482): unsure at all n locations
tagtgtagttaggaggtagccttccctcgaagtaaggctagttatcttcttcctctccctcgtgacctctgctcataacacactgagggatcaaaatgtcacaaaaatgattatcaacatgactattaaacagatgagaccaaaatgtcagaaagttttcattggactaatatcccaaattgtgtttcatttaaggggtaaaatataattaattttcatcttttccctttttttatggtttcacttattaactataaagactaaaagggataagtttggaaactatagagactaaatgagtaattaaacctttnttattgttacaagcataacattacaattaataaacattntaaaaaataggaaagcaagcttaagttagaacaaacataataataagcataatatngattaaaaaacataatttatttgttgctccagaaattctaatgtgacaatatntccaaaatatgatattcaac

SEQ ID NO: 10525 - DNA, 417 bp, Glycine max
  unsure (1)..(417): unsure at all n locations
ctaagcttatatgcaggacgcattgagtggtccctctatcataagaagctttctattttctcaaatccgctatgatcaacaccccagttctggcccttcccatattccatgaaccatatgtcgtcgagacagatgcttcacgcactgccatgggggctgngctctcttagcaagggcacccattagcgttcttcagcaagaacttcaaccctcgcctgcttaatgcgtcaacctatgtgagggaactccatgctatcacatncgcagtgcgcaaaaggaggcaatatctcctcggcagctcttcacgatccataccgatcacaagagtcttcgcgagcgtatgactcaggtgattcaaacgccagaacagcactatcaccctttcaaatagctagggcttgatacacaattcaatac

SEQ ID NO: 10526 - DNA, 436 bp, Glycine max
  unsure (1)..(436): unsure at all n locations
ngctaacccatggaagctcctaatatctcccactcttttttgggtgtgccattcttggatggccttgattntctcggggtccacttggaccccatttctactaattacaaaccctaagaaaactatattatcaacacaaaaggtacacttctctatatttgcatagagggtgtntttcctaaggactgaaagaagttgcctaagatgtcctaagtgattatctaggctcctactgtgctctaaaatatcatcaaaataaaaaactacaaatctacctatgaaatcccttaagacatgatgcataagcctcataaaggtgcttggtgcattagtaagcccaaaaggcataactacttctctatgcaaatatagagaagtgtaccttntgtgtagataactacttttcacactactnttcaatngaaacttcataact

SEQ ID NO: 10527 - DNA, 441 bp, Glycine max
  unsure (1)..(441): unsure at all n locations
agctntaatataaagaattatataaatataatttctcttatcatatgtattaattataaatcttcatattatttaatatatattatgctccatattatatgacacgttaaaaagttatataagtcaatagaaatatcttattgtgcggggaaatttgaacaaaataacattgtttttacttaaaaattgtcaaaatccttttctcttgtcttattttttttcttctatatctgtattgtggaaagtattatgaaaattgtacgcaaaaattaaagattataaaacttaaacttccaatacccgaaaaaaaagtctcgaacttccatcatattcataggaaaaaaaactagtaatatattctagcattaaaaaaaggaaaaatgaagccaaaaagaggaaagaatgtatatatattctagatcactttctatatgggatcca

SEQ ID NO: 10528 - DNA, 375 bp, Glycine max
  unsure (1)..(375): unsure at all n locations
ngccgccacagagntttctgactatgctcttgtgtggtgtaacatgtctcaaaaggagagagcaagaaatgaagagccaatggttgatacatgggcggagatgaaaaggatcatgatgaagcggtatgtgccagctagttactcaagggacttgaaattcaagctccaaaaactaacccaaggcaacaaaggggttgaggagtatttcaaggaaatggatgtgctcatgattcaagcaaagattgaagaagatgaggaggtaactagctcggtttcttaatggtttgactaatgatatccgtgatattgttgagttacaggagtntgttgaaatggatgatntgcttcacaaagcaatccaagtagagcaacaat

SEQ ID NO: 10529 - DNA, 396 bp, Glycine max
  unsure (1)..(396): unsure at all n locations
agctggtntgatcaatatcaagaaagttttcttatgtatttattattctgataatagttcatagcttagaagttattatattatatatataacttataaactcgtagcgtttttctttttcttccatttttacattagtagtgtgataaactctattttttaataattctgtgcattatcctttctaactgttttaatacacatccctactattattgaattttcataacatattcgatctttacaaatataaagagtttaaggttaatacaaaatctaaaactatagttgcctaagagtattnttttttatctactaacaaatagaatttatactaaaatttatataatgggcgaagcatatgccttgagtccatgctattatatctatattatt

SEQ ID NO: 10530 - DNA, 466 bp, Glycine max
  unsure (1)..(466): unsure at all n locations
agcttcatatgtttatgttttctggccattcacaccttattattactatgcagntaccgatcgtccagaaacagcanaagaagctaccaagttcttcattattctgaaacaatattccgtcaatgccgtgtgtgatattcttgtttaacaagctcttgtcttggttnttctttaataaaaaaggaaagtcttttgaactcttggaaactgaaaagcatattatcacatctccaaacactatgacttcaatcaaattgataaaataaatatttgattttgatttagttttttagttaattntaaaatctttccgtttntaatttataaatcaattctttttttagtcttaataatttttatactttttcgtattatatatgcattccagtgttagtcttatattatatcttcaaatatcttcaattatgtttaaaataaaatatgtgttcgtattatctctcataat

SEQ ID NO: 10531 - DNA, 402 bp, Glycine max
  unsure (1)..(402): unsure at all n locations
aagctgcaccgatgaaacacagggaccaccgagggggttccaaggagccgcatgaaggcgtgttcgangtccttgcctctnggatcctcgtccagctcgtgcacggttgggttcacacccatgccgcagaagagcctctggatggcgtggcacatgcagcacgtgctcacgctgaatatcaccaccgcgctctccgacgccagcctttctatgcgctccagcgggtcccccactaccgccgccgccgcgttccgaggggccggcacgtagctcccccaccacgccgccgccgctgcttggtaatgcattctcagaagaattntatgtgatgaaagaatgacacgcaaaatgtatgataatgagagtgagaatgtagtgggtttggcttggtttgtttgtgtg

SEQ ID NO: 10532 - DNA, 488 bp, Glycine max
  unsure (1)..(488): unsure at all n locations
agcttaaatataattataacagagaagagagactgattatcaataactaacttaactaactaatcataatggactaattaagctaaactaactatggtaataattctaactaaaactggttgtaatactccccctcaagttaggtacatagatgtctagaaggcctaacttggacaaaaaaaagagaatttacagtgaggcaataccttagtgaagatgtagcaagttgttgatgagtagataagtgtaccagcttgataaaaccagagtgcacatattgccttatgaaatgacaattagtatctatgtgcttagacctatcatttgaagttggattntcagtcaatgcaatagctgatttaaattntatcanaaataaaattaaaataaanatgtatttaagccttacaatttccaacaagttttgaactaaatatganagctatcctanattcattacttcctatattctattataagtgtcatat

SEQ ID NO: 10533 - DNA, 203 bp, Glycine max
  unsure (1)..(203): unsure at all n locations
agcttatatatatcgatacgctcgaaattaaacatcgtanactctcacgaaattcaaatagtcataactnttcacacggatgtccgattcgggcgcataatatgtcgagaggctcgtaattaaacaacgcaagctcttgagagattagactggtataacttttcacaccgaagctctcgtgaaagtcaaatggacataacttt

SEQ ID NO: 10534 - DNA, 337 bp, Glycine max
  unsure (1)..(337): unsure at all n locations
tccatttcaacttggagcgtctcgatatattactggtgtcaactgtacatccgtgtataaagttatgggcgtctcaatntgctcagagcttctgttctaaaatttgagcgtctctaaatattacgggactcaataagacatctgagtaaaaagttattgtagtttgaatntgctacgagctctcgttttcaacttggagcgtctcgatatataacgggactcaatcggacatccgtgtataaagttattgtcgtttgaatatgctacgagcttcagttttcaatttggagagtctcgatatattactggactcaatcagacatccgagtaaaaagtt

SEQ ID NO: 10535 - DNA, 384 bp, Glycine max
  unsure (1)..(384): unsure at all n locations
agcttgtagcaatatcaaacgagaataactttatacacggatgtccgaatgagtctcgtaatatatcgatacgctccaaattgaanacataagcccgtagacaattcaaaggacaataactttttactcggatgtccgatagagtctcgtaatataatgggacctccaaattgaaaatggaagctcctatcaaattcaaacgacaataactntntgctcggatgtccgattgagtcccgtaatatatcgagatgctcgaaattgaggacacaagctctgaacaatattgaacgacaataaatttattctcggatgttctattgagtcccgtaatatatcgtgctactccagattgaaaatggaagctcgtaggaaattcaaacg

SEQ ID NO: 10536 - DNA, 429 bp, Glycine max
  unsure (1)..(429): unsure at all n locations
agcttgaagaaaagactatatgaggtatcttccttgtgtatagcaatatctctaagggctactgtgtctacaacttgcaagctaagaaactcgtcatcagtcgagatgttgaagttgatgagtacgcttcttggaattgggatgaagaaaaagtggagaagaacgttcttatacccgctcaactacctcaagaagaagctgaggaagaagacccaggtgaaccacacaacaaaaagatcaagatctatcatcaccagagtctactccaagacgagtaagatctttggtgaacatatatgaaacttgtaacttggccatacttgaacctggaagctntgaagaagcgtcacagcatgaagtatgggtcaaggcaatggaagaagagatatagatgatcgagaacaacaacacatgggagttagtaaatcg

SEQ ID NO: 10537 - DNA, 444 bp, Glycine max
  unsure (1)..(444): unsure at all n locations
tactcagcttcacttntcgttgataaccttgatgactcatatgcattcaatctcatttcctccagctccaagagttgtaactntctttnttcccctgatatagcctcatcaaaattcagaaatttcaaagcccggtatgccttaagctctatttccaccggtaagtggcaggcttttccataaacaatttggaacagagacaggcctataggggtcttgaagacagttctgtaggcccatagtgcatcatccagtttgcttgaccagtccttccaagtggaagccacagttttctccaatattttcttcaattccctggtggaaacttcagctnnggccatttttttgtgggtgataaggtgaggccactntgtgtgtggcatgatagtggcctagcacctttngcagttatgctgggcaaaaataagaagccgcatcacttat

SEQ ID NO: 10538 - DNA, 397 bp, Glycine max
  unsure (1)..(397): unsure at all n locations
gaagaatagctctcanacttgtctccttgcaaaggaacttcctgttgggggtgatcaanggcataagaaaatcccttgggtcaaatgggaagtaatatgtctccctaaggaggatgggggtcttggggtcaaagatatctccaaattcaatacagctttgatgggtagatgggtatgggctctatcttctaatcataatcagctgtgggccaaaattttattgtcaaaatacgggggatggtctgatcttagtagtgggagggataaatcttggcattctcaatggtggagggaccttcgaaagatatatcaacaacctgagctcagtattattcaccagcaaatggtatggaaggtgggaggaggggaaaaaataaattctggacagatattggtt

SEQ ID NO: 10539 - DNA, 393 bp, Glycine max
tgacttgcccaatcttaagagagaattttttcaacaaggcgtaaagtttttgatgatacatgctctctcattgtagatagtggttcatgttgcaattgttgcagcacaagattagtctctaagttgagccttgctatcactccccatccaaagccttacaaacttcaatggctcgatgagcaaggtgagaggataatcaatcaacaagtgaaagtgcccttctccattggaagatataaggatgaagtgatttgcgatgtagttcctatggaggcaggacaccttctcttatgtaggccatgtcaatatgatatgaatatcatctataatggccgaaatatgagataccctcagcccctggaataaagttgtgtacatcctaacacttcacag

SEQ ID NO: 10540 - DNA, 278 bp, Glycine max
  unsure (1)..(278): unsure at all n locations
ctggaactatcttacatggacttgatggtgtctatgcaagtngaaagcctnggacgaaagaagtatgcctatgtgggtgtggatgatttctccagatttacctgngtcaactttatcagagagaaatcatacacctctgcaactgtcaagcactttcacatctttggaagtccatgttacattctggcngatagagagcaaatgagaaagatggatcccaagaacgatgcacgaatattcctgcgatactctacaaacagcagagcatatagagtatt

SEQ ID NO: 10541 - DNA, 399 bp, Glycine max
  unsure (1)..(399): unsure at all n locations
gcttgaacacanaattggagatgaaagatctatggtcatctaggaggatactcgggattgatattcatagggataaagcaaagggtgaactattcttgtcccaaagcaattacctcaaaaaagtggtggagaggtttaggatgcatcaaagcaaacctattagcacaccacttggtcatcatacaaagctatctgttattcaagcactagaaatagctgaagagaggtctaaaatgaatcacacaccctatgccagtggtgttggaagcataatgtatggaatggtttgcagcagacctgacttatctcatgctgtaagtattataagtagattcatgggagatcctggcagcgcacactaagaagctgtgaagtggacactaaggtatctaaatggat

SEQ ID NO: 10542 - DNA, 363 bp, Glycine max
  unsure (1)..(363): unsure at all n locations
tctngacaatgtgtcttgcatactngctntgagagaggaatatggtgtctttcatctgcttcactaggagtcccagaaaataagtcagctctccaacaagactcatctcaaattcagattgcatctgttggacaaaatgtcgaagcatctcattcgacatccctccaaacacaatgtcatcaacatatatctgtgctatcatcaagttttcagcatcttgcttgacaaagagagtcttgtcaattcctcccttcctatacccttgctgagtaaggaactctgttagcctttcataccaagctcttggagcttgcttcaatccatagagagccttcttgagcctgtatacatgatctggatgag

SEQ ID NO: 10543 - DNA, 398 bp, Glycine max
agcttaccttgtgtgtcaaggtggtttggaggttatgttcattgttttatggaacgcaatgatctctgggtttgctagacatgctcgtgcaccataggctatgatcttatttgagaaaatgcagcaaagaggctgttttcctgatgatgtaacatatgtgtgtgtactaaatgcatgtagtcatatgggtttgcatgaagaaggacagaaatattttgatctcatggtcagacagcacaatctttcaccgagtgtccttcactactcatgtatgattgatattcttggtcgagcacgacttgttcacaaggcttatgacttgatagaaagaatgccatttaatgcaactagttctatgtggcgttcacttctaggctcttgtaaaacttatggcaata

SEQ ID NO: 10544 - DNA, 487 bp, Glycine max
  unsure (1)..(487): unsure at all n locations
cgtacttgtacttgctatnggcagaatacatgcattacttcttcctttccaactcatcaacgtgagtgggcattntattctttttctataattacggggttaataagatgaaacaatagggtgatgaaacgaatagggtgtcctctcactgcttgaagcatccaatttttatttttatttttatggtagaacatattatcatatcttggaagcatcagctgtgactcggctaaaagctaccgcggtctttgagccagatgggcgccccaaatgcttgccgatgaactcaccggctaacatgagctttccgagatcaacgtnggttttcaccccaagtccattcagcatgtacacaacatcttctgtagctacatttcctgaagctcccttggcataaggacagccacctagaccagcaactgaagaatcaactgcactgatccccatctgtttagaaaagaaatcaataacgtccattaataacact

SEQ ID NO: 10545 - DNA, 464 bp, Glycine max
  unsure (1)..(464): unsure at all n locations
agcttaacatcagaccacttccagggtgctggaactacttcacatggacttgatggggcctatgcaagttgaaagccttggaggaaagaggtatgcctatgttgctgtggatgatttctccagatttacctgcgtcaactttatcagagagaaatcagacacctttgaatattcaaagagttgagtctaagacttcaaagagaagaagactgtgtcatcaagagaaatacgagtgaccatggcagagagtttgaaaacagcaagtttactgaattctgcacatctgaaggcattactcatgagttctctgcagccatcacaccacaacanaatggcatagttgaaaggaaaaataggactttgcaagaagctgctagggtcatgcttcatgccaaagaacttccctataatctctgggctgaagccatgaacacagcatgctatatccacaacagagtcacact

SEQ ID NO: 10546 - DNA, 407 bp, Glycine max
  unsure (1)..(407): unsure at all n locations
ctcgagatattcaaatggtcataactnttcacttgcatgtntgattctcgcgcatcgtgtatcgagacgctagaaatagaacaacggaagctctcgagaaattcaaatggttataacttttcactcgcatgtccgattcaagcgtatacaatattgagacgctcgaaattgaacaacgaaagctctcgagaaatctaaatggtcataacctttcactcggatttccgattcaggtgcataacatatcgagacgctaaaaattgaacaacggaagctctcgagatattcaaatggtcataactttttactcggatgtccgattcaggcgcacagcgtatcgagacgctagaaattaaacaatggaagctctcgaganatgcaaatggtcataacctttcactcgcatg

SEQ ID NO: 10547 - DNA, 369 bp, Glycine max
  unsure (1)..(369): unsure at all n locations
ctcaagagccaagagagaccagtctatggttgaaggcatgatattgttagacaagttgaagaattgtgtttggtaccagatgttgtcatccctccgaaattcaaggtaccatattttgatagatacaaggggactacttgccccaaaaatcacttgaaaatgtattgccggaaaatggggatgtattctagggacaagaagctattgatgcatttcttccaatatagtttggccagagcagtggtcatctggtataccaatctggaagcttctcgcatccactcatggaaagatntgattactgctttcattaggcagtactaatataacactgacatggctcccgatagaacccagctatagaatatg

SEQ ID NO: 10548 - DNA, 468 bp, Glycine max
  unsure (1)..(468): unsure at all n locations
taagcttaacatcagaccacttacagggtgctggaacttcttacatggacttgatggngcctatgcaagttgaaagccttggaggaaagaggtatgcctatgttgttgtggatgatttctccagatttacctgngtcaactttatcagagagaaatcagacacctttgaagtattcaaagagttgagtctaagacttcaaagagaaaaagactgtgtcatcaagagaattangagtgaccatggcagagagtttgaaaacggcaagtttactgaattctgcacatctgaaggcatcactcatgagttctctgcagccatcacaccacaacaaaatggcatagttgaaaggaaaaacaggactttgcaagaagctgccagggtcatgcttcatgccaaagaacttccctataatctctgggctgaagccatgaacacagcatgctatattcacaacagagtcacactta

SEQ ID NO: 10549 - DNA, 341 bp, Glycine max
  unsure (1)..(341): unsure at all n locations
ctgagcanatacaaacgacgcataacttttactctgatgtctaattgaggcgcgtaatatatcgagacgctcgacaatgaatgttgaagctctgagccaatacaaacgacaatcactttntactcggatgtctgattgagtcccgtaacatatcgagacgctcgaaattgaatgttgaagctctgagccaattcatacgacaatatacttttactcggatgtctgattgagtcccgtaacatatcgagacgctcgaaattgaatgttgaatctctgagccaactcaaacgaccataacttttttctcggatgtctgatngagtcccgtaacatatcgagac

SEQ ID NO: 10550 - DNA, 415 bp, Glycine max
  unsure (1)..(415): unsure at all n locations
actaagctcgaaggtaactagatgcctggtaacctggtaacccaactggccatgaatcanaaatctgcacctgtcgccagactctgtagtttatgctcctctaccgaccaccacacagaaccttgcccttttgtgcaacaatctgaagcaattgaacagcctaaagcttatgctgcaaacatctacaatagacctcctcaacctcagcagcaaaatcagccacaacagaacaattatgacctctcccgcaacaggtacaatcccaggtggaggaggaatcatcccagccttagatggtcgaatccttcacaacaacagcaataacaacaacagccttattttcagaatgctactggcccaagcagaccatacgttccttcaccaatccagcaacaacaacaacagcaacaaccct

SEQ ID NO: 10551 - DNA, 396 bp, Glycine max
agcttgttcttaatgagggtgattaggattgactccatcttatgaaggatagattccctactaaaaggaaatccaagcttatccctagaggggatggaccttttcaggttttggagaggatcaataacaatgcctataggttggatctcccagaagagtatggagtcagcaccacttttaacatttctgatttaattccttttgaatgtggagctgatattgaggaggaggaactaacagatttgaggtcatatcctcttcaagggggaggggatgatgatatcctccctaggaagggatcagtcactagagccttgagaaagaggctccaagaggattgggctagagctgctgaagaaggccctatggttctcatgaacctcaatgtatatttat

SEQ ID NO: 10552 - DNA, 392 bp, Glycine max
  unsure (1)..(392): unsure at all n locations
taacactgtatatngatttctttagttggcatactatgtgttcctttccctcaactgagaaccccattggttggtccatacaaacattctcctctaaatctccattaagaaaggcgattttcacatccatctgatgtagctctaagtcataatgggccactaatgccatgattatccngaaagaatnctttcgtgagaccgatgaaaacatctctntataatcaatgtcatctntttgagtaaatcccttagcaacaaatctagcctttgtacattcaaggtgccatgagagtcacggttggtcttgaagacccacttacaaccaactcttctacaatcctttggtaattctacaanggtccaaacaccattatgttccatggaatttatct

SEQ ID NO: 10553 - DNA, 264 bp, Glycine max
  unsure (1)..(264): unsure at all n locations
tgaaattcatcaaagcctcttggagctcactgaacgaagatgtcgaaagatttcttangaagcttcatgttaatggagtgttccctagaggtcgcaatgcatcaatcatcaccttgatacctaagattgaggatccacaaaatctgggggatcttaggtccatttcactggtaggatgtatgtataaaatccttgctaaattcttgcatgaatactaaaatgtgctttggtagtgtgattgacaaaaagcaaatcgccttcttg

SEQ ID NO: 10554 - DNA, 448 bp, Glycine max
  unsure (1)..(448): unsure at all n locations
tcagatgggacaattagctactcaatngaatcaacaacagtcccagaattctgacaagctgccttctcaagctgtccaaaacctcaaaaatgtcagtgccatttcattgaggtcgggaaagcagtgtcaaggacctcaacccgtagcaccttcctcatctgcaaatgaacctgccaaacttcactctattccagaaaaaggtgatgacaaaaatctacctaacaatttctgtgcaggtgaatcttcttccacaggtaattctgatttgcagaagcagcacattccccctcttccattccctccaagagcagtttccaacaaataaatggaagaggcagagaaagagatcttggaaacgtctagaatagtagagggtaacatacctctgttggatgcaataaagcaaattccaagatatgccaaattcttgaaggagctgtgcactaat

SEQ ID NO: 10555 - DNA, 439 bp, Glycine max
  unsure (1)..(439): unsure at all n locations
agcttctggaaagaactatttggaatgtagatttacattctatattaggtgcagaaagcaaatatagaggtgcaagaagcaattgcctgcataaaaacattatgtgtagcccactataccactctattcagcctatctaaggagagttatcccctggggaatactattcacccctacactaattgttgttgacccccaacatcattgggaaattacccttctaccccccaacttcaaaattccttatccctccctcttccctcttccttccccttcctagcacctctttccccttctccttctccatctttgtcccaaaccgacgcctcttacccttctctttctccttctcgtatcgatgccccttccttntttccttctccttctttctttctcctccccaacccaacctaaacgaacccttttccttcttctcttc

SEQ ID NO: 10556 - DNA, 502 bp, Glycine max
  unsure (1)..(502): unsure at all n locations
gtcacctgcggcatgcaagcttccaagagtngaagaggcggttgacaacagctccagtgttaattntgcccgaccctaagagaccatttgaagtgtattgcgatgcaagcgggcaaggcttgtggtgtgtgttaatgcaagagggaagagtagtggcttatgcttcacgccaattgcgtcctcatgaagttaactatccgacccatgatttggaactagcagctgtggtctttgccttgaagatttggaggcattatttatacggtactcgtnnttgaagttttagtgatcacaagagtctcaaatacttgttcgataagaaggaactcaacatgaggcaacgaagatggatggagttcatcaaggattatgattgtggtctttcctaccatccaggaaaggctaatgttgtagccgacgcgctaagccggaagtccttacatgtngcgaactatgatgagttggagcagagattgatagaggaatttcgagatctgaatct

SEQ ID NO: 10557 - DNA, 390 bp, Glycine max
  unsure (1)..(390): unsure at all n locations
taatcaagataagtatgataagggtttctcaaatattgaatagcacatgattnttctcaaaatatgtttaccaaagagtttttactctctggtaatcgattaccatattgttgtaatcgattaccagtagcaaaatggatttgaaaaagttgtcaaattgaatttacaacgttccaattattttcaaaaagctgtaatcgattacacatatttggtaatcgattactagtgcctttgaacattgaaattcaaattcaaatgtgaagagtcacatcttttcacataaaagctttgtgtaatcgaatacactgatttcgtaatcgattaccagtgactgtttctgaataaatcaaaagatgtaactcttcaaaagggttttgaacttttcaa

SEQ ID NO: 10558 - DNA, 475 bp, Glycine max
  unsure (1)..(475): unsure at all n locations
tatcgtcttatatggacgtatcatctaaaacacagacgctcatatacagatcatattctgataatacatatatagatacaacttttatcatttgtatttgtttgcatctaatacaaataattaggagtcattatttctctttaagacataaatgtattttgagttaacatttaccatttnttataagagaaaaatttaaaaattatcatccacaaatttaagataataagttattaacaataaatttaaaaatattaaatatattattntatgtcatttgaacaaaacacttcaagaactaaagcaaaattataaatatgataaaatgtgtctaaaataaactaacanaaaccaaaatatagaatttataagaactattaaaagtaataatttataagaccaaaatanaaacaataaatacaggttaaaatgttattaaactttatatattgcatgcatttaataagagaaaaaa

SEQ ID NO: 10559 - DNA, 458 bp, Glycine max
  unsure (1)..(458): unsure at all n locations
tcaagaaaatgatggcctcagcanattccttatttctggaagcatatccatagaanaacctagagatagatggtctgaagaggatagaaaacgagtacaatacaacttaaaagacaaaaacataataacatctgccctatgaatggatgaatatttcagggtttcaaattgtaagagtgctaaagaaatgtgggacactcttcgattaacacatgaaggaactacagatgttaaagatctatgataaatgcactaactcatgagtatgaattatntagaatgaatgcaaatgaaaatattcagagtatgcaaaagagatttacacatatagtaaatcatctagcagccttaggcaaagaatttcaaaatgaggatcttataaacaaggtgttaagatgtttaagtagagaatggcacccaaagtaactgctattctgaatcaagagattgtctacatg

SEQ ID NO: 10560 - DNA, 388 bp, Glycine max
agcttcgagctcagcaggagctacttggaattctctgtatttgaccaattcctgaaaccgatcaacaatgaagagttcattatcatcatcaatgaaaccaatatctcctgtgtgtaaccatacttctctgcctatagtactctctgtagcctctgcgtcatttagatatactgaccaaccagaaattgaacatatcaagaaactgtgatggtgtttgtttgtaacatattacctttgacaagacttacgctaattaaaattatgcttgcggagtcttacatttattcttgtataatcaattacacattctataacccattaataggcaggtgctcgctgatcagctacttcataaactgtctattttcatgctataatgatgtgactc

SEQ ID NO: 10561 - DNA, 417 bp, Glycine max
  unsure (1)..(417): unsure at all n locations
tataagaattccaaattctacaaggagaagaccaagaagttccatgatagtttgatagctaagaaggacttcgtggttggacaaaaagttttattgtacaactctatgctcgaactcatgagtggtaagttgaggtcaaagtggattggtccttttgtggtaactaatgtttttacttatggtacagntgagatcaaaagtgaatccacagataagggcttcaaggtcaatggacaccggctaagactattcctcacaaatccttccttatatgatgtangtggggaggagacctccttacttcaccctacttctctgtcgccatgacttnacggagtttctttntctgtctccttctttactattattgcactcgtccaaatttattgattgttttgaatggtcttaatcttatga

SEQ ID NO: 10562 - DNA, 419 bp, Glycine max
ctctatgtgtccttaatggaggaatctaatcactattagaaaatactctttcagcatcggttatttagaacattctacatcggttctaaaaccgactttgaaagtgccgatgttgaatgtatcaatgttaatatcggttttgtaaaactgatgttaacatatatatgacaacatcggttctctgaatacccgatgttaaacacaatgaacaaaaaaaaaaaaagtgtacgcatgatgaacgttgacatcggttttgcagtacaaccgatgttaatatgttatattaacatcggttgtttagaaaaaccgatgttaatgtaatatatcaagatcgggtctctacgataaccgatggtaatatattccattaacatcagttattcttaaaaaccgatgacaacggttatgatgcatacact

SEQ ID NO: 10563 - DNA, 466 bp, Glycine max
  unsure (1)..(466): unsure at all n locations
agcttaagctccttcaactgcacaaggctcttaatanttgaagagtatccttgtggaacctttactcgacgaagacactgacaaaaacttatcttctccttcttggacaaagtatggcaggttgggggcaagtaaattttcttcccatcagaccttggatgcaactgtgatcgtatacccatatcagctagatcttgacgggtattcaagccatccttcgtcttgccttgaatgttaaggagcgtcctaatcacactgtcacaaacatttttctccacatgcataacatcaatacaatgtctaatgtcaagatcacaccagtatggaagatcaaagaaaatggacctcttcttccatatgcaactctgactnttatccttctcttgggtcttcctaaatacagtattcaggtgctgaacctgctgatatacctactcactagtcaacggtatcggtgaatatcatg

SEQ ID NO: 10564 - DNA, 417 bp, Glycine max
  unsure (1)..(417): unsure at all n locations
tcaagaattatggcctcatcaaactacttgtttcccgaggaaattctataaatagacctcccatctntaatggagtgggttaccactattggaaaaattggaaaacccgcatgcaaatatttatagaggcaatagatttaaatatctgggaagccatagaacaaggaccttatgttccctctatagtggccggttgtgcaacaatagaaaaacctagagcagattggattgaggaagaaagaagattagtacaatataatttaaaggccataaatattattacatctgccctaggaatagatgaatactttagggtttcaaattgtaaaagtgctaaggatatgtgggataccctacaagtaacacatgaaggcacaacanatgttaaaagatctaggataaacacattaactcgtg

SEQ ID NO: 10565 - DNA, 307 bp, Glycine max
acagtgacaacgattgggctagagataaatatgatcggtaaagtaccaatggatttgtgtttttcataaggaacacaacgttcacttggatgtcaaaaaagtttccaatagtcactctttcgacttgtgaagcagaaaacataacagctgcttcatgtgttttccatgtagattggctcacgaatatgttaaaagagttgggcatgtcacaagaagagacaaccaagatttttgtggataataagtcaaccattgctctagcaaagaatccagtgttccatgatcgaagcaaacatattgatacatg

SEQ ID NO: 10566 - DNA, 295 bp, Glycine max
  unsure (1)..(295): unsure at all n locations
aagaaagcactttatgggttaaaaaaagcacctatggtttggtatgaaagattaagtaaattcctattagtaaaaaaattcactcgagggaaggtagatatcaccttattcataaagaagaaggataatgatatcttatcggtacaaatttatgttgatgatataatctttggatctactaatgaatctatgtgcaaggagttttctattgacatgcaaagttagtttgagatgtccatgatgggtgaagttaaatactttcttggactacanatcannacaacaaatgatggga

SEQ ID NO: 10567 - DNA, 438 bp, Glycine max
agctatatcaggaagttgatggaattctttgatgacatatcttttcatcacattctaagagaggaaaatcagatggctgacgcccttgccactctagcgtccatgttcaaagtaagcccgcacggagatttgtcgtacatcaaatttagatgccgtagtgagcctgcacattgcaatttgatagaagaagaggaggatggtaagccttggaacttcgatatcaaacgatacatcgaagacaaggaatacccgcttgaggcctctgacaacgacaaaaggacattacgaaggttggcggccggtttcctccttagtggaaatatcttgtacaagagaaaccatgacatggtgttgcttcggtgtgtcgatgtaagagaggccgaacaaatgctaatagaggtgcacgaaggggtcctttgtatgcatgccaatggacat

SEQ ID NO: 10568 - DNA, 380 bp, Glycine max
  unsure (1)..(380): unsure at all n locations
agcttgccaccatggagttntccgactatgctcttgtgtggtggaacaagctacaaaaggagagagcaagaaatgaagagccaatggttgatacatgggtggagatgaaaaggatcatgacaaagcggtatgtgccggctagttactcaagggatttgaaattcaagcgccaaaaactaacccaaggcaacaagggggttgaggagtatttcaaggaaatggtgtgctcatgattcaagcaaagattgaagaagatgaggaggtaactatggctcgatttcttaatggtttgactaatgatatccgtgatattgttgagctgcaggagtttgttgaaatggatgaattgcttcacaaagcaatccaagtagagcaacaat

SEQ ID NO: 10569 - DNA, 334 bp, Glycine max
  unsure (1)..(334): unsure at all n locations
gtaagccaattcatacgacaataactttntactcggatgtctgattgagtcccgtaatataacgaaacgctcgaaattcaatgtttaagctttgagccaattctaacgataataacttattactcggatgtccgattgagtctcgtaatatatcgacacgctcgaaattgaatgttgaagctctgagcctattcaaacaacaataacgttttactcggatgtccgattcagtgacgtaatatatcgggacgctcggaattgaatgttgaacctctgagccaactcacacgacaataacattttactcggatgtctgnatgagtcccgaaatata

SEQ ID NO: 10570 - DNA, 424 bp, Glycine max
  unsure (1)..(424): unsure at all n locations
agcttaaacattcaatttcgagcttctcgttatattacgggacacaatcagacatccgagtaaaaagttattgtcgtttgaattggctcgtaggttcaatattcaatttcaagcgtctcgatatattaccggactcaatcagacatctaagtaaaaagttattatcgtttgaattggctcataggttcaacattcaacttcgagcgtctcgatatattacgggactcaatcagacatccgagtaaaaagttattgccgtttgaattggctcatagggttcaacattcaattcgagcgtctcgatatattacaggactcaatcagacatccgagtaaaaagttattgtcgtttgagttggctcagaggttcaacattcaanttcgagcctcccgatatattacggcactgaatcggacatccgag

SEQ ID NO: 10571 - DNA, 386 bp, Glycine max
  unsure (1)..(386): unsure at all n locations
agcttcaaccaaggggagatggaccatttttagtgcttgaaagaatcaatgacaatgcttacaaagttgagctgcccggtgagtataatgttaattccaccttcaatgtctctgatttatctctttttgatgcagatggagaatccgattngaggacaaatccttctcaagagggagagaatgatgaggacatgttcaagagcaagggcaaggatccacttgaaggacttggaggacctatgacaagggctagagcaaggaaagccaaggaagctcttcaacaagtgctgtccatactatttgaatacaagcccaagtttcaaggagaaaagtccaaggctgtgagttgtatcatggcccanatggaggaggactaaatgacacca

SEQ ID NO: 10572 - DNA, 415 bp, Glycine max
  unsure (1)..(415): unsure at all n locations
tcccaagttnttaagttcttcctcanaactgtcctaagcaaagttcccaaagtcctattaacaacttccgtttgcccatcggtttgtgggtacaagtggttgaaaataacaatgtagtgcccaacttgctccacaaagtcctccaaaaatggcttaggaacttagagtccctatcactaacaatgctccttggcaaaccatggagtctcacaatctccttgaaaaacaaatcagccacatgggaagcatcatcaatttttttacatggaataaaatgagccattttagaaaacctatcaacaaccacaaaaatggaatctctaccattgcttggttttggcagccccaaaacaaaatccatggataaatcaatccaaggatactccgaaattggcaatggagtatacaatccatg

SEQ ID NO: 10573 - DNA, 447 bp, Glycine max
tgtagcatattcaaacgaccataacttttaactcggatgtctgattgaggcccgtaatatatcgagacactcgagattgacaacacaagctctgaggaaatgcaaacgactataactttttactcggatgtctgattgtgtcccgtagtatatcgtgacgctcgaaattgaaaacataaggtctgagcaaattcaaacgacaataactttttactcagatgtccgattgagtcccgtaatatatcgagatgcttcaaattgaaaatagtagctcctagcaaattcaaaacataataaatttttactcggatgtccgattgagtcccgtagtgtatcgagacactcgaaatcgaaaacagaagctctgagcaaattcaaacgacattaacttttttctcggatgtacgattgtgtcacttagtatatctagacgctcgcaactgaaaa

SEQ ID NO: 10574 - DNA, 404 bp, Glycine max
  unsure (1)..(404): unsure at all n locations
cgacctgtcggcatgcaagctttcattttcattataagcgtctctatatattacgggactcaatcggacattcgagaaaaatgttattatcgttagaatntgctcagagcttccgttttcaattacgagtgtctcgatatattatgggatttattcggacatccgagtaaaaagttattgtcgtttgattttggtcagagcttctgttctgaattttgagcgtgttgatatactatggatcacaatcggacattcgaataaaaagttatcatcgntctaatttgcttagagcttttgtgatgtgaacctgaggagaagcagatcgtttgatacatgctacggaggttttggtgatgccacttccaaagagggaagaatagtcagggtagacgccactttcaatg

SEQ ID NO: 10575 - DNA, 363 bp, Glycine max
  unsure (1)..(363): unsure at all n locations
agcttctatactntgtacaagaatgaagctctgataccacttgttagacaagtggcctcagatatcttaagaagggggggttgaattaagatattccaaacttttctcctaattaaaaatctatcttactttntacttaagttatgaattcccttaatgacaatcttcttaaatattaattcaaatgaagcaacttgaattatgaatataaagcaataataaataaaggagattaagggaagagaaaatgcaaactcagttttatactggttcggccacacccttgtgcctacgtccagtccccaagcaacccgcttgagagttccactaacttgtaaattccttttacaagttctaaacaca

SEQ ID NO: 10576 - DNA, 361 bp, Glycine max
tgtaatcgattacatcatttgtgtaatcgattactagtcacaaaaatttttatctcaagtttgaagagtcacaactcttcagaaactaactgtgtaatcgattaccacatctatgtaatcgattactattaagaaattttctaagataactctcaagagtcacaactgttcaagaagttgttgaatgaccattatagacctattactaggtgacttgggatacgaaagtccttagagtttttctgaataacattgacttatcctctcaaaaccaaattgtcttatcactctcacaatattccttgacccaaacacgtacgaattcgataacgaatctcgatcgatcttcatttgtatgtca

SEQ ID NO: 10577 - DNA, 341 bp, Glycine max
taataaatctatatatggtgtatagcaagcttcccgttagtggtaccttaagtgtcatgggataatttcttcatttggctctgatgataaccccatggatcaatgcatataccacaaggtcagtgggagtaaaatatgttttcttgttttatatgtagatgatattttacttgcagccaacgatcggagtttgctacatgaggtgaaacaatatttctctaagaattttgacatgaaggatatgggtgatgcatcttatgtcatcggcattaagattcatagagatagatctcgaggtattttgggtctatcataggaaacatatattaacaaaattctag

SEQ ID NO: 10578 - DNA, 322 bp, Glycine max
  unsure (1)..(322): unsure at all n locations
tctgataaggtaaagatgattaggtaaaagttgaaggtatcacaagatagacataaaagttactatgataaaaggagaaaactcgaatttcaagaagaagatgtgtttttgaaagttacattgataactgggttgcgggaacccttaagttccgaaaactctctcctaaattcattggtccctaccaaattcttaaaagagttgattccattgcatatcaaattgttntacctccaaatcttcacaatgtgttccacggttctcaacttttgaaatatgtntttgattcttcccgtgcgattgaacctgatgtagtacaatt

SEQ ID NO: 10579 - DNA, 142 bp, Glycine max
  unsure (1)..(142): unsure at all n locations
tctcgatatattatgcgcctgaatctganccccaattgaaaagttatgaccatttgaattgctcgtgagcttccgttgttcaatttcgagcgtctcgatatattatgcgcatgaatcggacctncaagtgaaagttatgacc

SEQ ID NO: 10580 - DNA, 361 bp, Glycine max
tgaatccgcggccacctcatggacttctctaacaacaataacatcatttactgcactgaattgttgggagttggaagccatcttcataatcaaattcctagcttcagcaacggttatatcaccaagagctccaccactggtagcatcaatcatactcctatccatgttgctaagtacctcatagaaatatcgaaaaacgagttgctcagaaatctggtgcgggggatagcttgcacacaatttcttgaatctttcccagtactcatacaagctttctccactaagttgcctgatgcttgaaatgtcatttctgatggcagtggtcctagatgcacggaagaatatctccaagaacaccctc

SEQ ID NO: 10581 - DNA, 449 bp, Glycine max
  unsure (1)..(449): unsure at all n locations
cgtgacactatattgtactcattctagtcacanaaggaaacaagttaaaaattattttcaaagtaaaaacgttgtttctacttcaaaactctttgaactacttcacatagacttatttggtccttccagaactatgagtttgggtggtaattactatggcttagtaattatagatgattattcaagactttgcttttgaaaaccaaaaatgaagcttttgatgcttttcgcaaacttgccaaggttattcaaaatgaaaaaggtcttaacattgtttcaattagaagtgatcatggagatgaatttcaaaatgagtcttttgaaaagttttatgaagaaaatggaattcaacacaattttttttccccaagaacacctcaacaaaatggtgttgtggagaggaaaaatagatcccttgaagaaggagttagaactcttctaaatgaaac

SEQ ID NO: 10582 - DNA, 381 bp, Glycine max
  unsure (1)..(381): unsure at all n locations
gcttgtgcatncatacctngatgaggatgtcccatatgttcttaaaactggactgattcatttgcttccaaagtctcatggccttgcaggtgaagacccgcacaaacatttgaaagaatttcacattgtctgctccaccatgaaagccccagatgtccaagaggatcacatatttctgaaggctnttcctcattcattatagggagtggcaaaggactggctgtattaccttgctccaaggtccatcacgagctgggatgaccttaagagagtattcttagaanaaattttccctgcttccaggaccacaaccatcaggaaggatatctcaggtattagacaactcagtggagagagcctgtatgagtactgggagagatt

SEQ ID NO: 10583 - DNA, 422 bp, Glycine max
  unsure (1)..(422): unsure at all n locations
ttcaaaagttttaagcattggatgattcttataaagaattagacggtnaagtgtcttaagtttaactatagcttggaattctgttctactgaattcaatgaattctatggagatgaaggcatagcgagacaacataatgtatgctatactccacaacaaaatggagaatatgaaggaatgaataagaccttgttggaaaggatgagatgcatgctatctaattcatgattgaatataagtttctaagttgaggcaatcaacacaacatgctatctcgtgaattggcaaccaacactaccacaaacttcaacacccctattgaggtatggtttagaaaattggttgaatactcaatgttgagggaactgattggacgagtcaaaaccattcgaagtagcctaaaaccacaacacccagaaagt

SEQ ID NO: 10584 - DNA, 401 bp, Glycine max
  unsure (1)..(401): unsure at all n locations
agcttctatactttatacaagaataaagctctggtaccgcttgttaaacaagtggcctcaattatcttaagaaagggggttgaattaaaatacaaaaactatccccttaattaaaaatttaacttttttatattaaaaatgcaacccttattatgagttactctaagaacaattcanaacaaacttctttaaagcgaaatataaacaataataaataaaagaagtttaagggaagagagaatacaaactcaatttttatactggttcagtcacgccctatgcctacgtccagtccccaagcaacatgcttgagatttccactatcttgtataaagccttttacaaagtttgaaccacacagtagcaacccttcccttgtgttcaaataaccttacaactta

SEQ ID NO: 10585 - DNA, 384 bp, Glycine max
  unsure (1)..(384): unsure at all n locations
tcttcaactcaccaatgtcatctggtaatctggacagacttacacaatctgagatgtcaagacagcttagcttgttaagccctttaacagaatctggcatctctaccaaatcagagcaagaacatagccttagcacttccaaattctccagcttcgcaatatcttgtggcaatgcagatagcctgtgacagttagtgatactaagcttcttcaatggggtgatgttactcagcccatcgggcaatttaaccagatcattacaatagtcaatgctcatctccacaagatttggcattgcatctgagatttggatagaacagntttcaaaagcctgcctcgtattacacatatgaagggacaattttcgcagattcttcaatatgc

SEQ ID NO: 10586 - DNA, 455 bp, Glycine max
tcgtacccgggttcctctcagtcacctgcggcatgcaagcttgataccttgcacacaagcaaacactaagcataatatctggttgacttgcagttaagtaaagaagtgaaccaatcatacctctatactttgactcatccattgatttaccgttttcatctaagtcaagataagtcgatgttgtcattggtgttgatgcttctttgcactttttcatgttgaatttcttaattagttatgtacaatattttgtttgacataggaaggttccatgtttcatttgcttgacttgaagtccaaggaagaagttcaattctcccatcatagacatctcaaattctttctgcattagtactggaaaattccatacacgaagtttcattagtagcaccaaagattatatcatcaacatacatttgcacaatgaacaactcatttgttaatctcttgataac

SEQ ID NO: 10587 - DNA, 379 bp, Glycine max
  unsure (1)..(379): unsure at all n locations
tgtgcattcaatatcctgataagggtgttccatatgttctcaagactggactaatacattngctgcccaagtttcatggtcttgcaggtgaagatcctcataagcatcttaaggagttccatattgtttgttccaccatgaagccgccggatgtccaagaatatcatatctttctaaaggctcttcctcattctctggagggagtggcaaaagattggctatactaccttgcccccaagtctattttcagttgggatgaccttaagagggtgttcttggagaaattattccctgcatctatgaccactgccatcagagaagacatttaggcatcangcaacttactggagaaaccatgtatgagtactgtgaaagattc

SEQ ID NO: 10588 - DNA, 326 bp, Glycine max
  unsure (1)..(326): unsure at all n locations
gcttgtgaccatttgaataactcaagagcttccattgttcaattntgagcgtcttgatatattatgcgccttaatcggacctgcgagtgaaaagttatgaccatttgaataactcaagagcttccattgttcaatttcgagcgtctcgatatattatgtgcctgaatctgacctccgtgtgaaaagttatgaccatttgaatttctcgagagcttccgttgttcaatttcgagcgtctcgatatcttatgcgcctgaatcggacctctgagtgaaaagttatgaccatttgaattactcaagagcttccattgatcaattacgagc

SEQ ID NO: 10589 - DNA, 355 bp, Glycine max
  unsure (1)..(355): unsure at all n locations
atgaatggagggagagggagaggtagagaanaagcactaaatttatgcctcanataaggtctgaactntgaagtgtaattctcaaatgatcaaagttgaaaaaatatatacacatgacctttatttatagcctaagtgtcacaaaaaattaaagggaaatttgaacacttgaatttgaaattgaatttgtggagccaaaatttcacaaattgttgtgtatcctacatttaaagatgcctgttttgcattgggctttcttcaagatgataaggaatatgttgaagcaatttaagaagcaaaaaattggggtacaggtcattactttataaaactttttgctacaatgctaatcaca

SEQ ID NO: 10590 - DNA, 436 bp, Glycine max
tgatgatcgatacaacagtcaacagctgataaagagaaagcataatagcactgcaacgattcaacatgcattgaaaagacacaagtttattttccaccgacgctggtagtcttcgaacacattgacattttgttgcacgtaacataccatgacgagattgcaaagcaaggccatatatataataacttgcatgggttggaagggtatcacactctaattaagggcacttgcgtctgccaccgtgggtggtgagactggcataacagggacacacttcttggttaccggaagttcccggtggcacgcagttgcagcgtctgcagcaagttccacatgctctgtgacacatgcgttgacgagatgctaaacggcacctcgcagcacatgcagcattacaatctgaaatcaattcatcattcaagttagtaattagttc

SEQ ID NO: 10591 - DNA, 364 bp, Glycine max
ctttaacccgcttctaaatgatatgttcggaatgcagtttaagaagcaattatcaatttaataatgttctttaaacatgcaagacaaaatttattgcaataataaatgagataaggaaagagagaaatgccaacttgatttatactggttcgaccacttcccgtgcctacgtccagtccttaagcaacccacttgagatttttcactctctttgtaaaaatcctattacaaagtctgaaccacacagggacaatccttcccttgtgttcagcaattcttacaacttaagagaccctcggtcctttaatcaatctctttgaaaagatgaagaagacaaactctctctttatgagaaagatattac

SEQ ID NO: 10592 - DNA, 428 bp, Glycine max
  unsure (1)..(428): unsure at all n locations
atgtgaagctcctgttntagctntacccgattatactcatccatttgaagttgaatgtgatgctagtggagttggcattggggctgttttgatacaaaacaaaaggcctatagcttatttctcggagaaattgggaggagccagattgaactattgcacctatgacaaagagttctatgccattgtgagagctcttgatcattggaatcattatttgcgttctaatcactttatattgcattcagatcatgagtcattgaagtatatcaatgggcagcagaagttgagtccaaggcatgctaaatgggttgaatttcttcaatcttttaatttctcttcaaaatacaaggatggtaagagtaatgtggtggctgatgcactttcaaggaggtatgctntaatttcaattcttgaaactcgtttacttg

SEQ ID NO: 10593 - DNA, 417 bp, Glycine max
  unsure (1)..(417): unsure at all n locations
ttngaatcagtggaaagaggtatggacttgtcgtggtcatccactctaaatggatatgtgtcatgttcctagctcacaaggatgagtcttagtgcctcctttaaattttgtaaaagatttcaaaatgataaaggagtatgcattacttcaatcagaagagatcaagggggagaatttgagaatgaaaattttcaactgttctatgatgaaaatgttattcttaataatttttcaactcctagaacatcaatagaatgaaatagttgaaagaaaaaacatatctttgcaagagatggccaacatcatgctcaatgataatttaacccctaagcacttctaggctaaagcaatgaataccacaacanaatttatataagggtaatacttaaaaagactccatatgaattatggaatgga

SEQ ID NO: 10594 - DNA, 338 bp, Glycine max
  unsure (1)..(338): unsure at all n locations
ntgggctaattcaaacgacaattatcctttgctcggtatgtctgattgagtcccgtaatatattgagacgctcgaaattgaattctgaaccttagagctaatgcaaacgacaataactttttactcggatgtctgattgagtcccgtaatctattgagacgctcgaaattgaattctgaaccttagagctaattcaaacgacaataactttttactcggatgtctgattgaatcccgtgatacatcgagacgctccaaattgaatgttgaagctcttagcatattcaaacgacaataactttttactccgatgtctgattggagtccgaatacatcga

SEQ ID NO: 10595 - DNA, 371 bp, Glycine max
  unsure (1)..(371): unsure at all n locations
agctgcatgattacatctccctctttctcaagaaaattcttttaatatcatcaaaatcttcatgatttacaaccctggatggaggaatcaccctaatctcagatggtccagccctcagcaacaacaacagcagcccgctccttcctttcaaaatgctgctggcccaagcagaccatacatttctncaccagtccaacaacaacaacaaccccagaaacagccaacagttgaggcccctccacaaccttccctcgaagaacttgtgaagcaaatgactattccaaacatggcagttcaacaagagaccaaagctttcattcagagcttgacttatcaaatgggacaattagctacacaattgaatcaacaac

SEQ ID NO: 10596 - DNA, 433 bp, Glycine max
ctattcccaatggcaaatcacataacaaatttttaagatactcagcctcactagtagcagtatctaaagcaataatttctgtttccatggtagaacgtggaataatagtttgtttagtagatttccatgatactgcaccaccagctaaagtaaaaacataaccacttgtcgattttgtttcatcagaataaaaaatccaatttgcatcattaaacccctcaattactgtaggaaaacatgtataatgaatgccataattaatggttccttttaaaatactctttctaatgcaatccaatgagaatgattaggaatattattataccttcctaatctaccaactgcatatacaatgccaggcctagagaagtttgtcaaatgcaaaaaagaaccaataatttgagaatatttatatgaagaagttcctttactc

SEQ ID NO: 10597 - DNA, 402 bp, Glycine max
  unsure (1)..(402): unsure at all n locations
tgttgtatttgctaagttctatgtcacaacattnttaatgttccttgcttaataagcttcttatttttagactttgttgttttttttttattattagaagtaatctatgtgtcatattagatggtttagaactaagtttcagttgtttatataaataatgattgtttatgagtaaaaaatattttcttattattcaaagagataatttaagagttatttaaaattatatcattaaaataaaatatatgagttgtttaattataatgtgatattgtagtaaccaattaatatacgataaaaaaactcagaataaattacttaaattatacccaatggaaatgctattggtggtattgcaatgatctttttaatcaaaatagagtaattatacaaattatttat

SEQ ID NO: 10598 - DNA, 408 bp, Glycine max
gcttctgaatgctctttcaagtactttttaagccaatcaaacgaaacctgcgtgcaccacaaattagataacgatatcaatccatcagctaataattctaaagaggatatatattttttcttgtgatgactttgaagttctaactatatgtacacttacttgattttctgccaaccccatttgaataactcctgagggattggctaattcagcataggggttctcatcataggctttccacccaccaaaataacgggaatcttccccgtgagtttcataaactgcaacttttgaaagctccacacagggttgctccatctcaatacccatagctagctagcttcctggcaaaagagttgattactcaattacagaaagcagacagctgctgtgagtaacacaaagata

SEQ ID NO: 10599 - DNA, 339 bp, Glycine max
agcttcgcaaaatttatttttctggaagaccaattactaagtctctcctaactagatgattgagatgatgcatgtttatgtgtgctgtcctacgatgccacaaccaagaatcatttatcttacttaccaaacaactcagctcatgaaatgatgcatgctcaatgtttaacatatagatattacctattctcttgccaatatggacaacctcactagacgtagattcaccaataagataacaattcttattgaattcaattttgaagcctttgtcacatagttgactaatgctcaggaggttatgttgtagtccatccacatatagaacattctatatct

SEQ ID NO: 10600 - DNA, 339 bp, Glycine max
agcttacaaaaaaagtccctacaacaaagactactcaaaatgccctgaaatacaaggctaaaatcctatactactagaatggccaaaacacaaggcccaaaagaaggaaaaacctattctgatatttacaaaaaagagtggatccaaccttgacccatgggctcaaaaatctaccttaaggttcatgagaaccctagggcattctttagtagctctagcccaatcctcttggagtcttctatccaatacccttggggggtaggattgcatcacaatcctcatctcctcctttctcggattgagttattaattgctcaaaatcaacatccgggtcctcag

SEQ ID NO: 10601 - DNA, 338 bp, Glycine max
  unsure (1)..(338): unsure at all n locations
atatatcatcatgtttatatncttattattgtaagaatgaccataatatctgtatgtaaattaaactagttntctaggtttctaaccataatatatgtatttttcaaaacttccatttcaaagaaaataatatntattattntaagttcaaaactcagagaggaaaaaatgcatgcaaacaaattcaaataataagtattggctaaaatagttttattatgaaattaaattctntaaggataaataatttcatttttcggaatatttgatattttgaattttatttgatccttannagtaacattgtaacaataaaataatatctttcaaagtttatg

SEQ ID NO: 10602 - DNA, 326 bp, Glycine max
agctttccagcaactcctctttgcacaagccactcatgcgcgacaagactgtgctggtaaccggcggagccggttacatcggcacccacaccgttcttcagctcttgctcggaggttgcagaaccgtcgtcgtcgacaatctcgacaattcctccgaggtttctatccaccgagtcagggagcttgccggcgaatttgggaacaacctctcctttcacaaggtgctcctcctccttctattgcctgtttcattcaattttgatttgttcggtgcctttttctcgtaaacaaagattatttcgcttcgtggcttgtgtttttcggga

SEQ ID NO: 10603 - DNA, 320 bp, Glycine max
agcttaataaatctatatatgctttaaaccaaacctcctgccagtggtaccttaattttcatgggataatttcttcatttggttttgatgaaaaccccatggatcattgcatataccataaggtcaataggagtaaaatatgttttcttgttttatatgtagatgatattttacttgctgccaatgatcaaggtttgctatataaggtgaaacaatttctctctaaattttttgacatgaaggatatggatgatgcatcttatgtcattggcattaagattcgtaaagtgatagaccttaaggtattttatgtctatcac

SEQ ID NO: 10604 - DNA, 300 bp, Glycine max
  unsure (1)..(300): unsure at all n locations
tatgcaggttgaaagcctttgaggaaagaggtatgcctatgtgggtgtggatgatttctccagatntacctgngtcaactntatcagagagaaatcagacacctttgcaactgtcaagcacttncacatctntggaagtccatgttacantttggcagatagagagcaaaggagaaagatggatcccaagagtgatgcaggaatattcctgngatactctacaaacagcagagcatatagagtattcaattccagaaccagaacagtgatggaatccatcaatgtggttgttgatgatct

SEQ ID NO: 10605 - DNA, 340 bp, Glycine max
agctttgagaaaaatcaaacgacaataatttttaactcggatgtccgattgagacccgtaatatatcgagacgctcctaattgaaaactgaagctctgagcaaatttaaaggacaataaattttcactctgatgtccgattgtgtcccgtaggatatcgagacgctcgtaattgaaaacggatgctctgagaaaaatcaaacgacaataacttttaactcggatgtccaattgagccgtgtaatatatcgagacgcctgaaattgaaaacggaagctctatgaaaagtcaaacgacaataacttttaattcggatgtctgattgagtcccgtaatatatc

SEQ ID NO: 10606 - DNA, 243 bp, Glycine max
  unsure (1)..(243): unsure at all n locations
gattttctactgccatgattaggtcatctgtagttntaggagcctctntgtgttgtaatgaccgaatgacattaaagaagccaagatctaagacgttaaaatctagcgagtttaggggttgagaaaccaatcgaatgtcaaaatcgccttcactagcagcttgatggaagtcgttgtcatcttcatcaatgtgacatggaacattgtcttgttgtatgaaaatattttctcctctatctccta

SEQ ID NO: 10607 - DNA, 338 bp, Glycine max
agctttagttcactgcttttatagtgcacgatatgcttccagaggaaaacacattgtctaaaagttactatcaggcaaagaagatactatgtccgatgggtatggagtatcagaagattcatgcttgcccgaatgattgcatattgtattagacatgaatttgaacaaatgtccaaatgccctaggcgtggggtatcacgatacaaagtcaaggatgatgaggagtgtagtattgatgaaaactcaaagaagggccccccagtgaaggtgttgtggtatctaccgatcgttccaaggtttaagcgtccttttgctaattgagacgacgctaaagacct

SEQ ID NO: 10608 - DNA, 332 bp, Glycine max
agcatccacaaactgctgttggcaattgactcacaaatcatagcacggccgagaatttggtcatgagaatcaacacgaagacgaggtggactaccaacactccagacaggttggatctcatgggctagagcatctatctgtaactgcccaccactccaggcagtcaccaaaatacaatctgtgctgactaaattgtaaagaaaactaacagcacgaccttcacattctgcactacgaccaactgaatcttcattcccatcctgacctactcttcgcagaggtccctacaaaatcaaaagacataaagtagagtcataatatgtaacactgcc

SEQ ID NO: 10609 - DNA, 330 bp, Glycine max
  unsure (1)..(330): unsure at all n locations
cttcagactgatctacactngcacagtggccaaagatgcatgggagatcctgataatcactcatgaaggaacctccaaagtgaagatgtccagattgcaactgttggctacaaaattcgaaaatctgaagatgaaggaggaagaatgtattcatgacttccacatgaacattcttgaaattgccaatgcttgcactgccttgggagagaagatgacagatgannagctggtgagaaagatcctcagatccttgcctaagagattngacatgaaagtcactacaatagaggaggcccaagacatttgcaacatgagagtagatgaactcat

SEQ ID NO: 10610 - DNA, 318 bp, Glycine max
  unsure (1)..(318): unsure at all n locations
tgcgtcnattaacanatccaatatcatagtcattgccttatcgcttaatccacacaaaacttttatatgatataatttgattataaattctaattntgtgtacttgcttccttcatacaatgtttggctcccgtcctttagaagctcataaaagccattatgatcttctcttggttcatcatttactatttcatcttcatttagtggttgtgatgcacctacattagggtcatgttgcctatattgttcanatgcgtcattgatcatcatttccattgggttntgaggttgaacaccactatcttganaacatcttca

SEQ ID NO: 10611 - DNA, 307 bp, Glycine max
  unsure (1)..(307): unsure at all n locations
tactcagcttcgacatgataatggagacacatgaacagcgctaggcaatgacattcatggtgctccgaacaaaggcggagtatggaggattggcttgatggtccacacttangcaattatgaaactcagctccaaactcgaaagtggaggacacacgaacaaccctaagcaagaacattcatgtggctccgaaaaaggacgagaatggaggattgccttgagggtcctctcttaggcaatcatgaaacacagctccaaactcanaagtggaggacacacgaacagccctaagcaagaacattcatgt

SEQ ID NO: 10612 - DNA, 305 bp, Glycine max
  unsure (1)..(305): unsure at all n locations
gagagccatgagggcggactcatgggccactntgngatagacaagacccttgtcttactcannagaaagttntattggccccatatgaagaaagatgtccataagcattgcactaagtgtgtggattggttacaagccaagtctagggtgatgcctcatgggctatacacacccttacccatccctttctcaccttgngtagacattagtatggactatgtccttgngcttcctagaacccanagaggtgtagactctatctttgtggtggtggataggtttagcaagatggcacactntatatc

SEQ ID NO: 10613 - DNA, 332 bp, Glycine max
agcttgcttctacagggtgacctattggaggctcccaacttacttccaatgaaaggccttcttgttacaaaatttgaaagcaatgaaggtaagtaaattgtcaattacaaaattataaaaaggtcctcaattttggtggttgttctttctttggtgattcactcaatttggagtgcttcttagcccaatagctcttaaggtggttgaccccttgcttcttgactcaaattcttcaagggatgacatcaatcctcctttccaattccctatatggcaactcacaaacaaggaaacaaagagacaagaaataaccaaagacaaaaaaaaaaatg

SEQ ID NO: 10614 - DNA, 278 bp, Glycine max
  unsure (1)..(278): unsure at all n locations
aagttattgtcgttttgaattgctgagagcttcaacattcaatttcgagcgtctcgatgtattacgggactcaatcagacatcggagtaaaaagttattgtcgtttgaattagctcagagattcagaattcaatttcgagcgtcccgatgtattacgggactcaatcagacatctgagcgaaaaagttattgcngtttgaatttgctgagagcttcaacattcaattctgagcgtctcgatgtattacgggactcaatcagacatccaagataaaagt

SEQ ID NO: 10615 - DNA, 340 bp, Glycine max
agcttagagctaattcaaacgacaataactttttactcggatgtctgattgagccccgtaatacatcgagacgctcgaaattgaatgttgaagctctcagcaaattcaaacgacaataactttttactcggatgtctgattgagtcccgtaaaatatcgagacgctcgaaattgaatgttgaagctctcagcaaattcaaacaacaataacttttaactcggatggctgaataagtcccgcaatacatcgagacgctcaaaattgaatgttgaagctctcagaaaattcaaacgacaataacttttttccttagatgtctgattgagacccgtaatatat

SEQ ID NO: 10616 - DNA, 434 bp, Glycine max
  unsure (1)..(434): unsure at all n locations
cgctgcatgtacacgtctatcttggctagaaagcanaggcatgtgaatgtgatgatgacagaggaagagagggcacactcccaacaaaggcaaagactcctttagccattcccgggttgtgctctctctcttctgtcaacatgagatatctcacatcactcatcacagtccattcccaaccaccaatagaacccttcaagacatgcatttctactcgtgatcaagatcaccctgtccattatgaacaataacaccatcatgcatgcatttggataagaccatacatatataataattatatggcangtggacctttcgtgtatcaaaacaagcatatttctaattctttanaattgctttttccctactctattcttgggctacatatgtatatttatattacccaataattaaatacataactacagtttatt

SEQ ID NO: 10617 - DNA, 336 bp, Glycine max
agcttggactgagcattgatgaagatgctggtgaagcagatgctgacatgcctcctcttgaggacgctgatgcagatgctgagggtagcaagatggaagaagttgattaaatctgacttaattgcctgttacgtttttagaaacaatgattggagaaacagtctttttactatgttttatgttttttgaattttcgaaattttggaacgttggctagttaggtgccgtatgtagtagtttctttatggtaaatttgtgtccgctccctggccaatgaatttgtgctttcttcgtataatcgtgtatgctgattgcggaagtttcagttcgggaatg

SEQ ID NO: 10618 - DNA, 337 bp, Glycine max
  unsure (1)..(337): unsure at all n locations
tacatctctgctgagaatatctctcttttccgagggtgactagatctctatagcctntcaccccatcaccataacccatgaatagaccctntcttgatctangtaccagctntccttcattgacatgataataagcattgcagccaaatactcttaggtttgagtagtttgttgttntgtcattccagatttcaatacgagttttaagttctatagtagtagaggatgttctattgatcagaaaacaggctgtattgatagcttctccccaaaaacttctgttgagaccagcattagacaatangcatcttgttctttncagaaagtgtttgttcat

SEQ ID NO: 10619 - DNA, 333 bp, Glycine max
agctttgaagataaagaatccagttatggttttcaaagtggatttcaaaaaggcctatgattctgtatcttggtcttttttggactacatgttgataaggttaggtttctatcctaaatggagaaaatggattgctgcttgcctccaatcagcaaccatttcaatcctagttaatggaagccctacaaaggaattggcccccactagaggtttgaggcaaggggaccctttagctcctttgctttttaatatagtgggtgaaggtctcactggtatgatgagagaggcccttcataaaaacctttatagaagctatccggttgggaagcaaaa

SEQ ID NO: 10620 - DNA, 317 bp, Glycine max
  unsure (1)..(317): unsure at all n locations
tatcctgatgaggatgttccatatgttctcaagactgtactaatacanttgctgcccaagtttcatgatcttgcangtgaagatcctcataagcatcttaaggagttccatattgtctgttccaccatganatcccttgatgtccaagaagatcatatctttctaaaggctnttcctcattctctagagggagtggcgaaggattggctgtactaccttgctcccaagtccattaccagctgggatgaccttaagaaggtgttcttggataaattcttccctgcatctangaccactgccatcagaaaagacatttc

SEQ ID NO: 10621 - DNA, 332 bp, Glycine max
agcttgtaatctattacacatatactgtaatcgattaccagagcagattttcagaaaatattctcaacagtcacatctttttatgtggttcttgaatggctatcaaaggcctatatatatgtgacttgagacacgaatttgctaagagtttttcagaacaaaaaggtcttatcctcttataaagaaaaatcgttttatcctcttacaaattccttggccaaattacttgtgattcaataaggaattatttgagtgctcaaattgttcaatctatctctttcaagagagatttcttcttctcttcttcttcattctgaaaagggattaagaga

SEQ ID NO: 10622 - DNA, 336 bp, Glycine max
  unsure (1)..(336): unsure at all n locations
ctcgcaggtagccatgagtngtgatatgaacctggcgatgtagttcaagtgccccaagaaaccncagacttgctgtntggtgcatggctctggcatttcgaggatggccttaactttntcggngtcaacctctatcccttttcggctcacgatgaaacccaatattnttcccgatttgaccccgagagtgcacttggtcgggttcaaccttagtcggtacttccgtgacctcttgaacaactttcgtaagatgacgagatgttcttcttcagttntgaacttggcaatcatatcgtccacgtacacttcgatatcttgatgcatcatatcatggaa

SEQ ID NO: 10623 - DNA, 340 bp, Glycine max
agcttaagctctttcaactgcacaaggctcttaatatttgaagagtatccttgtggaaccttcacccgatgaagacactgacaaaaacttatcttctcctttttggacaaagtatgacaagttgggggcaagtaaattttcttcccatcagaccttggatgcaactgtgatcgtatccacatctctgctagattttgacgagtattcaagccatccttcgtcttgccctaaatgttaaggagcgtcccaatcacactgtcacatacatttttctcgacatgcataacatcaatacaatgtctaacatctagatcagaccactacggaagatcaaagaaag

SEQ ID NO: 10624 - DNA, 338 bp, Glycine max
agcttatgctgcaaacatttataatagacctcctcagcagcaaaaccagcaacaacagaataattatgatctttcaagcaacagatacaatctaggttggaggaatcatccaaatctgagatggacaagtcctccataataacaacagcctttccctcttttccagaatgttgctggtccaagcaagccatatgttcctcctccaatgcagcagcagtcataacaaagacaacctacaactgaggctcctcctcaaccttccttagaagagttagtgaggcaaatgaccatccagaatatgcaatttcagcaagagacaagagcttccattcagagtc

SEQ ID NO: 10625 - DNA, 331 bp, Glycine max
agcttatgctgcaaatatttacaatagacctcctcaacctcagcagcaaaatcaaccacagcagagcaattatgacctttccagcaacagatacaaccctggatggaggaatcaccgtaacctcagatggtgcagccctcagcaacaacaacagcagcttgctccttccttccaaaatgttgttggcccaagcagaccatacattcctccaccaatccaacaacagcaacaaccccagaaacaaccaacagttgaggcccctccacaaccttccctcgaagaacttgtgaggcaaatgactatgcaaaacatgcagtttcagcaagagacc

SEQ ID NO: 10626 - DNA, 336 bp, Glycine max
agcttaagctccttcaactacacaagactcttaatatttgaagagtatccttgtggaaccttcacccgacgaagacactgacaaaaacttatcttctccttcttggacaaagtatggcaggctgggggcaagtaaattttcttcccatcagaccttggatgcaactgtgatcgtatacccatatgagctagatcttgacgggtattcaagccatccttcgtcttgccttgaatgttaaggagcgtcccaatcacactgtcacaaacatttttctccacatgcataacatcaatacaatgtctaacgtcaagatcacaccagtacggaagatcaaag

SEQ ID NO: 10627 - DNA, 311 bp, Glycine max
  unsure (1)..(311): unsure at all n locations
ctcagcttctcgatatattatgccctgaatcggacttccgtgntgaaagttattccatntgaatntctcgagagctttggttgttcaatttcgagtgtctcgatatattatgcacctgaatcggattgtcgagagacaagttatgaccatntgaatttctcgacagcttccggtgttcgatttctagcttctccatatattatgcgcctgaatctgacttccgtgtgacaaagcatgaccatnggaacttgtcgagggcttccgatgtgcgatatggagcatctcgatatactatgtgcttcaattggaca

SEQ ID NO: 10628 - DNA, 270 bp, Glycine max
agcttctcgatatattatgcgcctgaatcagacttccgttacaaaagttatgaccatatgaatttctcgatatattatgcgcctgaattggactttcgtgtggcaagttatgtccattcgaattcttcgagagcacccgttgctcgatcactagcgttcgtgatatattatgcgtccgaattggacgcgctactgaatgggtatgaccacttgaatttcttgagagccttttgtgaaaaatatgctgcgtcttgatcttgtatgggcctg

SEQ ID NO: 10629 - DNA, 325 bp, Glycine max
agcttgtaatcaattacacacatactgtaatcgattaccagaggagattttcagaaaatattctcaacaatcacatcttttcatttggttcttgaatggccatcaatggtctatatatatgtgacttgagacacgaatttgccaagagtttttcagaacaacaagtgtttattctctcaaaaaaagcaaaatcgttttatcctcttaagaattccttggccaattcaattgcaattcattaaggaatcatttgagcgctcagattgtaaaatctatctctttcaagatagattcattcttcttctctttctaattcactaaggga

SEQ ID NO: 10630 - DNA, 326 bp, Glycine max
  unsure (1)..(326): unsure at all n locations
tgacattcatggtgctccgaacaaaggtggagtatggaggattgccttgatggtccgcacttangcaatcatgaaactcagctccaaactcgaaagtggagaacacatgaacagccctaagcaataacattcacgtggctccggaacaggatgagaatggacgattgccttgagggtcctctcttaggcaatcatggaacacagctccagactcaaaagtggagaacacatgaacagctctaagcaataacattcatgtggcttcagacaatgatgagaatggacgattgcctngaacgtcctctcttaggcaatcatggaataca

SEQ ID NO: 10631 - DNA, 282 bp, Glycine max
cagaagctcacgagatactacaatggtcttaacatgtcacacggaagttctattcaggtgcataatatatcgagacgctcgaaatagaacatcggaagctctcgagaaattccaatggtcataacttttcacacggaagtccgattcaggcgcataatatatcgagaagctggaaattgaacaacgaaagctctcgagaaactcatatggtcataacttgtcacacggacatccgattcatgcgcataatatatcgagacgctcgacattgaacaacgtatg

SEQ ID NO: 10632 - DNA, 421 bp, Glycine max
agcttgaaattgaacaacggaagctctcgagaaattcaaatgtgtcataacttatcacacggaagtccgattcaggcgcataatatatccagacgctcgaaattgaacaacgaaagctctcgagaaattcaaatggtcataacttgtcacacggaagtccgatttcggcgcatattatatcgagacgctcgaaattgaacaacggaagatctggagaaattcaaatggtcataacttatcacacggaggtccgattccggcgcataatatatcgagacgctcataattgaacatcgaaagctctcgagaaattcatatggtcataacttgtcacacgaaagcccgattcaggcgcataatatatcgagacgctcgaaattgaacaacggaagctctcaagaaattcaatggtctaactttc

SEQ ID NO: 10633 - DNA, 282 bp, Glycine max
aaatgctctcattccttcttcattgaacacaaaagcaacatctttattcaacaaattgctcaacaggttggctactttggagaaatcttttatgaatcgcctgtagaaccctgcatgtcctaagaaacttcttatttccttgacattcaggggaggaggtagtttctcaattacattgtccacctctttccctcttacttgaaatttatgccccaacactatttcttcttgaaccatgaaatgacattttctccaattgagaactagattagattcttcaca

SEQ ID NO: 10634 - DNA, 395 bp, Glycine max
cttgattcttgaccactctctttgtgacttctccttcttggcaacgagtcctgctaaaacaacaatggcaagtggttaacccccacaaattttcacaatggatctacccagaggctctaaatcagacgggcattcttcccctctaaaaatcttctttgtgaagagttcccagctttcatcttcattgaggatgggaaggtagtatggagacgcagttccagcatagtgtgccacctctttgttgcgacttgttatgagaattctactacctgtttggtcatctggaaaggctcctttaacctcatcccatacttgggtttcccagatgtcatcaagcactaccagatacttcttccctttaaccattctgctaccttttcttagtttacctcact

SEQ ID NO: 10635 - DNA, 238 bp, Glycine max
  unsure (1)..(238): unsure at all n locations
catataaactgaatcctatgcacccttaaggacttattctaaatatcagctgactgatcattagagntaatgaactcagtggccatctctttggacaatagctttctccgaataaagtgatagtcaatctctatgtgcttggtcctctcatggaagactgggttttgagcacatgtgaagagcaaccttgattatcacaatataacttcatttgcatcactttgcagaatttcaactc

SEQ ID NO: 10636 - DNA, 255 bp, Glycine max
  unsure (1)..(255): unsure at all n locations
gagcacgctggacttcacagcgtacctaggagggccgtagttgaagagccccaccacaccgcgatagatcttgaacgacgggatgtggaagagccgtcattccagggtgtttcaccactgatgccttgtggctgtcgaacacgccctggagggagatccatggaggttttcgagagctccanggagttggttgttgattgtgttctacatcatacgcatttggttcatgaggaatcgttgatcgtgcaagatata

SEQ ID NO: 10637 - DNA, 303 bp, Glycine max
  unsure (1)..(303): unsure at all n locations
cgagctaacccttgcatttttttgaggtattttgctacctaaacatgtgtatatttttgtgagatatttttgctatatacatgcatatccgaggtatcttgctacctaaacatacatgtatatattgtgaggtattttgctatatacatgcatatccaaggtatcttgctacctaaacatacatatatatatnttgtgaggtatctttntgttatctaaattacatacatgcatatctaaggtattttcactacctaaacacacatgcatatattntgtgaggcatgactaccttccgagctt

SEQ ID NO: 10638 - DNA, 472 bp, Glycine max
  unsure (1)..(472): unsure at all n locations
agtcacctgcngcatgcaagcttcttcagaaacgtggcagttgtgtgcaatacataatgcctaaaacaccacaacaaaatggtgtatcagaaaggcgtaatagaactttaatggatatgattaggagtatgttaatcaattcaactttactcgtatttttgtggatgtatgccttgaaaactgccatgtatttgttgaatagggttcctagtaaggcagttccaaagacaccttttgaactgtggatgaataggacacctagtataaggcacatgcatgtttggggttgccagacagaaataaggatttataatccgcaagaaagataattggatgcaagaacaatcagtgaatatttcattggttatccaaaaaagtcatggggtatatgtntttttgtcctaatcatagtatgagaatngttgaaactggaaatgcatgtttactgaaaatggtgaaattagtgggagta

SEQ ID NO: 10639 - DNA, 341 bp, Glycine max
  unsure (1)..(341): unsure at all n locations
tgtaggcctaggatcttcttcatcaatggattcctttgcttcttgganaatgaatggcagcggaatggagaaggaagagagagagagagaggagacgccacttcaaggagaagatgagtctagaagaagctcaccaccataagaggccatggataagagcttgggggaagaaggagatgaatgaagggagagggagagaagagcacgaaattntgtgctccaaatgagctttgaaatctgaattntaatattcaaatgatcaaagttgaaaaaaatgcacacacatgacctctatntatagcctaagtgtcacacanaattggagggaaattcaaatttca

SEQ ID NO: 10640 - DNA, 390 bp, Glycine max
  unsure (1)..(390): unsure at all n locations
ngctaaggttaaaccatactcgtgctcttcattgcactccaaaggatattgatgcaagcacctcagctagtggacttgggtattgggtcattcgtctctgatccacgttctgaggtctacaataatatgaagaacgccatcttatagtgcatgttaataaccagtttgtcatgatttttctgggtttatcctcactgccttagagctttatatcctgtttgcatgaacttaacaaccttgaacctgaagtttgcagcaggaattcanaacacagagctaataacactaatatgctgctgtgggaaacttcagcgtttatcggaatatataccaacctaagtctcttttcatctatgttcgtatgctgttgaatatctataattgctatac

SEQ ID NO: 10641 - DNA, 371 bp, Glycine max
  unsure (1)..(371): unsure at all n locations
atgatgcagatgggtntgtagctacctcatgcactcctctaatgactatggcatcatttctggcgctaaactgctgggagttggaggccatcttctcatattaaattttggcttcagcaggagtcatgtctctaagggctccaccactggcagcatctatcatacttctctccatattactgagtccttcataaaaatattggagaagaagttgttctgaaatctgatggtggggcaactggcacatagtttcttaaatctctcccagtactcatacaggctctctccactgagttgtctaatacctgagatatccttcttgatggctgtggtcctggaagcanggaaaattttttctaagaatactctct

SEQ ID NO: 10642 - DNA, 338 bp, Glycine max
  unsure (1)..(338): unsure at all n locations
tatgctgcannatattaccaatagacctctaaccctagcagctaaatccaccatagcagaacaattatgacctctccagcaacagatataaccctggatggaggaatcaccctaacctcaaatggtccaacccttagcaagagaccagagcctncattcagagcttaaccaatcagatgggacaattggctacccaattgaatcaacaacagtcccaaaattctgacaagctgccttctcaagctgtccaaaatcccaaaaatgtcagtgccatctcattgaggtcgggaaagcaatgtcaaggacctcaacccgtagcaccttcctcatctacaaat

SEQ ID NO: 10643 - DNA, 436 bp, Glycine max
  unsure (1)..(436): unsure at all n locations
cggaagctctcgagatatcaaatggttatatctnttcacttggaggtccaattcacgcgcataatatatcgagacgctcaaaattgaacaaggaaagctatcgagaaattcaaatgatcataacttttcacatggaggtcagattcaggcgcataatatatcgagatgctcgaaattgaacaatggaagctctcgagaaattcaaatggtcataactntacactcggaggtccgattcaggagcataatatatcgagacgctcgaaattgaacaatggaagctcttgagcaattcaaatggtcttaacttttcactcggaggtccgattcaggcgcataatatatcgagacgctcgatattgaacaatggaagctcttgagcaattcaaatggtcataacttctcacttggatgtgcgattctggcgcataatata

SEQ ID NO: 10644 - DNA, 310 bp, Glycine max
gcctcttacgtctggtttatgaatgtagcatatagatccaaagacccttacgtagcttgctgatggcttcttcccgttccaagcttcaattggagtcttgtctcttacagacttagttggacatactgtgagtatgtaaacagcaatcgtaactgctacagcccagaatgtgttaggtagtaccttttccttgagcatcgaactaaccatcttcataactgtgtgactctttctctcagacacttcattttgttgaggagaatatgcgactgtaagttgtctcttatagccttcatgctcacaaaaactt

SEQ ID NO: 10645 - DNA, 337 bp, Glycine max
  unsure (1)..(337): unsure at all n locations
gggttgatgcgttctgtctcgtagaatggcattatcactagctgacatgttctcaattagctcaggtgcttcttctaggatcttcagttntatctttccccctgcagaagcatctaacagttgcttggtttatggtctcagcccatctataaacatattcaattgaattggctcagaaaacccatgggtgggagttcttctcaataaacctttgaacctctccaatgcttcactcagagattcatcanggaactgatgaaatgaaggcattgcagctttcccttctatagtctntgactntgggaagtatttctttangaacttttcaataactctt

SEQ ID NO: 10646 - DNA, 404 bp, Glycine max
  unsure (1)..(404): unsure at all n locations
agctnttcactcggatgtccgattccggagttattatatcgagacgctcgaaattgagcaacggaagctcttgagaaattcaaatggtcataactttccacatggatgtctgattaagacgcataatatatcaagatgttcgaaattgaacaacgaaagctctcgagaaattcaaatagtcataactttttactcggaggtccgattcatgcgcataatatatcaggacggtcgaaattgaacaacgaaagttcttgagaaattcaaatggtcataacttttaacccggataaccgatttagaaacatcacatatagagaagctcgaaattgaacaacggaagctctcgagaagtttaaatggttaatacttttcacggaggtccattcgggcgataatatatc

SEQ ID NO: 10647 - DNA, 457 bp, Glycine max
  unsure (1)..(457): unsure at all n locations
gctcgcacaatggaagcacagatgtctttctatgggaggcaggatatccctcatcaattctgtcttaacagccctccctatctaccttctctctttttttagaatccctaaaaaagtggtgcataaggtagtttctattcagaggaactttttgtggggaggaggttctgaggcagccaagataccgtgggtaaattgggatattgtttgtcttcccaagaataaaggagggctggggattaaagatatgtccaagtttaatgaggccttgattggtcaatggggatgggactatgctaataaccanaatcagctntgggctatagttttgatgtccaaatatggtgtgtggaatgctttatgctatggaagaaacagtgcagactgctccccttggtggaaggatcttagagctgttttccagccacagcatagtaacagtttcatcaataacatg

SEQ ID NO: 10648 - DNA, 354 bp, Glycine max
  unsure (1)..(354): unsure at all n locations
tctcgcgcacttctccgtgttctgcgaaatcgaagaaagttcgttagggtttgataaacaaacaggaaagtcgaaagggtttgctttatttgtttataagtctcccgagggtgctcaggccgcattgatagatcctgtgaagactgtggaagggaggcagttgagttgtaagttggcgattactgatgggaagcagggaaagcgggtagggccggactctgcccaggcccatcacgggaatgttcagcacgggcatggagatggagtgggggcgggaatggngatgcctcctaatgcggggtccgggcctgtgcagtatggtggacctggacagtatgggcccccggttgggat

SEQ ID NO: 10649 - DNA, 459 bp, Glycine max
  unsure (1)..(459): unsure at all n locations
agctngcattntgtggaagattaaactcttgttagggtatattagagcacctcactgtgctattaacatcaaaccaagtaaatattatacccttgcaaaggatagtttagtacaccctcggtgaaatagatccaactacaataccacaacattaaacaataataaagaatttaacttggaataagaaaacactcatgaaatgattagatcattatagcccagtaaagggccccaagatcaacggtttcaaaaaaactgtacacgatctcatccacaaaatatttttactcacaaaattttaaaaagaagatataaacaaaacaaactaaaaatagagagttagggggtatattgaattaagattntaaaaaactattttaacataaaaaaacttgtggagtttaaagaatatgtaggaatattatgacttatcagattntntacaagacttttatgata

SEQ ID NO: 10650 - DNA, 371 bp, Glycine max
agcttctacattcaattgcaagcttttcgatatattacgggactcaatcggacatccgagtaaaaagttattgtagtttgaatctgctcagggcttcgggattccatttcgagcgtctcgatatatcacgggactcgatcggacatcagagtaaaaagttattgtcgcttgaattagctcagagcttctgcaattcatttcgagcatctcgatatattacgggactcgatcagacatccgagtaaaaagtgattgccgtttcaatctgctcagggcttctgaatgacatttcgagcgtctcgatgtattacgggactcaatcagacatactgataaacagttattgtcggttgaatttgctcagagcttct

SEQ ID NO: 10651 - DNA, 443 bp, Glycine max
agcttcccagatccgctcatggaatgacttggcaactgccttcattaggcagtaccagtacaatacggacatggcccccgatcagaaccagctccagggtatgactaaacgagagcatgagtccattaaggagtatgcccagagatggagagatctcgcagcccaaaagggcatctccggatgtattgccggaagatgggggcgtattctgcggacgaaaagttgttggtccatttctttcaagacagcttggccggggcagctgtagcatggtataccaatctggaagcttcccagatccgctcatggaaggacttggcaactgccttcattatgcagtaccagtacaatacggacatggcccccgatcggaaccagctccagggtatgactaaacgagagcatgagtccattaatgagtatgcccagagatggagagatct

SEQ ID NO: 10652 - DNA, 466 bp, Glycine max
  unsure (1)..(466): unsure at all n locations
agcttcttatccaaggctcatcttggtggtgaagctctcttcttccatggcttattccctagaggatggcgcctcctctcacctcttctcctttgtcttccgctgcatctccatggtggaaaatcaccattaaaggacctcattgaagctcaaagatccagcctccatagaagctccacaagcaagcttccatcacaacccctaagcacttttgggccaaagcagtgaatactgcatgttatcttcaaaacaaaatttacataagacctatccctaaaatgaatttgtatgaagtatggaaggaatgaaaacccaacatataatattttcttccatttggatgcaaatgtttcattctcaacacaaaggataacctgngagaaattgactagaaaagtgataatgggatatttcttagatactctaaaacttctaggacattcaaagtttacaactcaagaacctt

SEQ ID NO: 10653 - DNA, 372 bp, Glycine max
  unsure (1)..(372): unsure at all n locations
agcttgataagccatcttctccaaaagctctttgtataataactttatatgaatcctgagatttaacacaacaatatgaaggatgaaactcaaagaaacagctattatctcgagtgaatttactaacactaagtaaatttttggtaagggagggaactagcaataaatttttaagggagagagtagtggttggaaaatagggggacctaaacagatttgagcctatggaagagattcttgtacctgtgccattagccattaggatatgttcatttcctgcagctgtactgctctgaaggagattatgtggatcattggttgcatggngtgaagcacctgaatctggaaaccaagcctgagaaatgttagcag

SEQ ID NO: 10654 - DNA, 339 bp, Glycine max
  unsure (1)..(339): unsure at all n locations
attcaaactcggaaattcaagaagattccttgatttctaaagtgtataagattaagatgatcatagaccattcccttttcttggatctcactcaattatcaagtgacggtgtaccatctaatggttcacttgatgatgagtggaagtttgatttctctgtgtctgatgccccccggatggtttgcaccaaccaagcagatatgatcggaaggcttcttgcctgttcattggcattngaatgtcgcatcatgcactacttgattatgcgcatcctactccctagatcttccaaccttgcacaagtgtctgaggaagaattgataatcatgtgggttttct

SEQ ID NO: 10655 - DNA, 412 bp, Glycine max
  unsure (1)..(412): unsure at all n locations
aaaataacttaatgccattaacctagggaattaaaaaaaaaacttaatggctgagtgtaactgaaattgtggcaaccaaaagtcacccccaacagccaacaagtcagccaccatttggtctcccaaaaggctgatgcctagtgatgcaatcctaccttgcaagggcattggatataaaacttgaagtagattgggccagagatgcaagagaaggccctagggttcttatgagccttagggtagatttcgggcccatgggctaagtacgagcccacttatctttgtaaatattagattaaggtttcaattattttgggcctcgtatttagggctccataatttaggtagggtaccctaganatataggactttcagcccttgtattttagggcacctagactatgttttgatt

SEQ ID NO: 10656 - DNA, 287 bp, Glycine max
  unsure (1)..(287): unsure at all n locations
cgccttaatctaacttccgtgtgagaagtatgaccatttgaatttctcaagagctttctttgttcaactttgaacgtctcgatttgtgattcgcccgaatcggacatccgtgtcaaatggtatgacccattggatntctaaagagctttcgttgttcaatttcgagcctctcgacatattatgcgcccgaatcgggcatccgtgtgaaaacttatggccatttgaatttctcaagaagttccgatgttaatttcgagcgtatcgatatatnataagcctgaatcgga

SEQ ID NO: 10657 - DNA, 457 bp, Glycine max
  unsure (1)..(457): unsure at all n locations
agcttatagaatatataataaaagaacaatgacaattgaagagtctatacatgtttcctttgatgagtctaatgccattcttccaaggaaggattttttagatgatatttcagattccttagaagatacacatattcatggaaataactctaaagaaaaagatgaaggaagcaatgaagattctcaagataatggggctagaggaaataatgaacttccaagagaatggaaagcctcaagagatcatcccctcgacaacattattggtgatatatcaaaaggggtaacaactagacattctcttaaagatttatgcaataatatggctcttgtatctatgattgaacctaaaaatataaaagaagccatagtagatgataactggataattaccatgcaagaagaactgaatcaatttgaaagatataatgtgtganaactagtagaacaacctgaa

SEQ ID NO: 10658 - DNA, 443 bp, Glycine max
  unsure (1)..(443): unsure at all n locations
agctcgcatcaagtcctgtctaagtggtcctgaatatttgtgtatgacagnggtcaagaatgatagagatgagctaattcctacaagaacagtcaccgggtggagaatgtgtatcgattacaagaaactcaatgaagccaccatgaaagatcattacccgcttccctaaatggatcaaatgcttgagagacttgcggggcaatctttctactatttcttggatggatactcgggctacaatcaaatcgcagtagatcctcaagaccaagaaaagacaattgtcacatgcctcttctgtgtattagcttatctgcacatgtcgattggtttatgtaatgccccagctactttccaaagatgtatgatggcaatgttcgctgacatggcatagaaatgtattgtagtctctatggatgattcttctgactttgcacatcttttgg

SEQ ID NO: 10659 - DNA, 380 bp, Glycine max
  unsure (1)..(380): unsure at all n locations
gctccttcaactgcacaaggctcttaatatttgaagagtattcttgtggaaccttcattctatgaagacactgacaaaaaattatcttctacttcttggacaaagtatggcaggctgggggcaagtaaattttcttcccatcagaccttggatgcaattgtgatcgtatacccatatcagctagatcttgacaggtattcaagccatccttcgtcttgccttgaatgttaaggagcgtcccaatcacactttcacaaacatttttctccacatgcataacatcaatacaatttctaacgtcaagatcacaccagtacggaagatcaaagaanatggatctcttcttccatatgcaactctgactnttatacttcttttgg

SEQ ID NO: 10660 - DNA, 459 bp, Glycine max
  unsure (1)..(459): unsure at all n locations
agcttgatctagtgtaaaattaactttacctataagataaagcaaacacaggtccagatgattaccgaanttgtaagaacaacaattaagtcatcttgaaagtactcaaacagataatagtgcactatagcttccctcagagacagaggccatgaaaccttcaccctttcttccaaaattcagtgaaaaatcagcattcaaaagtggtaaagggcattaaatgttttttttttttacttggtgcaggctggacaaacctcactagtgataattgttccccaatccgggtcttttgcaaacattcagctgataagattttgaaagtgggaatagtagactgaggccacctaaatgaaaattgtgaanagggtgtcaggtgcatttatcagatacatttttataatgatatattacttagtttcaaaaacattactaaggtatacaagtacaacaacattc

SEQ ID NO: 10661 - DNA, 454 bp, Glycine max
  unsure (1)..(454): unsure at all n locations
agcttgcanaatggaagcaaagatatctctctatgggtgaaagaataaccctcattaattcagttttaacagcattacccatttacttgctgtctttttttagaatccctaaaaaagtggtgcaaaagatagttactattcagagaaattttctatagggagggtgatttgaggccaacaagatcccttggtgaaatgggacacaatttgtcttcctaagaacaaaggggggttagggattaaagacttgatcaaatttaatgaggctctgcttggcaagtggggttgggagttggctaataattagaaccaactntgggcaagaattttattgtctaaatatagcggctggaatgaatagctctctggtagaaacagtagtgatttctctcattgatggaaagatctaaagattgtatttcagtagtaggacagcaatagcatcatcaataat

SEQ ID NO: 10662 - DNA, 394 bp, Glycine max
  unsure (1)..(394): unsure at all n locations
agcttgaatcggacatccgtgtganaagtnatgatcatttgaatttctcaagagcttccgtagttcaatttcgagcttctcgacatattatgcgcccgaatcggacatccgtgtgaaaagttatgaccatttgaatatctcgagagcttccgatgtttaatttcgagcgtatcgatatattataagcctgaattggacatccgtgtgaaaagttatgaccatttgaatttgcgagagttttcgatgtttaatttcgagcgtatcgatatattatacgcctgaatcggacatccgtgtgaaaagttatgaccatttgaatttctcaagagcttcgatgggtcaatttctagactctcgacatattatgcgcccgaatcggacatccgtgttaaaa

SEQ ID NO: 10663 - DNA, 423 bp, Glycine max
agcttatccatggcttcctatggaggtgagtcttttcttgattcatcttctccttgaagtagcgtctccaatcatcattcttccatctccattccactgccattaatcttcaagaagaaaaagaatccattgatgaagaagatccaaggcctactatcatactctaatttcgtccgggcaccgttgtttgtcagcatgcgaccttcgtttgaccacttcaaaatgtttaacacccatcgccgtgaaattcgtaaagttccgagatgtttcggagagaaatcggccaaaaacacgaaaatggaagtgtagttagcaaagtaggggtgtgtaaatagactgttacaccctaatttcatctggggactgttgttgatcgcttcgaaaggcttcacacccatcgtcatggaatccgtaaatttcgga

SEQ ID NO: 10664 - DNA, 404 bp, Glycine max
  unsure (1)..(404): unsure at all n locations
agctngatatatgtaaatggttggaaatcctttgacttgagtattcttcagaaataaattgagcagagctactccaactttgctccagactccagattcagaacaaagttctgtagttcagtcttggaattttaaacaaaaaatccaattcttgaagtttaagaaagaggaagcaatngcacttggggctcaagccctggatttgagattgccatttggtgaaattgaggttcttaaggaaaacttggacgtgatcaagagacagataggtctagaagatgtggaaattttatctgcagtagatgccgattccttggccagagctgaaccattagcttctntactaaatcaaaatcctccttcacctggaaagccaactgccatctttntaactcggtagctac

SEQ ID NO: 10665 - DNA, 331 bp, Glycine max
  unsure (1)..(331): unsure at all n locations
agctgtcaaacaaatcggtgatctcactcaccacaattattatatgaaagatctaagttagatgctgaaggttgaaaagaaatgatggaatctcataacctatgttattcaaatcgaggccctaatgatttacttgggtgatgttcgcaaaatattgagcaatggctccagtgaagctattatgagaaaaacacaatgaagtgagatgttgaggatttgaaagtgatgatggaatctcattgctganattgttccaacacaggtccaagtgttatacttgtgtgagattagataaaaacagaggaatatgtcctttgaagtcagatgaatg

SEQ ID NO: 10666 - DNA, 451 bp, Glycine max
  unsure (1)..(451): unsure at all n locations
gagcgatatatctaactcaattgatcaatctatgtaaattatcatagataatnggatatatagtctttgaatgtatagataaaaaaatgaaaacaatcaatttataaatcaggtatctttgttctctctaggaatttttacaaccaaacaattattgcacctacaattgcttgtgaggtttttatttatttatttaaacttttaattgaattctaagactctaaaaattaattatgtatacttgactcgaatntatactaataacaaagaaagacttaatatctctatttgtttataactaattaaaattgaatgtatctgaagttcaattctcatgtataaaaattctattaaacttctcatttgtctttatctctttctatcatactatatcaattatgctatcaattactcatctctcttttgttgcaatttctctcaagatgtatac

SEQ ID NO: 10667 - DNA, 461 bp, Glycine max
  unsure (1)..(461): unsure at all n locations
aattatagcctcanaacatgctacatattcatcttccatggtagatgcaacaacaactaatgcatatggaattgcttccatntgttttcattccaaatcatttaagacattgtgcaaggctaaatntgtctcctttctaaatggaacgggtgatgttgaacactttttcttcctaaatctctctagtactntattgatatatgctntatgagataagcttaacaatccaagtgatctattacggaatatatttatccctatcatatatcttacctcacccatatcttttacatcaaagttgctagagagaaacttcttagtctcatgaagaagaccaagactattagttgcaagtaagatatgatncaacatacagaatagaaaaataaccttactcccactgaccttcagatatatatacaccaatcaacaatattntccttaaattcaaaggaaacaat

SEQ ID NO: 10668 - DNA, 475 bp, Glycine max
  unsure (1)..(475): unsure at all n locations
ctggattctctgtctgtntatggtacataagcccnctacacgtacctcattttatctccataccttttaattntaaacattgcgtggactgtgttgtgactctcttgtggtattttctaccatagaagggctagtcacgatcaacaaangntatatcgtacatgtcgaatccaaaataaactagtacattctcatttaaaaaaacaaataatacttgtttggttaatattgaagaactaattttaaatcttaagttgattntagattacaacanatttgattaacttttacgttgaattaaaattttatctctatcttgattttataataaaaatatcgtcatataaatcagttaacattcatctaaacacaactntaatggaacatttcataccaggctattatgattcagattcatcaatgataatatgagagccaatannttggcttcaattcgaatcgactctcanatctc

SEQ ID NO: 10669 - DNA, 482 bp, Glycine max
  unsure (1)..(482): unsure at all n locations
cttgactctcanntttgtttatttactgtattatattttacgtatatttcacactgtatcccaagtgtagtacttatgtacaattcgattccgaggatattaaaaggctttntatttattattttacttttctgtacattaataactctaacatctcacactataattagtaaatatgattaattaattcaatatatactgacataattaatatcgaataagataatcaaatagttaagaaaatggggataaaaatagactaaagttatatgataattaaaatagttaaggaaatgtataaaaagataactcgctttagcatttaattntattggtcttaataatttacataaatttaaatattntacacaaaaattcactctaatattaagaatgttaaaatgagtgactannatttattttataggtcgtataatacttaaaaaatatattatttatacaataaatgttntaaacaatag

SEQ ID NO: 10670 - DNA, 321 bp, Glycine max
  unsure (1)..(321): unsure at all n locations
cacccgactaagacactaacaaaaacttatcttcttcttcttggacaaagtatggcaggctgggggcaagtaaattttcttcccatcagaccttgtatgcaactgtgatcgtatacccatatcagctagatcttgacgggtattaagccaatcttcgtctttgccttgaatgttaaggagcgtcccaatgactctatcacagacattnttctccacatgcataacatcaatacaatgtctaacgtcaagatcacaccaatacggaagatcaaagaanatggacctcttcttccatatgcaactatgacttttatccttctt

SEQ ID NO: 10671 - DNA, 382 bp, Glycine max
  unsure (1)..(382): unsure at all n locations
atagcttttttatgagatagtattnctaaaatttattatcaattggaattatagaatttgtgaaatgttaatattttaaattttttccctttgtggactcaaactttaaattttcaacaacacctacattaaaattggaagacattctcacattaattattgaaacttagaaatgtcaaataagttcttaaacttaatgatttagttttatttcggttcttaaacatatgctaatatttttaataatatgtctacattatcaccctatgtatattatcttgaatgttgcactaatgtcatcgttgattatatctttagagggttntgtttcttcgatttaataactatctgacaattcattccattttcaagatctaaagtg

SEQ ID NO: 10672 - DNA, 449 bp, Glycine max
  unsure (1)..(449): unsure at all n locations
tgactcanaaacttggaatccctatccgatacaatgctcctaggcaatccatgaagacgcactacctctttgaagaaaagatccatcacatgacaagcatcgtccaccttgtgacatggaatgaagtatgccatcttggaactatcaacaaccacaaaaattgaatccttgcccctcttggaccttggaagaccaagcacaaaatccatggaaatgttggtccaaggggaggtaggaattggcaatggagtatacaaaccatgatgcatgatnttggactntgccttatgacacacaatgcaattagaacaaaaataaaatttcatgcaaaatgttcaaagtcttttcaactccaaaatggtcccattaaccccctttatgaacttcataaatcacgagttcacgcattanactttgatgctacacaatctattatttttaacaagtat

SEQ ID NO: 10673 - DNA, 482 bp, Glycine max
  unsure (1)..(482): unsure at all n locations
ggttccaacactctgttcaagctctcccaaaatctatagggtaatctaggatctctatcagatactatgctagatggcacaccatgtaacctgacaacctcacttatatacaaggtggtcaacttctccaaggaaaatctgatattaatgggaatgaagtgagagacttagtcaatctgtcaacaataacccagatagaatctaaacctgtaggggttctaggtagtcctaccacaaaatccatggaaatactgtcccacttccactgaggtatctctaagggttgtgacttccctgaaggtctctgatgttctatcttagccttctgacagactaggcatgaattcacaaactcactaacctctctcttcatgttgggccaccaaaacatcgtctntaaatcatgatacatcttggtagctgatgtgccatcattntcttctattatctgaacccttttcgaccatttaattattattggc

SEQ ID NO: 10674 - DNA, 429 bp, Glycine max
  unsure (1)..(429): unsure at all n locations
tcataaaagtntatatggctagaaacaagtaccgaggcagtggttctagaagtttaatgagtttatgagcaactcacgattcaacagatgtgacatggaccattgtagctacgttgttgcaacctacccttctgcgggagggcgacacgtgaatagtgatgcgtattccacgaaagggatacgcgcggagtcgccaccaacgtttatttgaggaaaacgtcagatgaaccagatagacgcgatctacgaacttttaagtgaaaggctcgggagatgtatttatgcacggggaaggtattagcaccccacacgatcgtcacaagggacggcagcctttaatcgaatgtgcaaacatgactgtgattttacgttccgctttatgtccttatatccttataccctgtttacatttttctctcttgtggcgac

SEQ ID NO: 10675 - DNA, 464 bp, Glycine max
  unsure (1)..(464): unsure at all n locations
cagcaacactcatgttcatccatcttgcccttactgtaaaaaaactaatcacccacaaaacaagtgttggtggaggccagatgtaaggtgtcatatgtgtggtcagttatggcatgtaaaagaattgcaaatttaacacacaagaagaagtcaaggttgttgaggaccaatcacaagaggagcagttgttcgttgcatcatgcttggctttcagtagctctacaaaaagttggcttattgatagtggttgtacaaaccacatgacctatgatcgtgagctctttacagaacttgatgaagctattttttctaaagtcaagataggaaatgcaacatatattgaaataaaaggcaaaggaattgtgtcaatttaaggccacacgggtttgaaactaatttctgataactactaaatatgagttantttgataataaaaatatattgaanatatctctaaaaatat

SEQ ID NO: 10676 - DNA, 440 bp, Glycine max
  unsure (1)..(440): unsure at all n locations
ccctcagccttatagtatccatcttgtgcctttttcccacaactctngtaaatgggagagaaatgttcatctaaagcatacaagtccctaatgttatcaaatcctaaaatatgagctcctagggagcaaaacatgtgtgtctcctagagagggcatcagctaccacatttgtttttccctttttgtatttgataaaatatggaaattgctctaggtactctacccattttgcatgccttttgtttaacttgctttgccctctaatgaacttaagtgattgatgatcactatgaatgacaaattccttggaaacaaggtaatgttcccaagttcggagtgctcttattaaggcataaagctctttatcatangtggtgtagttaagggtggcaccatgaagtttctcactaaaataagcaatagggtgcccaccttgcaac

SEQ ID NO: 10677 - DNA, 446 bp, Glycine max
  unsure (1)..(446): unsure at all n locations
ngaggtacaaagaattattagctcacattcttntaattatttattatttctaagttctttntttataattagtgttagttaatattggtcttaataccactactacaatgtgatctttaacaatatttctctgtctaacacttagtaaaaatattgntaaggttttgacaacacttaaaatatgtcgctaaaaatgaataaatattattaatatatgtttntatgacactttatcaaatatagtgtataagtcatgttgttaaaacctttaatcacttatatttcatcaatcaattcaagcaatccatacacttagccaaatagccatttaatcacaacaacaaacgtaaaactcataaccctagaccgcttgaaaacaaaacagaatcatgccataattaaaattagacanagattttcaacatagaaactnnttacatagcagt

SEQ ID NO: 10678 - DNA, 498 bp, Glycine max
  unsure (1)..(498): unsure at all n locations
ctgttcatgacactgagattcctcatggccactagggtttgggagactcatagtaccccaattaacagcatgagttntactggttgttctgttctccctagataaaggccctttgtactttctgtatctcgtcttcttctaggtgtcttccttaagagaggaacccctaaatgtgccccaaagtcattgcctctgaatatccccgacactgccaccaaggatgttttggtatgcagactgacattttttgagaagtatatttgagtcttctccttgctcacttcttgacttgacatttcacaaaagaggttcattgtgtcttgaacacactgcatctgagagatnttagcttgactacaaaggagcaagtcatcagcaaacagatgagaaataggaggactattcctccccatactatgattatntacattataagatttaatgtgacaataaaacctaaaacgctggtccttatttatactaagaatcctaattaaa

SEQ ID NO: 10679 - DNA, 502 bp, Glycine max
  unsure (1)..(502): unsure at all n locations
gctaaacattcaacttcgagcgtctcgatatattacgagtctcaatcatacatccgaganaaaagttattgtcatttgaatntgctcagaggttcaacattcaatttcgagcgtctcgttatattacaggactcaatcagacattcgagtaaaaagttattgacgtttgaattagtcagagcgttccacattcaatttcgagcgtctcgatatattacgggcctcaatcagacatctcgagtaaacgttattgtcgtttggattggctcagagattcaacattcaatttcgagcgtctcgatatatgacgagactcaatcagacatccgagtaaaaagttattgtcgtttgaattggctcagagcttcaacattcaatntcgagcgtctcgatatattacaggactcaatcagacatccgagtaaaaagttattgtcgtttgaattggctcagagcttcaacattcaatttcgagcgtctcgatatatgacaggactcaatc

SEQ ID NO: 10680 - DNA, 395 bp, Glycine max
  unsure (1)..(395): unsure at all n locations
agtcttgaaccaattcaaacgacaataactntntactctgatgtctgattgaggcccgtaatatatcgagacgctcgtaattgaatgttgaagctctgagccaattcaaacgacaataactttttactcggatgtctgattgagtcctgtcatatatcgagacactcgaaattgaatgttgaagctctgagccaattcaaacgacaataactttttactcggatgtctgattgaggcccgtaatatatcgagacgctcgaaattgaatgttgaacctttgagccaattcaaacgacaataactttgtactcagatgtctgatagagtctcgtaatatatcgagacgctcgaaattgaatgttgaagctctgagctaattcaaacgacaataactt

SEQ ID NO: 10681 - DNA, 437 bp, Glycine max
  unsure (1)..(437): unsure at all n locations
tagagtggcatactcttattggaaatcaacttgttacaaaattaanagttntaaggactgacaatggcctgcagtttgattcagagcaatttaatgagttttgcaggaaagtatgtatcaaaaggcacaaaacagtttctacacaccaacaaaatggattagcagaaagaatgcataagaccattttggaaagagtgaggtgcatgctgcctattgcaggactgccaaagaccttttggggagaagctgcaaacacaacaacctatgtgattaatagatgtccatcatcagctttagacttcaagacaccaatggaagcttagagtggtgaaccacctgattactcaagattgaaggtgtttggatcactggcctttgctcatgttaaacaangaaatgtggatgcaaaggctgtanagtgtgtgttcattatctat

SEQ ID NO: 10682 - DNA, 464 bp, Glycine max
  unsure (1)..(464): unsure at all n locations
tcatgagagagtcaaagatcaaattgagaggagaaattaaagctatgctaaacaagccaacanaggaagaaagaaggttgtcttcgaacccggagattgggtttgggtgcacatgagaaaagaaaggtttcctgaacaaaggatatcaaagcttcaaccaaggggaatggaccatttgtgcttgaaagaatcaatgacaatgcttacaaagttgagctgcccggtgagtataatgttagttccaccttcaatgtctctgatttatctctttntgatgcagatggagaatccgatttgaggacaaatccttctcaagagggagagaatgatgaggacatgttcaagagcaagggcaaggatccacttgaatgacttggaggacctatgacaagggctagagcaaggaaagccaatgaagctcttcaacaagtgctgtccatactatntgaatacaagcccaagtt

SEQ ID NO: 10683 - DNA, 470 bp, Glycine max
  unsure (1)..(470): unsure at all n locations
cagctagaatgttaggacggtatcaaagtaatctatgaatggtacattcganaactacaaagaaggttctaagatacttacaaggaacaaaaagtttgatgcttacatataggaggtttgatcaccttcaggtgattgggtatttagactcgaacttgctcaatgtgcagatacaaggaaatccacccttggttatgtacttcttttagccaaaggagtaatatcatggaagagtgcaaagaaacctattgttgctacattcattatggaagctgaatttgtagcatgttttgagactacaattcaagctaattggcaacaatattgtcaagccgctaaaaatatattgtaataactccataacagtattnttctctaagaatgacaagtactctaaaggtgctaaatatatggaattaaagtaatttgtcctgaaagaagtacagaaacaaaaaatgtcaatagaaatt

SEQ ID NO: 10684 - DNA, 460 bp, Glycine max
  unsure (1)..(460): unsure at all n locations
tgagcanattcgaacgacaattacttttaactgggatgtctgattgtttcccgtaatatatcgagacgctcgaaattgaatgttgatggtcgttgcaaattgaaacgacaataactgtttactctgatgtctgattgagtcccgtaatatatcgagacgcttgaaatgaatcttgatgctctgagcaaattcaaacgacaataagcttttactcggatgtctgattgagtcctgtaatatatcgagacgctcgaaatttaatacgagagctatgagcaaattcgaacgactataattttttactcggatgtctgattgagtctcgaaatatatcgacacgctcgaaattgaatgttgatgctctggtcgattcaaacgacaatatattttctgccaacattgcagaatttntatacatacactggtctataatatctctttatggtagacgaagttttgt

SEQ ID NO: 10685 - DNA, 333 bp, Glycine max
agatagggcatgctcgatggcccttaacactgtattcattcaaataccaatatgcttggaagtcattattggtaccaaattacatcccacaacttgaatgttttatttcgatacccatgaaacactacaattctctattctacaactttgtcagtctttatctatggaccgagataaacatcaatatcatttcctggttcgcttgtggctgatatcatcattgacaacatcatgtattcttgtttcatgcacaaccaaggaggcaacgtgtatattactaacataacaggccacatactatgttgagtacttaaactatcatatggattcatt

SEQ ID NO: 10686 - DNA, 324 bp, Glycine max
  unsure (1)..(324): unsure at all n locations
tttgtgaagtgatttgccggatatgttgatgatagaanaagtactaccgganttgtattttttatgggtgattggtgttttacatggagttctaagaaacaaggcattgtgacactttctacttgtgaagcccaatatgtagctgcaacttcttgcacatgtcatgccatttggctaagaagaaatgtggaggaaccttcagtgttgccataagaaagcaccaagatctatgttgataatagatctgcataagagcttgccaagaatccggtgttccatgaacgaagtaagcatatagatacaaggtatcattttattagagag

SEQ ID NO: 10687 - DNA, 244 bp, Glycine max
atggagtagcccgaagcttatgctgcagacatttacaatagacctccttaacctcagcagcaaaatcaccacaacagaacaggtatgacctctctagcaaaagatacaaccctggatggaggaatcaccctaatctcagatggtctagccctcagcaacaacaacagcagcctgctccttccttacaaaatgctactggcccaagtagaccatacattcctccaccaagccaacaacaacaaca

SEQ ID NO: 10688 - DNA, 309 bp, Glycine max
  unsure (1)..(309): unsure at all n locations
agcatgggctcatgaacgcacacctttggctaattttatttgatggagagataaaccaatggctcttttcattgtgcaagcaagattggttggactaacccactttttcggagggtatatatttacttatgcagccttcttaattgcctcgacttcgggcaaatttgggtaatttcattaattctttattattatatctggcatatcatttccttttatggggaanggacgccaattatacatctaggatccgacttctatcattgatactaataggaaatgaaccactatggcaaggaaaagtgtgat

SEQ ID NO: 10689 - DNA, 436 bp, Glycine max
  unsure (1)..(436): unsure at all n locations
tggtggttgagtcatatatacagtttcttgaaggtctccatgcaaaaaggcattgttgatatccacttgatgaataggccaatgttgataaaccacaaaggacagaacagatctaatcgttgctggcttaatcactggactaaaggtttctttaaaatcaaacccctctctttgatgatacccttttgctaccagcttgtccttgtgcctttgaaaacgtccatcagcattaaacttgcttttaaaccgtcatgttcctctttcatagctttgagccattctggcttggccattgcttcctttatagtatgtggctcaacaatgtgatcatagcttccttccttgtaagaagcataagttttcgggttaaaaacaccagctttggctctggttgtcatgggatgagtattntgaggaacataactngcaatgggag

SEQ ID NO: 10690 - DNA, 372 bp, Glycine max
ccaagcttatgctgcaaacatttataatagatcccttcaatttaaaaaccaacaacaatagaataattatgatctttcaagcaataaatacaatccaggttggaggaatgatccaaatctgagatgggcaagtcctccacaacaacaacagcctatccctcctttccagaatgttgctagtccaagcaggccatatgttcctcctccaatgcagtagcaataacaacagtaacaacaaagacaacaagcaactgaggccccttctcaaccttccttagaggagttagtgaggcaaatgaccatccaaaatatgcaattttagcaagagacaagagcctccattcagagtctgacaaatcaaatggggcagat

SEQ ID NO: 10691 - DNA, 432 bp, Glycine max
gtatcaaattcaaacgacaataacgttttactcggatgtttgattgcgtctcgtaatatatcgagacgctcgaaattgaaaacggatgctcgtagcaaatgcaaaccgcaataacttttaactcggatgtatgattgagtaccataatagatcgagacgctcgaaattgaaaaaagaagttctgagcaaattcaaacgactataactttttactcggatgtctgattgagtcccgtaatatattgaggagcacgaaattgagaacagaagctctgaccataatcaaaccaaaataactttatattcggatgtgcgattgagtcccgtaatatatgaagacgctccaaattgaaaacagaagctctgaacaaattcaaacgacaataactttttactcggatgtccgattgagtcccgtaatatatcgagacg

SEQ ID NO: 10692 - DNA, 360 bp, Glycine max
  unsure (1)..(360): unsure at all n locations
agctntgagccaattcaaacgacaataactttttactcggatgtctgattgagtcccgtaatatatcgagaccctcgaaattgactgttgaagctctgagccatatcgagacactcgaaattgaatgttgaagctctaagccaattcaaacgacaataacttttctctcggatgtcctattgagtcccgtaatatatccagacgctcgaaattgaatgttgaagctctgacccaattcaaacgacaataactacttactcggatgtctgattgagttctttaatatatcgagacgctcgaaattgaatgttgaagctctgagccaattccaacgacaataactttttactcggatgtttg

SEQ ID NO: 10693 - DNA, 437 bp, Glycine max
  unsure (1)..(437): unsure at all n locations
tgttaaaatagtttgtttggttcaaatatttagagatcgttacaatactcagtttcaaaaatatgttaactaaattatttttttatctagaacactaaagtttagttcactaaattatttttatatagaacactaaagtttaatgactttatttgtctattgaaaaaatacagtggtaaattatactctctctttatattcttaattataaaattttttcaactaattcatacctcttaagaaaagtaattagtttttatttaatcacattaaatttgtcaattaattgttaaatcatttcaaaattactttttttttttagagaaaaaattacattcatcttatctttatccacttaattatttatanattaatattggagaaagacntaataagaaagggtatgtaagacaaatataattaatgcatctagaaat

SEQ ID NO: 10694 - DNA, 397 bp, Glycine max
agcttctttaggtgtgattcccttaagctctttgttggaattttgttcaaaatacagttagtagtagataccgcttccccaaaagtaataaggcatcttcttccctttcatcatgcttctgcccaagttccgaaatgtcatatttcttttctcagcaacaccattatgttgaggtgtgtaaggggctgccacttcatgagttttaccttcatcaccacaaaatttctaaaattcatgtgaattgtattctccatttgttctaagaaccttaattactttcccaccttgtttttcgacctgtagtttgaatttcttaaagatctcaaacgcttcactcttcttattgataagataaatccatattttctagtaaactcatcaacaaaagaaacaaagt

SEQ ID NO: 10695 - DNA, 439 bp, Glycine max
  unsure (1)..(439): unsure at all n locations
gctatttaagaaatgatgactaaattcgatcttgtantggttataattcaagtggagtggttcaaaatttcacgtaaagttattttattattttgaacataattttttaatagttttatacttataatataaaatcatttatactttgatgtaggaaagaagcttgacaaacaaagctaatagaagcaagcaagaaataaaatcaattattggcacaaaaatcaatcatgcaaaaggcatttgaaatggtaacatcttttaatattttatattcattttcttataagttatataataataactctttttttttgttattgtttttatatgatatatgaaagtttggtgaaatttatataaaagcatcatgcattagattatactgtttttatattatttaatttgtctnttactatatttaattttaataaaaagaaga

SEQ ID NO: 10696 - DNA, 389 bp, Glycine max
agctttttattttcagcatatgaagattaatctgtggccaccacatggactcctctaaggacaataacatcatttcttgcactgaattgatgggagttggaagccatcttctcaatcaaattcctatcctcaacaggagtcatatcaccaagggctccaccactggcagcatcaatcatactcctctccatgttgctaagtccctcatagaaatattgaagaaggagttgctcagaaatctggtggcgagggcaacttgcacacaatttcttgaatctttcccagtactcatacaagctctctccactaagttgcctgatgcctaaaatgtcttttctgatggcagtggtcctagatgcagggaataatttctccaagaacaccctctg

SEQ ID NO: 10697 - DNA, 435 bp, Glycine max
cgcctttgcctgatccagattatgaggtacatattgactatttttgggggtgtgaaggtcttaagaaaaccatttggaaacttatgaatggtgatgagaacagccccattgaggaagatctcaaatccagcaatgcacattgcatctcatacaaaataaaggatcttagtaaggtataaatcaacatgacatttaccattatattaatttacataatggctagctgggcgcactaagagataaatgataatcatgtgtattaaaattcaggcaaaaaaagttgatgagttgaggcagaagcttacgatgagaggtctacgttgtcatcctatgtactgcagggggtcatctagaatgcatgtgattcctcttcttgcatctagagcccaggcactcacgtaattaccacttcatccttaacttctaatttatatt

SEQ ID NO: 10698 - DNA, 417 bp, Glycine max
  unsure (1)..(417): unsure at all n locations
cttaccaccataggaagccatggataatagtttgaatgaaggaaaagatgagtggagggagagggagagaatgagcacaaaattttgtgcctcaaatgaggtatgaactttgaagtgtaattctaaaaagatcaaagttgaaaaaatgcacacacatgacctctatttatagcctaagtgtcatacaaaattggagggaaatttgaatttctattcaaattttacttgaatttgaaattgaatttgtggagccaaattttggagccaaaatttcactaattatggttagtggaatttagctatggttcatcccactaatccaagatcaagtccaagattctccactaagtgtgcttaggtgtcatgaggcatgtaaagcataaaggacatgcacanagagtgattatatgatgtgac

SEQ ID NO: 10699 - DNA, 394 bp, Glycine max
  unsure (1)..(394): unsure at all n locations
gaatgcactgttcaatggagtagacaagaacatcttttgactgatttacacttgcacagnggccaaagatgcatgggagatcctgaaaatcactcatgaaggaacctccaaagtgaagatttccagattgcaacatctggctacaaaattcgaaaatctgaagatgaaggaggaagagtgtattcatgacttccacatgaacattcttgaaattgccaatgcctgcactgccttgggagagaggataacagatgaaaagctggtgagaaagatcctcagatccttgcctaagagatttgacatgaacgtgactgcaatagaggaggcccaagacatttgcaacatgagagtagatgaactcattggttctcttcaaacctttgagctatgactc

SEQ ID NO: 10700 - DNA, 411 bp, Glycine max
gcttcttcattcaggtatccattcagatacgcgctcttcacatccatctggtacagcttgaatttgaggaagcaagctacaccaagtaacaatctgatggactcaagtctagcaacaggggcaaaagtttcatcaaagtctacaccttcaatctgagtgtagccttgagtaacaagtctggccttgtttctggttataacaccatcttcattggttttgttcttgaagatccacttggtgccaatcacattagttccctcgggtctaggaactagctcccaaacttcattccttttgaattgctccaattcttcttgcatagcattgatccagaactcatcagttagtgcctctttcacattcttgggctcaattatggagacaaagcatgaattggagacaatctcaatc

SEQ ID NO: 10701 - DNA, 398 bp, Glycine max
  unsure (1)..(398): unsure at all n locations
gcatgcaagctntttctataaatatttaacatagttgcatttcatgactcaacaatatataatttttcattacaaaataatgtattaactctatgtttaatagcttcatatacacaaattgctaatcatttgagtactaaattaactatggtaaattaaataaaaaatatatgacactataatcaaatatatgttttgtatataaatgaaatgttcaagttatatttatgttcatgtaaatgttcaagtaatgtttgacaattatgatacattcatgaagcatataagtgaaatgttgtatgtttagcactcactaagaccctgtctcattagtttagtgtgtatgttccttaggtaaagagatctagtccaagagcatacaagtgcaaagcataatt

SEQ ID NO: 10702 - DNA, 450 bp, Glycine max
tgaccctcgagcccatccatgcatctttattggcttgataccacatactcaaaggatatcttgtctatgaccttcactcccacaatattatagcatctcgcaacatcgtcttttatgaagaccatttttcgttatttcatgaaaaccaagcctcaaacaccacacatacctctctttccccaactccattttcgagcaaccccgaaaattttgactctcctatcacacccattgtcaacccgtcttcttcacatgctcacgaccctcacctacgacgatctacgagaccgaagcatgcacccacctacctccaagactaccatcgtgatctcacttctctcactgttaccacctcgcccaatgttcggtatcctcttaactccgtcttgtcttactctcgtctctctccttcgcttcgtcacttcgtcatgtccatttcggtatctactg

SEQ ID NO: 10703 - DNA, 374 bp, Glycine max
  unsure (1)..(374): unsure at all n locations
ccaagctntgggactgaggacctatataacattatcaaggttttagtttagggagttttttttcggagaggaaaataattctaggattttagaattccagtttttattactgttcatgcacactgttcacgtagaataaaatttattttttgcaaatcatctctaatccatacatcttttaatattatgctctttttattttcttttgatatactttgtgctttaacgacttgaattcaatatgattttgtttatcaattatttttggatttatacattacttatacaaaattttataagtntctttttttagttaatatttgactaggttttaaaataattaattaaagatgtctttaaacagacttttaaat

SEQ ID NO: 10704 - DNA, 448 bp, Glycine max
  unsure (1)..(448): unsure at all n locations
tgagcaaattcaaacgataataacttttaactcggatgtccaaatgtttcccgtaatatatcgagacgctcgaaattgaaaacaaaagctcgtagcaaatgcaaaccacaataacttttaactccgatatccgattgagtctcgtgatataccgagacgctcgaaatngaaaacaaaagcttgagcaaattcaaacgataataacttttaactcggatgtccaaatgaaacccattgtatatcgagatgctcgagattgaaaaccgaagctcgtagcaaatgcaaaccacaataactttntactccgatattcgagtgagtcccttattatatcgagacgcttgaaattgaagacagaagctcgtagcaaatgcaaaccacaagaacttttaactgggaggacgattgagtccggaatatatcgagatgctcaaaattgaaaacagaa

SEQ ID NO: 10705 - DNA, 428 bp, Glycine max
  unsure (1)..(428): unsure at all n locations
tcaagctagttntatccacatagtggatatcttcccattacaaacttgggagtttactcaataatcatccaaaaacactttttccaataatttagttttctcattgaatttcaatgcatttggttatatgaattaataaaggagaataaatgaaataagaaaaaaattattgtttgatttgtaaatgaaactgaaatgaaataaatgtttttaataagttttaatattgttttaagcaaaagtgtgggcaacaaaaggatatactttttagaataaaaaatacatttttttaatttgtcagtatatctttatgagcatttaatttgcaatattttgttctttaaggatatctaagttatttctattaaaaaaggatatctaagttatttaatgaacatacctcttctttttccttattcaactaaata

SEQ ID NO: 10706 - DNA, 378 bp, Glycine max
  unsure (1)..(378): unsure at all n locations
tcttacaagcatacggctntctggatgtagatgatgatatctatacagatggatcttatatatctatatatctatagatagatatatagatatagatatatagatatagatcatacaatgaagtaccgcacgagtgggtatataggaatccaaatctgccgaatcactcatgttatgatcttctacatcctaggtcttcccgttccttcatctggcttatgttcttcatgtagcattcagactgaatgactctatgaaattacgtcgctacttccacatggtacgggtaacgtaagagacatctctatttttcccggtgggaatccttagaattaccacagcttagctttcaattcgcctctgaccatcaaatgaaat

SEQ ID NO: 10707 - DNA, 414 bp, Glycine max
  unsure (1)..(414): unsure at all n locations
agcttgtgatttagttnttgatgcagcatgtgagggaaaacaattcttaattgttggtacaaaaaaaaaagcagcggattcagtagcacgggctgcaataagagctcggtgtcattatgttaataaaaagtggctcggcggtatgttaacgaattggtatactacagaaacacgacttcaaaagttcagggacttgagaatgcaacaaaagacggggagactcaatagttttccaaaaagagatgccgctatattgaagagacatttagctcatttggaaacatatcttggcggcattaaatatatgacggggttacctgatattgtaataatcgtcgatcaacaagaagaatatacggctcttcgagaatgtataactttggaaattccaacaatttgtttaatcgatacaaa

SEQ ID NO: 10708 - DNA, 404 bp, Glycine max
agcttggacttcctgtgttttgggaacctctccttcctcaggtgtacccaaacccaatcacctggttcaagcatgactttctttctgcttttgttggcttgccttgcatagctcgcatttttcttttcaatttgggccttcacttgctcatgcaacttcttcacatactcagctttagcctgtgcatccttatgcttaaacatagcaatgttaggcataggcaacaaatcaagaggagtcaaaggattaaatccatacactatctcaaatggtgaacaattagttgtgctatggacagcccgattataagcaaactcaacatgaggcaaacaggcttcccaagatttaagatttttctttaaaacagtcctaagcagtgtgcctaaagtcctattgactacctc

SEQ ID NO: 10709 - DNA, 363 bp, Glycine max
  unsure (1)..(363): unsure at all n locations
ngcacaatggaagcagagatgtctntctatttaggcatgataaccctcatcaattctgtcttaacagccctccctatctaccttctctctttttttagaatccctaaacaagtggtgcataaggtagtttctattcagaggaactttttgtggggaggaggttctgaggcagccaagataccgtgggtaaatcgggatattgtttgtcttcccaagaataaaggagggctggggattaaagatatgtccaagtttaatgaggccttgattggtaaatggggatgggacttggcaaataaccagaatcagctgtgggctacagttttgatgtccacatatggtgggtggaatgctttatgttat

SEQ ID NO: 10710 - DNA, 372 bp, Glycine max
  unsure (1)..(372): unsure at all n locations
agcttaataaatctatatatggtttaaaacaagcttctcattagtggtaccttaagtttcatgggataatttcttcatttggttttgatgaaaaccccatggatcaatgcatataccacaaggttagtgagagtaaaatatgttttcttgttttatatgtagatgatattttacttgcagccaacgatcggggtttgctacataaggtgaaacaatttctctctaagaattttgacatgaaggatatgggtgatgcattttatgtcatcggcattaagattcatagagatagatctcgaggtattttgggtctatcacangaaacctatattaacaaaattctagagagattttggatgaaagattgctcac

SEQ ID NO: 10711 - DNA, 384 bp, Glycine max
agcttagcaaatggacctgggtgttgcctagtttcatcatatcttccataatactcatcacctctatcatatctaataattttcacatttatctctaattgcccttttacttcattgtagtaaatttctaaagcatccattgcctaagaaatctcgggcagtaagtagacataactgtaacgtgaataatcatcaataatggtgataaagtatcattcctttccgaaagaactaacatcaaaaggtccacaaatatcagtatgcacaatttcaagaagctgagtgcttcttgtagctcctttctttgtatggtttgtttggtttcctttaatacaacccacacaaatatttagatcccgtaaatctagataaggaagaaattca

SEQ ID NO: 10712 - DNA, 449 bp, Glycine max
  unsure (1)..(449): unsure at all n locations
ctcaagcattgcataccccaaggatccattaggaaattacttgtgatagagagccattanggtgggctcatgggccactttgggatagaaaagacccttgtcttactcaaagaaaagttttattggccccatatgaagaaagatgtccataagcattgcactaggtgtgtggcttgtttacaagccaagtctagggtgatgcctcatgggctgtacacacccttacccatcccctctgcaccttgggtagacattagtatggactttgtctttgggcttcctagaacccaaagaggtgtagactctatctttgtgttggtggataggtttagcaagatggcacactttataccatgccacaaggtggatgatgcttcccacatctcanaactcttttttagggaagttgtgagactccatggtttgcctaggaccattgtatctgatag

SEQ ID NO: 10713 - DNA, 400 bp, Glycine max
agctttatatcataggattttaagtgattatgataattcctaataagcgagaacgtttagagtcagtgatcccagcctccctaatgaatggcacatataagttgggcttagtaaacgggtaacaggcacaatggaacattgatcactaatttttttcttttccattaatgctacaatcaacagtaacttatgcggcatatgacaaagagatccatacctgaatggctagaaatgcagccatgcaaatgcagttccctatcaagcacagaactccaagatgaaaatggtcaaaccaaagggtctgttaaccaccaattaatcattcacatggctctggctgacctttagcacttatttcatttgtgttacatgaatgaatttagcatattctatcaaagct

SEQ ID NO: 10714 - DNA, 391 bp, Glycine max
  unsure (1)..(391): unsure at all n locations
agctntagaactagcatgatatgccatgtattcttcatacacactttcaagatcaggagctctttcttcttcataattgaaattctgataccaggggacagatgtcgtaccggatgtcacgacatcacgcttcagaacatgcagattatatgtgtccgtatgaacagattaaacaagttaataacaccagagaattgtttacccagttcggtgcaacctcacctacatctgggggctaccaagccagggaggaaatccactctcaatagtgttagttcaaggtctaacagcccctgtttacaaccttctcacctaaccactacccgtgcgatctctacctaagagccactcttagatatgagaacctgcgctcactccctctcactcacac

SEQ ID NO: 10715 - DNA, 411 bp, Glycine max
agcttctgttttcaatttcgagcgtctttatatattacaggactcaatcggacctctgactcaaaagttattgtcgtttgaatttgctcagagcttctgttctaaattttgagtgtctcgatatgttacgtgactaaatcagacattcaagtgaaaagttatttcggtttaactttgcaacgagcttccgttttcacttacgagcgtctcaatttattacgggactaaatctgacatccgagtaaaaattaattgtcgttagaattttcttaaagcttcagttttcaattttgagcatctcgatttattacgggactcaatcagacgtccaagtaaaaagttattgttgtctgaatatgcactgagattctgttttcaattctgagaatctcgatatattacgagactcaa

SEQ ID NO: 10716 - DNA, 360 bp, Glycine max
agcttcaccggagagaatatcgcaaacctctacaggaactctgctcgtggattcgaggttattgacaacattaaatcagccgtggagaaagtgtgtccaggagttgtttcctgcgcagatatccttgccatcgctgccagagactctgttcagattgtaagtggtcaaacaaccaacaaaaacacattaaactaaatcattaaattgtacatatcaaaattaattaccaatttagtaccacacatgcaattaaagagaacattttgttgattttgatcaatatagcttggaggccctacatggaatgttaaacttggaagaagagacgctagaactgctagccaatctgctgctaacaat

SEQ ID NO: 10717 - DNA, 426 bp, Glycine max
tatagaatatataataaaagaacaatgacaattgaagagtctatacatgcttcctttgatgagtctaatgccattcttacaaggaaggattttttagatgatatttcagattccttagaagatacacatattcatggaaatgactctaaagaaaaagatgaaggaagcaatgaggattctcaagataatggggctagagcaaataatgaacttccaagagaatggaaagcctcaagagatcatcccctcgacaacattattggtgatatatctaaaggggtaacaactagacattctcttaaaggtttatgcaataatatggcttttgtatctatgattgaacctaaaaatataaaagaagccatagtagatgataaatggatcattgccatgcaagaagaactgaatcaatttgaagaaacaagt

SEQ ID NO: 10718 - DNA, 396 bp, Glycine max
tctgttttcaattacgagcgtctcgatctttacgagactcaatcggacatccgagtcaaaagttattgtcgtttgacttttctcagagcttccgttttcaatttcgatcgtctcgatatattacagggctcaatcggacatccgagtgaaaagttattgtcgtttgatttttctcagagcttccgttttcaattacgagcgtctcgatatcctacgggacacaatcggacatccgagtgaaaagttattatcgtttgaatttgctcagagcttcagttttaaattacgagcgtttcgatatattacgggactcaatcggacatccgagttaaaagttattgtccgttgacttttcttagagcttccgttttcaatttcgagcgtctcgatatatta

SEQ ID NO: 10719 - DNA, 343 bp, Glycine max
agctttgagaaaaatcaaactacaatatgttttaactcggatgtcctattaagccctgtaatatatcgagacgctcgaagttgaaaacggaagctctaagaaaagttcaacaacaataacttttaactcgaatgtccgattgagtcccgtaatatatcgaaacgctcgtaatttataacagaagctctgagcaaattcaaacgacaaaaacttttaactcggatgtccgattgagtcctataatatattgagacgctcgaaattgaaaacggaagctctaaaaaaagtcaaacgacaataactgttgactcggatgttcgattgtgtccccgttgatattaag

SEQ ID NO: 10720 - DNA, 415 bp, Glycine max
tgtagggccttgatcttcttcattaatagagtcttttgcttcttgaagatcaatggaagtggaatagagaaggaggaaaggtgattggagatgccacttcaaggagaagatgagtcaagaacaagctcactaccataggaagccatggataagagcttgaaggtaggagaaaatgagtggagggagaggcagagaggggggaacaaaatttatgcctcaaatgaggtcagaactttgaagtctaatttctcaaatgatcaaagttgaaaaaattcacacacaaggcctctatttatagcctaagtgtcacacaaaattggagggaaatttgaatttctattcaaatttatcttgaatttgaatttgaatttttggaagccaaattggagccaaaatttcactaattatgattagt

SEQ ID NO: 10721 - DNA, 321 bp, Glycine max
tctacattcaagttcgagcttttctatatattacgggatctctatcggacatccgagttaaaagttatagtagtttgaatttgctcacggcttccgtattccatttcgagcgtctcgatatattacgggactcaatcgtgcatccgaagaaaaagttattgccgtttgaatgtgctcacagcttcggcattccatttcgagcatctcgatatattacgggactcaatcatacatccgagcaaaaagttattgaaatttgaatctgctcacggccttggtattccatttcgagcgtctcgatgtattacgggactccatcag

SEQ ID NO: 10722 - DNA, 395 bp, Glycine max
  unsure (1)..(395): unsure at all n locations
tctatagaaggttcgttcctaatttctctacaattgcatcacctctcaatgagctggtgaagaagaatgtggcatttacctgnggtgaaaaacaagagcaagcctttactttgctcaaagaaaagcttactaaggcacctgttctagctcttcctgacttttctaaaacttttgagctagaatgtgatgcctctggagtgggagttggagctgtattgttacaaggtgggcaccctattgcttattttagtgaaaaacttcatagtgccaccctcaactaccccacctatgataaagagctgtacgccttaataagagccctccaaacttgggaacattaccttgtttccaagggaattgtcattcatagtgatcatcaatcacttangtacatt

SEQ ID NO: 10723 - DNA, 395 bp, Glycine max
  unsure (1)..(395): unsure at all n locations
cgcttattccatgcaactaatataatatgatagatttgacatatcaatatgataccaataaatatgcaaaataacaatatgatagcaatacatgatagatctgacataataatatgagtttgttagcacaaacacaggaataaagagaattctctcaaacaaaaagtaattggtacaaaaattcttatacatgtaacttccaaactaataaaggcttctctaatataatatgatagatttgacataacaaaatgataccaataaatctgcaaaacaacaatacgatacanatacatgatagatttgacataataatatgagtttgttagcacagacacaggaataaagaagaattctctaaacaaaaggtgattggcactgaaattcttatacat

SEQ ID NO: 10724 - DNA, 499 bp, Glycine max
ttgtatggtaggaggtgtaggacacctctatgttggttagagcccaaagaaggccttaccttagggccagaagtggtacaacaaaccaccgagaaagtcaagttaatccaggaaaggatgaggaccgctcagagtaggcaggaaatttatcatgataagaggaggaaagatctggaattcgaggttggtgatcatgtattcttgagagtcactccgtggactggggttggtcgagcattgaaatcccgaaaactcacaccttgctttattggtcctttccaaattcttaagagagttggccctgtggcataccaaattgcattgcccccgtctctttctaatcttcacaatgtctttcatgtgtctcaattccgtaagtatatccatgatccatcccatgtgattgaatgggatgatgtacaagtgaaggagaatttgacatatgaaacattgcctttgaggatcgaggataggcgaacaaaacacctatgagggaaag

SEQ ID NO: 10725 - DNA, 518 bp, Glycine max
agcttgctaggcttcaggaattctggtactttctgtccaggaaagccttcaagatgcaactttttcaatgttggaggcaaatcactgtaccttgtttcagacactccccatgatattttgagatgtttaagtgccgacaactctcccaagctttcaaactccccatctttgataacagcctcacttcctatatgtatgctgagtctccttagttctttcaaattctaaagatcagatattctgcagggagtctttctagaagtacttatgacaaatcccttgagaacttggagatttgtgagcttttcaatcccctttggcatgccctccaaaaagtaacactgggatacaatgagatgtgtgagatgtttcattgatgaaatataattaggcagtgtttccaagttgtggcaagctttgagatcaagaatttctatgctctcaagttgagcaatggacggtggaagctcagatattcttgatatcccacgaaggctaagataaaacaacgtctttag

SEQ ID NO: 10726 - DNA, 487 bp, Glycine max
tgccgccacggagttttccgactatgctcttgtgtggtggaacaagctacaaaaggagagagcaagaaatgaagagccaatggttgatacatggacagagatgaaaaagatcatgaggaagcggtatgtgccggctagttactcaagggacttgaaattcaagctccaaaaactaacccaaggcaacaagggggttgaggagtatttcaaggaaatggatgtgctcatgattcaagcaaatattgaagaagatgaggaggtaactatggctcgatttcttaatggtttgactaatgatatccgcgatattgttgagctgcaggagtttgttgaaatggatgatttgctttacaaagcaatccaagtggagcaacaattaaaaaggaaaggagtggcttacaggagttttaccaactttggttcttctagttggaaagacaaaggtaagaaagatgggggctggtacttctagtagtttcacacctta

SEQ ID NO: 10727 - DNA, 541 bp, Glycine max
  unsure (1)..(541): unsure at all n locations
agcttgccgccacggagtttccgactatgtttttgtggggnggaacaagctacaaaaggagagagcaagaaatgaagagccaatggttgatacatggacggagatgaaaaagatcatgaggaagcggtatgtgccggctagttactcaagggacttgaaattcaagctccaaaaactaacccaaggcaacaagggggttgaggagtatttcaaggaaatggatgtgctcatgattcaagcaaatattgaagaagatgaggaggtaactatggctcgatttcttaatggtttgactaatgatatccgtgatattgttgagctgcaggagtttgttgaaatggatgatttgcttcacaaagcaatccaagtggagcaacaattaaaaaggaagggagtggctaagaggagttttaccaactttggttcttctagttggaaagacaaaggtaagaaagatggggctgctacttctagtagttccacacctatcccatcaaaaactcgcttagagtcccaagaggaaccctttaaaagggggggg

SEQ ID NO: 10728 - DNA, 307 bp, Glycine max
tgtagggttaaagtctcacgattgtttcgtgctcatgccacaattgttagttgtggctatacgagacgtcttgccaaacaaagtcaggttaacgataactcgcctatgctttttcttccattctatatgtagcaaagtcattgatccagtcatgtttgatgagttggaaaatgaggcccaaattatactgtgccagttggagatgtattttccccctgctttttttgacatcatgattcacttgattgtgcatctgatcagagaaatcaaatgtttgtggtcctgtttatctaccgtggatgtacct

SEQ ID NO: 10729 - DNA, 524 bp, Glycine max
aagcttctggtgggacagtctagacttgcgttttctatctgacattcaccacagattctgccttcttctattttcagattgggaatgcctctaacagcacttttgtcaaggattttcttcatgcctcttaagtgcagatgtccaaacctttgatgccatattctgacttcatcttctatggtggatagacatgtggaggagtagctggtttcttggggtgtccataggtaacaattgtcctttgatctgctgcccttcattagaacttcactcttttcatttgtcaccaagcattctgactttgtgaagattacattgaaaccttcatacacagctgactgaagctatatatgtttgcagtctgttccctttaccagcactactttgttcatactatgaagtccatcctcaactagcttttccattccaatgaactttttctttatagccatctccaaatgtcacattactagtgtgaccgggctcaatgtttataaaggaatcttttgactccctgtctgtgt

SEQ ID NO: 10730 - DNA, 444 bp, Glycine max
agcttgaaggtaaactagaggccacggtttatctggtgagccaactggccatgaaacaaaaatctgcacctgacgccacactctgcggattatgcccctctgccaaccaccacacagatctttgcccatttgggcaacaatctgaaacaattgaacagcctgaagcttatgctgcaaacatctaaaacaaacctcctcaacctcagcaaccaaatcagccacaacacaacaataatgacctctccagcagcagggacaatcccggggggaggaatcatcccaaccttaaaagggcaaatccttcacaacaacagcgacaacaacaaccacaacaccaaccctattttcagaatgttgctggcgcccagcagaccatacgatcctccaccaaaccagcaacaacaacaaccacagcctcaaaaacagcaaacagctgagagctcc

SEQ ID NO: 10731 - DNA, 417 bp, Glycine max
ttcaaaaaacgtcgatgccaagtgtatactttttttcttccatgttttagttgtacatagcttgtgtcttcttcatagatagggcatgcacaatggcccttaacactgtatccactcaaattctcacatgctggaaagacattaatggtacaaaataacattgcacacaactcgaatgtcacattttaatacccatcaaacacagcaaccccctcgtcccacaactttgtcaagtctttaatcaagggactgagataaaaatcaatgacattttctggttgtcttgggcccgatatcatcatagacaacataatgtatttttgcttcatgcacaaccaaagaggtaagttgtaaattactaacaaaaaaagccccaaactgtgatgagtgtttaaactcccataccgattctttcca

SEQ ID NO: 10732 - DNA, 406 bp, Glycine max
tcggtatgcaattttgagagtctcgatattttacgggactcaatcagaaatccgagcagaaaagttactgtcatttgaatttactcagagcttcgataatcaatttcgagcctctcgatatattacaggactccatcagacacccaagtaaaaaagttattgtcgtttgaatttgctcagagcttcagtattcaatttcgagcgtctcgacatattacgggactcaatcaaacatccaattaaaaagtaatggtcattggaattggctaaaaccttgggccttaaattccaagcgtttcaataattaacggaattaatcctaccatccgagtaaaaacttattttcgtttgaatttgttcaaagcttcggtttttatttccaaagagttggatatattatggggct

SEQ ID NO: 10733 - DNA, 525 bp, Glycine max
agcttctttgagaaaacttccttgagtttctagagcttagctacacacacccctctcataactaagctcacctccttgagaagcttccttaagaagattcataaacaagttagagcttagctacacatacctgtctaatagctaagctcacctccttgagatgagaagctagagcttagctacacaccccctataatagctaagctcacccccatgacaaaaaacatgaaaatacaaaaaaaaagtccttactacaaagactactcaaaatgccccaaaatacaaggctaaaacattatactactagaatggccaaaatacaaggcccagaggaaggaaaaacctattctaatatttacaaagataagcgggctcatacttagcccatgggctcgaaatctaccctaaggctcatgagaaccctaggaccttcccttggatctctagcccaatcgacttggagtcttctacccaatgcccttgcggggtaggattgcatcaaataggtaaaaagcgttgggtctt

SEQ ID NO: 10734 - DNA, 260 bp, Glycine max
tcttacaaagcatacggctttctggatgtagatgatgtatatctatacagatggatcttatatatctatatatctatagatagatatatagatatagatatatagatatagatcatacaatgaagtaccgcacgagtgggtatataggaatccaaatctgccgaatcactcatgttatgatcttctacatcctaagtctttccgttccttcatctggcttatgttcttcatggagcattcaaacggaatgactctatgaa

SEQ ID NO: 10735 - DNA, 499 bp, Glycine max
agcttcaagagtatttaattataagattttgatcaataatttcattttttatttcactggtaagtaatttcatagttgattaaaaacattaagatttcataaagtatactaaattaaatattgaataatataagttgtgtacgtctaaaaccttagagttgttgtcacggctttgcacttaaaaaagataaagataatggatgcaagtaaggagatataggtacccaacaagtaaagaaatggaaattggagttattacgtgcaaaaattactggtcggatagttattttttctttccaaatgcgagtacaaaaataaatactatggtactttattcaaacctttttcatgttctatccagcttattttaggaattacaaatttgtgatcaattataaatagaagatcaatgtgaaccagacagaaataaatagaacatcatgaaaaaaatcgaaatctatagaggatcaatattttagagtaattttgattactagat

SEQ ID NO: 10736 - DNA, 317 bp, Glycine max
tcgtgaagcaagctccaatgatgcaagtttcgtgaatctaagtgagatgcttatgtccacatctaataatattgtgtggaagtgtgctcttggaaagaactttacaagaaaatggtacaacagtgtgaaaaatttagcgagggaggctatgattcatcttacagctttcacagtgagagattacttcccatggttgggttggattgatgttcttactggaaaaattcagaaatacaaggcccctgcttgagcaatggatgctttgtttgatacggcaattgcagaacatttggcttgaaaaaaggaaaggtcaacac

SEQ ID NO: 10737 - DNA, 455 bp, Glycine max
agccaaatctagatatacctcagaacaatatatttttgtcaccacgagatatattgacagcggcggatcatctgattggaacgaaattcggaaagggtatacttgacgatataaatcatttgaaaaataaacgtattcgttcggcaacaaatctattacaagatcaatttggattggccctggttcgtttagaaaatatggttagaggaactatatgtggagcaattagacataaattgataccgactcctcagaatttggtgactacaactccattaacaactacttatgaatctttttttggaatacatccattatctcaagttttggatcaaactaatccattgacccaaatagttcaatgggagaaaattgagttattcgggccccggaggaatgaccgggcgaaccgctagtttctggatacgaaatatccaccctaatcactatggacg

SEQ ID NO: 10738 - DNA, 519 bp, Glycine max
tgccttgccccttgatatattagttggactcttttttcactatgaatgacaaattccttgggataaaggtagtgttgccatgtttttaaaatccgtactaaggcataccaactccttatcataagttgaattagttaagggtaagaccacttaacttttcactaaaataagcaattggatggccttcttgcatcaacacagccccaatcccaacatttgaagcatcacactccatttcaaaagaatttttgaaagtttggcaacgcaagtatgggggcattaattagcttttgcttaaaaacattgaaagcttcttcttgtttctctccccatttgaaacccacatttttcttgagcacttcattgagaggtgctgccaatgtgcttaaaaccttcacaaaatctttataaaaactttcttaaccatgaaaaacttctcaccctcggtcacagactttaggtgtaagccattttttgaataagcccctaaccttcttcttattaaacttgcacttcctt

SEQ ID NO: 10739 - DNA, 492 bp, Glycine max
tcatgatgaatcaagattgattcaaagatgttttgatgataacaaagatgatgacaaaggtgatgaaaaaaagctcaaaggtcaatcaaagaatgagttcaagattcaagactcaagattcaagaatcaagagaagacttaatcaagataagtatgaaaaggttttttcaaaaactaagtagcacatggattttttctcaaaacatgtttaccaaagagtttttactctctggtaatcgattaccagattgttgtaatcgattaccagtagcaaaatcaatttgaaaaagttttcaaatgaatttacaacgttccaattgatttcaaaaaagttgtaatcgattacaatgttttggtaatcgattaccagtgtctttgaacgttgaaattcaaattcaaatgtgaagagtcacatcctttcacataaaagctttgtgtaatcgattacactgatttggtaatcgattaccaatgattgcttctgaataaatc

SEQ ID NO: 10740 - DNA, 509 bp, Glycine max
agcttttcatttgatccagcagaggaggtttatacaacctatttcactcaagtcacacccacggaactctggcacaagagacttggccattgccatcttgaaagaatgctaaacatgaaaaaaaaggaaatatgcgaaagaaaatttgaagaagtttcaaatggaggaatgcaaatctattatcacaccaatgaatcataaggagaagtttaccaaggaagaaggtgtttataacattgatgaggatattatgggagctcgattggatgtctaatgtatctcactacaacaaggccaaacattctattttctcaaaagaacaaaactagaatttttgttgacaatcaagtagccattgctattgcaaacaatcccgtgtgtcatgggaagactaaacatttcaatatcacggtctattatttgataaaaatgcaacaaagtggagaagggaacttaatttactgcaagtctaaagatcaactggctgacttgtttacaaagtcactacc

SEQ ID NO: 10741 - DNA, 269 bp, Glycine max
tgaatcggacctgagtgtgaaaagttatgtccatttgaatttctcgaaagctttcgttgttcaatgtcgagcatctcgacatattatgcgctcgaatcgaacatccgagtgaaaagatatgaccatttgagtttctcgagagcttccggggttcaattccgagcctttcgacatattatgtgcccgaatctgaccttcgtgtgaaaagttatgaccatttgaatttctcgagagcttccgatggttaatttcgagcgtctcaatatatt

SEQ ID NO: 10742 - DNA, 391 bp, Glycine max
ttgtaagggtaaagtctcaccaatgttacctgctcatgccacaattggtagccgggggtatacgaaacattttgcccaacaaagtcagggtagcgataactcgcctgtgctttttcttccatgctatatgtagcaaagtcattgatcctgtcaagtttgatgagttggaaaatgaagccgcaattatactgggccagttggatatgtattttccccctgctttctttgacatcatgattcacttgattgtgcctctggtcagagaaatcaaatgttgtgggcctgtttatctacgggggatgtacccggttgagcgatacataaagattttaaaagggtataccaagaatctatatcattcagaaacttttattgttgagaggtacatttg

SEQ ID NO: 10743 - DNA, 497 bp, Glycine max
agctttgcagtagatgccactctactctaaattttttaaagatatgttaacaaggaagcataaatatattcatcaggaaaacatcatagtggaaggaaactgcagtgttgtaatctagaagatccttccactcaagcataaagatcctgggagtgtaactattccttgttcaattggagaagttaatgtgggaaaatctcttattgacctcggagccagtatcaatttgatgccactctccatgtgcagaagattgggagagttggaaataatgcccactcgaatgactttacaattagctgaccgctccattaccaggccatatggagtaattgaagatgttttggtcagagtaaaacattttatcttcccggtagactttatggtaatggatatctctaaagatactgacatccctgtaatattgggaaggccattcatgttgaccgcaagttgcatatttgatatggggaaaaagaagctggatgtatgttttg

SEQ ID NO: 10744 - DNA, 374 bp, Glycine max
tcttatccaaggctcatcttggtggtgtattctccttcttccatggcttattccctagtggatggtgcctcctctcacctcttttcctttttcttccgctgcatccccatggtggaaaatcaccattaaaggacctcattgaagctcaaagatccagcctccatagaagccccacaagcaagcttccatcagaatgttcgaatgcggcccataataaattgaaacactcaaaattgaacacgaatgctccaagaaaattcaaatggccatgacttctaacttcgtatccgattgcaacccataatatatttagacgctcaaaattgaacatgaaaggttcgagcaaattcaaatgaccataactcttactttcg

SEQ ID NO: 10745 - DNA, 444 bp, Glycine max
agcttttcttttagcaaagcaaaggcttgctcttgtttttcaccccaggtaaatgccacattcttcttcactagctcattaagaggttatgcaattgtagagaaattatgaacgaaccttctatataagcttgctaacccatggaggctcctaatatctcccacactttttggggtgggccattcttggatggccttgattttctcaggatccacttggaccccatttctaccaactacaaaccctaagaaaactatattatctacacaaaaagtacatttctctatatatgcatagagggtgtttttcctaaggactgaaagaactttcctgagatgtccctagtgatcatctaagctcctactggacactaaaatatcatcaaaataaaacactacgaatctacctatgaaatcccttagacatgatgcataacccccataa

SEQ ID NO: 10746 - DNA, 508 bp, Glycine max
  unsure (1)..(508): unsure at all n locations
agctttgccgtagatgccactctacttttttttttttaaagatatgataacaaggaagcataattctattcatcaggaaaacatcatagtggaaggaaactgcagtgttgtaatctacaagatccttccactcaagcataaagatcctgggagtgtaactattccttgttcaattggagaagttaatgtgggaaaatctcttattgacctcggagccagtatcaatttgatgccactctccatgtgcagaagattgggagagttggaaataatgcccactcgaatgactttacaattagctgaccgctccattaccaggccatatggagnnattgaagatgttttggtcagagtaaaacattgtatcttcccggtagactttatgggaatggatatctctaaagataccgacatccctgtaatattgggaaggccattcattgtgaccgcaaggtgcataattgatatggggaaaaagaaactggatgtctgttttgaagaataaaaa

SEQ ID NO: 10747 - DNA, 379 bp, Glycine max
agcttcggttgttcaacttcgagaatttcaatatattatgtccctaaatcgaacatccgtctgaaaggttaagaccattcgaatttctcgagagcttccgttgttcaattttgagcgtctcgatatattatgtccccaattcggacatccgtgtgaaaaggtatgaccattcgaatttctcgaaagcttcatctgttcaattttgagcatctcgatatattatgtccatgaatcgggcttccgtgtgaaaagtcttgaccattcgagtgaaaagttatgaccatgggaatttctcgagagctttcattgttcaatttccaaccgtttgatttattattgttcctgaataggcattctacgcgaaatgttattaccattt

SEQ ID NO: 10748 - DNA, 470 bp, Glycine max
agcttgctaacccatggaagctcctttttttttccacactttatggggggggccattcttggatagccatgattttctagggcccacttggaccccatttctaccaactacacacacctaagaaaactatataatctacacagaaggtgcatttctctatattagcaaacagggtgtgttttcctaggactgaaagaacttgtctgagaatgcctaagtgatcatctaggctcctactatacactaaaatatcatcaaaattaacagactacaaatctacctatgacatcccttatgacatgatgcatacgcctcataaacgtgcttggtgcattagtgagcccaaaaggcatcactagccattcttacaaaccaaacttggtcttgacagcattttttcactcatcaacctgtttcatcctgagttgggcgataaccacttttaagaacagatttttgaaaagaaattg

SEQ ID NO: 10749 - DNA, 487 bp, Glycine max
agcttaatgtattttgtgagcatcaaatgtctaaatgattcttataacttcaagtctagcaacatgaacaaaggtttcagagaaatctataactttttgttgattatatcctcaagctactaacctagctttgttgcatactacttttccttgttcatccaacttgtttctgaagattcatcttgttccaatggtgctcttgttttctggcattggaacaaatgtccagacatcatttttgttaaactgattcagtttttcttccattgtgattatttagtcattttctatcaaagctttgtctatagttttaggtttgatttcaaacacatggtctttgaatgatgatctaaatttaactccttcagtctaatctcagatgatatgatcttatggatgaaatgaaccaaattccaaaccttcatttgaagtggttgatctgatgattcttaaatcaaaatgaaatattcttcagactatttgactt

SEQ ID NO: 10750 - DNA, 445 bp, Glycine max
taacaaaaggcatgcgaagtgggtggaattcctatagcaattcccttatgttatcaaacataaaaagggaaaaggtaatattgtagccgatgctctttctcggcgtcatgcattactttctatgcttgaaacaaaattgattggtcttgaatgtttgaaaagcatgtatgaaaatgatgaaacttttggagaaatttttaaaaattgtgaaaatttttcagaaaatggtttctttagacatgaaggctttcttttcaaagaaaacaaattgtgtgtgcctaaatgttctactagaaaattgcttgtttgtgaagcacatgaaagaggtttaatggggcattttggggtccaaaaaactctagaaacattacaagaacatttttattggcctcatatgaaaaaaaaagtgcaaaaaatttgtgaacattgcattggatgtaaaaag

SEQ ID NO: 10751 - DNA, 510 bp, Glycine max
tcagaaagctttttatggacttaaacaagctccaaagcaatggtgtaggacttagccacttccttcttgaacaaaatttcgagagaggacaagttgataaaatgttttccattaagaagtcctctcataacactctactcatgcaagtttatgtggatgacataatttttggttgcactaacaaatctctttgtcaagattttgtgcacaagatataaggagagtttgaaatctcaatgatgggaaagctaaattactttcttggtctttaagtgaaacaaatggaccgtggaacatttctccatcaagcaaatactgcaagtaacctctcaagaagtttgagatggaaaaaaaaaagcaaggaggctgcaactcctatggttactagttgttaccttagtgtggatgaaaaaggaaagccaatcaatcaaataaggtatagaggtatcattggctccctactttacttaactgcaagtagtttggacatcatgtttaatgtttgcatgt

SEQ ID NO: 10752 - DNA, 435 bp, Glycine max
agcttttaatggaagtcatgaaaattatggcccctcagaagcattaactggaaaccaagttcatgatcgcgtaaaggaaattgtaaccgtgtttggcaagtcccagaagaagacatcatctcccaacaacatgtggaagaaatgctcaatatttttgatcttccatactggtctgatctatatgtgcactgtctagatgttatgcatgtggagaaaaatgtgtgtgatagtttaattggtactcttcttaacattaaagggaagacaaaggatggtttgaaatttcgtcaagacttggttgacatgggaatacgagagcagttgcatcccatatcacaaggtcggcgaacatatttacccccagcatgccacacactgtcaacaacagagaagataagtttttgtccatgtctgtggaatctcaaagttccacaa

SEQ ID NO: 10753 - DNA, 415 bp, Glycine max
  unsure (1)..(415): unsure at all n locations
acgtgcctcatgcaacaattgatattcgtggctatacgaaacatcttgccaaacaaagtcaggttagcgataactcgcctgagctctttcgtccatgctatatgtagacagtcattggtccagtcgtgtttgatgaaatggaaaatgaggccgcaattatacaaagccagctggagatgtattctccccctactttctttgacatcatgattcacttgattgtgcatctggtcagagaaatcaaatgttgtggtcctgtttatctacgatggatgtacnccggtgatcgatacaataagatcttaaaagggtatacaaagaatctatatcgtccagaagcatctattggtgagaggtacattgcagaagaangccatggaatttgttcataatacttagagaaggctaaacatgt

SEQ ID NO: 10754 - DNA, 375 bp, Glycine max
  unsure (1)..(375): unsure at all n locations
agcttgtctctcaacactacanagctattcacctttaaatcctttgtaaaaatatctgccagctgcatttcagtgctgcaatacctcaaatccagctgcttcttgctcaccttttccctcagaaaatgaaatctagtctcaatatgttttgatcttccatgtgctactggattcatggccaaactgatagtagatttgttgtctacatacaatctaactggcctctgaatntccaccttcaattcttcaagcaaggagtccaaccacaaggcttgacatgcagcatagcaagctgctatgtactctgcctcacatgaggataaagccaccacttgctgtttctttgaacaccagcttattgatgtacccagaaac

SEQ ID NO: 10755 - DNA, 313 bp, Glycine max
ataactgaatcttagttctcttagacttattttttatcagctggctgatcattataattaatgaactcagtggcaatctctttggacagtagcttctctcgaataaagtgacagtcaatctctatgtgcttggtcctctcatggaagactgggtttgaagcaatgtgaagagcagcctgattatcacaatataacttcatttgcaccactttgcagaatttcaactcttccagaatttgtttaacccacataagttcacatgtaaccatagccatagatctgtatacagcctgtgctctagatctagcaacaa

SEQ ID NO: 10756 - DNA, 276 bp, Glycine max
tcattttctataggttactactgtgatgaacgtttatgttatataatccctatggaagcagggcacatttttgtgggtagaccatggctatttgacaagaaaagtatccaccatggtctccccatgaaatacccttacccatggaagcaaaaagttctaccttgttcccttgacaccttcacaagtggctagggatcaagtacaaataaaactcatataggatgaggtatagaatagaataaaaaagaagacctactctatggagaggaggagtgt

SEQ ID NO: 10757 - DNA, 367 bp, Glycine max
agcttgtttgcagacatagcctttttggtgtttatgccaccaccggagacatcatcggcagcggcagcggtagcggagagcaccatatccgggtggatggagccatccatggagaggctgtgttggtgtccaaccctagtaggcctttcattattattattattattcttattattattattattattattattagcaatgctgttgtgttgaggtggaggaggaagaggaagtggagaggaatcgagttgatcgaattgaaggtagatggaaagcaagtcgttgtcatcggggagatcaacgtcgaatgtgaggtcggctggtaaggttataatctccgaatgggcgcgcctgtgccctctgttct

SEQ ID NO: 10758 - DNA, 389 bp, Glycine max
  unsure (1)..(389): unsure at all n locations
ttaagtatgtatggcaaaactttattactggtgttcaagacatacaagtgagcttgtaacaaatgttctacacttggagtgatcacatgccagccttttgaacctttaccacgcactctatcatcatgccgagactcaggaagaccaacaggtttagtcttctctaagtattctgaacaaaattcaatggcttcttctgtaatgtacctctcaacaatagatgcttctggacgatatagattctntgtgtacccttttaagatcttcatgtatcgctcaatcgggtacatccaccgtagataaataagaccacaacatttgttttctctgaccagatgcacaatcaagtgaatcatgatgtcacagaaagcagggggataatacatcta

SEQ ID NO: 10759 - DNA, 426 bp, Glycine max
tatgctgcaaacatttacaatagaccttctcaacctcagtagcaaaatcaaccacaacagaactattacgacctctccagcaacagatacaaccctggatggaggaatcaccctaatctcagatggtctagccctcagcaacaacaatagaagcctgctccttccttccaaaatgctgctggcccaagcagaccatacattcctccaccaatccaacaacaacaatagccctagaaacagccaacagttgaaggtcctccacaaccttccctcgaagaacttgtgaggcaaatgactatgcagaacacgcagtttaaccaagagaccatagcctccattcagagcttaaccaatcagatgggaacaatggctacacaattgaatcaataacagtcccagaattctgacaagctgccttcccaagct

SEQ ID NO: 10760 - DNA, 414 bp, Glycine max
  unsure (1)..(414): unsure at all n locations
aagcaagaaattaggtgcatatagagttacatacgtcttggaattgatacatacggacatttgtgggtcatttcatacatcttcatggaatggtcatcaatattttatatcattcatagacgattactccaaatatgcatactntatttcttatacatgaaaagtcacaatctttggatgtgttcaaaacatttaaagttgaagttgaaaatcaactcaacaaaagaatcaagagtgttagatctgaccgtggtggtgaatactatggttgatatgatggttcangtgaacaacgtccggngccttttgccaagtacctagaggaatgtggaatcgtcccacagtacaccatgtcagggtcacctagcatgaatgatgtggctaaatgacgaaacaaaactcttaaggatatgg

SEQ ID NO: 10761 - DNA, 410 bp, Glycine max
agcttacttggaaatcattaggtggaacctcttaagttgtgtgagcactatgtctataggaagaaccatcagatgaaactcccaacagttgtgcacactataaaagccatattgggctatgtccattctgattactaggggccttcgagagttccatcactaggcagagcaaggcacttcttctccagcaacgatggttactccaggatgacatgtgtatttacgataaaacaaaaatctgaagctttcaaatgttttaagcattggacgattgttatgaagaatcaaacaggaatgacaatgaagtttcttaggatggacaatggcttggaattttgttctacaaaaatcaatgagttatgtaaagatgaaggcatggcaagataatgtatcgtatactatactccaca

SEQ ID NO: 10762 - DNA, 311 bp, Glycine max
agcttatagatgaactacatctgtatgactcttacggatgaagttcatccgtatgaagcatacagatgtagtacatccatatgcattggttttcttccagaatatttattaaattttgaaaacattagatgtaataacattattaatatgtttaattcttattacatatttttgaaattgtggataatttatctattacaaattatttatagtgtaagtaaaagattaaattatttaggtacaataattgaatttattttaactagtaaaatgtctaattacgtgttagttatagttttctatgttttttt

SEQ ID NO: 10763 - DNA, 409 bp, Glycine max
  unsure (1)..(409): unsure at all n locations
acttagttaaaatatctgttggctggtcanttataatgatgaactcagtgataatctccttggacaatagtttctctcgaatgaaatgacaatcaatctctatatgtttagtcctctcatggaagactgaatttgaggcaatgtgaagagctgcctgattatcacagtacaacttcatttgcaccacctcacaaaatctcaactcttggagaaagtgtttaatccacataagttcgcatgtaaccatagccatagatcgatattcagcctctgcactggatcgagcaacaacggtttgtttcttgctcttcctatagataacatttcccccaataaaaatacaatatcctgaggtagatctcctgtctatgggacaagcagcccaatctgcatcacaatatccagagac

SEQ ID NO: 10764 - DNA, 469 bp, Glycine max
  unsure (1)..(469): unsure at all n locations
ctcgacccggatctgtaacctcctgacgctgcagcttacaaggacccgaaatctttaaggagcctcagagtacaatcatgtattgaccccccctcctagctgctccaagtactaagcataatatcgtttgacaatatcaacgttcatgggtgaagtcaactcttcatcatccatgctggcaagcaccagtgctcctcctgagaatgctttctttacgatgaaaggccctttatagttnggagcccactttcccctattgtcctttagggcttgggatactttcttcagaacgaggtccccctagttgaatttgcataggcataccttcttgttgaaagcattcttcacccatctctggtacagatgcccgtggctcatagccgccagacgcttgccttctataagattgagctgattaaagcgtgcttgggctcactctgattcttccaacccggactcttgcagaatc

SEQ ID NO: 10765 - DNA, 426 bp, Glycine max
  unsure (1)..(426): unsure at all n locations
agcttgtttaccccatgtttgagttgcttacaatagagttgttcatagcaccactaattattctccttttgaagttatttatggttntaacccactaactcctcttgatcttttgcctatgcataatgtttctgtttttaaggataaagatggtcaagcaaaggcagactatgtgaagaagcttcatgagagagtcaaaaatcaaatttagaggagaaataaaagttatgctaaacaagccaacaaagggagaaagaaggttgtcttctaacctggagattgagtttgggtgcacatgagaaaagaaaggtttccagaacaaaagatatcaaagcttcaaccaaggggagatggaccatntcaagtgcttgaaagaatcaatgacaatgcttacaaagttgagctctccggtgagtataatgttag

SEQ ID NO: 10766 - DNA, 417 bp, Glycine max
  unsure (1)..(417): unsure at all n locations
agctttctcaagctggattctagattgtagcatagctgcattaagaaatagtaataaataagcaacatttagtattgttcccatggttccagtaggcagcctatatatgatattatatcaaattatacctcttcccaagcggaattttctagacggagatatatagttaatatgatacagcctggccttatatagctctctatctctgtgggactgtgggataaccagttaaggatctggtaatcaaagaaaaacataaataaaacaccattcaaaaaacagtgtagtgaaatagtttatagcaatttcaaggcagcaatgaagtacctgtgatcggagagcatggnggaaatcatttggagccttgccaaatagtttgaaaacaattcgatctgtacgactctgtaaacagaaagc

SEQ ID NO: 10767 - DNA, 438 bp, Glycine max
taagtctacctgcggcatgcaagcttctattttaattacgagcgtctcgatatattacgggactcaatcggacatccgagtaaaaagttattgtcgtttgaatttgcttagtgcttctgttttcaatttcgtgcgtctcgatatactacgggacacaatcggacacccgagttaaaagttattgtcgtttgaatttgctcagagcttctattttaaattacgagcgtctcgatatattacgggactcaatcggacaaccgagtaaaaagttattgtcgtttgaatttgcttagagcttctgttttcaatttcctgcgtctcgatatactacgggacacaatcggacacccgagttaaaagttattggtcgttgaatttgctcagagcttctgttttcaattacgagcgtctcgatatattacgggactcaatcggaca

SEQ ID NO: 10768 - DNA, 402 bp, Glycine max
tcaaccttgttgggatgggtggtgctgcttgttttacagctattgatcttgcgagagaccttctggatgcttatccaagaacttatgcacttggagtgagcacagaagcatgtagctcaacatggtacagtggccatgataatggcatgctgcttcccaatggcttgttcagaatgggagctgcaaccatcatgctctgaaactttcacctatatagatggtgcgccaagtatgaactcaaacacgcatttctcgatcgaatttgactcctctaaagtgaaatgagaaagcaattatatgtggactgtacttcctactccaatttaaaggaaaaaaacttatcagcagttctttgtgttggtattctctaattagaagaggagtgttatcttactaatctat

SEQ ID NO: 10769 - DNA, 397 bp, Glycine max
gcttagctctagaggggatggaccttttattgtttggagaggatcaataacaatgcctataggttggatctcccagaagagtttggagtcagcaccacttttaacatttctgatttaattccttttgtaggtggagctgatattgaggaggaggaactaacagatttgatgtaaaatccttttcaggggaaggggataatgcaatgctccctaggaaaggaccagtcactagagccatgagcaagaggctccaagaggattgggctagagctgctgaagaaggccctagggttgtcatgaacctcagggtagatttctgagcccatgggccaagtttgggtccaattctctttgtacatattagactaggatgtcattatatttgatcattgtattt

SEQ ID NO: 10770 - DNA, 385 bp, Glycine max
  unsure (1)..(385): unsure at all n locations
agcttgccaccacggagttntccgactatgctcttgtgtggtggaacaagctacaaaaggagagagcaagaaatgaagagccaatggttgatacatggacggagatgaaaaagatcatgaggaagcggtatgtgccggctagttactcaagggacttgaaattcaagctccaaaaactaacccaaggcaacaagggggttgaggagtatttcaaggaaatggatgtgctcatgattcaagcaaatattgaagaagatgaggaggtaactatggctcgatttcttaatggtttgactaatgatatccgtgatattgttgagctgcaggagtttgttgaaatggatgatttgcttcacaaagcaatccaagtggagcaacaattaaa

SEQ ID NO: 10771 - DNA, 287 bp, Glycine max
aatacaagattatttcaaccaacaaagtcttgattcaagatttcttcatgatcaagccttgccgcaaaatgaaaagaattcaagtcatccaaagcacatgtaatcgattaccaatacatgtaatcgattaccaaagaggattttcaaggaatatcgccaacagtcacatcttatcattcggattttaatggccatcaaaggcctatatatatgtgtgacttgggacgaaattacagagagtttgcttggcaaaatgtttatcctctctcaaagaaatgaagagattc

SEQ ID NO: 10772 - DNA, 395 bp, Glycine max
agtctcatgattgtctctgtgctcatgcaacaattgttagctgtggctatacgagacatcttgccaaacaaagtcaggttagcgataactcgcctgtgctttttcttccatgctatatgtagcaaagtcattgatccagtcatgtttgatgacttggaaaatgaggccgcaattatactgtgccagttggagatgtattttccccctgctttctttgacatcatgattcacttgattgtgcatctagtcagagaaatcaaatgttgtggtcctgtttatctacggtggatgtacccggttgagcgatacatgaagatcttaaaagggtatacaaagaatctatatcgtccagaagcatctattgttgagaggtacattgcagaagaagccattga

SEQ ID NO: 10773 - DNA, 474 bp, Glycine max
tatacaagaatgaagctccgataccactagttaaacatgtggccttagatatcttaagaatatggggttgaattaagatatcaaagactactcccctattaaaattgtaactatctatctgaattattaatgcacccttaatttgaattactaaaaagacaattcaaagtaaacttctttaatgcaaaagataaataacaataaatgaaagaagtttaatggaagagagaatgcaaacttagttcttatactagttcggccacgccctgtgcctacgtccagtctccgagcaacccgcttgagatctccactatcttataaaatgtcttttacaaagtctgaaccacacaggaataacccttcccttgagtatagaattccttagaacttaagagatcctcggtcccttaatcaatctcttgaatatgaagaagaagaagaagaagaattctctccttaagagaaagatattac

SEQ ID NO: 10774 - DNA, 448 bp, Glycine max
  unsure (1)..(448): unsure at all n locations
ttcagtactcctaacattcagaaagagaaacaatccttcactgttccaaacttataaattataatatttagctaacttataagataattttaccaatacatcctagattatttgtncttaatttttattaaacataagagaacccatatatatattgtcaaaaagactacatatatngacaaaaaatgcccaatatatatgactnttatctaaaataataataataatactgtttctttaaaattcactttaaatctcatatatttatcccacaattagatttcttcaaatctgatggaacttttgttaaacacagttgttggtttggttgtctcttaaaagatgaaaatgtagatataatatttaggtaatgaaacatagctacaactcactgtatctttattataaataaaagcaaaagttgagagtaagaatagtgggtctaaaa

SEQ ID NO: 10775 - DNA, 216 bp, Glycine max
cagcataaccatgtatgtcaagccttacatggttgtagttcagagtaacaatgtgtctgctgaccaaataggccttgcataaaaggttagctgcatttattcttcatgttggctatttttcagttcaattataggaaaccagtggattattattatctggaatgtagattgaaaagcatgagcttctaagataagacgtgttactactttatatta

SEQ ID NO: 10776 - DNA, 470 bp, Glycine max
  unsure (1)..(470): unsure at all n locations
ctaagcttccaagttttaagttcttcctcataactgtcctaagcaaagttctcaaagtcctattaacaacttccgtttgcccatcggtttgtgggtgacaagtggttgaaaataacaatttagtgcccaacttgctccacaaagtcctccaaaaatgacttaggaacttagagtccctatcactaataatgctccttggcaaaccatggagtctcacaatctccttgaaaaacaaattagctacatgggaagcattatcaactnttttacatggaataaaatgagccattttagaaaacctatcaacaaccacaaaaatggaatctctaccattgcttngttttggcagccccaaaacaaaatccatggataaatcaatccaaggatactccggaattgcaatggagtatacaatccatgaggttntaccttannacttgccttnttacatacaatgcaatgttcacaaa

SEQ ID NO: 10777 - DNA, 306 bp, Glycine max
  unsure (1)..(306): unsure at all n locations
caatttagcaacttccgaatatatatgaattggcaagtttaagagactcatatttacaaggatgaaaattgatgtgcaagcttcttggtaaacattgcatgtgatttgggccgcgttcagtgtaacattgcatgttacgttaaataaatataacaaattcatttgataataaattaaattttagatatatgatgagacttttatgattaaatatataaaaatcaataactttattaattaaaataatggtttgaaagaaaatacaaatgatctcttatntattcattagatacgaaataaaataga

SEQ ID NO: 10778 - DNA, 436 bp, Glycine max
gctccttcttccatggcttattccctagtgaatggtgcctcctctcacctcttctcctttgtcttccgctgcatctccatggtggagaaccacaattaaaggatctcattgaagctcaaagattcggcctccatagaagctccacaagcaagcttccataaaaaaggcaagctatctatgcggtttgacaatggaaggtaaaggaaataagctatgaaagtaagcaagaaatgtaaactatgcgaatcctaaaagtatttggatgaccacatttaaggttcccaacaaaacactcacaatcctaagggaaaattacctaaaattattacatataaatggaagtaggatgacctattggaggctcccaacttacttccaatgaaagacctttttgttacaaaattgaatgcaatgaaagtaagttaattctcaatta

SEQ ID NO: 10779 - DNA, 319 bp, Glycine max
  unsure (1)..(319): unsure at all n locations
cacactaatatataccttataatcaatcaaggaaacacatngacttcaccaacttggtctaagagaaaacaaaatatcacattttattctccttatattaattttctctagcattcaagcaggatggatgaaatggagaaaagcatctggggtgttatgtgatgcaaaggtaccgatcaagcataagggaaagatttatcggactgcggtaagaccggcgattatgtacggaacagaatgttgtgcggtcacaagccaacatgagaataaagtacgtgtagcggagatgaggatgttgctgtggatgtgtggaaagact

SEQ ID NO: 10780 - DNA, 234 bp, Glycine max
  unsure (1)..(234): unsure at all n locations
ttaaaaattattcnaatagtgaatattatttaatggtatttgtaacatattatttatctataaaacaaattctaacatatagtatgtgaatggttataangacgtttaataagagataagaaataaaaagtattaattcatattactaagaataaattttaattaaaattaatgctaacaataaagatgaaataaattaattatattagttaacatttgtcacaaaaattattt

SEQ ID NO: 10781 - DNA, 446 bp, Glycine max
  unsure (1)..(446): unsure at all n locations
tgcatcagacanagatgatagcaaatccatttcaggatatggtttcactttaaatggtggtgcagtaagttagaaaagttccaagcaagctacggtagcatattcaactactgaagcaaaatatatagtggcaagtgaagccgctaaagaagctgtttggatgaaaaagttcacctttgaacttggtgtggttccttcaatagaagagtcggtcccattattgtgcgacaataatggggctattgctcaagcaaaggaaccaagatcacaccagaagtccaaatatattttacgaaggtatcacttgattagagagataatagaacatggtgacgttaagaatgaaaaggtagatggaaaggagaatgcatcagatcccttcaccaaggcacttggcanaagagagttngacaagcacanataggaattatgaatgaagttcatga

SEQ ID NO: 10782 - DNA, 333 bp, Glycine max
  unsure (1)..(333): unsure at all n locations
gctatgttntaatgtcgagcttcacgatatactacgggacactatcggacatccgagtaataagttattgtcattataattttctcggagcttgcgttttcaattacgagtggctcgatatattacgggactgaatcaggcatccgaggaaaacgtgtttgtcgttagaatttgctcagagcttttgttttcaatatcaagcgtctcgttatattacgggacttaatcgtacatctgtgttaaaatttaatgcggtttgaatattctacgagcttctgtttccaattacaagcgcctcaatatactacgggacacaatcggacatacgatata

SEQ ID NO: 10783 - DNA, 301 bp, Glycine max
  unsure (1)..(301): unsure at all n locations
ctacaaaaggagagagcaagagatgaagagccaatggttgatacatggacggagatganacagatcatgatgaagcaatatgtgccggctagttactcaagggacttgatattcaagctccatagactaacccaaggcaacaagggggttgaggagtatctcaaggatatggatgtgctcatgattcaatcatagattgaagaagatgaggaggtaactatggctcgatttcttaatggtatgactaatgatattcgtgatattgttgagctacaggagtttattgatatggatgatttgc

SEQ ID NO: 10784 - DNA, 457 bp, Glycine max
  unsure (1)..(457): unsure at all n locations
atctctgagtcacctgcngcatgcaagcttctgggagacatctngacttgctntccaatctgacattcaccacagattctgccttcttctattttcagaatgggaatgcctctaacagcacctttgtcaatgattntcttcatgcctcttaagtgcagatgtccaaatctttgatngccatatttgacttcatcttctttggagaatagacatgtggaggagtaactggtttcttgaggtgtccataggtaacagttgtcctttgatctgctgcccttcattangacttcactcttctcatttgtcaccaagcattctgactntgtgaagttacattgaatccttcatcacacaatngactgatgctgatcaagttcgcagtcagtcccttcaccagcagtactttgntcagactangaagtccatcatggactatgctttccattccagtgatctt

SEQ ID NO: 10785 - DNA, 374 bp, Glycine max
  unsure (1)..(374): unsure at all n locations
gagcgattcctttcttcttatcattntcttcatgttgattcaatctcattaattccatttcatgttcctgtaactttccaaacaaagtggcaagagacatgttagatagatctcgtgattcagtaatgattgttaccttaggttgtcattccctgcttaagcatctcaaaactntatttataagatcttcatttggaaagaattttcctaaagatgtaagatgattaattatatgagtgaacctctttcgcatgtcttgtatggtttcacttggattcattctaaataattcatattcatgaatcattttatntatcctatatctttntacatctgttgtaccttcatgtgttacttgtagggtatcccacata

SEQ ID NO: 10786 - DNA, 428 bp, Glycine max
  unsure (1)..(428): unsure at all n locations
accgcgatctcaagtcaccgcggctgcagctgaggcaactgatgcatnggtaactgggtaacccagctggccttgaaccagaaatctgtacctgtcgcaagggtctggtggttgtgctcctctgctgaccaccatacaaacctttgcccttccatgcagcaacctggagcaattgagcagcccgaagcttatgctgcanatatttacaatagacctcctcaacctcagcagcaaaatcaaccacagcagaacaattatgacctctccagcaacagatacaaccctggatggaggaatcaccctaatctcaaatggtctagccctcagcaacaacaacaacagcctgctccttccttccaaaatgctgctagcccaagaagaccatacanttctncaccaatccaacaacagcaacaaccccagaaaca

SEQ ID NO: 10787 - DNA, 337 bp, Glycine max
ctgcagcttgatgcacatttgagaggtaatgtacaacgatatgatgcgctccatgagaggttggatcaaatggagaatagagatcatcatgaagaagaaaggacgagaagagggaatgatggtgttcctagacataaccgaattgatggtattaaactcaacattcctccatgtaaaggaaagaatgatccggaggcctacttggagtgggagatgaatatagagcatgttttctcatgcaacaactatgaggatgaccataaggtgaagctggctgccacggagttttccgactatgctctagtgtggtggaacaagctactaaaggagagagcaa

SEQ ID NO: 10788 - DNA, 450 bp, Glycine max
  unsure (1)..(450): unsure at all n locations
agcttatctcagatcagtttatgaacanaataaacctccttataaatacatgtttcactccaaccaaatgcatagatngcacattgttcagtccctcaagctcatgcaaagatgggaaattacaaatatttacattctttcaatttgcattcaaacaaacacaaacacacatatatattaggtggaacaatgtaatattaatttgaatattgattacatatatactattttccatgatgatataataacttgccttgtgacaatatataccaacaacccagttgtttaaatatttcatcanaaatgcttgcatggttccattcttttctctcttcacatactccaaataattcgtatgaattatccctataactagcctgaatntagtcttccatcttttcccatggtgataccatgtcaagtgctcgggctcctctagaacagcaatat

SEQ ID NO: 10789 - DNA, 207 bp, Glycine max
gcttcccctgtgtgcatttgtgtaatacattatcctgtgtatgatgatcacgggtccaaggcagccagggaatgatattgatgtgtatcttacaccattaatcgaagacttgaaaaaattgtgggaagaaggagtagatgtgtgggatgcaaatgtgcagcatacattcacattacacgcaatggtgttttgtactattaatgattt

SEQ ID NO: 10790 - DNA, 430 bp, Glycine max
  unsure (1)..(430): unsure at all n locations
tgaagcttccatatgttgagtggtgcaaccctctttagaatatcactcatgcacccaacatcttcatgatttgtgtacatagggactcattaagtaggtttgttcttaatttttgtttcaatacaaacttaagtgctcatatgggacaccttangtttgtcataatattttgtaggaataatcaacatgaaaataaagaanaaggtatgttntattcaattactttccttaactnttaaaataatgatcaagggcttcccatggaccctgagagaataatggtcattcctgagtggcctactccaccatgtataagggacatttgnngcttcaatgacttaacanacttttacaataggtttgtctcatatttttctatacttgtagcaccactcattgagtnggtaaagaactatgttctctcatggga

SEQ ID NO: 10791 - DNA, 248 bp, Glycine max
  unsure (1)..(248): unsure at all n locations
cacacatatgtcctattcggngacataactcatctagacgctcgaaattgaacaacgcaagctctcgagacattcgaatgtgcataacatttcgcacaaatgtccaattctgggacataatatatcaagacgctctaaattgcatagcggaagcactcaggaaattcatatggtcataattattcacatggatgtccgactcgggaaaataatatatcgtgatgctctaaattgaacaacgagagcta

SEQ ID NO: 10792 - DNA, 188 bp, Glycine max
  unsure (1)..(188): unsure at all n locations
gtatgttgctggattaatatctcgatgcacgatatgtggttcacactccttgtgcaaataagctaatccatgagctgcaccctgngcaatcttgagtcttacatcccattttagagctgaagttccatcctcactctcatgcagccaatagtcaaggctttcattctccaagtaggagtaaataaaca

SEQ ID NO: 10793 - DNA, 347 bp, Glycine max
tatgcgcacacttctgtacgaacgttcacttgcacatgacattattatatctaatatatatgcacccatatacaatcattgcaccttcgttacctataatattcacatgtacttccatggtgtatttgttatctacatcacacacatttcctttgctaaattcacatacatgcatactctaagcactgtggctatcaaaaattgcatacgtgcacatcttggtatttctcatacctatacatacacaaactatatgatgaatcttgactatctacacaataaggcgctacatttcatgctattctcaagtgtttgtactacctaaagccgcatgcaaattgaagtat

SEQ ID NO: 10794 - DNA, 366 bp, Glycine max
  unsure (1)..(366): unsure at all n locations
agcttcaacctagaggagacggaccattccaagtgttgtataagatcaacgacaatgcctacaagaatgacttgcctagtgagtataatgtaagtgccactctcaatgtgtctgatctatctctntntgatgcagatggaggagccttggatatgaggacaaatccttttcaagaacgatggagtgatgaggacataaccaaggaccatgaagcacttgaaggtcccatgaccagaggcagacttanacaagcccaacacgtcatagagacaaagctggtcatttgtatagctgccattgatgatgattgaaggcccaagtgcagaaagatgaaagcccanaggcagaggcactaccaagactact

SEQ ID NO: 10795 - DNA, 342 bp, Glycine max
  unsure (1)..(342): unsure at all n locations
acacatgttttntttcagctntaaagttatgcagtagtcccacagatatgaagcatttatagtagcatgtactatgtcggatctaccttcctttgggatgacgagaataattttcccgaaatcacctccaaacacaacaacttttccaccaaatgaaccactgtcagaattagacatgcacatgatgtcattcaatgttntatctaatgcttcataacaaacttatgagccataggagcctcatcctatantaatcaattgattgcctttaacaattcaacttgttctgtaccttggtggatattacatgtggagttgtccaatataggcaccatgaatagc

SEQ ID NO: 10796 - DNA, 360 bp, Glycine max
  unsure (1)..(360): unsure at all n locations
ttctgggggtgaagctccttcttccttggcttattccctagtggatggtgcctcccctatcctcttctcctttgccttccgctgcatctccatgantgaaaatcaccattgaaggacctcattgaagatcaaagatccagcctccatagaagctccacaagcaagcttccatcaagttatgaccatttgaatctctcgagatcttccgtgggtcaatntcgggcgtctccatatgtcatgtgcctgaatcggacctnncgtagaaaaattatgaccatntgaacttctctagagcttcgcggtgttaatttcgagcttctcgatatctgatgtgcctgaatcggacatncgagtgaaaag

SEQ ID NO: 10797 - DNA, 304 bp, Glycine max
  unsure (1)..(304): unsure at all n locations
cttcactcgcatgtgcgattcatgcgcgtagcgtattgttattctctatatctaacanaggaagctctcgagaagatctaatggacatcaactttcactcgcatgatccatgcaggcgcataacatattgagacgcttgaaaatgaacaactgagtttctcgagaaattcatatggtgataactcttaactcgcatgtccgattcatgcgcataacatattgagacgctcgaaattgaacaacggatgttctcgagaaatttagatggtcataacctttcactcttatgtgcgatacacgcgca

SEQ ID NO: 10798 - DNA, 373 bp, Glycine max
  unsure (1)..(373): unsure at all n locations
agctngtgcctcttcatgtctggaatatgaatgtagcatatagatccaaagacacttagatgctttgctgatggcttcttcccgttccaagcttcaattggagtcttgtctcttacagacttagttggacatatgttgagtatgtaaacagcagtgtagactgcttcagtccagaatgtgttaggtagtcccttctccttgagcatcgatctagctatttccataactgtgcgattctttctctcggacactccattctgttgaggagaatatgcgactataagttgtcgctctatgccttcatcctcacaaaatatttaaactcgcgagaggtgtactctttgccgcgagcacttcttaagtactttatcta

SEQ ID NO: 10799 - DNA, 403 bp, Glycine max
  unsure (1)..(403): unsure at all n locations
tcttagtttcagatgatgcagatgggtntgtagctacctcatgcactcctctaatgactatggcatcattattggcgctaaactgctgngagttggaggccatcttctcaattaaatttctggcttcagcaggagtcatgtctccaagggctccaccactggcagcatctatcatacttctctccatattactgagtccttcataaaaatattggagaagaagctgttctgaaatctgatggtgagggcaactggcacatagtttcttaaatcgctcccagtactcatacaggctctctccactgagctgtctaatacctgagatatctntcctgatggctgtggtcctggaagcanggaaaaaatttctaaaatactctcttaagtcatcccagctcgtgat

SEQ ID NO: 10800 - DNA, 232 bp, Glycine max
  unsure (1)..(232): unsure at all n locations
tcggacctcagtgtanaaagttatgaccatatgaatntctcgggagcttccgttgttcaatatcgagcgtctgtatatgtgatacgcctgaatcgaacatccgtgtgaaaagttatgaccatttgaatttctcgagagcttccttggttcaattccgagcatctcgacatattgtgtgcccgaatctgaccttcgtgtgaaaagttatgaccattagaatttctcgagagct

SEQ ID NO: 10801 - DNA, 407 bp, Glycine max
  unsure (1)..(407): unsure at all n locations
ggatganagtgcacaactcctacttgttgttatgatgatggagaagcagtacttcttggacctgaaatgctacaacagattaacgaacaagtgaagttgattcgagagaagataaaggcatctcangataggcagaagagctattatgatagaaggaggaagccactatatnttcatgaaggagaaccatgtgttttgaaggtttctcccttaaccggagtcggaagggctcttatagctaggaagttgacacccaagtatctaggtccatatcanaatttgaagaagatagngcctgtagcttatcatatcgccttacctccgagtttatcgaatntgcattctgtgttccatgtctctcaactgagacggtacaacccagatccatcacatatacttgcagtgga

SEQ ID NO: 10802 - DNA, 371 bp, Glycine max
  unsure (1)..(371): unsure at all n locations
agcacctgcgctgcagcttatagatttattatttgatgtgnattctttgttataaccggttacatatattacagtatgagttacagggttttttcaagttgtattaatattagtctaattaaaattagntttctaaattaagagaacctatttcacaatgagaaatttgtattcanagatattcacagagatagttaatntactttctttttagctagcattatattacatataaagtttccttatatgtaagtcaatatattaaatgactataagaaatctggacttataaatggagtaatggatatatgatatagttgtgcattattatgataagttggaacattaataattgacacaagtgataatga

SEQ ID NO: 10803 - DNA, 495 bp, Glycine max
  unsure (1)..(495): unsure at all n locations
atacaagaatgaagctctgataccacttgttagacaagtggcctcagatatcttaagaagggggggttgaattaagatattccaaactgcttccccaattaaaaatctatttcactttntattcaagttatgaattcccttaatgacaatcttcgtaaatattaattcaaataaaacaatttgaatatgaatataaatcaataataaataaaggagattaagggaagagagaatgcaaactcagttttatactggttcggccacacccttgtgcctacgtccagtccccaagcaacccgcttgagagttccactatcttgtaaattccttttacaagttctaaacacacaaggacaatccttcctttgtgtttagaaatcctntacaacaagagactcacagtctcttaatcccttagagaatgagaagaagaagaagagatctctcttanaagagatgggatttacagaatgagcactcaaataattccttatg

SEQ ID NO: 10804 - DNA, 398 bp, Glycine max
  unsure (1)..(398): unsure at all n locations
agctnntatgcaagtcaatttcaagaggcatctcggagatgatcntttacgagcatatttgcgcaaaatctcttgaactaagaagatgtcgtccatcatctttctgttcttaatgaatagcagttgagtttccccaattatatgtctaagcacttaggctattgcggtggccagaattttagacacaatcttgtataacanattacagcaagatatgggtctaaaatggttacctgngaggcctggtcatgcttatgaataacgcaatatagcatggttagctgcttagaattgttcaggtgaaagaatcattaccgcacaaagaatcataccaatgtatttaagcctctgaagataaacatgaagcctctgccaggagcttatgtatcatcacaaat

SEQ ID NO: 10805 - DNA, 394 bp, Glycine max
  unsure (1)..(394): unsure at all n locations
gctcncagagcctggaacaagagaatagatacttntctcttgcaagttggattcatgaaatgcactactgaatatggtgtgtatgttaaaggagaaagtctttcagacatcctcatagcgtggttatatgtggatgacttgttgatagcaagaaaagatttcaatgctatctcgacattcaagcaagagatgaaatctgaatttgaaatgtcagatcttggagaattatcatattttctgggcatagagttcaagaggacaaaggctaggtattttattcaccanagcaaatacacaactgatgttctaaagaggtttcagaatgttgactgcaactcagtttcaactcctgttgaaactagtgctatgctggatcaatcanggctgaaacaat

SEQ ID NO: 10806 - DNA, 381 bp, Glycine max
  unsure (1)..(381): unsure at all n locations
agctagtacanatctttacacttggagtgataacatgcagtcctcttgaacccttaccgcccactctgtcgtcatggtgagactcaggaagcccaacaggtttagccttttgaatgtagtctgaacaaaattcaatggcttattctgcaatgtacctttcaacaatagatgcttccggacgatgtagattctttgtataccctnttaagatcttcatgtatcgctcaaccgggtacatccaccacaaataaacaggaccacaacatttgatttctctgaccagatgaacaattaagtgaatcatgatgtcaaagaaagcatgaggaaaatacatctccaaatggcatagtataattgcggcctcattttccaggtcatcaa

SEQ ID NO: 10807 - DNA, 489 bp, Glycine max
  unsure (1)..(489): unsure at all n locations
gcttctgaggacacaatgcaaggaagctattctcgaactaaatgcttcatatgaaaggtacanttttgtaatttctcaattcagttntcaattctggacgatttcctgttaatttatcctttcacttttggttatagatgacttgctccacggttgaactcactgttcaatangtggagaagttgagggaaatgagtccactttatgaaattgtcaaggaaggtatcaacatcaaggacattcaatgggcacagcactgattattatcaagctctcagaatgcaatgcaagtgatgggaagcaattgtgattgaactccagacgtagctgccactcttgcaattgcagattcttcgaacttgctgattatntagtaatttgtatcttgaggttacattacaattaanaatttaccctgtcagagctatttattangtatacaccatctgtttcaatgattggtagttttgcttgtcagcgatgtttatg

SEQ ID NO: 10808 - DNA, 300 bp, Glycine max
tgcggagatgatggtacagcgggtgaaccacaagcggaagtttcttttggtgaggtagccatggaaaagcagagcgtctggaatgatttcgtaaatctcagaaggctattgggaaatgctggtataaacacgaatgccaagcagatataatattgaatgaggaatgtagagggtcgtgtgaagcaacggtcgaattttccttggttcagtagtgaacgtgctattaatgttaagtgattcgtttgggcacgttcagattgctgtagttgctataattcctctagcacacaaatgcccagc

SEQ ID NO: 10809 - DNA, 400 bp, Glycine max
  unsure (1)..(400): unsure at all n locations
tgcagctagagacactctacacgagccaacctcactcattctaacctatatcaaattcacaattctggttatggtagtcattggtttttctattcccaccacacacacacttaacactcttagttcacacaccacaccatggttaactaacaatatattatgcattgctagtatgttatacctttattgtaanattgaacttcactagtttattaagagaatcattaataataaaataatactccgtatctagatctctagttggtatatagttgtgcattagaatataggttatatgactatatatttaacaataattagttatgatgaatttcattatataacataaacgacatcgtgtctaaggaaaggaaagataatttattatatatattataaa

SEQ ID NO: 10810 - DNA, 457 bp, Glycine max
  unsure (1)..(457): unsure at all n locations
gctaactcgatanatacagctntatcaccgtctacacgcaatgctactgcttgacgtttatctgcatctntatctaccagattcntgaaaacaaatatagacatgcatgtttctttntgtattacttaagcttcagtcagcacatatntatttttctgaaagcaataatgcatcaaagctatcatagggtctgtttggctatatttttttataaaanaattaaaagaataaaataacattaacttctctaataaattaagaataatttatacataagttaaagttaactctntacagaaattaaatgattctatcttatctaanaatgctgngtttgagttttaatttattntatggatgaagtgatttaacttatttatgtggtagaaaatatttcttactatagtgtatgatagtctcttatagatatcgactactcacactaaaaaactattaa

SEQ ID NO: 10811 - DNA, 416 bp, Glycine max
  unsure (1)..(416): unsure at all n locations
catggatgtctgattgagtcctgtcatatatcgagacgctcgaaattgaatgttgaatctctgagccaatccaaacgacaataactttntactcggatgtctgattgtgtcccgtaatataacgagactctcaaaatagaatgttgaagctctgagctaattcaaacgacaataacttttaactcggatgtctgattgagtcctgtcatacatcgagacgctcgannatgaatgttgaagctctgagccaattcaaacgacaataactntatactcggatgtctggatgactctcgtcacatatcgagacgctcgaaattgaatgttgaagctctgagccaattcaaacgacaatnaacttttactcggatgtttgattgagtccagcatatatcatacgctcgaaaatgatgttg

SEQ ID NO: 10812 - DNA, 501 bp, Glycine max
agcttgcttctacagatgatgacaaaaagcccaagagaatgatttcaagattgagtcaacaagattcaagaatcaagagaagtttgatttcaagattgaagagaagatgaattcaagattcaagagaagaaatcaagaagacttcacaagggaagtattgaaaagatttttcaaaaaaaacaaacatagcacaattttgtttttcaatagagtttttctcaaaattttctaagttaccagagtttttactctctggtaatcgattaccagtggcaaagcttgatttcaaaagcttttaactgaatctgcaacgttccaattgatttttaaatggtgtaatcgattaccagtgtaacttaacgttgaaattcaaattcaattatgaagagtcacatcttttcataaaatgctttgtgttatcgattacatggttttggtaattgattaccagtgacaagttttgaataaaaagtccagagatgtaactcttctaatggtttt

SEQ ID NO: 10813 - DNA, 513 bp, Glycine max
agcttgtctaagtccatactatgatttgttcaatttgcataccaaggaagttgggaagttccatataaacttcttcaaacaaatctccattcaaaaaagcattattaacatctaataggagaaggcaccagtttctagcagtagcaacacagagcaaaactctcacagtggtaagcttgacaactagagaaaaagtataagagaaatcgattccagcttgttgagtataccctttggcaaccaatcgagctttgtatctatccacagagccatccattttatatttaactttatacacccatctacaacctatacaatgcttatcaagtggtaagggaacaagtcttcaggtggaatttgttggacaagtggcctcaatatcttaaggggaggggggatgaattaagtcttacaaaattgcacttagaaccttattaaatctcaagtgcccaggttgattgcattcatagcattttgggggctaagaggaattttctccttccttctttggat

SEQ ID NO: 10814 - DNA, 482 bp, Glycine max
tccacttgtatattgcaactgatgcaatcctacctttcatgggtattggatagaagactccaaaaggcttgggctagagctactaaagaaggccctaaggttctcatgaaccttaaggtagatttttgagcccatgggtcaaggttggatccactcttctttgtaaatattaaaataggtttttccttcgtttgggtcttgtattttggccattctagtagtatagggttttagccttgtatttcgaggcattttcagtagtctttgtagtagggattttttttggttttttcatgtattttgtcatgggggtgagcttagctattatagggggtgtgtagctaagctctagcttttcatctcaaggaggtgagcctagctattagaaacgtgtgtgtagcttaactcttactttttttaggaatcttctcaaagaagcttcttaaggaggtgagcttaattattaaaagggtgtgtgtaac

SEQ ID NO: 10815 - DNA, 510 bp, Glycine max
agctttattcaagacaaagaaattatagatattcaagatggatgatcaagacagtctctatagtcttagaaagggtatattaaataggaagggaattccaattgaagtagcaaaaggtttggccaagaattttaaattaaaaagtctttttcaacaaatttactctctggtaatcgattaccaaaggatgtaatcgattaccagtggccaaaactgatttacaacagctattaaaatttgaattcaaagtttgcactatgtaatcgattacacatatatagtaatcgattaccagcagtttctgaacgttttaattcaaattttaaagcttgtaatcgattacacatatactgtaatcgattaccagaagagagtttcagaaaacattctcaacagtcacatctttttgtgtgattcttgaatggctatcataggcctatatatatgtgacttgagacacgaatttgataagagtttttcaaaacaaaaaggtcttatcctcttataaag

SEQ ID NO: 10816 - DNA, 397 bp, Glycine max
tgtaatcgattacagagatacagttttctattaccagagcacattttcaaaaaatattctcaacagtcacatctttttatgtggttcttgaatggctatcaaaggcctatatatatatgtgacttgagacacgaatttaagaagagtttttggagaacaaaaaggtcttatcctattaaaaagcaaatcgtgttatcctcttacaaattccttggccaaattacttgtgattcaataaggaattatttgagtgctcaaattgttcagtctatctctttcaagagagatttcttcttttcttcttcttcattctgaaaagggattaagagaccgagggtctcctgttgtgaaagaattctaaacacaaaggaagggttgtcccttgtgtgttaaaact

SEQ ID NO: 10817 - DNA, 487 bp, Glycine max
tattgaaactattgataagcctcccatggttttctcctgatctaagtgatgctgaagcaaccaaggtttttcaaaaatacctagatgagtgtcttactactaagtgcattatcttggaatcaatgagttcagaactccagaggcaacatcaagacatggacccatatgagatcgtcgaatatcttaagaagatgtacggtggtcaaagcgggaaggctatatttcaattatctaaggccctgtttagatcctcacttgttgcaaatgaaaaggttggaccccatgttcttaagatgattgatctcatagaacaacttgagaagttggggtggactcttgggaaagagctttctcaagatttgattctacaatcactttccgatttattttcacaatttattgtgaattttaacatgaataagatgaattgtgacttgcatgaaatgcttaatctgctaatttgattatgagaattaaattgcttttg

SEQ ID NO: 10818 - DNA, 497 bp, Glycine max
tgcaatcatttggtataaaattcacttagtcttgtggctctacacaagggtgtctgcaaccttctaaaatagtatctccttcatcctattaaaatcaaaatgacaatgttaaatgctattcctaaaaagatccctccaaccaaaacaggggataaacagagaaggaaggtaaatgcgagaagaaaagaatgtagtaattgtgaaaacagcaaattaagtaccaatgaagtgatgtcaggccttgtgtagggagtaggacaactagaagccaaatcagcaaatctcaactatagattcctatccatgtaccttagtaacttttttaatttatagattctttaaaaaaaattcatggttagtggggttctactaaatgttgtcatgacaagagtatattcattagacatcaaaatggaagttatagtgccctttaactaacaaaattatttttccctgatatttctctttgatctttctaaattgtcaaatctaaatgt

SEQ ID NO: 10819 - DNA, 469 bp, Glycine max
tatgctgcaaacatctacaacagacctccttaaccttagcagtaaaatcagccacaacagaacaactatgacctctcaagcaacaggtgcaatcccagatagaggaatcatcccaaccttagatggtcgaatccttcacaacagcagcaacaacaacagccttattttcaaaatgttgttggcccaagcagaccatgcgttcctccaccaatctagcaacaacaacaacaacaacaacaacaacaataacaacagccccagaaacagcaaacagttgaggcccctccgcaaccttcccttgaagaacttgtgaggcaaatgactatgcaaaacatgcagtttcaacaagagaccagagcctccattcagagcttaactaatcagatgggacagtgggctacacaattaaatcaacaacagtcccaaaattctgatagattaccttctcaatctgtccaaaatcccaaaa

SEQ ID NO: 10820 - DNA, 497 bp, Glycine max
agcttgtttctaaacactcacttatttccaacagctgatttgcctttggggagttccaaaagcttctagacattgttcttcggaaactggtccagctctacttgcattgctttgacccaatgttcatcaaacatagcatcatctatgtgttttggctcaatctttgatagtagcactgtatgcttgagagagttccttgttttcactttgtccttaggatcaccaatgatttgaggctttggatgatgttttgttagcaagggtcctattggttctctgacttttttaggttgatcatccactggtctgttggacgcaagctcatcttggctagacgcagaagaacacttgacgatattttctattttcatctctggaaaagaattatccagctctaacattgtagtgtcaaacttgttgtcattaaatcttacatgaatagcctcttctacaataaaggttctagagttgtacactctatatgccttggacgattt

SEQ ID NO: 10821 - DNA, 511 bp, Glycine max
agctttccacattgaattcattacctaatgtcatattagatgggaattgggtatcttaacataagaaatttcagatggactttaatcctaatcccacagccgaccttttcacgagatctctacttaaccctttggttaaatgatccaaattatgctgagttctcacaaactccactgatatcacaccatgcatgattaactcccgaaccatgttgtgtctaacacccaagtgtctagacttcccattatacacttgactatatgccttagccaaagtagtctgactatcgcacctgatagacatgggaggtataggtttgggccacaatggaatctcatagatcagatttcttagccactcagcttctttaccagctgctgctaaagctacaaattcagattccattgttgaatttgtaatgcaggtctgtttcttggatgcccaagagatagcacctcctccaaggaggaatacccaaccacttgtggatgaataatcttccatattggt

SEQ ID NO: 10822 - DNA, 523 bp, Glycine max
ttactatgcagagaatatccaaagaaaatatcttcatctgacttagcatcaaattttcctaagttatcttttccattattcaatacaaaacatttacaaccaaagatatgaagatgtgagatgtttggttttctgccattgaacaattcatatggagttttctttaaaatgggtcttattaaagccctatttaaaatgtagcatgcagtgttaatggcttcagcccaaaagtattttggaagaggagtatcatttaataaagttctagcaatctcttccaaagatctatttttcctttcaacaacaccattttgttgaggggttcttggtgcagaaaagttatgctcaatcccatgcttatcacaaaataattcaaattctttattttcaaactcacccctatgatcactcctaatagatataatcttgagatttttcttattttggatgatttttgcaagttttctaaatgcttgaaatgcatcattcttatgagtgataaaaagagtccatgtgtatctag

SEQ ID NO: 10823 - DNA, 505 bp, Glycine max
agcttcacaagcaagcttccatcattaccaaacttttgtacgcacttctactggggcaaccccattctctttggtatatgggatggaagctatgctccattttgaggtggagattcattctttgagaattctagcagagtcaggattggaagaagtagaatgggcccaggcacgttttgactagttaaatgttattgagggaaattggctgccataagtcatgggcgactatatcagagtagaatgaaaagtgcattcgaaaaaaacgtgcgcttgtgtgagttcaccgagggggatcttattttgaagaaaatatcgcatgttcagaaagatcattgagggaaatgggccctgaactatgaaggaccttttatggtaaagaaggctttctcgggtggagcattgttacttatgaatatggatgatgaagagctgcctttgcctgtgaattctgatgttgttaagtgatactatgcatgatattggggacagtttgaaagttcac

SEQ ID NO: 10824 - DNA, 487 bp, Glycine max
agctttgatgatgtctatattgagtcacatgtttgtcatcatcaaaaagggggagattgtgaatgtatgtatacatgattttgatgatgtcaaaagaagaatcaaacaaggctcatttgcttcaagattaatacaagattgttttaacaaacaaagccttgattcaagctttcttcaagatcaagccttgcctcacaaggaaaggtttcaagtcatccaagggacatgtaatcgattaccaatggttcgaaagtgtgtaatcgattacacatcatatgtaattgattaccagagactctgaacgttgggaattcaaattttaaatgaagagttacaattgttcaagaaaaacaactgtgtaatcgattacaccaattctgtaatcgattaccagagaggattttcaaggaatatcgccaacagtcacatcttattatttggattttgaatggccatcaaaagcctatatatatgtgtgacttgggac

SEQ ID NO: 10825 - DNA, 473 bp, Glycine max
agctttgagttttatattttatttgggggaagattatcattttctcacttacttttatttgtaatctttgcttcaattttcaggccttcaacagatgaacgaactgcaatatagaattcttatcagaagaggtacaaatagagctaatacaatggtaagacatcaatcagataagttactccaccacacacactaacatatttgtgaggagaaaaaaaaatgttcccttacctgaaatggcaggcatgagtgcaccaacacaaattatcatgcaagcacccagtaaaacaaaaataagcaaaaccgtttttgtacctcttgtgtttctcaatgaatctttttaaaggcgagggtggtatgcttctatttgaggaaccaggttttgtgatatgtagaaagcttcctcatcacaaacttgatgattaagaagcaaacaaaattttgcatttctgcaaaggtgtgaatacaaaaca

SEQ ID NO: 10826 - DNA, 491 bp, Glycine max
tcagaggttgcttgatgagcttaacgacaatactgtcattgtgtttgttaacaccaagaggaatgcggatcatgttgccaagagtttggataaggaagggtatcgcgtgactactttgcatggagggaagtcgcaggagcagagggagattagtcttgaagggtttaggaccaagagatataatgttcttgttgctactgatgttgctggacgtgggattgacatacctgatgtggctcatgtcatcaactatgatatgcctgggaatattgaaatggacacgcaccggattgggcgtactggtcctgcaagaaagacgggtgtggctaccacgttcttgactcttcaggactctgatgtcttctatgacctcaagcagatgcttattcaaagtaacagtcctgttccacctgaactggcaaggcatgaagcttcaaaattcaaaccaggaactatttcagacagaccacctaaccaaatgacactgtttt

SEQ ID NO: 10827 - DNA, 501 bp, Glycine max
agcttgaaagaagaatatttttaattaatgtaaataaattaaaaattaagtggcgataatgaaggttgattaatggttatctagatttcataaagttagaaaagggttaattaaattataagagtttaaagtggagaacatttttgtaaataactatacaactagtttaaaaatagaattttagtttaattagttggtgactaattaaagtgtttggttatatgatgtagaataattaaaataagttagagttgtaacacagtgaaaaattacaactcagactgacagagaaattgtgttgtgtcatttgtgtatgtatgaatttaatttcaatacttgtatgtttttaattatagaatttgcgtgctatatatgtctatacttagtgtaaataatttgtttagtctaccttgacaaggatatggaaactacttaacaaaaatttcatctgtaacaaaaatacgttgtacactgagtgacagtgtaatttaactctgtgtg

SEQ ID NO: 10828 - DNA, 434 bp, Glycine max
  unsure (1)..(434): unsure at all n locations
tgaagcccttaaaattgagagaaatgtagctttttgctgtaaactgtcacatgagatttgaacatctactggatgagagtactattgaagtgaacagtcccagaaatgctttcctgcatctgatcaggaagataaatccggatatttttactcagatcattattaatggatcatatgatgcccctttctttgccacacggtttagggaggcactcttccattattctgctatttatgacatgtttgacactgtcataactagtgaaaatgaatggaggatgacgattgagagtgagcttttgggccgggaggttatgaatgttatagcatgtgaaggntctganagggntcaaaaacctgagacatacaaacaatggcaggtttggaataccaaggctggttttaagcaggtccctctgaatgaagaattaatg

SEQ ID NO: 10829 - DNA, 503 bp, Glycine max
agcttgcaaaccattccattctccacacatattactagctccatcatatccttgacctcatatattttgaatgttgagattatgatgagacaatattgaacatatcccatgcttaagaatggatgatgtagtatcttgcatatgtatcatatccaaaaaatgctccttaacatatccattcttatcaacaaatctaagaactagagttgtttgttctcttttagattcatcatgggcttcatcaacaatgaaacaaaattttgcattaccaatctcttcttgaatttcatcttgcacctttctagcaaagacatatagaatatctttttggatagtgagtgaaatgtatcttacattttgagggacgttttccgagataatttcatctatttccttattataagaagctaagagctttatcatttcaagaaagttaccacggtttccagatcccacactttcatcatgtcccctaaaaatgcaagcttgaaatgtcaaccatt

SEQ ID NO: 10830 - DNA, 511 bp, Glycine max
ttcctatcttaaagatttgtttggtaaatttaacaaaggaaaaagtgatcttaatcacatgcttaatgtgcaaaagcatactacaaataagaccgacttatggtataacaagcaaaccaccttttcaaagaaaacaaagtttgtatcctcaaaagaggtgaacccaaacaaggtctacaagtgaggaacacagtgaattctaggagaaatgcaaagacatgtcattattgcatgaaaagacttctttcaaagcaaaaaacattttttctacttcaaaaccctttaaactacttcacattgatttatttggtccttctagaactatgagtttagatgaaaattactatggcttagtaataatggatgattactcaaggttcacatgactttgtttttgaaaaccaaaaatgaagcttttaatgcttttcgcaaacttgccaaggtgattcaaaatgaaaaagtctgaacattttttcacttagaagtgatcatggaagtgaatttcaaaatg

SEQ ID NO: 10831 - DNA, 508 bp, Glycine max
agcttggtgctctttgcattcagtgtttacaggataaggtttgtgctctacacttccttgctagtgtgggtgcattttgggaactgcatattgcacatgacggtttttgttaaccaccttagttattgtaggttcattcaattcgtgaagcagctgctaacaacttgaaacgccttgctgaagaatttggtcctgagtgggctatgcagcacataattcctcaggttcatctatttacttaatttattattaacgaaatgatacaccaacatatgtcaacattaattcgtctgtgtgggtttttgtgcatgtcttgaaatatatgtttgctatatgctattaccttttctattctcccaagtgtaacttcagaagtatctatatggaatgtgtggaacaggttttggagatgaacaacaacccacactatttgtatcggatgactattcttcgggctatctctttgcttgctcctgggatgggccctgaaatcacttgttcaaacttg

SEQ ID NO: 10832 - DNA, 492 bp, Glycine max
tgttcaagccataaatcgacctctttatttttataccaagtccttattaccacgaatacaaaaacctttaggttgttgcatgtatattgtctcactcaaatcaccattcagaaaagttatctttacatccatttagtgcaactccaaatcgaaatgagctatgagggtcataatgattctaaaggaatcctttgtcgatataggggaaaaagtctctttaaagtcaacaacctcattttgcataaaatcttttgtcactagtctaaccttaaatctttcaatgttaccatttgagtctttctttgtcttaaagacccatttacaaccgattgccttataattctcaggcaacttaactagctcccatacaccattaactgacatagattgcatctctttattcattgcatgccttcacattttttttactaaaggtaagaaacaacttcatgataattcttttggatcaataatgtctccaatgtcgtatgc

SEQ ID NO: 10833 - DNA, 494 bp, Glycine max
agcttcatgatgatgaatcttgttgattcaagtagttttgatgatgacaaaaagcccaaagaatgatttcaagattgagtcaacaagttcaagatcaagattaatttcaagtttcatgagaagaaatcaagaagattcaagaatcaagagaagtttgatttcaagattcaagagaagaaatcaagaagacttcacaagggaagtattgaaaagatttttcaaaaaacaaacatagcacagttttgttttcaaaataatttttctcaaaattttccaagttaccagagtttttactctctagtaatcgattaccaatggcaaagtttgatttcaaaagcttttaactaaatttgcaacgttccaattgttttttaaatggtgtaatcgattacaatatattggtaatcgattaccagtgtatctgaacgttgaaattcaaattcaattgtgaagagtcacattttttcataaaatgctttgtgtaatcgattaca

SEQ ID NO: 10834 - DNA, 500 bp, Glycine max
agcttaggatctactcagttaaaaaatttaaagtgtgcatcaactagccaaaaccattaaaggaattcatagaagacatcacataagccatatgaatatgaccacatccacaaagaaattgagctagttataattacaaagtatgaaatgagacaaggcaataatcatgtgattgattataaggcctaagatgtcagtccgaactatacacaacttcctgctctcactacagagcatagggaccaaaacaagacaaactaatggagaggcaacattaaaggttggccagatagttaatacctcttattaatctctggttcttaaatcataatgttgattgagccttctgattcttaatcataatattgagcaagccttttgtgcctttctcttcttttttctttagctttgggggttgaagaaccactttgatagtgggcgcaaagacaactttcacattctgttattaactggggcacatgaaaacttgtgatataaac

SEQ ID NO: 10835 - DNA, 372 bp, Glycine max
tgtcccatgcttcttgggccgtaggcgcttttgatattttgtcaactgtagcttcatccaccgattgctatatgagaaacagagccttctcgtctctctttcttgactccttccacctttcctttacaccttggctgaactaggcttcatcttgcttcacaaacccattctctacgatatcccacacatctagagctcctagtagcgccttcatgttgatactccaattatcatagatgatctttgtgatcatctgcattcggaaaggaaaacctccattcgccatctttcgaggatcttgaacctttgataccactttgttggaaataaggctctttgtgttttcgaaaagggtttatgaatattggagac

SEQ ID NO: 10836 - DNA, 523 bp, Glycine max
tgggaactacctaatactcagctttggaaaatgatttctatacaaattttatttttataaagcgactaacaaatatggaactgaatctcattttgacattttaactcttccctaaattccaatatagatttgtgatttatccaaaactatttgtgtaaacatatatattatacttagaattatatttttaatagttctgtacacttattagtttttatgcatataataaatatttttgtagaaagtgtctaggtctattttgaatttgtaggttgagttctttgtgaaataaaataaatattaaaagaatgcacttaatgtttggatctattttactcaaaatccatgttgtaaagacactttcttcatcaactgtaagtctaagtaaaaaggtgttatcaatcaatggttttgaactgtcattgaaaagttgtccactttctacgacggtcaattcaatattccatgctaaccttgatgttaaaagtccttccaaacccatggttgaaatcctttttttttc

SEQ ID NO: 10837 - DNA, 511 bp, Glycine max
tccttgaaaagattcctaaaaaagctagagcttagttacacacacctatctaatagctaagctcacctccttgagatgagaagctagaacttagctacacaccccctataatagctaagctcacccccatgaaaaaatacatgaaaatacaaaaaaaaatccctactacaaagactactcaaaatgcctcgaaatacaagactaaaaccctatactactagaatgaccaaaatacaaggcccaaacgaaggaaaaacctattctaatatttacaaagataagcgggctcatacttagcccatgggctcgaaatctaccctaaggctcatgagaaccctagggccttcccttggatctttggcacaatctacctggagtcttctatccaatgcccttgcggggtaggattgcatcacagctgtggtctttgccttaaagatttggaggcactatttatatggtactcggtttgaagttttcagcgatcacaagagcctcaaatacttgttcg

SEQ ID NO: 10838 - DNA, 506 bp, Glycine max
tgtgcatccaataccctgatgaggatgtcccgtatgttcttaaaactggactgattcatttgcttccaaagtttcatggccttgcaggtgaagacccgcacaaacatttgaaggaatttcatattgtctgctccaccatgaaacccccagatttccaagaggatcatatatttctgaaggcttttcctcattctttagagggagtggcaaaggactggctgtattaccttgctccaaggtccatcacgagctgggatgacttgaagagagtattcttagaaaaaattttccctgcttccaggaccacaaccatcaggaaggatatctcaggtattagacaactcagtggagagagcctgtatgaatactgggagagatttaaaaaactatgtgccttggtaacccaactggccttgaaccagaaatatgtacttgttgcaagggtcaatggtttgtgcttctctactgaccaccatacagacctttgcccttccatgcagcaacct

SEQ ID NO: 10839 - DNA, 471 bp, Glycine max
agcttccatcaggagagatttagaggagcacgaaattttgtgctctaaaagagctttgaaatctgaagtttaatattcaaatgatcaaagttgaaaaaatgcacacacattacctctatttatagcctaagtgtcacacaaaattggagggaaatttgaatttcaattcaaatttcacttgaatttgaaattgaatttgtggagccaaactttggagccaaaatttcactaattatgattagtgaattttagttatggttcagcctactaatccaagatcaattccaagattctccactaagtgtgcttaggtgtcatgaggcatgaaaagcatgaaggacatgcccaaagtgtgactatatgatgtgacaatggggtgtagtaagcaaatgctcacctccccctttaaaatttaattggattgggcttctaccaattcaattaaattttatttcccaacacacacatcaa

SEQ ID NO: 10840 - DNA, 503 bp, Glycine max
tggattggctcgactcattttcacctctattgatttttggcacttacgattaggccatccatctaataaagttcttgatcaagtatgtaccaactttacttatgtcaaaataaataaaagtagtgtttgtgatacatgccatttagcaaaacaaagcaagcttactttttcttctagtgttactggtacacgcaagccttttgaattagttcacatggatatttggggaacccttgctaccccctctttgcatggacataaatattttcttactgtggtagatgattttacaaggcacacttggttggtcctcatgaaattaaaatctgaaactagaaacctcattgaaaactttattcattttggttggaatcaatttaatgctatttgttaagactattatttcaaaacatggggcctaattttggctattcccgaactctattaaaaaaatatgggatttttacataataatttaatgtgtttcacaaccacaaacaaaa

SEQ ID NO: 10841 - DNA, 511 bp, Glycine max
tgtgagaggattcttattagagatattggttgatatgcaaatgaaattactcatttctgtgctgctctttattctttaatttagagcacaactcgttcaaatctttaatgctttattactgcagtatattttatatcttaacattatgaaatgctttgataaaatgttagcaactgttaagtgaaaatgttcctctttttgtaatacagaattcatggcctcaaatctggaaagatgttgaaagagttccgtggccatacatcttatgtgaatgatgcaatttttacaaatgatgggagtcgtgttattactgcctcaagtgactgtacaatcaaggtctgttacttggcattgtacttgaagttccttgttcatttggtgttcatatgagatgtctttttcctccgtattgtaagtctgggatgtaaagactacagactgcataccaacttttaagccccctcctcctttaaaggtgtgtcttccaaaaatttactattatggggttttg

SEQ ID NO: 10842 - DNA, 507 bp, Glycine max
agctttggctgattcaaaatggtttaatgcaatgcaacaagaatatgaggcactgatgaataacaagacctgggatttggtttctcttccacccaatagaaaagcagtgggtttcaaatgggtgttcagagtcaaagaaagtgcagatgggactgtcaataaatacaaagctagactagtagcaaaaggatttcatcaagtggctggttctaatttcaatgaaactttttcccctgttatcatacctgttacggtaaggttgattctcaccttggctctaaccaataagtgggaactctttcaacttgatgttaacaatgccttcttaaatggttttctagaggaaaccatctatatgcagcaaccccctggatttgaaaaccccaatacttctcttgtttgtaaattgaataaggctctatatgggcttaagcaagcaccaagacagtggtttgatagactaaaatctacactcttgcatcttgttttttttgcaagcaagtgatc

SEQ ID NO: 10843 - DNA, 489 bp, Glycine max
agctttattcaagacaaataaattaaagatattcaagatggatgatcaagacagtctctagagtcttaggaatggtatattaaataggaagggaattcctaattgaagtagcaaaaggtttggccaagaaatttaagttaaaaagtctttttcaagagatttactctctggtaatcgattaccagaggatgtaattgattaccagtggccaaaaatgatttacaacagctattaaaatttgaattcaaaatttgcactgtgtaatcgattacacatatatggtaatcgattaccagcagttattgaacgttttaattcaaattttaaagcttgtaatcgattacacacatactataatcgattaccagaggagattttcagaaaatattgtcaacagtcacatcttttcatttggttcttgaatggccatcaaaggcctatatatatgtgaattgagacacgaatttgctaagagttttataacaaaaa

SEQ ID NO: 10844 - DNA, 500 bp, Glycine max
taacaaatacccaatcaccttctcagaatctaacatcatgtctattgttattaggaaaatgtttcatagtatgatgagctttgataagtttcttcctaaaatcagcgaatacagcttcgcggtcagcaagaaagtcatcctcggcatcaaggttggatgttcccgtcacataatgcggaatattgggaggtttcttcccaaaggtgatcttgtaaggtgacagccccatgcctgaatgaatggatgtattatacgaccattctgcccatagtaagaattttccccaggttgaaggtcgaggatgaacaaaagctcccaaatactgttctattatgcgatttaacacctcagtctatccatggatcttgccaacaatgtgcatgaagagctgcgccaccattgaagctatgtaatgggtttggagggtaccaaagtgaattccctttgaaaaaccgtctatgacgaccaagatcacagtgtgtcccccgaaaactggcaat

SEQ ID NO: 10845 - DNA, 503 bp, Glycine max
agctttggagtttccaagtgccaattcgtcttcttctttagtccagtcttcttctggcttcaattcttcagtgggctttccttctgtgtccagcatcttgggatgttcccagcctttgatgacagctttccaggttctgctatccagtgatttgaggaaggccaccattcttgctttccaatattcatagttgcttccatcaagaattggtggtctgttcactggtccgccttctttctccatgttcatcagaatttatcaccctagatctcactctgtgatttcgagtgttggctctgataccaaatgaaattctgataccaggggacagatgtcgtaccggatgtcacgacatcacgcttcagaacatgcagattatatgtgtccgtatgaacagattaaacaagtaaataacataagagaattgtttacccagttcggtgcaacctcacctacatctgggggctaccaagccagggaggaaatccactctcaatagtgtt

SEQ ID NO: 10846 - DNA, 497 bp, Glycine max
agcttaacaaaaggcatgctaagtgggtggaattcctagagcaattcccttatgttatcaaacataaaaagggaaaaggtaatattgtagccgatgctctttctcggcgtcatgcattactttctatgcttgaaacaaaattgattggtcttgaatgtttgaaaagcatgtatgaaaatgatgaaacttttggagaaatttttaaaaattgtgaaaaattttcagaaaatggtttctttagacatgaaggctttcttttcaaagaaaacaaattgtgtgtgcctaaatgttctactagaaatttgcttgtttgtgaagcacatgaaggaggtttaatggggcattttggggtccaaaagactctagaaacattacaagaacatttttattggcctcatatgaaaaaggatgtgcagaaattttgtgaacattgcattgtatgtaaaaaggcaaagtctaaggtaaaacctcatggattgtatactccattgccaatt

SEQ ID NO: 10847 - DNA, 458 bp, Glycine max
tataatatatcgatacgctagaaattaaatgtcggaaactctcgggaaattcaaatggtcataacgtttcacacggatgtccgattcgggcacataatatgtcgagaggctcgaaattgaacaacggaagctcttgagaaatttaaatggtcataacttataactcggatgtctaattcaggcgcatcacatatagaggcactcaaaattgaacaacggaagctctcgagaaattcaaatggttataactattcacactgaggttcgattcatgattataatatatcaagacactcgaaactaaacatcggaagctctcgataaattcaattggtcataacttttcacacgaatgtccgattcgggcgcataatatgtccacacgctcggattttgaacaacggaaagcttcgggaaatttaaatggtcataccttttcacacctgaagtccgattca

SEQ ID NO: 10848 - DNA, 424 bp, Glycine max
tataatatatcgatacgctcgaaattaatttttggaaactctcaagaaattcaaatggtcataacttttctcacggatgtccgattcgggcgcataagatgtcgagaggctcgaatttgaacaacggaagctcttgagaaattcaaatggtcataacatttcacacggatgtccgattcaagcttataatatatcgatacgctcgaaattaaacgtcggaaactctcgggaaattcaaatggtcataacgtttcacacggatgtccgattcgggcacataatatgtcgagaggctcgaaattgaacaacggaagctcttgagaaatttaaatggtcataacttatcactcggatgtctaattcaggcgcatcacatatagaggcgctcgaaaatgaacaacggaagctctcgagaaattcaaat

SEQ ID NO: 10849 - DNA, 502 bp, Glycine max
agctttactatgcagagaatatccaaggaaaataccttcatctgacttagcatcaaattttcctaagttatcttttccattattcaatacaaaacatttacaaccaaagatatgaagatgtgagatgtttggttttctgccattgaacaattcatatggagttttctttaaaatgggtcttattaaagccctatttaaaatgtagcacgcagtgttaacggcttcagcccaaaagtattttggaagaggagtatcatttaataaagttctagcaatctcttccaaagatctatttttcctttccacaacaccattttgttgaggggttcttggtgcagaaaagttatgctcaatcccatgcttatcacaaaataattcaaattctttattttcaaactcacccccatgatcactcctaatagatataatctttagatttttcttattttgaatgatttttgcaagttttctaaatgcttgaaatgcatcattcttatgagtg

SEQ ID NO: 10850 - DNA, 404 bp, Glycine max
agcttgaatcggacatccgtgtgaaaagttacgagattttgaatttctcaagagcttccattgttcaatttcgagcattcttcccttttataagcctgaatcggacattcgtgtgaaaagttatgaccatttgaatttctcaagagcttccgttgttcaatttcgagcctctcgacatcttatacgcccgaatcgaacatccgtgtgaaaagttatgaccatttgaatttctcgagagcttccgatgtttaatttcgagcgtatcgatatattataagcttgaatcggacatccgtgtgaaaagttacgagattttgaatttctcaagagcttccattgttcaatttcgagcctctcgacatcttatacgcccgaatcgaacatcccggtgaaaagttatgacc

SEQ ID NO: 10851 - DNA, 493 bp, Glycine max
agcttcatgcttaagtatgtatggcaaaacttcattattattgttcaagacatacaagtgagcttgtaacaaatcttttagacttggagtgatcacatgcagtcctcttgaacccttaccacccactctgtcatcatgccgagactcaggaaggccaataggtttagccttctcaatgtattctgaacaaaattcaatgacttcttttgcaatgtacctctcaacaatagatgcttctagatgataaggattctttgtatacccttttaagatcttcatgtattgctcaaccgggtacatccaccacaaataaacaggaccacaacatttgatttctctgaccagatccataatcaagtgaatcatgatgtcaaagaaagcaggggaaaaatacatctccaactggcatagtataatttcggcctcattttccagctcatcatacttgacaggatcaacgactttgctatatatggcatggaaaaaaaagcac

SEQ ID NO: 10852 - DNA, 427 bp, Glycine max
tcacgatatactacgggacacaatcggacattcgagtaaaaagttattgtcattttaattttcttagagcttccgttttaattacgagcggctcgatatattacgggactgaatcagacatccgaggaaaacgtttttgtcattagaatttgctcagagcttttgttttcaatatcaagcgtctcgttatattacgggacttaattgtacatctgagttaaaatttaatggggtttgaatttgctacgaccttctctttccaattacgagcgcctcgatatactacgggacacaatcggacatccgagatataagttatttttttttgcatttgctcagagcttatgttttcaatttcgagcatctcgatatattacgggacttatatagacatcccagaaataaattattgtcctttggaatttgc

SEQ ID NO: 10853 - DNA, 395 bp, Glycine max
  unsure (1)..(395): unsure at all n locations
agcttgtgcctcttcacgtctggaatatgaatatcatatagatccaaagacccttaggtgctttgctgatggcttcttcccgttccaagcttcaattggagtcttgtcttttacagacttagttggacatctgttgagtatgtaaacagcaatgtagactacttcagcccaaaatgtgttaggtagtcccttctccttgagcatcgatctagccatttccataactgtgcgattttttctctcagacactccattttgttgaggagaatatgcgactgtaagttttcgctcaatgccttcatcctcacaaaatctttcaaacttgcgagaggtgtactcttttccgtgatcacttcttagtacttttatccattttccactntgatttttcagca

SEQ ID NO: 10854 - DNA, 343 bp, Glycine max
tcatgaacttggcattactgctcttcatatcaagctccgcgccacgggtgggaaccagaaaaaactccgggtcctggtgctcaaacagctcttcgtgcccttgctcgttcaagaatgaaaattggtcgtataggtatttgccttcactttatttgcccattgtcatgtttttatgtgttggctgcatattttccagggtgtaacatattgtgttgaagcatttattttcttggttaatctgaagagtcagtgtttatctctccctttcgattgcagctttgttttcttattgatttcatttgaatggcatgtactgtgaagtacttattaatggttcttgatt

SEQ ID NO: 10855 - DNA, 312 bp, Glycine max
tactcggatgtctgaatgagtcccttcatatatcgagacgctcgaaattgaatgttgaagctctgagccaaatcaagccgacaatatctttttactccgatgtctgattgaggcccgtcatatatcgagacgctcgaaattgaatgttgaacctctgagccaattccaacgacaataacttttttctcggatgtctgaatgagtcccgtcatatctcgagacgctcgaaattgaatgttgaagctctgagccaattcaaacgacaataactctttactcggatgtctgattgagtcctgtcatatatcgaga

SEQ ID NO: 10856 - DNA, 358 bp, Glycine max
agcttatctccagcatagtcaacatcacagtagcttgtgagtccaaaatctttccttcttttaaagcatagaccaaggttataagttccaataagatatctaaaaatgcatttaataacagataaaaggactttccttggttctttttgaaaccttgcacataagtaaacactaaacattatatcaggcctatacgctataaggtataacaatgatccaatcattgctatttattgggttttgtccaacttttttagattcttcgtccaaccctaagtatctagttggatgtataggtgtctccatttcttttgcattgtccacgttgaacatatttagtaagtctttcatatacttg

SEQ ID NO: 10857 - DNA, 390 bp, Glycine max
ggatcttcttcatcaacggagtcctttgcttcttgaagttcaatggaagcggaatggagaaggaagaaagatgattggagatgccacttcaaggagaagatgagtcaagaacaagctcaccaccataagaagccatggataaaaacttgaaggtaggagaagatgagtggagggagaaggagagaaggagcacgaaatttagttcctcaaatgaggtatgaactttgaagtgtaattctcaaatgatcaaagttcaaaaaatacacacatatggcctttatttatagcctaagtgtcacacaaaattgtagggaaatttgaatttctattcaaatttcacttgaatttgaaattgaatttgtggagccaaaatttcactaattatgatta

SEQ ID NO: 10858 - DNA, 449 bp, Glycine max
  unsure (1)..(449): unsure at all n locations
agctntctattctaatatagaaatccatgaatgtaccttaatgtctgaagtttatgggattaagatggtcattgaccaatccctattttatgatttaacaaaattgcctagtgaaggtgtaccttttgagggtgcattgattgatgaatggaaattctatttctctgtgcatgatgcctgccggttggtttgcaccaatcaagcggatatgaccggaagacttcttgtcagttcattggcttttgagagccgcatcctccattaccttattgttcgcatcttactccctagatcttcaaaccttgctcaggtttctgaagaagatctcattgtcatgtgggcctttcataaaggtttacaaattgattgggcacaccttgntagatatcgcatgcataaggcatngcgaatgaatgccccnttgccttatcctcatcttattactcttt

SEQ ID NO: 10859 - DNA, 393 bp, Glycine max
  unsure (1)..(393): unsure at all n locations
tgaggatagagacttcccaagctatntatcttctctctcatattgctctttctcactctaagaagtggattcactcttttgtcttggatgataggaatgaaggctcctacccttatttatactactccacctctacaatgaatggtggagattacttgtatcttatggtggagattaattctctagaatgcttcacacattctatgagtctctacactctgctactcccttccatactctntcataaggttctagaaggttccacacatctccagaatattccagaggtttctacattcttccacaagcttctagagagttctacactactctagagttctctaggacgttctagaaaattctacacttttctagaaagctctagaattttct

SEQ ID NO: 10860 - DNA, 446 bp, Glycine max
  unsure (1)..(446): unsure at all n locations
tgctcaccactatcagaggagaaacctttttgttgtttcatataaacctcctcctctaaatcaccattaagaaaagttgttttaacatcaatttgttgcaactcaaggtcaaaatgagcaactaatgccaagattatacgaagagaatctttcttagatactggagaaaaagtctctttgtaatctattccttccttttgagtaaatcctttagcaacaagtcttgccttgtatctctcgatgttgcctaatgaatcccttttggtcttaaaggcccatttatatccaatgacctttgccccattatgcaactctacaaggttccaaactttgttactctgcatagaattcatctcatccttcatggcagtcataccataaattgactctttacaactcatggctttgatcaaaagttcaggatcattntcagctncaatattata

SEQ ID NO: 10861 - DNA, 343 bp, Glycine max
tgggcaaatccgaggactggtgtacggaggcagcatcttctctcaattgtagtcaaatggatattccattgtcttaccttggaattcctgtaggggtcaactctaaaaataggtctgtgtggcaccccattattaccaaatgcgaggctcaacttacgaaatggaagcaaagaaatctatcaatggggggtagaataaccctcattaattcagtcttaacagccttacccatatatttgctatccttcttcaagagtcctaagctagcggtgcagaagattacatctatacaaaggatattttgatggggcaacctccaagactccattaagaatccttgggt

SEQ ID NO: 10862 - DNA, 436 bp, Glycine max
agcttatcttgattgaatgtagcattttacttgtctatatttctaaattatcatttctgcaaacgactcattcagctctgacattatagtgtttgtcttattgccattaaatcttacaggaatgtccttttccataatcaaggttttagagttatacactctatatgccttggataattgagagtattcaagtaagaatccataatcacatttggagtcaaactctttaaagttatccttggtgttcaaaatgaaacgttgacatccaaatgggtggaaataaaaaatattacgcttaccttcctttcacaattaatagggagtcttctgtaagattgacctaatatagactcttgtatgtaaaaaacaaacagtgtgatcgacgccgtactcgaatcaaataaacatgataatgcagtaactatgaagtgatcct

SEQ ID NO: 10863 - DNA, 279 bp, Glycine max
gtcattctcaaaccctaagagtaggtctcataaaccttctcttgtattagcctatatatgaatgcactctttatgtccatttgatatagccgtcatttaggatgagcgaaaaaatcataataaaatgcgtattgcctgtagcaagcaacatgagcataagtttcactatagatgatgccttacaactgtgagtaaccttttgcaactaaccttgccttgcttcgtacaaccttacatgcctcggtcaacttgtttcgaatacccatgtagaacctccta

SEQ ID NO: 10864 - DNA, 471 bp, Glycine max
  unsure (1)..(471): unsure at all n locations
tctaaactttgtacaagaatgaagctctgataccacttgttatacaagtggcctcagatatcttaagaaggggggggttgaattaagatattcgaaacttttctcctaattaaaaatctatcttactttttacttaaggtatgaattcccttaatgacaatcttcttaaatattaattcaaatgaagcaacttgaattatgaatataaagcaataataaataaaggagattaagggaagagaaaatgcaaactcagttttatactggttcggccacacccttgtgcctacgtccagtccccaagcaacccgcttgagagttccactaacttggtaattccttttacaagttctaaacacacaaggacaacccttcctttgtgttagagattcttacaacaagagactcacagtctcttaatcccttagagaatgagaagaagaagaggaacanatctctctagaaagagat

SEQ ID NO: 10865 - DNA, 420 bp, Glycine max
cacgcttatatctatgctaaaaccctcaatatttctgtcataaccgcatgggtgcgcgacatatacgagactacactctctaatctcccttactatgctgaccatggagtagcggatgactttcttcagatcgcctatgttagtggatagatattgactcacaagaaattacataatctttcttagatgtaacgcaaatacacctggaccgctttcttccttttccgacacacctacacacttttctaaattatgaaaacatacacaaactttcttagatatgatgcagctatgtgagagaagtcatacgcaacaactattgagtatttttcatcaaaaacaacgcggttttgctcctttgactataaaacatgtttattaaaaaaatatttctgcacaaaatgcaaacaagttctcaca

SEQ ID NO: 10866 - DNA, 435 bp, Glycine max
agcttcgtcatcatcatcaatttcatacacttcagtattattattgtcaccatcaccatagacggagctacaaaaattgtgactactgtccatctctaacattatatcgtccaacttctacacaccaacacattagaaaataaataaaaaatacataacctaattgttgcctttgaaacaccgtaatttctctatcattaagtgcctgcaatggtacacaacaatgacactagtatcttccattaacagaagaagaatggcagaattaaaataagttattattataaatagctttttttgttaaaaatataatttttaaaatactctatattgttcattataaattaaaatttattacaaaatatataatcttatagattcaacattttatgcatacattacataatttgttaataacactttattatcaataaa

SEQ ID NO: 10867 - DNA, 381 bp, Glycine max
  unsure (1)..(381): unsure at all n locations
agagcatactgcatttgacaacgaacaaacccattgtcttggaagtacttgtcaatgcgagtattccatgccctcggtgcttgctttagaccatacaacgccttgttcaatttcaagacttttccttcttgaccttcgatgacaaaacccattggttgttcaacatagacatcttctttaagatagccatttagaaatgccgattntacatcaagctgaaaaattctccacttcatttgagctgccaaggaaataagaagacgaatggtctccatgcgggcaaccggtgcaaacacttcatcataatcaactccatanttgtgcttgtagcccttagctacaagtcttgctgtgtgtctctcaacctctcattttgcattc

SEQ ID NO: 10868 - DNA, 317 bp, Glycine max
  unsure (1)..(317): unsure at all n locations
gctctcgagaanatcgagtggtcataaattttcacacagatgtccgattcggggaaataatatatcgagacgcacgaaattgaacaacggaagctctccagaaatttgaatggtcataacatttcactcggatgttcgatccggggacataatttatcgagacgctcgaaattgaacaaccgaagctctcgacaaattagaatggtcgtaacttttcacgcgaatgttcgattcggggacataactcatctagacgctcgaatatgaacaacgcgagctctcgagagatatgaatggtcataaagtttcacacggat

SEQ ID NO: 10869 - DNA, 468 bp, Glycine max
  unsure (1)..(468): unsure at all n locations
ctcagcttaacatcagaccacttccagagtgctggaactacttcacatttacttgatggggcctatgcaagttgaaagccttggaggaaagaggtatgcctatgttgttgtggatgatttctccagatttacctgggtcaactttatcagagaaaaatcagacacctttgaagtattcaaggagttgagtctaagacttcaaagagaaaaagactgtgtcatcaagagaatcaggagtgaccatggcagagagtttgaaaacagcaggtttactgaattctgcacatctgaaggcatcactcatgagttctctgcagccattacaccacaacagaatggcatagttgagaggaaaaacaggactttgcaagaggatgctanggtcatgcttcatgccaaagaacttccctataatctctgtgctgaagccatgaacacagcatgctacattcacaacagagtcacact

SEQ ID NO: 10870 - DNA, 355 bp, Glycine max
  unsure (1)..(355): unsure at all n locations
cttgaaactcagctttgctgcnacatttatatagaccctctcagtggccaaaccaacttcaatataataattatgagctttcaagccacagatataatccaggttggaagaatcatccaaatctgagatgggcaagtcttccacaacaacaacagcctgtccctcctttccagaatgctgctgggtcaagcaggccatatgttcctcctccaatgcagcagcaacaacaacaacaaagacaacaagcagctgaggccccttctcaaccttccttataggagttagtgaggcaaatgatcatccagaatatgcaattttagtaagagacaagagcctccattcagactctgacaaa

SEQ ID NO: 10871 - DNA, 262 bp, Glycine max
attgatgaattggagacactacctctgtagagctagatttgagggttttagtgatcataaaagtttgaaatacctatttgaccacaaagaactgaacatgaggcagaaaaggtggatggagttcttgaaggattatgacttagaagtggtatatcaccttagcaaagccaatgtagtggcagatgctttaagctgaaagtcattactcacatctgctatgatgattcaagaatgaaagttgactaaagagttcagagatctg

SEQ ID NO: 10872 - DNA, 332 bp, Glycine max
  unsure (1)..(332): unsure at all n locations
aaagattttggctggttatgccataaacacattcctgatcagaaaagaaagaagctggatgataagagtgagtcaatggttttcataagatatagctctagtggtgcatacaagctgtataatcctaccaccaagaaagtagaattcagcagagatgtattgtttgaagaatataatgcttggaaatccgataattgttgttcacgttaagatcaaacagtggctgagatagatttagatctagatcagactgcacctgatntagataatggagaagaacttggagaggaactcaatttaccacttgcaccacctgtggaatctaatgcacc

SEQ ID NO: 10873 - DNA, 426 bp, Glycine max
  unsure (1)..(426): unsure at all n locations
ggatgttgaattctggntgttcctggtgcggagatgatggtacagcgggtgaaccaaaagcggaagtttcttttggtgaggtagccatggaaaagcagagcgtttggaatgatttcgtaaatctcagaaggctattgggaaatgctggtataaacacgaatgccaagcagatataaatttgaatgaggaatgtagagggtcgtgtgaagcaacggtcgaattttccttggttcagtagtgaacgtgctattaatgttaagtgattcgtttgggcacgttcagattgctgtagntgctataattcctctagcacacaaatgcccagcttgcccctcagttnttcaaactgatttgcatccaaagcctttgtgaaaatatctgctatttgttcctcagtgtcaacatgcttcagtgtgatcactttat

SEQ ID NO: 10874 - DNA, 423 bp, Glycine max
  unsure (1)..(423): unsure at all n locations
tagaagcttcaagaattatggcctcatcaaactacttgtttcccgagggaaattctataaatagacctcttatctttaatggagtgggttaccactactggaaaacctgcatgcaaatctttatagaggcaatagaattaaatatttgggaagccataaaacaaggaccttatgttccctctataatagccggaagtgcaacaatagaaaaacctatagcagactggactgaggaagaaagaagattagtacaatataatttaaaggccaaaaatattattacatctgcccttggaatagatgaatactntatggtttcaaattgtaaaagtgctaaggatatgtgggatacactacaagtaacacatgaaggcacaacagatgttaaaagatctangataaacactttaactcgtgaatatg

SEQ ID NO: 10875 - DNA, 448 bp, Glycine max
  unsure (1)..(448): unsure at all n locations
ggagtttccaagtgccaattcgtcttcttcttatgtccagtcttcttctgacttcaattcatcaaggggctttccttctgtgtccagcatcttgggatgttcccagcctttgatgacagcttttcaggttctgctatccagtgatttgaggaaggccaccatccttgctttccagtattcatagttggttccattcagaataggtggtctgttcactggtcctccttctttctccatgttcatcagaatttatctccctagatctcactcagtgatttcgagtgcctgctctgataccaattgaaattctgatactggggacagatgtcgtacaggatgtcacgacatcacgcttcagaacatgcagtatatatntgacagtgtgtacagtgtanacaagaagataacacaagagaattgtaacccagttcgtgcaacctacctacat

SEQ ID NO: 10876 - DNA, 436 bp, Glycine max
  unsure (1)..(436): unsure at all n locations
gatactcagctggatttcctcttagagggaatctatccttcctaagatggtttctatcccagtcccccctattaagaactagctcctttcttcctctattgcctttagttgcatacacctttgtttggttctttatttggttcccaaccctctcatgaaacttctttacaaactctgacctaaattctccttctttatgtataaaagaagtgtcaagtaggagggtaattaggtctaatggtgttagaggattgaacccataaacaacctcaaaaggggattgcttggtggttctatggacccccctattgtaggcaaattctacatgaggaagatactcattccatgacttatggttgcttttcagaagagcccttatnagggtgtatagagactattcactacctttatttgcccatcagtttgtggatggaaa

SEQ ID NO: 10877 - DNA, 255 bp, Glycine max
tcttcatatattgtgtttttgttgatacacaattttacttggtttcatatgtgctctataaattgagttttatttgtttgcataacttgtaggcaacaataacgcaaccagttgttaataacatgatgaatgtcttgtactttcagattaccgctggagcaataccattgtaccttgttgcctttacaggaaactgggcttatggatcttccacagaactgtatttgctgaatagagtgaatggtcctagttggg

SEQ ID NO: 10878 - DNA, 393 bp, Glycine max
tctgcgagcattgttctccagattccatattctcatgacctcattcttcagtcccagttgggcataaagagagatgatatgagtgtcaccctggccatctttgttgtccagcctttcctcagatttccttagggcacaaaccgcattccttgtaagtcctgcttatatgtaaaaaatggccgcaatagaataagtattccagtccatgacaatgtgtggctgagtctacatctctttcaatactttttccactccaccaaaatcagacctcacaccataagaatttatacagatcctgtagctgaagttgtctggcaagacttggttctgtttcatctcacgaaacacataccgaaccttctgatgctgtccaatatttgtatatagacacat

SEQ ID NO: 10879 - DNA, 363 bp, Glycine max
  unsure (1)..(363): unsure at all n locations
tattgtgaggaaatatggtagtgccatagacactattattaccatgaactgcatcaatcccatagatgagaggtattcccagtcgcgactgaagagctgatttttgaaagccatccaccatatcagcccaatcagacgacagtgcattttcaaatggtgcactgccaccagaactgagtatgctccctatagagtgcacaaataatcaaacgccacccttcaaattcatttcaaattccaacaggttcaaagcttgaacaaaatgtagacacaaatggaccatgtaatacatcgatacaaaaacatcaccaatgttcccattntcaagacacactctcaataggggtccctcaaattcatttc

SEQ ID NO: 10880 - DNA, 474 bp, Glycine max
  unsure (1)..(474): unsure at all n locations
tntgcgacanactatgtctgcaacattataactttattattttttgttttgatacctacttttcttttgcatcatcatcaaatttaatttgtacgtgttgatgattcacttttttttcttatattactttntacctcaggcacttgcttttaattttaaaagataacaaatattatataatattatatctacataatctacacctatattataattnttatttttcacctatattataattgttatttttcaacttatttgcgcgaatgcactcaacttaaactagttatacactaaaaaaaactaactaaaaatcattattattatanttttaaataatcttacacgatggtcgaaaatatcacttaggataaattggagtaactntatggatcccataattggtaaggtagtaacaataataatacaccagagcatgagaatgagaagacagtcacatctaaattaaccttc

SEQ ID NO: 10881 - DNA, 339 bp, Glycine max
tactcctcatgcttctcaccatgtctaataaagttttatttcttcgctctaccacaccattctaatccggagaaccacgcatagtgtattgggcaacaatcccatgttcttgaagaaatttcgcaaatgaacctggtgcttgtccatcttctgtgtatctaccatagtactccccacctctatctgatctcgcgagcttaatttgttttccacattgtttctcaacttcagccttcaaaactgtaaaggcatctaaagcttcattcttagaatgaagatagtggagatacatatatcgtgaataatcatctataaaggttatgaagtatcttcaactat

SEQ ID NO: 10882 - DNA, 489 bp, Glycine max
  unsure (1)..(489): unsure at all n locations
tcttcagtcacctgcggcatgcaagcttctgacaatggttatgtaaactctcaacaacattaattgctattggtttctctcaatcaaagaatgactattctctntntaccattgacaaaggtgcttccctggttgttctgttggtctatgtagatgacattttgcttgctggcccaagtgctacatgtgttcattctattcaggccaagcttcaagctttgttcatactaaagatccttggttccttacaatattttctgggcctagaagttgcanagtctagaaagggcgttgtcttgactcagtgaanatatgccctttctctgttagaggatactggttttctttgctgcaaaccatcctcccttccaatggatccaaatctatagctcaacatgcttagtggtgatttactgcccgatccctcaatgtacaagcatttacttggtcgcctcatgtacctaactatttcaaggccggatattacat

SEQ ID NO: 10883 - DNA, 214 bp, Glycine max
  unsure (1)..(214): unsure at all n locations
ctgcaagcttgggagaccttactacttgcagtggtatctttgggtggattttctgcgtatgcatggtaggtcngctctaactgcaatggtatatcgaaaggtgctaaggatatcaaacttggccatactaagtcacacgaacagggatgttagaaactacatggcacttgatcgtcttagggccagagactactatcggtatgttcatgacatg

SEQ ID NO: 10884 - DNA, 437 bp, Glycine max
  unsure (1)..(437): unsure at all n locations
agcttgcagaccanggatntatctgcaacttcaaaactatgaggctgagtcataaatacatatccctcaagcaacccattaagaaaagcattgttgacatcaaactgaaataactcccacccttgagaaagagcaagagtgagaataacacanattgtgacaggctcgaccacaggaaaaaatgtctcatgaaaatcaaatccatgaacctaatgaaacaaaccccttatcaaccagtgtggctttgaacttgttgatagaaccatcaacattttcttttactctgaaaagccatttgcacccaatagcttgcctattaggaggtaggggaaccaagtcccgagttctgttttacagtaaagcatcatactcctcttgcatagctgtagaccaatctgaattttccagggcctctttgacagtcttgggttcaaatg

SEQ ID NO: 10885 - DNA, 413 bp, Glycine max
  unsure (1)..(413): unsure at all n locations
tgtcaaagttagcatggatggagcaccttacctccgcanagttgtcttgaagatgtacaagagttaccctgagctctctgatgccttgngcaaaatgtttagctccttcaccattggtaactataattaatccataatttaccatacattaactnttttttatatagaatttaatgactgatcataacttttacgtatcagtatctagtttgttttctctttaatataactaccaaaagatatggatcttaaatntgattttgtagaaagttaactaatggtgtatgtgaatataaaattgaatcgtgcagctgattcgatggtattaattattggtgtgttcttgatatatttaaggaaattgtgaatcccaaggcttcaatggattcatgaatgagagcaagttgatggat

SEQ ID NO: 10886 - DNA, 406 bp, Glycine max
  unsure (1)..(406): unsure at all n locations
ggcatcagttgaggctcgggttcttccagcttccatgggtaattgatcataattaattaaattgtntacaaatgttgtttgctttagcagtttttccattatgattacattatattttggctcttcttgtccctaaagttgaaatatcacgacactggaagagagaaagaatacttgccacaagttggtcagtggaatatgatgaacaaggtcagctaagaatgaacaaataatatattagatgtaattatcttaatgaaagaaaataaaagggaaaattacttgtttccaacttactgtaattcctgtaattntaatgcagaaagttataaatggaagtactgtaagatattgngcgtgtatcaacttctctcgaagtgtacaggagagtacagctcgtggattt

SEQ ID NO: 10887 - DNA, 426 bp, Glycine max
  unsure (1)..(426): unsure at all n locations
ngaaggcaaactggatgcattggttaactcgcgtacccagctggccttgaatcagaaatttgtacctgttgcaagggttagtggtttgtgctcctctgctgaccaccatacagaccattgcccttccatgcagcaacctggagcaatcgagcagcctgaagcttatgctgtgttagtgcttagctatactgagttttaaaagattggctaaaattttgttataacataagcacttatacaatgaaggaaagctggagttgctgcacatgatgtccaacgttattgtaaggaatcatattgtgctccacaatgcacaatgcaagatataatgtctaatgaagaatgaagctgcaggatcaccatgttgatacaatgccagacattctgccgaaatactgaccataaattgtgtatcttacagataat

SEQ ID NO: 10888 - DNA, 363 bp, Glycine max
  unsure (1)..(363): unsure at all n locations
tgtaatcgattacacacatattataatcgattaccagagaagttnttcagaaaacattctcaacagtcacatctttntctctgattcttaagtggccatcaaaggcttatatatatgtgactagagacacgaatttaacaagagttttgaagaacaaaaaggtcttatcctcttaacaagcaaaattgtgttatcctcttacaaattccttggccaaaacactcgtgattcaataagggaattattgagtgctcaaatngttcaatctatctctntcaaaagagatttcttcttctcttcttctttattctgaaaagggattaagagaccgacggtctcttgttgtgaaaggattctaaacac

SEQ ID NO: 10889 - DNA, 431 bp, Glycine max
  unsure (1)..(431): unsure at all n locations
agcttcttagtttcagatgatgcagatgggtttgtttctacctcatgcactcctctaatgactatggcatcatttctggcgctaaactgttgggagttggaggccatcttctcaattaaatttctggcttcagcaggagtcatgtctccaatggctccaccactggcaacatctatcatacttctctccatattactgagtccttcataaaaatattggagaagaagctgctctgaaatctgatgatggnggcaactggcacatagtttcttaaatctctccagtactcatacaagctctctccactgagttgtctaatacctgagatatccttcctgatggctgtggtcttggaagcaaggaaaaatttctctaagaatactctcttaatgtcatcccacctcgtgatggaccttggagcaagggaatac

SEQ ID NO: 10890 - DNA, 395 bp, Glycine max
  unsure (1)..(395): unsure at all n locations
ggctaattgaagatcttctacttgatattcacccttcgctagtagcattaccaccttggagtcgccctttgccaccagatctttaactcttgtttccctagtgagccacatgctggcatgtaatgccttatatntggctcgggtgtgggtaaggctaaagttgaactttaanggattttcaatgatgactacatcgagaccttcaaacacaattcctgctccattgcttgcactgttcatcgtgttgttgacaaatagtatccatagagataaggataccactatgtaagttccaccatgaaatctatgagggctttccctttgactgcctcttttttccaaggacaatgtcgtacttagataattctattgaccatttcatcatcctttcaact

SEQ ID NO: 10891 - DNA, 284 bp, Glycine max
  unsure (1)..(284): unsure at all n locations
gatcttatgcagaatcttctgttatagaagaggttgatgttgtcttanaactcattaagaagacctgngttatgcttggaattaatgagatgctacactaatatttgttctcatgggtcttatttcatcagtatcttgtcactggccaagtggagaatgatcttctgtttgcatccagtaatctattggcagaagttgggaaagatactggaggctcaaaagatcctatttacacacaaatcttgaggaacacattgagtttgatactaagttgggcagagaaa

SEQ ID NO: 10892 - DNA, 482 bp, Glycine max
tatgcgcaagaaccagtccgtctagtggaatgacgactgtcaagtggttttccccccgttcttatgtcgttggtgcccaggagaccccttattctatacatgactgtgttggatgggtcgatggggtgtatgctggggaagcatgtcttgtccggaaagagggaacgggttgtctactacttgagcaagaagttcaacacctgtgagatgaactactctttgcttgaaaagacatgttgtgccttggtgtgggcggcacatcgtcttatgcagtacatgctgagccacaccacttggttggtatccaagatggacccagtcaagtacatttttgaaaagcccgttcttaccggacggttcgtccagtggcaggttctgctatcaaagttcgacatttcttatgtcactcataaggcgataacggtaagcaccctttccgactatctagctcagtagccccttaatgactaccaactcatgca

SEQ ID NO: 10893 - DNA, 442 bp, Glycine max
  unsure (1)..(442): unsure at all n locations
attntacttgtttaaaaagtatattntatcatcaaaaactataaatntattaaaaaaaactacttttataactatatttgaaatattcatatttatgacttataatttaagtatttttttaataatgaaaacaactacggttataacgattaatcatcaaaatgaatacttttgaatgcaatacaataatacattggtatgtcaatacaataatacaacaaactattgtacatgcatgattcatcttcaatggttgtagtttcctttgctaatccctcacaatcagagtttgtaagggattagaaagggaaggtttcatccctaacactactactaaaataggattttacaatgttgaaccaacaacaattttagcaaatattttgaaaanaaatagtcacaactttataaataatcgcaaatatttaaagaatggtttttc

SEQ ID NO: 10894 - DNA, 475 bp, Glycine max
  unsure (1)..(475): unsure at all n locations
atctctgagtcacctgcggcatgcaagcttattaagttattaaattaaatcactcatgaattttnntctttttaatcttcattntatttatgttttctcatgttaatacaatacttttctctatctaaaataaaaaaatatcgtattaccattgaaatcattaattctattagtcaaatattgtcacaatttgatctcttttgtgtgcatttagtcattatattatatacttataaatttttagggaaaaacaaattattnattctanaaaatatacttttacgaaaagaaatatttgtaaatatttagacctgattaatccaacccaacccatttatgattgggttgggttgggtatgaaaaaaattatacaaacccgactagggatggcaacggngcangtcggngatgagtttgaccttccccgtcgagttttatagggtttgggtatacctgcgagtaacccactacacta

SEQ ID NO: 10895 - DNA, 406 bp, Glycine max
  unsure (1)..(406): unsure at all n locations
tctcacagtcacctgcggcatgcaagcttctcctcttgattctcatccttcttcaatcaatctctaagccattgttcctgctactnctcatccctctgattcagactggcccattgccatccgcaaaggtactagatcctctcgtaatcctcatcctatctataactctctaagctatcatcgcttgtctccttcatattcttcttttgggttctctctatcttcgcattctggcccttctaatattcatgaggcactgattcatcctggatggcgacaggctatgattgatgaaatgcacgctcttgaacatagaggtactagggaacttgtatcccttcctcctggcaagaaagctgagggttgcagatgggcttatacagttaaagttgggcctaatggtgag

SEQ ID NO: 10896 - DNA, 442 bp, Glycine max
  unsure (1)..(442): unsure at all n locations
atcctctaagcacctgcangctgcagcttggtattaggtaaacaattaattaaaccttgtctttgnggtttgtctccttgaggaatctgccagcacttgtttattgtattgtatatgaaatangactggatgattacttaattgctacttgtagtcatattaagatatgtgacctcgtcttgattttctttatttgtaagaaaaattgcttgttaatatttaattaatagttgggttgcaattaaattttatctgagctatacttgttaaaataaatcatattaattagttcgtgtatagattaaaataaaattagcaagctattagaaatgttgctatatgtgtgagaaaatgaataactggagttaaattatatagctagaggagtgtaagattaaattaattaattaggtgaaggttagattatgttaattaagttagt

SEQ ID NO: 10897 - DNA, 397 bp, Glycine max
tgatgcaacattggagaggttaatgaaacaacgagatgatgcgcttcatgagaggttggatcattatggagaatagagatcataatgaagaagaaaggaggagaagagggaatgatggtgttcctagacaaaaccgaattgatggtattaaactcaacattcctccatttaaaggaaagaatgatccggaggcctacttggagtgggagatgaaaatagagcatgttttctcatgcaacaactatgatgaggaccagaaggtgaagcttgccgccacagagttttccgactatgctcttgtgtggtggaacaagctacaaaaggagagagcaagatatgaagagccaatggttgatacatggacggagatgaaaaagatcatgatgaagcggtatgt

SEQ ID NO: 10898 - DNA, 430 bp, Glycine max
  unsure (1)..(430): unsure at all n locations
cagctgcagcttagcttcgtcccaggcttcatgtagacttgtccaanatcgtgaagtaaacctcggatccctgtcagatacaatactggagggaattccatgcaaccttactacttccttgatgtacaactccactagctnttccattctatacttcatattcaccggaataaaatgagcagatttggtgagtcgatctactatgacccacacagcatcatgttcacgactagtctggggtaaactagatacaaaatccatagatatgctctcccatttccattccggaatttccaatggcttcaattctcctgatggtcgctggtgctcaaccttagccttttgacatgtcanacatcttgctacatattcagctacatctttcttcataccatgccaccaaaaacttctcttcatatcttggtacatc

SEQ ID NO: 10899 - DNA, 458 bp, Glycine max
  unsure (1)..(458): unsure at all n locations
agctntaccaagggcattggttgctggctttgttaatactgacaaagaatttcagagcagaggtgtgaactttagctnttattcttgtgtttttttggggataaaatattgtgagggtcgaaatacagaactggaggatctggaattntaattttttctcttcgtattactgattatataagtcctcatctggttntgtccaggagaaacttcgggaaccacagctacattcctaatagtggataggtggactgtgactgttgcatctgttggagattcccgttgtatactatatacccagggtggtgctgttacctccttaactgttgatcaccgacttgaggagaatattgaagagtatgtttttatctctaaggccgtagttggtaacttctttgtatgctcttggntacgaagtacactgtatgcacangagggaacgtgtcacttctagtgga

SEQ ID NO: 10900 - DNA, 384 bp, Glycine max
  unsure (1)..(384): unsure at all n locations
tcttagtntcagatgatgcagatgggtttgtagctacctcatgcacttctctaatgactatggcatcatatctggcgctaaactgctgtggagtggaggccatcttctcagataaatatctggcttcagcaagaatcatgtctacaagggctccaccactggcagcatctatcatacttctctccatattactgagtccttcataaaaatgttggagaagacgctgttctgaaatctgatggtgagggcaactggcacatatgttcttaaatcgctcccagtactcatacaggctctctccacttgagtgtctaatacctgagatatctttcctgatggctgtggtccctgaagcacggaaaaaaatttctagaatactctctt

SEQ ID NO: 10901 - DNA, 386 bp, Glycine max
  unsure (1)..(386): unsure at all n locations
tcattcttagaatgatgtaagtagagatacatatatcgtgaataatcttctattaagggtatgaagtatttcggactatatgcatccatgtctggacaacatatgtctgtatgtatgatttctaataaattagaactcctctttgcaccctttttagacttgttagtttgcttacccttaatgcaatctacacaagtctcaaaatcagcgaaatccanagtactaagtactccttcatttactaatcgcttgattcttcaatagagatatgtcctaatctccggtgccacaacatagaggattcttcattcacaatacatcgttttaacccaacagaaacgtgcatagaagtagcgtcattttgcaattcaatcgaataaagacca

SEQ ID NO: 10902 - DNA, 458 bp, Glycine max
  unsure (1)..(458): unsure at all n locations
agcttgtaatcgattactcacatattattatcgattaccagagaangttntcagaaaacattctcaacagtcacatctttttctctgattcttaagtggccatcaaaggcttatatatatgtgactagagacacgaatttaacaagagttttgaagaacaaaaaggtcttatcctcttaacaagcaaaattgttttatcctcttacaaattccttggccaaaacacttgtgattcaataaggaattatttgagtgctcaaattgttcaatctatctctttcanaagagatttcttcttctcttcttctttattctgaanagggattaagagaccgagggtctcttgttgtgaaaggattctaaacacaaaggaaggattgtccttgtgtgtntagaacttgtacaaggaatatacaagatagtggaactctcaagcgggttgcttgtggactggacgt

SEQ ID NO: 10903 - DNA, 434 bp, Glycine max
  unsure (1)..(434): unsure at all n locations
agcttctcaatccgctctggatgagcataacctttgtcgtccctctgaaagatagcaatgggcaaaaagaaatcacattnttaattaatctcaggaataaagaaaacaaaaaaaatatttgatggtcaaacaaggaaattatcaacatgccttaagatacagtgtaaggcgagttcctcttggaatcagcttctcgggatctgtctcctcagatattgtatatgagctagcatttgcctccccttcccaaacatattgcttatcggattttggactctttgttgagacaaccaccttcaaacaacaaaaaattatataaataccagattaaacaaaaatatttaagagcatcacatatttacttntacaaanatgcatacccgatcagaaaccagaaaagcagaatataatcccacaccaaattgaccaattaa

SEQ ID NO: 10904 - DNA, 384 bp, Glycine max
gctattcttgtctatttgcgtttgtttttaaactttcccagtgtttgtaagagaattggtttcatttcttgttttaaaattaggagaaaacattattactttttttctaatttattcttcagtctcaatttagttatcttatttttaaaatatttgttttggtcatttagaatgagttcaatttcatcctttacaatgattaatgtttaagattttttttacaaaatataaaaaataaatacttcaaaaaaaattaatatttattagagacagtcttactaaaatattcttattctctctcctaatttcaataaaaattattaaatcttttaaaatatcattatttattacatgataaaattaaaataaatgtttgaatatcta

SEQ ID NO: 10905 - DNA, 463 bp, Glycine max
  unsure (1)..(463): unsure at all n locations
agcttgcatacaactcgttagctcctatacatggactatgagtcaantttttaaaattctatacatttcaaatctttaattctctagtagattgtagataacaagattattttaaaaataaaaagacaattgaacttattctattaactttgttgggccacaagatatgacaaaaaatataattataaacaaagctggcataaataaaaactaccccaccttgtatatataatatactaaaaaaccaaataaagaaagccgagctatacataactcaagtctgactaatttatttaacgagctcaattnttagctcaagtttagctcatttgattaatgaactaaattcaacgaattaattatcaaatcaagtgttgactatctgtgagttgtgttgactcattaccactatgaaatgtgactatagagttcaagaccagatctacccatttgcatgtaatcc

SEQ ID NO: 10906 - DNA, 473 bp, Glycine max
  unsure (1)..(473): unsure at all n locations
agcttgtagttcctttctctcctcttctccacctccatattcacataaggaataggccaccatatctatttcagacctctagtgcaaagcaagaatattttctgagccccttttagcttcatgatattcattgttgtggatgaacttccccagcaactgagtgtctaacatgctgtgtcgagcaccatattctcttatccttcggatcaataacgagcccatttgtttgaattttggcacgaactctaaagcatggaaaatacatttgcatcttaacctctgcgaatgcaattatctcaaacatatataaatgccttgaaccttttataacatttaagttaactactattatatgaataaatgaagagtgaagatctgatgcanacaacaccaagtgttctgatctgattaccgcatagtgaaaatgaacaatatctgtccacatggtagtgtttggtggaaaatgatttgtg

SEQ ID NO: 10907 - DNA, 377 bp, Glycine max
aacagcagaataattatgatatttcaagcaacagatataatcccaggtggaagaatcatccaactctgagatgggcaagtcctccacaacaacaacaatctgtccctcctttccagaatattgctgatccaagcacgccatatgttcctccttcaatgcagcaacaacaacagcaatctcaacaaagacaacaagcaattgaggctcctcctcaaccttccgtagaagagatagtgaggcatatgaccatccaagatatgctatctcagcaagagacaagagactccattcacagtctgacaaatcagatggtgcagatggctactcagttgaatcaagctcattcccaaaattctgacaaatagccttcacaaact

SEQ ID NO: 10908 - DNA, 468 bp, Glycine max
  unsure (1)..(468): unsure at all n locations
tgatcctctcagtcacctgcggcatgcaagcttctanactntgtacaagaatgaagctctgatactcacttgttagacaagtggcctcagatatcttaagaagggggggttgaattaagatatcccaaactgtttcccctaattaaaaatctatttcactttttactcaagttatgaattcccttaatgacaatcttcttaaatattaattcaaatgaagcaacttgaatatgaatataaagcaataataaataaaggagattaagggaagagaaaatgcaaactcagttttatactggttcggccacacccttgtgcctacgtccagtccccaagcaacccgcttgagagttccactatcttgtaaattccttttacaagttctaaacacacaaggacaatccttcctttgtgtttagagatcctttacaacaagagactcacagtctcttaatcccttagagaatg

SEQ ID NO: 10909 - DNA, 434 bp, Glycine max
  unsure (1)..(434): unsure at all n locations
atcttcttcataacgggagtccttgcttcttgatgttcaatggaagcggaatgtataaggaagaaagatgatnggagatgccacttcaaggagaagatgagtcaagaacaagctcaccaccataagaagccatggataagagcttgaaggtaggagaagatgagtggagggagaaggagagaacgagcacgaaacttagttcctcaaatgaggtatgaactctgaagtgtaattctcaaatgatcaaagttcaaaaaatacacacatatggcctctatttatagcctaagtgtcacacaaaattgtagggaaatttgaatttctattcaaatntcacttgaatntgaaattgaatctgtggagccaaaatttcactaattatgaatagtgaatnttagttatgggtcagcccactaatccaagatcaagtccaa

SEQ ID NO: 10910 - DNA, 326 bp, Glycine max
caagccttcagcgtcccgacatcgtccatgttcttgtattcttcctgcaattttcaataagaatggatcagtaaccggatggttcttcatcaagaattaattttaaaaagtcccattagttctggaatatatatttacttattcaatactgggcgttaagagatgaacataccaggcagattgcacaagcctcttcttcttgactttgctcagatgaacagtatattgtttctgtcaaatacttggaaatcaaatcctcagacaatcctgtgctcacatggcctattctctctccaagtgcaagtagttcctggtcgagcaaagca

SEQ ID NO: 10911 - DNA, 447 bp, Glycine max
  unsure (1)..(447): unsure at all n locations
agcttaagctccttcaactgtacaaggctcttaatatttgaagagtatccttggggaaccttcacccgacaaagacactgacaaaaacttatcttctccttnttggacaaagtatgacaagctgggggcaaataaattttcttcccatctgaccttggatgcaactgtgatcatatccccatctcagctagatcatgacgggtattcaagccatccttcgtcttgccttgaatgttaaggagcgtcccaatgacactgtcacatacatttttctccacatgcataacatcaatacaatgtctaacgtctagattagaccagtacggaagatcaaagaaaatggacttcttcttccatatgcaagtcttacttttatccttcttttgggcctttccaaatacagtattcaggtgttgaacccgctggtatacctgctcatcagtcaac

SEQ ID NO: 10912 - DNA, 453 bp, Glycine max
  unsure (1)..(453): unsure at all n locations
atatggacganagtgcacaactcctatntgttggtacgatgatggagaatctttacttcttggacctgaaatgctacaacagattaatgaacaagtgaagttgattcgagagaagataacagcatcccacgataggaaaaagagctattatgatagaaggaggaagccactacattttcaggaaggagagcatgtgtttttgaaggtttctcccgtaacccgggtcggaagagctctcaaatctaggaaggtgacgcccaagtatctaggcccgtatcagattttgaagaagattgggcctgtagcttatcatatcgccttacctccgagtttatcgaatatgcatcctgtgtttcatgtctctcaactgagacggtacaacccatatccatcacatatacttgcagtggatgaggtacaggtgaaagataacctcacctacagagcacaacc

SEQ ID NO: 10913 - DNA, 316 bp, Glycine max
  unsure (1)..(316): unsure at all n locations
agcttctagacaatggttttgtanactctcaacaactttatttgctaatgggttctctcaatcaaagaatgactattctctctttaccattgacaaaggtgcttccctcggtgttctggtggtctatgtagatgacattttgcttgctggccccagtgctacatgtgttcattctattcaagccaagcttcaagctttgttcatactaaagatcctttggtccttacaatattgtctgggcctagaaattgaaagtctatatagggcgttgtcttgactcagtgaaaatatgccctttctctgttagaggatactg

SEQ ID NO: 10914 - DNA, 469 bp, Glycine max
  unsure (1)..(469): unsure at all n locations
agcttaataagtccatctatggatngaaacaagcctttcgtcagtggtatttaaaatttcatgaggtcatttcttcatttagctttgaagagaatgtcatggatcactgtatataccagaaggtcagtgggagtaagatatgtttccttgtattatacgtagataatattctgcttgcgactaatgataagggtatgctatatgaggtgaaacaatttctctaaaagaactttgatatgaaggatatgggagaggcatcttatgtcataggcataatgatccataaaaaaagatctcgaggcattttaggcttgtctcaagacacctatatcaacaaatctttagagagatttaatatgaaagaatgttcaccaagtgtagctcccatcgtgaagggtgacatacttgctctgagtcatgccccaaaatgatntgagcggaacacatganaatattatatgcttacagt

SEQ ID NO: 10915 - DNA, 448 bp, Glycine max
  unsure (1)..(448): unsure at all n locations
agcttcatgcttaactatgtatggaaaaacttcattactgttgttcaagacatacaagtgagcttgtaacaaatcttctacacttggagtgatcgcatgcagtcctcttgaacccttaccacccactctgtcatcatgccgagactcaggaagcccaacaggtttagccttctctaagtattctgaacaaaattcaatggcttcttctgcaatgtacctctcaacaataaatgcttctggacgatatagattctttgtatacccttttaagatcttcatgtatcgctcaaccgggtacatccaccgtagataaacaggaccacaacatntgatttctctgaccagatgcacaatcaagtgaatcatgatgtcaaagaaagcanggggaaaatacatctgcaactggcacagtataattgcggcctcattttccaactcatcaaacatg

SEQ ID NO: 10916 - DNA, 445 bp, Glycine max
  unsure (1)..(445): unsure at all n locations
agcttgtgcattcaatatcctgattagggtgttccatatgttctcaagactggactaatacatttgctacccaatgaagccccctaatgtctaagaagatcatatcttaaggagttccatattgtttgttccaccatgaagccccctaatgtctaagaagatcatatctttctaaaggcttttcctcattctctggagggagtggcaaaagattggctatactaccttgctcccaggtccattttcagctgggatgaccttaagagggtgttcttggagaaattcttccctgcatctaggaccactgccatcagaaaagacatttcaggcattaggcaacttagtggagagagcttgtatgaatattgngaaagattcaagaaattgtgtgcaagctgtcctcaccaccagatttctaagcaacttcttcttcaatatttctatg

SEQ ID NO: 10917 - DNA, 466 bp, Glycine max
acctgcggcatgcaagcttcggtagagaacttcattgttgatggaagaggatggaaatctgttgataagataaacacttgaagtgaaggcatggtcccaataatgagaaggcatgttagcttgagagagtaaggtaagaccaagctccactatatttgaatatttgaactgtttaaaaatctccaatgtttctgatttactttttagtatacctagcagattggcttatttcattcattgtgtggaatgaaaacaggggattcaagcttgaatgctattagagtaggtattgtcagatcggagagagtgagagaatgagaggagagagaaacagagggttggagagagtgagaggtagaggtaaggatttcgagagagacaaagtgaaactgagagagaggcaccaatacacacaaaccagactcagggataggactcagctacactacaaccaaacaaactggag

SEQ ID NO: 10918 - DNA, 357 bp, Glycine max
tgcacagcatgctgatactgatcatgcatatttgtttgatgatgaccgaggaacaatttgggatcaacttgaaacttatgtgcttcaagagagaagaaaagctgcttattccactcgtgaagatgatcaaaggctggctatgaagatggttcaaactgagaaacatttggtattaccattggtttataaacttattgagctaactttgatattgccggtgtcgacagcatccgttgaaagagctttttcagcaatgaaaattatcaagtctaaattgcgcaataagatcaacgatgtgtggttcaatgacttgatgggatgttacaccgagcgggagatattcaagacacttgatga

SEQ ID NO: 10919 - DNA, 317 bp, Glycine max
  unsure (1)..(317): unsure at all n locations
agctntctagaaatgttttcaaagttntcaaagctgtattcgattaccaaaactacgtaatcgattaccaatgctttaaaatggttaaaaatgattttgtaagtgtgtaatcgattacacatcatatgtaatcgattaccagagcttttgaacgttggacatttgaattttgaataaaaataactgtgtaatcgattatgccaatgttgtaatcgattaccaaagaggattttcgagaaaatctgcgaacagtcacaacttttcattggatttatgaatggccatcaaaggcatttaaataggggtgacttgggcac

SEQ ID NO: 10920 - DNA, 415 bp, Glycine max
agcttcacaagcaatgtatctattgcaacatgtatgaatatttattatacattaagtagattataaatataaaaaattcatatgaggaataagagttaaaattgaacctctccaaattttgaatctgatgaagtacccttttttgaatccctgtgccaagtcaacatttaaacttgaatgatataaaaaagaaaaagtaaaagtcagccacattcagagttgcttttatcatactttgcatcaacgccttttatcaaggtggagaatactcggcatttcccatctgtggatgttgtagcaagaagaatctgcagtttaaagaaaaacaaaataaaaacaaagaagatgagcatagggggttttacatcaaataacaaatatatttcaaaacacaattatctaagatttgattctg

SEQ ID NO: 10921 - DNA, 346 bp, Glycine max
tgccaccatggagttatccaactatgctcttgtgtggtggaacaagctacaaaaggagagagcaagaaatgaagagccaatggttgatacatgggcagagatgaaaaggatcatgaggaagcagtatgtgccagctagttactcaagggatttgaaatttatgctccaaaaactaacccaaggcaacaagggggttaaggagtatttcaaggaaatggatgtgctcatgattcaagcaaagattgaagaagatgaggaggtaactatggatcgatttcttaatggtttgactaatgatacccgtgatattgttaagctgcaagagtttgttgaaatggatgatttg

SEQ ID NO: 10922 - DNA, 309 bp, Glycine max
agcttaccaccataggagaccatggataagagtttgaaggtagaagaagatgagtggaggaagagggagagaaggggggcacgaaatttatgcctcagatgatgtatgaactttgaagtgtaatttctcaaatgatcgaatttgaaaaattgcacacacaagacctctatttatagcctaagtgtcacacaaaattggaggaaaatatgaatttcacttgaatttgaatttgaatttgtggagccaaatttggaaccaaaatttcactaattatgattagtgaatttcagctatggtttagcccactaa

SEQ ID NO: 10923 - DNA, 389 bp, Glycine max
agcttgcatttgtggaagattaaaccccgaaagggtatattagagcacctcactgtgctattaacatcaaaccaagtaaatattatacccttgcaaaggatagtttagtacaccctcggtgaaatagatccaactacaataccacaacattaaacaataataaagaatttaacttggaataagaaaacactcatgaaatgattagatcattatagcccagtaaagggccccaagatcaacggtttcaaaaaaactgtacacgatctcatccacaaaatatttttactcacaaaattttaaaaagaaaatataaacaaaacaaactaaaaatagagagttagggggtatattgaattaggattttaaaaaactattttaacataaaaaaa

SEQ ID NO: 10924 - DNA, 191 bp, Glycine max
tgtggcccttttgatttttctacccaccgctttgcttggactgtcctatcccaaaccatattgaacatcatagcaactcaataatcaagtgtgctgacagcctaacccttcgatcacaaagaccctttgcagtgtaaaccttgctgtgcctatcttttctacctgtggaccgaacaatgtgccctacttgg

SEQ ID NO: 10925 - DNA, 428 bp, Glycine max
  unsure (1)..(428): unsure at all n locations
ccggattcctttcttttatcatgtgcacccaaacccaatcttcgggttcgaagacaacctactttctccctttgttggcttgattagcatagctcttattcttcctctcaatttgatctttgactctctcatgaagcttcttcacatagtccgcctttgcttgaccttctttatgcttaaaaacagaaacattaggcataggcaaaagatcaagaggagttagtgggttaaaaccataaacaacttcaaaaggagaacaattagtggtgctatgaacagctctattgtaagcaaattcaacatggggtaaacaagcttcccaagtttntaagttcttcctcaaaactgtcctaagcaaagttcccaaagtcctattaacaacttcccgttgcccatcggtttgtgggtgaccaagtggtgaaaataac

SEQ ID NO: 10926 - DNA, 373 bp, Glycine max
tgcctaattaaagcgcaatggaagacccattttgtctcatacccacacacaatcgcgggccacggattcacaacggcacatcccgatgtaatggcagcgaacccgccaagcaagccgttacacacgtcaatcacgttccagtggccatccaataaccgcttgctgaacaacgtcgtcagagccgcagtgctcccagccaatgtcgtcgtgacagctgtcctccctatagcgctccattgaccataataccctccacttccataccccttggctattgtcagaaacgaaccatggttgaagccgtaccagccgaaccataacaaaaacgaaccaagcacaactaaagacgcgctgtggccacgtaaagcaaccg

SEQ ID NO: 10927 - DNA, 353 bp, Glycine max
tacatcaacatcgattgatcgatcatggaaatgatccaaagctaagttgctgtgaacatagtgtatatggaaaccacaatagagttagcttccattgtgcaactctcacaactcagggtatcctatattatgtacactctgatgtttgggggccaccccaggtactctcattaggaggagcaaaatatttcataactttcattgatgattggtctaagaaagtctggacttatctgtcgaaacataaaaatcacgcttttaagtgtttcaaacaacggaaattgcttggtgagaatcaaactggtaggcatgtgaaactgctcagaactgataatggcctcgaatacttaagt

SEQ ID NO: 10928 - DNA, 391 bp, Glycine max
  unsure (1)..(391): unsure at all n locations
agctgcttctttaggtgcatagaatgcggttaaaaaaatagtaagtgtcatgaatctctgacataagcttcaaccaattaacattgtttgaatgacaactgttgtagttggacagcaatgacatagtttgtcctccatggtatgctttatgttcctattggttatagttttggtatgctttatgttcctattggttatagntttggtatgctttatgttcctattggttatagctttggtgctagaatgttcaatttggagtccacaagaggaggatctccatattgtgctggagtttttgttggagatggtacaagacaagcaagtgaaatggagctggagcttgcagagtatcatggcaagtatatatgaaattaacccataaaagcta

SEQ ID NO: 10929 - DNA, 359 bp, Glycine max
tggatcccaacactctgttcaggctctcctaaaatctagaggcaaatctaggatctctatcagacactatgctagatggcacaccatgtaatctgacaatctcactaatatatagggaggtcaacttctccaaggaaaatctgatattaatgggaataaagtgagtagacttggtcagtctgtcaagaataaccagatagaatctaaacctctaggagttctaggtagtcctacaacaaaatccatggaaatactgtccacttccagtggggtatctccaagggttgtaacttccctgaaggtctctgatgttctatcttagccttctgatagactaaacatgcatacataaactcatt

SEQ ID NO: 10930 - DNA, 443 bp, Glycine max
  unsure (1)..(443): unsure at all n locations
agctntgcaactnttcatccctggcacaattgtcaggattcaaagtattcctgcactggacgagtccaaccaaccaatcccaaacaaggtcgtattccatcgaattttttggtcatttaaggcatccatagatgtgtttgcattttgtaaacccattgtgcaaatcgatggatcaaggctatatggaagatacaaagggacactgttagttgcagttgcacaagatggcgctaacaacatatttccattggcattttccattgtcgagggtgagacaacatatgggtggcactttttttgcaaaacttgagaacacatgtgacaccacaacatggtatatgcttaatctctgacaggcatgagtcaatcaaaagtgcatacagatgacctgacaaggggtggacagtagacaactcgtcacatgtgttttgtattcgacacat

SEQ ID NO: 10931 - DNA, 369 bp, Glycine max
tagatgcaagttataatattgaaatctacaatagaaataaggttaaacaagatgttccttgaaaaagtttggttggtttgaaaaatttaaggctctagttagacttatttcttataatgagggctaattttatgcttgacctgatcatttttgaaagttcaataatttagtgaataaaatatgttttagattgttaataaattagtaaattttgtatttgtctattaattttttcttttgcattgagttcttaataacataataactttgtttttggtcatggacatttttttgtgtcctataaattagtgaattttgtgtttgttccctcatttttttcttttattatttattccctttgaaaaaaac

SEQ ID NO: 10932 - DNA, 410 bp, Glycine max
  unsure (1)..(410): unsure at all n locations
agctntatgttgactcttattgtagtcaacatttgaaatatttntaaaaggtaaataaatgtaagaatttgatactctatcataattttaatattataataatactaaaaaaattattataatttatatttacttaaatatgttgatctattagacattaaaaggttttttaaataacctaaaatccgatatttttaaccaaatatgtttttataaaagttgaaacttgatctatttttgaaagaatctaatataacctgaggttattgtgacttatcaatatataatgaaatatatgntaattgacttaaaatattttgttttttcttaattattctaaacatatgataaaatacattttttaaataattaaaccanatacttccatgcttcaaattatttattttaca

SEQ ID NO: 10933 - DNA, 355 bp, Glycine max
tctgttgttcaatttcgaacgtgtcgatatattatgcgcctgaatcgtacctccgagttaaaagttatgaccatttgaatttctcgagagcttccgttgttcaattacgaccgtctctatatattatgcgccttaatcggacctccgagtgaaaagttatgaccatttgaattggtcaagagcttccattgttcaatttcgagcgtctcgatatattatgcgcccgaatcggacatccgagtgaaaagttatgaccatttcaatttcttgagagcttccgttgttaaatttcgagcgtctcgatatattatgtgcctgaatcggacctccgagttaaaagttatgtccatttgaa

SEQ ID NO: 10934 - DNA, 361 bp, Glycine max
  unsure (1)..(361): unsure at all n locations
ntctctgttctgcaactatgtcatcctttttttttaggtgtagaatgaagcttgacaggttcaggtgcaggtgctgctactggtggaggcacatgaatttggttttcagacctcaaggtgatggcactcacattttttggattctgcacagtttgtgaaggcaacttgtaaaattttgggactgagcttgattcatctgagtatccaactaccccatttgatttgtcagactctgaatggaagctcttgtctcttcttgaaattgcatattctggatggtcatttgccttactaattcttctatggaaggttgaggaggagcctcagttgcttgttgtctttgttgtgactgttgctgctg

SEQ ID NO: 10935 - DNA, 197 bp, Glycine max
tgacagaatactgggactgttgttgattttattgggcagccaaatgccccatctgattgggtaagctctgaatggaggctctggtctcttgctgaaactgcatgttccgcatagtcatttgcctcacaagttcttcaagggaaggttgtggaggggcctcaactgttggctgtttctggggttgttgctgttgttgg

SEQ ID NO: 10936 - DNA, 363 bp, Glycine max
tattacgtgttgatgattataagacatatatatgtatatgaattgttaaaataaattaggaattaatagttcaaataataaaattaaattgaagaaaattaatatattaagattcaacaataaatactttcaatgcatttttagtttaattatttattaaatctttttaattgaaaataatatagttcaatttaatatatacatgttttgtgccatgtaaatattaatactgtgtgatgtttatatgattcatgaagtctgataacatgttactttgggattataacattgtgattgagattgagagtatgtgataaattaagtatgtgttgaattataagatacatgtgtattgagattttg

SEQ ID NO: 10937 - DNA, 453 bp, Glycine max
  unsure (1)..(453): unsure at all n locations
agctttntcttccttgttttcgtntttaattaattaaaaggaacgcgaaaacattntgggctagttttgaaccctcaccctacaagcatgaaaggactccctttgccgctaagctactgcaatttaattatttattagttgcagttcatgtgtatttataacttctgaaggataaatcatttatacacaaacggtttaaaattgtgtgtctctaagttatgctgaacatgcaatattatgttaaatattggtatgcattggatttgatcctttaaagtttattacatgttgaatggatatacgtacaatgttattttgaattggtatacatgtaatttctatgattcaatattgagcacatttgcattattaagtatgtttatgccaaatattattttgaatgttaagtgattaatataatnttattaaattagagaatagccacagcatctt

SEQ ID NO: 10938 - DNA, 450 bp, Glycine max
  unsure (1)..(450): unsure at all n locations
agcttcatggctgntatacttgcttcaagaacttggagtctttattggaatggctattgaatcgttagtaaacagtacatctgctattgatctagcaaggaatcctgtctctcatgaccgaagcaagcacattgagactaaatttcatttcttgagagatcaagtggctaaaggaaaagtttagctaccgcattgcagaactgaggttcaactagctgacataatgactaaggctttgaaggctaacatattcacggagctgagaatgagaatatgaattcagagtttggaggattaagatagtctgttcaataaatgttgttgtaatgttcttgttgttgattcactgtttttgaatcaaagtggggtgttacggataatactaaacacttactaatttgatagtaattgatggtgattagttactttgagatagactatatatataca

SEQ ID NO: 10939 - DNA, 294 bp, Glycine max
  unsure (1)..(294): unsure at all n locations
ttgacatttgtcacacctttagacgtaattatgagcatctttgcacaatgtaggccaataaaaacctgattggagaaccttgacaacagttctttctccattataatggcctccataaggtgaactatggaaacgccacaatatgcttcttgcctcctcctaagttacacaccttcacaagagggtgtccgctctaattgtaaacagataaggaccatcccacacaaaatgtntagcatccctgaaaaacttattcttttggtgccaggttagatcatcatggagtgcaccaac

SEQ ID NO: 10940 - DNA, 432 bp, Glycine max
agcttcttagtctcacctgatgaattcgtggctactttatgcactcctctaatgacaatagcatcaattctggcactaaattgctgggagttggaagccatcttctcaattaaatttctggcttcagcaggagtaatgtctctaagggctccaccactggcagcatctatcatacttctctccatgttactgagtccttcataaaaatattggagaagaagctgctctgaaatctggtggtcatctctcccagtattcatataggctctctccactgagttgtctaatacctgaaatatcttttctgatggtcgtggtcctggaagcagggaaatttttttctaagaatactctcttgaggtcatcccagctcgtgatagaccttggagcaaggtaatatagcaagtcctttgctactccctataaagaatg

SEQ ID NO: 10941 - DNA, 364 bp, Glycine max
tcaagcttaacattcaattttgagcgtctcgatatatgacaggactcaaccagacatccgagtaaaaagttattgtcgtttgaattggctcagagcttcaacattcaattttgagcgtctcgatatatgacgggactcaattagacatctgagtaaaaagttattgtcgtttgaattagctcagagcttcaacattcaatttcgagcgtctcgatatatcacgagactatatcagacatccgagtaaaaagttattgtcgtttgaattcgctcagaggttcaacattcaatttcgagcgtctcgatatattacgggcctcaatcagacatccgagtaaaaagatattgtcgtttgaattggctc

SEQ ID NO: 10942 - DNA, 439 bp, Glycine max
agcttagagccaattcaaacgacaataacttcttactctgatgtctgattgagtcccgtcatatatcgagacgctcgaaatttaatgttgaagctcttagccaattcaaacgacaataactttttactcgaatgtctgattgagtcctgtaatataacgagacgctcgaaattgaatgttgaagctctgagccaattcaaacgacaataactttttactcggatgtctgattgagtcccgtcatatatcgagacgctcgaaattgaatgttgaatctctgagccaattcaaacgacaataactttttactcggatgtctgattgagtcccgtaatatatcgagacgctcagaattgaatgttgaagctctgagccaattcaaacgacaataactttttactcggatgtctgattgagtcccgtcatatatcgagacgct

SEQ ID NO: 10943 - DNA, 398 bp, Glycine max
  unsure (1)..(398): unsure at all n locations
agcttgcgaatntnggcgatatcacgggacatatgcttgatgactgctgtgagaacaccaaccttccacgccttctttaaggcatgtggtttcttgtaaggtggagggccttgatctttatgtagaccaatttgaggccaccatagttcatttccagtcggtcaccatggaggaggaacacccttctctattgagaacctcctctgacgaggatcacagcgctgcataagtgctgacaagagagaacccaaagctgtgaactgtaactcttgcaatgtgtgtagtgtacgaccaatggaagtgcttccatcattctttccacgaatagcattatcggcttgatacttggctatggcatcatgaccatttctatcaaacctgaacttatccttacacca

SEQ ID NO: 10944 - DNA, 355 bp, Glycine max
ttgagaaaattcaaacgacaataactttttactcggatgtctgattgagtcccgtaatatatcgagacgctcgaaattgaataccgaagcgctgagcaagttcaaacaacaataactttttactcggatgtctgattgagtcccgtaatatatcgaaaagctcgaatgtgaatgtagaagctcagagcaaattcaaacgacaataactttttactcggatgtctgattgagtcccgtaatatatcgagatgctcgaaatggaataccgaagctctgagcaaattcaaacaataataactttttactcggatgtccgattgagtcccgttatatatcggaacgcttgaaattgaat

SEQ ID NO: 10945 - DNA, 382 bp, Glycine max
  unsure (1)..(382): unsure at all n locations
agcttctacattcaatttcgagctgttcgatatatcactggactcaatcggacatncgagtaaaaagttattgtagtgtgaattcgctctaggctttggtattccatttcgagcgtctcgatatatcacgggactcaatcggacatcagagtaaaaagttattgttgttagaattcgctcagagcttctgtattccatttcgagcatctcgatatattacgggactcaatcagacatccgagtaaaaagtgattgttgtttcaatttgctcagggcttcggtattccatttcgagcgtgtcgatgtattacgggactcaatcagacatccgagtaataagttattgccgattgaatctgctcacagcttcgacattccattt

SEQ ID NO: 10946 - DNA, 446 bp, Glycine max
  unsure (1)..(446): unsure at all n locations
agcttactggtgctcaggtactctctatttcttcactttaccaacaataaacaaactattctacttatctcctcttttcattatatttaggttcttctcagacgtttgaggttgttcctcagtcctggttatccctatgaagaaattttaagcacatttcacaatcagaccggcatagtcatgtgctcctacctcccaatgttcaccagctntaatagaacaaggggtaaacaaaattaaaaattaaaaatttccctatttccgattcttgttcgctatttcttataggattaagtcaacaactattaacgaacgttgtattctgcaccaggtggcttgattcaattgaaccatggcaggcctcagcctctccaatatgtggtcaatgcangccttttggctgctctttacagtgattatctcgatgctgctgatacacctggatg

SEQ ID NO: 10947 - DNA, 371 bp, Glycine max
  unsure (1)..(371): unsure at all n locations
ttaattnttttggaatcaaataaaaaatcaaaaattgtctcatattgtaaaaattgttcaaatcgtgtttcaatagaattaattgattaatccaatatgtataaaaaaatactcaatacaaaaagattcttcatgtttataatatcagagattgattaattcaatagaattaattgattgatcttttgtaatactcaattaattgattaattctccaaaattaatctccattgtaatactcaattaattgattaattgaatggagattgattaattcaatagaattaattgattgatctaatatgtataaaaaatactcaatacaaaaagattctttaatagaataaatttcatgtttgttttaatttaaa

SEQ ID NO: 10948 - DNA, 407 bp, Glycine max
  unsure (1)..(407): unsure at all n locations
agcttgccaacccatggaagctcctaatatctcccacactttntggggtgggccattcttggatggccttgattttctcagggtccacttggaccccatttctaccaactacaaaccctaagaaaactatattatctacacaaaaagtacacttctctatatttgcatagagggtgtttttcctaaggactaaaagaacttgcctgagatgtcctaatggatcatctaggctcctactgtacactaaaatatcatcaaaataaacaactacaaatctacctatgaaatcccttaagacatgatgcataagcctcataaaggtgcttggtacattagtgagcccaaaaggcatcactagccattcatacaaaccanacttggtcttgaaagcggttntccactcatca

SEQ ID NO: 10949 - DNA, 353 bp, Glycine max
tccatcacttttcacacagaggtcagattcgggcacataatatgtcgagatgctcggaattgaaccacggaagctctcgagtaattcaaatggtcataacttttcacacagatgtccgattcgggcgcataatatgtcgagtagctcgaaattgaacaacggaagctgtcgagaaattcaaatggtcataaattttcacacggaggtcagattcaggcacataatatgtcgagatgctcggaattgaaccacgaaagctctcgagaaattcaaatggtcataacttttcacacggatgaccgattcaggcgtattacatatacagacgctcgaaatggaacaacgaaagctct

SEQ ID NO: 10950 - DNA, 448 bp, Glycine max
  unsure (1)..(448): unsure at all n locations
agcttgaatcggacctcagtgtgaaaagttatgaccatttgaatttctcgagagctttcgttgttcaatgtcgagcatctcgacatattatgcgctcgaatcgaacatccgtgtgaaaagttatgaccatttgagtttctcgagagcttccgtggttcaattccgagtatctagacctattatgtgcccgaatctgaccttcgtgtgaaaagttatgaccatttgaatttctcgagagcttccgatgtttaatttcgagcgtctcaatatattgtaagcctgaatcggagctcagtgtgaaaagttatgaccatttgtatttctcgagagcttccttggttcaattccgagcatctcgacatattatgtgcccgaatctgaccttcgtgtgaaaagttatgacctattgaatttctcgagagctnccgatgtttaatttcgagcgtct

SEQ ID NO: 10951 - DNA, 362 bp, Glycine max
taagctccttcaactgcacaagactcttaatatttgaagagtatccatgtggaaccttcacctgacgaagacactgacaaaaacttatcttctcctttttggacaaagtatgacaagctgggggcaagtaaattttattcccatcagaccttggatgcaactgtgatcgtatccccatcttagttagatcttgacgggtattcaagccatccttcatcttgccttgaatgttaaggagcatcccaatcacactgtcacatacatttttctccacatgcataacatcaatacaatgtctaacgtctagatcagaccagtacggaagatcaaagaaaatggacctcttcttccatatgcaagtc

SEQ ID NO: 10952 - DNA, 470 bp, Glycine max
  unsure (1)..(470): unsure at all n locations
gatccttaagtcacctgcggcatgcaagcttgcattntaagacaaatcccccccaccctcaaagctgattctcaatccagcagtcccttaccaccttgtggtaatgcttgttattaagccatccatcaaagaccttaaaaggcttaggaccccaatcaatgctcttagatttcatgaggatagggcagtgatcagagtagttcctttcaaggttgagctgcgaactgtctggccacttagaaagccaaccatcagagacaacagctctatccaatttgcttttacaggaaccattaggcctaacccatgtgaactgcttacccacactaggaatatcttccacctccatgatagcaagccaatcattgaaatctgacatgatgctggactctgaatntccatgattgcttcccattctctctgaagggtgcctaatacaattataatcgccaataagacaccagcatata

SEQ ID NO: 10953 - DNA, 386 bp, Glycine max
agcttcagtggcttattgaagatgaagaggtatttgtgactcagcacgttgaggtgtgtctcaccattgagagatataatgacaaggcgctgtgtgatgtggtcccaatggaagcgacccatgtgctgttaggaagatcgtggcagtatgataccactgcagagcatgatggcttcaccaacaacatctttttgcgcaagctgacaagaagattgctttcgcaccgttatctcctgaagaggtttgtgaggatcatatacaactgagaggattgagaaagagtgatactcttgtgacgaaaatgagtgagacacttgataacgaaatgtgaggatagaacaagagtgaaacacttgagacggaaaagagagatcacacgtagagtg

SEQ ID NO: 10954 - DNA, 420 bp, Glycine max
  unsure (1)..(420): unsure at all n locations
tagctngtgcctcttcacgtctggaatattaatgtatcttatagatccaaagacccttaagtgctttgttgatggcttcttcccgttccaagcttcaattggagtcttgtcttttacagacttagtcggacatttgatgagtatgtaaacagcagtgtagactactttagcccagaatgtgttaggtagtcccttctccttaggcatcgatctgtccatttccataaatgtgtaattctttctctcggacactccattttgttgaggaaaatatgtgattgtaagttgttgctcaatgccttcatccttacaaaatctttcanactcgcgagaggtgtactctctgccgcgatcacttcttagtacttttatccgttttccactttgattatcagcaagggccttgaactttttgaatac

SEQ ID NO: 10955 - DNA, 422 bp, Glycine max
agcttgagcaatcctttgttaactatgtctcgcacgatatggcagtcgatttcaatgtgtttagttcgttcgtggaaaatagggtttgaggctatctggatggcggactgattatcacaatagagagttgcaggttgaacgaaggggaccggaaaatcatgaaggaggtaggtgagccactgaagttcacacgtagtagaagccaaggctctatactctgcctcagatgaactgcgagagaccgtagattgcttcttggaccaccaggaaattagagactcacccagatagactgagaagccagtgatggagcgtcgtgtgtcgcaacatcctgcccaatcggagtcactgaaagctttgagagtgagtgtaccttgagccacgaagaagatgccagaaccaggagttcctttgaggtacgt

SEQ ID NO: 10956 - DNA, 361 bp, Glycine max
tgttgtttgcgacgccaacggatacaactctttttcatcggattcatattcatgatcttgatcttgatcctcgtacgctggtgatgaggagcgggttgagtggccagtagttttgaaacggagtaatgtggggccagtggagtgcactgttgaagaattaccaatggggcttccatccatgattcgtgcactcgactttcctagcgtcactgctcctccctgcttcttcttcgcagccatgtgccatttcttcagagccttgtttgtgtgctcgtcaaatattgctgttttcatccttgaacccatctgcgtgtatgtatgtgtgcgtttacagcgatacattgtcgtccattagaccaat

SEQ ID NO: 10957 - DNA, 315 bp, Glycine max
  unsure (1)..(315): unsure at all n locations
tgcacctgaatcgttcttccgtttganaagttatgaccacttgaatttctcgagagctttcgttgttcaatttcgagcgtctcgatatattatgcgcctgaatcggactttcgtgtgataagttatgaccatatgaatttcttgagagctttcgttgttcaattatgagcttctcaatatactatgcaccttaatcggacttccgtgtgataaggtatgaccatttgaatttcttgagggcttccgtcgtgcaatttcaagcgtctcggtatattatgcgcctgaatcggactgctcggtgataagttatgacca

SEQ ID NO: 10958 - DNA, 589 bp, Glycine max
agcttctgtcagtctgagataagactttggctatatggagattttgctcatccagtatcacatcaacatcaggaatatgaagagcatgataccaagcattagaggagaaagaattgtcccgtagattctcaaaatacccagtttctaaactgtattgatctagccagtataatgagtgaaattcagtagttaaagcatggattaaccagtcaactcttggccagaaattggcataattctccttcaaaagcatggattttaattttaggtgataggattctattgcagcatgtggctcaggagttgtcacagagagtgattttatggcattaatccacatatctgcatgagaagcacagtaatatggttattcaagaaacaatattaatgcagaatactcaaatgactggatagtccactaattatgatgaaaataattagtcaattgtagaaaatgctagtgtgagtgttgcccaagaaaacttaaggcactcatctggaggtgggactaagaatgaaatgaatttgatataaaatctgaatcagaatgtttctgatcaaaactgactatgatgtgaggctacaacag

SEQ ID NO: 10959 - DNA, 562 bp, Glycine max
agcttccctgcatagaaaattataagattgtgaatcttgctaaggagaatgctgtggatcactcactacatgttggaaatggaagtgatggtcaagcgagtgttaacgaaacagttggaactgcagagtcggtcatccaagaatctgctgagtatttgaaggacatgagtgaagaagaattgatggaaatgtgtgacctcaaccatttgttagatgaattgggtccacgtttcaaagattggacaggccgtcaaccattgcctgttgatgcagacttgttgccagctgtggttccaggatataaaaccccattcagacttcttccttatcggataaggccttgtttaaccaacaaggaaatgactaacttccgtaggcttgcaagaacaacagctccacattttgcccttggtaagcaagaaactatctagttaaattcatgtcttgcaatttgcaaatgtctctttctaatagatactatttgtttgctaatgcaggcagaaacagagaattgcaaagtctggctcgtgctatggtgaaactgtgggaaacaagtgctatt

SEQ ID NO: 10960 - DNA, 379 bp, Glycine max
ttactgttttgcagtgttcatcctccaaatcttttaaccatgtattgtttcgtgtcatgaagttgttgcaccctgaatcaaaataccatcattcttctagacatgttggttgtaactcctcgtaagccatcaacaaaatctcttcttcttcatctaattcatcataatttgctttcttttccaaggcaggacactcatatgggaaatttcctagtttgtgacatttgaaacactcaatagtggctttattgaaggattgtctacctctccctctgccacgtcctcctctatacgcacctcgaccccggcctctgatgggtccatcctcttgagtgttttggcgagtgtgttcttcatgaggtgccttcaacacatgctc

SEQ ID NO: 10961 - DNA, 647 bp, Glycine max
agcttagaactaacaatggtggtgaatatgaagacaccaaatttaagaggttttgctatgagaattgaatcaaagtggagaggattgtatcaagtagtcctcaatagaatggtgtagctaagtgtatgaactaaacattgactgaaagagttagaagcttacatgtacagtcaagcctacgaaagcagttttgggcagaagctatgaacacaacaacttacttgattaaccgaggtccactagtaccattggaacatagaatactagaagaggtattgagtgaaaaaaggtcaaacttacgcatctaaagtttttggttgtgtaacttatgtgcatattagtgatcaaggaaaaaataaacttgatcccaaataaaaaaagtgcacttttattggttatggtgaggatgattttgactaccgcttttgggataatgaaaaaaaatgatgatttgtagtagagatgtgatctttaatgaaagaataatgtaaaatgaaaaacataacatagacactaacaactcaaaacagagtgagtcaatgtatgtagaggtggatgatgtcccaaaaactcttgtaattgtgagtcatcaaccagaggaatcaatggaagataacagtgaaccacatttcaacatacgagatcat

SEQ ID NO: 10962 - DNA, 567 bp, Glycine max
  unsure (1)..(567): unsure at all n locations
agctttgaaggtgcgtagtccaccattttccctagtagaatactggtaatgtgtctactatcattgtcatcgtttttttcgtcattgaggtgccacttaagctgccaggttctctccacctttgggcgtattcttttgaaagaatcgtgccctctttttgcacatgttctatagttgcatcctatccgaagacattatactgacactgcctaacgaaggcaaccactaggtcattccaagaatggactcgggaaggttccaagttagtgtaccaggtaacagctaccccagtaagactttcttggaaggaatgtatcagcaattccttatcttttgtgtatgcccccatcttccgataatgcatctttagatggttcttggggcaagtagtcctctcgtacttgtcaaagtccagcaccttgaacttgggaggggtgatgatattgggtactangaacaactctcctaggttagcaaaggcataatcttcacctccttcaatggccatgagcctttcctctagatgatcccacttttccatttctgccatagcatgagggtttttac

SEQ ID NO: 10963 - DNA, 653 bp, Glycine max
  unsure (1)..(653): unsure at all n locations
agcttaagtttaaagttaattatttctctttattattcaatcaaaattatatcattagtaaatcaaccaagtggttgaacataaatgattagtgtactggatttaagattgaattaatcgagtaatatccgagtttaaccctcagcgaaaataattactagatatttaagtccaaaaaaatatcattagcaaaaacacacaattagattttttttaagatatttagtaagcacatcttatacttgatcaaacaagtaataacttaaggctaagcattgtaagtaacactaaataaaattaaattggatgtgtcttaagaatattaattaattcttaaaaatcacattaaaaaaaaaaaagaaagacatcaataatatatttttaataaaaatttaacttttattcccttccctccttttttatttataagacctaagtttaaaattgtatttgtttctttttatcagatctaatctaatctataatatttttggaattaattattttaaaaatatccttcattaaaagaagataaaaaaatatattaataaataattaaaagaaaaaaatattattaacaatgataatttaaaaaaaatgatgaatttaacataattntattattatcaattaaaattattattttttttaat

SEQ ID NO: 10964 - DNA, 538 bp, Glycine max
gctttcatgctgatgattcattcaagcagtcacaaacaagttatcctaactatatgcagtgatgaataaaattaaaaagggttgggttgcctcccagtaagcgctcgtttaacgtcattagcttgacgcatcttacttcatatgtcttgaaaatacatgagagtggtcatcctcttaatattccctccacgatactgctttaatctctaaccatttactacccatggtctgtctagattttctaattgaggatcaaataattccacaaccccgtagggcttgacatctttgatgatgaaaggcccaaaccatttggatttcatcttgccggaaaataatttcaatcttgaattgaacaaaaaacattttgtgccctagctggaactcctttttaagcagctttttatcatgataggccttcactttttcattgacaattcttgaagactcttaggcattcatcctcattttttctaactctaagagttgaaacttccttttttctcctgctaaggactcatcaaaattaaggaatttc

SEQ ID NO: 10965 - DNA, 380 bp, Glycine max
tggcaggaaaatttgatcaaattttctaggctaatttctttttgttggtctcttgggcaggcatctccaatcttaactgcattcattgcaggacaagctgctacctttaagatgtttgaaacgattaagaggcagccagatattgatgcttatgacactggtggttgactgctagatgatatttctggagatataaagcttaagaaggtctgctttagttatacttctagacctgatgagcaaatattcaatggattttcaatttcaataccaagtgacactactgcagctttggtagggcaaagtggaagtgagaaatcaacaattattagtttaattgagagattttatgatccacaagctggtgaagttctcattga

SEQ ID NO: 10966 - DNA, 622 bp, Glycine max
agctttgatgcaacatttggagatgtttatgatacaacgagatgatgcgctccatgagaggttggatcaaatggagaatagagatcataatgaagaagaaaggaggagaagagggaatgatggtgttcctagacaaaaccgaattgatggtattaaactcaacattcctccatttaaaggaaagaatgatccggaggcctacttggagtgggagatgaaaatagagcatgttttctcatgcaacaactatgaggaggaccaaaaggtgaagcttgccgccacggagttttccggctatgctcttgtgtggtggaacaagctacaaaaggagagagcaagaaatgaagagccaatggttgatacatggacggagatgaaaaagatcatgaggaagcggtatgtgccggctagttactcaagggacttgaaattcaagctccaaaaactaacccaaggcaacaagggggttgaggagtatttcaggaaatggatgtgctcatgattcaagcaaatattgaagaagatgaggaggtaactatggctcgatttcttaatggtttgactaatgatatccgtgatattgttgagctgcaagagtttgttgaaatggatgatttgcttc

SEQ ID NO: 10967 - DNA, 566 bp, Glycine max
agcttgccttgccccttgatatatttgttggactcatggtcactatgaatgacaaattccttgggataaaggtagtgttgccatgttttcaaagcccgtactaaggcatacaactccttatcataagttgaatagttaagggtaggaccacttaacttttcactaaaataagcaattggatggccttcttgcatcaacacagccccaatcccaacatttgaagcatcacactcaatttcaaaagatttttgaaagtttggcaacgcaagtatgggggcattagttagcttttgcttaagaacattgaaagcttcttcttgtttctctccccatttgaaaccaacatttttcttgagcacttcattgagaggtgctgccaatgtgctaaaatccttcacaaatcgtctataaaaacttgctaagccatgaaaacttctcacctcggtcacagacttaggtgtaggccattcttgaataggcctaacctttctctcatcaacttgcactccttttgaactcacaccaaaaccaagaaacacaacatggttagtccaaaagatgcattt

SEQ ID NO: 10968 - DNA, 328 bp, Glycine max
tatcgtgacatgtgaactcgatgtatggcatgtctccatgtggggttagctgaaacatggatgctctggtggcaagcacattagccgtctgatctttctctcttggaatgtggcggaaagagacctcatcaagaactcaattaccttcttgatgtatgcctgatagggcatcaactcgtgatccctagtttgccattctcccctcatctggcgaattaccaaggctgagtctctgctcactttaaccaattcgacatttaagtcaattgccacttggattccgagggcacatgcctcatactcagccatattattcgtgcaatcgaag

SEQ ID NO: 10969 - DNA, 650 bp, Glycine max
agcttctacttcatgttcttcttcacctttatgttcttctttcatatttttctcttttttacattatattaattatcatgtctacatttttgtcatttctttttctcggtgtatattaggagcaggtgtctatatggagtatggataatttttgtatactagaaaagtaatgatatatatcacatacctcagtaacatattttctctctttatctcacgaattctattacattatctcacttatcatatttatatacttttctcttgttggatcaagtggtctcggattaattaagaagggggggttgaattaatttttaatgtgtcttgactaattaaaaattatccttcttaatattactagattcaattaggctttactattaagttatgaggaagtaaagaacaaaaacaataacttagacaaaagtaaagcggaaataaaagtacgtagcggaaaagtaaaaagtgtagggaagaagaagacaaacacaagatttatactggttcggccacaacccatgcctacatccagtccccaagcaaccactggttcttgagatttctaataaccttgtaaaatcctttacaagcaaagatccacaagggatgtaccctcccttgttctctttgaacaaccaagtggatgt

SEQ ID NO: 10970 - DNA, 410 bp, Glycine max
gctctaggaaccttgaacggagaaagatctatatataggcttgctaagggtagagagaggaaaactagagatttggatcacgtaaagtgtgttaaggatgaagaaagcaaaggcttagtgcatgaaaaagatatcaaggaaaggtggaaggtgtatttccacaacttatttaatgatggatatggatatgactctagcagtctagacacaagagaagaggaccggaactataagtattatcgtcggattcagaaacaggaagtaaaggaagcgttgaaaagaatgagtaacggtaaggcggtggggccaaacaacatacctattgaagtgtggaaaactcttggagatagaggtcttgagtggctcaccaaactctttaatgaaattatgaggtcaaaacgcatgcccga

SEQ ID NO: 10971 - DNA, 594 bp, Glycine max
agcttgtcgcattacaccaagttgtttttggccttttgttgtctaagttgctgatccacatagcggagacggggtattccctcttgctccccaaggcttctttgtgtcacttgaatttggccactgatggcatcacgcaaacaccgaaagtggcgagaaattgttcttaaagcaagcgtagtatatggttctgctgctccacacccggcaaccatgtcaaaagatgacaccacaatctgcatctgatggcagtactgtctgtatcttttatctacctataaccagtggaaacaaggaattttttatggagtccgccattggccgacactatcatgaattcataactaactgtcttttcaatagttaaacacaccgttcaaactttggagcaacaaatgaattctacaaacattatagatataactgtagagcaatattatgtcctcttaattaatcttcattcaaatagaattaaaaacgtataaactttgtgaacatcaactatataattaatggctttatggtggtgcaccagttcaatctgacgtgacagctaacatttcaaaaccatttaccttcgttactggtttgggc

SEQ ID NO: 10972 - DNA, 503 bp, Glycine max
agctttaaggtcaagagggctgaaggattatatatcttgcctcgttgtagatattattccttcagatcatcccgtgttgccaacaattccaagaaagaaacgtaacgtgctaacttcccttctctttggaaagaaatctcaaaactctacaaacaaaggcaccaataagctttcttctgttggtgttgtggaggaattatttgaagagggttctgcaatgcttacagagaggtaactgggaccataactgctaaatttatatttgcatgatgtcatttgaagtttaatttgtcaccatcatggtggaaagagagaaaaaatgatccttttttcccaatacatctatctttgattcttaaattttcggacttaaaatgcaggttaggcaaggattttccatctaatacgaatcctgagatgttccgctgtgcggtttgccaagcagatcagccctctgtggacagtttatcaatgaacactgggccttgtttccccccagtatc

SEQ ID NO: 10973 - DNA, 465 bp, Glycine max
ttaaagaagcaatgcattaccccaaatggattaatgcaatggaagaagagttgaattctattgagaagaattcaacatgggaacttgttaatctgcctcttgacaagaaacccatagcactgaagtgggtttataaagtgaaggtgaaatccaaatgaggccagacttgtggcaaaagggttcttatgaaaacctggagttgactatggtgaggtctatgcacctgtggcaagaatagaaacagtgagattggtggtagcaattgcaaatataaaaggttggtctatgcataaactagatgtgaagtctgctttcttaaatggacagctagatgaggaggtttatgtggaccagccactctttgagaaattgggacaagaagaaaaggtatacagattgagaaaggcaatatatggtcttaagcaagctccaaggggctggaacaaaaaaattgacagctttctt

SEQ ID NO: 10974 - DNA, 464 bp, Glycine max
ttctaaactttgtttcaaaactttgtttttctgcaagtggaaattctgcagaaaacaaaatgttggatcaagtggcctccgaataaattaagaaaggggggttgaattaattattaatgtgtccttactaatttaaaatttaacccttttaatgttactagatttccaattagcttttactactaactttagaaagtaaagaacataaataaaaacttatccaaaagtaaaagcgataattaaaagtccatagcagaaattaaagagtgtatggcagaataatacaaacccccgatttatactgggtctgccacataccgtgcctacatccaatcctccagcaacctgctgttcttgagatttcttttaacccttgtaaatcctttacatgccaaagatccacaagggatgtccccttccttgttctctttgaaaaacccagtggatgttttcctcccctttga

SEQ ID NO: 10975 - DNA, 499 bp, Glycine max
acactataaaaactcagctttgagcgaatttaaacgacaataacttttttctctgatgtctgattgagtcccgtaatatatcgagacccgtgaaattgaatgttgaagctctgagccaattcaaacgacaataacgttttactcggatgtctgattgagtcccgtcatataccgagacgctcgaaattgaatgttgaaacttcgagccaattttaaacgacaataaccttttactcggatgtctgattgagtcccgcaatatatcgagaccctcgaaattgaatgtggaagctctgagccaatttgaacgacaataactttttactcggatgtctgattgagtcccgtaatatatcgagacgctcgaaattgaatgttgaagctttgagccaattcaaacgacattaacttttttatctcggatgtctgattgagtcccctaatatatttgagacgctcgaaattgaatgttgaaccttttgagcaattcaaacgacaa

SEQ ID NO: 10976 - DNA, 544 bp, Glycine max
agcttaaacattcactttcgagcctctcgatatattacgggactcaatcaaacatccgagaaaaaagttattgtcttttgaatttgctcagaggttcaacattaaatttcgagcgtctcgatatattacgggactcaatcagatatccgagtaaaactttattgtcgtttgaattggctcagaggttcaacattcaatttcgagcgtctcgatatgttatgggactcaatcagacatcccagtaaaaagttattgtcgtctgaattggctcagagcttcaacattcaatttctagcgtctcgatatatgacgggacaaaatcagacatccgagtaaatacttattgacgtttgaatttgctaagagcttcaacattcaatttcgagcgtctcgttatattacgggactcaatcagatatccgagtaaaaaagtattgtcgtttgaattggctcaaagcttaaacattcactttcgagcgccacgatttattacgggactcaatcaaacatccgaaaaaaaagttattgtcgtttgaatttgctc

SEQ ID NO: 10977 - DNA, 521 bp, Glycine max
agcttccaaatgagcatccaatccccttttcttttattatggctattatctagaatattctcaatggtattgtgataggcagttctaacaatataggtacccgtaggggagaatttccaaattaccttatcattctccatcacgttcaagaggggaagagctagaattttttcagcatcatggtggctaaagattgcttccacgagatatttcttccatgcacacttattatgatctattaaatcatccactcttaagccataattttcatttgaaggaaaagtcgagacataggaattgttatcatttttaagccaaggttgggactaagcatgaatagaattaccatttccaatcctccattgctaaactccttttatcactacccgtgaagtatggatactacgccatacaaagcttgaattatgccccaattgtgcatccaaaaaatccaccgacggaaaataattggctttgaaattctttgctattatagtacttggctggccataaatcttcaa

SEQ ID NO: 10978 - DNA, 506 bp, Glycine max
tgaaagatctcatgaaccaagtcgtgcagtattctggagcagcagtcttacttagccaagctgttaggttacaattatgatatacaatacaagtcaggtaagtccaacgttgttgcagatgcgctttccagggtacctcatcccgaagcaagccagtactggttattatctatccctcacttcatcttcctcgatacactgcgccaacacttcaccaccagcactcctttccaggccatgcttcaccaagttacgagtgaccccagttcacaccccgagtttgcacttcgcgacggcttgttattcttcaataatcgaatttggttggaacccgacaaccctttcgtcgataccttgattgacgaattccactctactcctatcggcggtcacctcgactttgccaagacactccattgcatacaagtcagtttccactggaacaccctcagccgtgacgttaagcgttttattcgacaatgcccgaaatgccaacaagtcaaata

SEQ ID NO: 10979 - DNA, 613 bp, Glycine max
agctttttttccattggtgctatctgaaaatctgtttttattaatattaatcactaaacattcttcagttggttaaaaactcatgtttcatgattgaaaggtataaaagttatgacttcatattaatttcttcttggtctatgacatgatttatagtgtatttatttctcacattctaattgactttttatatgatggtgatgcacttgcagatcagaattggtccctgcatatgttcgtctgctgcgtgataatgaggctgaagtacgtattgctgctgctgggaaagtaactaagttttcccgcatattaaatcccgatcttgcgattcagcatattctaccatgtgtgaaggtacagtcacagtaaaaaaattgggattcttagaggttaacatttatgatactagtatgattacaactgataaagtttgcctactataggagttatcaactgattcttctcaacatgttcgctctgcactggcttctgttataatgggtatggcaccggtgttagggaaggtatataaattactatctaaactcattatttatactgacataaatttaacacatttaaagtcattccaaatgtggcttaagttattatg

SEQ ID NO: 10980 - DNA, 568 bp, Glycine max
agcttctagccaaatggacttaccttgaattaattcctttgatagcccttttgagccttgtttccctttccttgttttgaagctcactacaagccttaagtgaaaaaccatgatatcactgttagtgcttagctctactgagttttaaaagattggctaagattttgttaaaacataagcacttagacaatgaaggaaagctggagttgctgcacatgatgtccaacgttatgtcaaggaataagatcgggctgcacaatgcacaaggcaagataaaatgtcaaatgaagaattgaagttgcaggatccacgatgtcggatacaatgtcctgacatcctgcccgaaaatactggagttgctgcacaatgcataagtcaagataaaatgtcaaatgaagaattgaagctgcagaatccacgatgtcggacacgatgtcctgacatctggcccgaaaatactggacacataaatctgttatatctttaacagattattgtgtagttagcaagagataagatgatctatcttctggaacgaattaaaagataattaaagttcgaatttcaa

SEQ ID NO: 10981 - DNA, 610 bp, Glycine max
agcttagaatacctgctaccaattcagttcccaagactaacaacaatttcatttccattaaatctattttgtcttgtaataaagaagctattgatatctggcattttcatttgggtcatccttcatatgatagaatgcaattgttgaaacaaacttaccctatgttgacttgtgataaaacctttgtttgtgatactttccatagagcaaaacagagaaaactcccatttcccaatagtgactcttatgcttctagtcctttctctttgatacatgtagacatttggggtccttgtgccacaactgctttgaatggacataagtattttcttacaattgtggatgatcatactagatttgtttggatttttataatgacttcaaaagttgagactcaaactcatttacaagcctttgtttcctatgttgagaggcaattcaatacaaaagtgaaagctatccgatcagacaatggtgcagaatttattatgaaacatttttatcataatactggtatcatacaccaaacttcttgtgttgaaaccccccctctcaaatggaaatatggaaagaaagccatcacatttattaaatgttactcgaacccttt

SEQ ID NO: 10982 - DNA, 647 bp, Glycine max
  unsure (1)..(647): unsure at all n locations
agcttatcgtaaggattaatctataatatttatatttatacctttatatatgtagtatattctatggattaatctttatacaaatacatgaatcagatcagcttaataaacaacaaaagtcagcattattgtgtttgcccgttaatatttacgtggtttttgcgaggaataaaattttgtattcctctgtttatttatatggcaatgtttcgtaatttgaaaaatacgttgttgcttttaaacgttcacatttgagagatataattattctcgatgttttcttcggtgttttaaaaaaagatagcgcggtaacgcacggtttcatataataaattatgtatcagatttaaaaattaatttaaaattcaagctatagttcatagaatgacaagttgacaataactaagcttgtgaaataatttattttgggcacggaacttcattnttttacaacaaaaaaaaacaaattcactatttattgtatttctttagcaaaaaatttatgccaattgcttaaaccataaggtataactaacttgatctctctttttttccagtaaaaaaaaaaacgtgatctcttcttaaaagatatatgattatttatttttaccacgtattattttcattaaaaattaataaaaatttat

SEQ ID NO: 10983 - DNA, 423 bp, Glycine max
atgggtccaagtggcttcttataccaatgccacgagaagtgtggtggtcagattcataaagagggaactgatttgtcgatacggactccctaggtagatcattactgacaatggcaccaatctgaacaataaaatgatgcaggaaatgtgcggggatttcaagatccagcatcataactctaccccttatcggccaaagatgaatggggctgtagaggctgcaaataaaaatattaagaagattattcagaagatgacggtgtcatacaaagattggcatgagatgctgcctttcgccctgcacggatatagaacctcggtacaaacttctactggggcaacgccatattccttggtttatgggatggaagcggtactcccatttgaggtagaagtcccttcccagaaatactagcggaatca

SEQ ID NO: 10984 - DNA, 484 bp, Glycine max
tcatgagagagtcaaagatcaaattgagaggtttaaataaaagctatgctaaacaagccaacaaagggagaaagaaggttgtcttcgaacccggagattgggtttgggtgcacatgagaaaagaaaggtttccggaacaaaggaaatcaaagcttcaaccaaggggagatggaccatttcaagtgcttgaaagaatcaatgacaatgcttacaaagttgagctgcccggtgagtataatgttagttccaccttcaatgtctctgatttatctctttttgatacagatggagaatccgatttgaggacaaatccttctcaagagggagagaatgatgaggacatgaccaagagcaagggcaaggatccacttgaaggacttggaggacctatgacaagggctagagcaaggaaagccaaagaagctcttcaacaagtgctgtccatactatttgaatacaagcccaagtttcaaggaaaaaagtc

SEQ ID NO: 10985 - DNA, 605 bp, Glycine max
agcttgaaattgaaaaacggaagatgtctattaattcaaatggtcataacttatcacaccgaagtccgattcaggcacataatatatcgagacgctcgaaattgaacaacggaagctctcgagaaattcaaatggtcataacttttcaaatggaagtccgattcaggtgcataatatatcgagaagcttgaaattgaacaaaggaagctctcgagaaattcaaatggtcataacttatcacacggaagtccgattcaagagcatactatgtgaagatgctcgaaattgaacaacgaaagctctcgagaaattcaaatggtcataacttgccacacggaagtccgattcagacgcataatataccgagacgctcgaaattgaacaatgaaagctctcaacaaattcaaatggtcaaaacttgtgacacagaagtccgattcaggcgcataatatatcgagaagcttgaaattgaacaacggaggctctcgagaaattcaaatggtcataaagtgtcacacggaagtccgattccgggggatagtatatcgagaaggtcaaaattgaacaacggaagctctcgagaaattcaaatggtcataacttt

SEQ ID NO: 10986 - DNA, 440 bp, Glycine max
agcttctcggtacatcacgggcttcattcttacacccatgtcaaaagttatggccctgtgaattggtccacagcttccttgttaagtttcgagcgtctcgatatatcatgtgtctgaatcggacatccgagtgaaaagttatgacaattttaatttgtcgagaacttacattattcaatttggagcgtctctatagatcatgggcctaaatcatacactcatgtgaaaagttatggccgattgaattggaccatagctttcttgcttaatatcgagcgttgttgtatattatgtgccagaatgtgacattcgacgccttagacatgaccatgggaatgtttctagaggtacatctttaattctgtgcatcatgatatactatgggcctgagtcggacatacaaggtaaaggtcatgagcatttggattatttgagaactt

SEQ ID NO: 10987 - DNA, 555 bp, Glycine max
agcttccaagaatcaagatcaagattcttgactcaagattcaagaatcaagagaagacttaatcaagataagtattaaaaagtttttcaaaaactgagtagcacatgaatctttctcaaccccccttcttaattattctgaggccacttgatccaacaagtggtatcagagcaattatcttgtagaaagtctaaccacttcaagattcatggcctcttcaaatcctttgtttcctgaaggaaattccattcatagaccacccattttcaatggtgagggttaccattattggaaaacccgtatgcagatttttattgaagccatagatctaaatatttgggaagcaatagaaataagaccatacatacccactgtagtagatgtaagcacaagcactacaacacaaaaacctagagataagtggacaaaagaagatagaagaagaatccagtttgatctcaaagccaaaaacattattacttcagccttaggaatatatgagtattttagagtgtcaaaatgtacaaatgccaaagagatgtgggatactctcca

SEQ ID NO: 10988 - DNA, 598 bp, Glycine max
agcttgttgtcaccatcaacaatctgtttgttcttgaagtaactagccttgccaaaaccctcctcagggaaatggccactccccatttgagtcgaggtgtgttggccgtcggactcagagttcacaacctctcccccccactcaatcattgacgcgctgtcagagaggtacgagaatagaggagccggccagtatcccataacatggtcattcccaaactgcatccaccagttaccctctttggggtcctacatacatattggttttccataatagacaacatcagatggcattgttccatattaataaattcatggaccctaaaaaataatgcagcattcacgtataatgaaatgttagtgtcagagattctcttgatttataattaactagtgtggtctgcacaaaacagtggtgttaatatattaatggtgcattatggtagtgtttgttaagtgctgggcgtatttttatgccagaatgtccaatatcaagagataatatataaaatggaaataaataaataaaaaatgtacctttcagaccaggatgctgatatcatattgggaagagctatacttaaaaaagggggagatgc

SEQ ID NO: 10989 - DNA, 347 bp, Glycine max
atcaactatgcatctggcagaaaacatgaatggccttaccaatattagctgaatggccgtatctacacaaatatgcatcaccactgattctgtcgggaagataaagagtttcactacgaccatgacatctttaatgactaaaataggtatgattatggatgcacctgctacttgcaaagtcatctcttacgggcatgatctgcaactgttccaaacttatacacatggagagcggtattacaggaaagaaggctcctaagtcactaagagcctttttcacagtgacttctgcaattgaacagggagtattgacactgccattgtttttttgctagggtggtaagatc

SEQ ID NO: 10990 - DNA, 339 bp, Glycine max
caacgaactctatgaccatctccttggagagaagcatttttctaatgaacagacattcagtctctatgtgcttatttctcctatgaaagactgaatttgacgcagatctgaatagcagccggattatcagaatccaacttcatttgcaactatacacagaacctcaattcttgccgaaagtgaataccccacatgagtggacaagttaccatagccatagatcgacattcaagtgctgcactagatctatcgacgacaggatgcttcttgcttttgcgagagagacaatttccttccacgaagactcaagcgcctagggtagacctcctattaatggga

SEQ ID NO: 10991 - DNA, 483 bp, Glycine max
ttatataccctgagactaggctcaagcccttttatttacactatatcagaggtgagtgagcctattagcagtgacccctttgttctagtaattattatttgtgttgttgttcatgaagcactatctagtatgaattttaattggttgcaataggatttcaatgtaaaggtgaattttttggagaataattttcctttgatcttacttcgtctgctgaattcctaaggattattgttggtctggttttctatataagcctaaggaatcaatcctggcaaaccctatgatccgcattcccagcggatctagggtgaaccaatttggcgttcctgctttgcacatgagaaggaatgttggcttgagagttaggtccatggttgagatagtggatcacaacacaaatttcagttctcatagaatacatgcatagtgtttttgttacatgtagaaatattatttgggattgttccttcaacatttatg

SEQ ID NO: 10992 - DNA, 506 bp, Glycine max
tcccgacaaacacttggaggagaagaagaatttttgaagaaaaaagttaaaattaacttacgaaccttacaattattagaatctttctcatctaactactccaaaagttgactgcataacgtgattttatcttagtggagaagttttatttattttacctccctatttcttctcctataggtgattgtagaatgtacagaagcttatacaaattgaactattactttgcttatccaataagattagatttatatacttgctagatgcatagtctattaaaaagtaatattacacgaagttttggattattgaatttagtctcgtagcagtttattatttattataaattgaaaatcctttttgaacactttgtttaatcgggttgtactagttattgaactaaccattacttgacctattaatggtagtatacatctcatatcatctcactggataatatttctctctgcgccataatttcaacatggaatcaaagaagtatatca

SEQ ID NO: 10993 - DNA, 642 bp, Glycine max
agcttctcagggaaaaatcttgacggttaggattccaatggatatccattccaccccaaatatctcaagtttttaggtaagaattcaagaccctttggaaggtacactgaattaattctctcagagtctccattgtgagatttgaaagtgagtaatctcaggtttggcatctttctgaatactttggagcttaaatttatatgtgtaatttgagtcatatctaaccatattccttcaactgcagcagttccctgacaaataataattagaattaatgtttacatcttttgtaataatttgcattttttataccaagagtttaggaatgcaagtcaaagtatcattaacatactctattatttgtcaatacatcatagatttccacaggatcccacaatctactgcgttgccctggaaatttaacagattcttcacgaacaacttctctacccatttcttgtatcagatcgtgcatatctatgcaattgctatatgtagtagtgataagagctttgtctaaaagacttcttatccctatatcagcagaaaaatcgcagtcattaatatttttgttacatggtctctgctttgtcctttaagaaaacagctatgtctaaaaaaatgtttttctcatcatcatct

SEQ ID NO: 10994 - DNA, 512 bp, Glycine max
acagtagagccgaccggctggcatgctagcttggcgcgtcaacttacatttgacttccagaggaacctcatgttgaagaaatgatgcccgccacaacgtaaggctccatccccaaatggactgtctctgatctcaagcttctgcagattaggacatcctttcagaacatatcggagtcccagatcaatgtctccagcagaggctactgaccgcgccctaatcgacttcccatacgtgcgattgtaagtcaaagcccgatcagtccttttaccagacacagaatgccgagtgagcttcctgcgttcataacgatggcaccaaaaccctcatccatgggttctagcgactctgggcctggcctataccgtccaaatttgcacaacctaaacacctcaacatccgggcagttgttcgacatggctaccacggcagcattcgccatcctctggcacattaacagaatcgactgcagtttcctacaacctcgagaaaacggcttcaaaccccacctt

SEQ ID NO: 10995 - DNA, 308 bp, Glycine max
ttgagccaattctaacgataataactttttactcggatgttcgattgagtcccgtaatatattgacacgctcgaaattgaatgttgaagctctgagccaattcaaacaacaataaatttttactcggatgtccgattcagtgacgtaatatatcgggacgctcgaaattgaatgttgaacctctcagccaactcaaacgacaataactttttactcggatgtctgattgagtcccgaactatatcgagacgctcgaaatagaatgttgaacctctaagccaattcaaacgacaataacattttattgg

SEQ ID NO: 10996 - DNA, 392 bp, Glycine max
cagcttgtacatctcaacctatcacataatattcttgaaggggagctgaacttgactggattgataggcttgcgcacattagacttgtcaaataacagattttatggggatattgggttgaatttcccttccatttgtgccaatttagtcgttgcgaatgtctcaggtaataaattgactggtgtgattgaaaactgctttgatcaatgtctcaagttgcagtacttggatttgagcaccaacaatctgagtggaagcatatggatgaagttttcgaggctcaaagagttttctgttgcggagaaccatctaaatgggactattcctttggaagctttttctttgaattgtagccttcaaaaactagaccttttacaaaatggattttgctg

SEQ ID NO: 10997 - DNA, 505 bp, Glycine max
agcttgaatcggacatccgtgtgaaaagttatgagcatttgaattactcaagagcttccattgttcaatttcgagcatctcgatatattataagcctgaatcggacattcgtgtgaaaagttatgaccatttgaatttctcaagagcttccgttgttcaatttcgagcctctcgacatattatgcgcttgaatcggatatccgtgtgaaaagttatgaccatttgaatatctcgacagcttctgatgtttaattcgagcgtatcaatatattattagcctgaatcgaacctcagtgtgaaaagttatgaccattttaatttcccgagaacttccgtttttcattttcgagcgtctctatatgtgatgctccttaatataacatccgcgtgaaaagttatgaccatttgaatttcttcaagagcctccgttgttcaatttgagcgtctcgatatgtgatttgcctgaatcggacattccggggaaaagttaagacccttttaaatt

SEQ ID NO: 10998 - DNA, 487 bp, Glycine max
agcttgtagggttaaagtctcacgattgttacatgctgatgcaataattgttaggcgtgactatacgagacatcttgccaaacaaagtcaggttatccataactcacctgtgctttttttaccatgccatatatagcaaagtcattgatcctgtcaagtttgatgagctacaaaatgaggccgcaattatactgtgccagttggagatgtattttccccctgctttctttgacatcatgattcacttgattgtgcatctagtcagagaaatcaaatgtcgtggtcctgtttatttgcggtggatgtacccggttgagtgatacatgaagatcttataagggtatacaaataatctatatcgtccaaaagcatctattgttgagaggtaaattgcatatgaagccattgaattttgtctagaatacattgaaaaggctaaaactattggccttcctgaatctcaacatgatgacaaagtgggtggtta

SEQ ID NO: 10999 - DNA, 615 bp, Glycine max
agcttatcaatctgaattcattggcatggatgggcttcttgaccttaggaattaagactatgaaggttttatttatgtaagttaggtcctttcctttgttcaaaatttgtagtgctagacttgtgatatcaacaccaataatactccaaaatttgtggtaaaaaagagtggaggtgtcatttggactaagggattttgtggggagcatttgagaaatggtgtcttgaattttagtccctatgaattcagcattcaagatattgaggagattcggtgaaattgtgttttgaaataagcttgtaactttctctgttaacaaagtcttggagggggtaaacaagtcagaaaattaattcataagaacttcacctatattctcaaaggcatatacaaatctcccatcatcctttttaagcctctgaatagtatttactttttgcctctaagataccttttggtggaaaaaagttgtgttttggtcatcgggttttagccaatttgcacaagaacattggtctcacttattttcgtcctgcaacaagacatcatcaagagtatttttaccaactattattttaccttccactttgttagtctacataggaagttggaagc

SEQ ID NO: 11000 - DNA, 601 bp, Glycine max
agctttacacaacaaatatttaattgttgtgtgatcagtgtaaattactattttttatcctaccagataagaccaaaatttctcaagtgcaaacacaattgccagtaattctttctcagttgtggcatagttaatctgagcatcattcaaaactttgctagcataatagatggtatggaatattctacctttccactgcccaagtacagcacctactgcataatcacttgcatcacacatcaattcaaactcttgcccccagtctggtgacgtaatcacaggagcagaaaccattttagctttgagagtgttaaaggcttctagacactcttcattaaatacaaacacagcttccttgttcaatagattgcttaagggtttagcaatcttggagaagtctttaatgaatctccgataaaaccctgcatgtcccaaaaagctgcatatgcctttcgcattgactgggggtgggagtttatcaataacatctaatttagctttatccacctttattccttttttagaaatcttgagtcctagcacaatgccttcttgaaccataaagtgacattttttcatactttagcaccatattggattc

SEQ ID NO: 11001 - DNA, 553 bp, Glycine max
agcttcccgctgatggtatttatagtttaatgataccattgcttcctttggatttaagggaatcattgttgatcaatgtatatatttaaaggtcagtgaaaataaggtaatattttttattctgtatgctgatgatatcttgcttgcaactaattatcttggtattttcgtgagattaagaagtttctctttagtaattttgaaatgaaggatatgggtgaggcaagctatgtgataggaatataaatattcagagacaaatcacaaggactattaggcttgttctagaaaacatatatcaataaagtactagagagtttcaagatgaaaaattgctcagcatcacccattccaattcaaaaagagacacatttagtcctgcataatgccataagaatgatttggaacgaaaacaaatagaagcaattttgtatgcatctgttgatgaaagtattatgtatgcttagatttgtacttgactagtcataagctttgcaacttggatgttaagaagatatcaaagtaatctgggaattgaaacattggaaaaact

SEQ ID NO: 11002 - DNA, 610 bp, Glycine max
agcttttctttgagaaaagcaaaggcttgctcttgtttttcaccccaggtaaacgccatattcttcttcaccagctcattgagaggagatgcaattgtagagaaattaggaacgaaccttctatagaagcttgctaacccatggaagctcctaacatctcccacactttttggggtggaccattcttggatggccttgattttctcagggtccacttggaccccatttctaccaactacaaaccctaagaaaactatattatctacacaaaaggtaacttctctatatttgcatagaaggtgtttttcctaaggactgaaagaacttgcctgagatgtcctaagtgatcatctaggctcctattgtacactaaattatcatcaatataagcaactacaaatctacctatgaaatcccttaagatatgatgcataagcctcataaaggtgcttggtgcattagtgagcccaaaaggcatcactagccattcatacaaaccaaacttggtcttgaaagcgggttttcactcatcaccctttttcatcctgaattggtgataaccacttttaagatcaatttttgaaaagatattggcaccatgccactcatc

SEQ ID NO: 11003 - DNA, 488 bp, Glycine max
tataataaatcgatacgctagaaattaattttcgaaaactctcgagaaattcaaatggccatatcttttcacaggatgtctgattcgggcgcataatatgtcgagaggctcgaaattgaacacttgaagctcttgagaaattccaatggtcataagttttcacacggatgtccgattccggcttataatatatcgatacgagcgaaattaaacatcggaaactctcgacaaattcaaatggccataacgtttcacacggatgtccgattcgggcgcataatatgtcgagaggctcgtaattgaacaacggaagctctaaagaaattcaaatggtcataaattttcacacggatgttcgattagggcgtatcacatatagagacgctcgaaaatgaaatattgaagcttttgagaaattaaatgggcataacttttcacaccgaagtccgattcagggctataatatattgatacgctccaaattaaac

SEQ ID NO: 11004 - DNA, 347 bp, Glycine max
aacttaaagtagctgcttgtcatcagtcgtgactttttcgtaaaaatgacatcgtagacatcaaagagacattcctagaacgcacgcggcaggtacatatagcttaaaacctcagaatctgaactcaatgaatggcggtcatattatagatgaatgctgcgccattgactcttgctctctgaaccatagactaaacttcattcctcttcgtccctggaagagacaagcgaaacaggtatgcatcttcacactctccaatgtccacaagccccatggttggcccaatcccccctgtagccacagttccagtcaagccaaaaccattcttggtagcagccacaatatca

SEQ ID NO: 11005 - DNA, 379 bp, Glycine max
  unsure (1)..(379): unsure at all n locations
tgtgatgttntccggcgatgctgaatttgttgatggtgctcataatattcttaacaaagacagtgaaataggccgtggaggatttggagttgtttattgcactgtccttagagatggtcattgtgttgcaatcaagaagcttacagtgtccactttgaccaagtctcaagaagactttgagagggaagttaaaatgcttgggaagatcaagcatcaaaatcttgtggcacttgaaggttattattggactccatccttgcagctcctaatttatgagtacctagccagagggagtttgcaaaagcttctacacgatgatgatagcagcaaaaatttgctttcttggagacaaaggttcaagatcattcttggaatggca

SEQ ID NO: 11006 - DNA, 395 bp, Glycine max
tctaaactttatacaagaatgaagctctgataccacttgttagacaagtggcctcagatatcttaagaaggggggtttgaattaagatatcccaaattacttccccaattaaaaatttatttcactttcttttcaagttatagattcctttaacaatgaacttcttaaatattaattcaaataaaacaatttgaatatgaatgtaaagcaataataaacaaaggagattaagggaagagaaagtgcaaactcatatttatactggttcggccacacccttgtgcctacgtccagtccccaagcaacccgcttgagagttccactatcttgtaaattccttttacaagttctaaacacacaaggacaatcattcctttgtatttagaattcattta

SEQ ID NO: 11007 - DNA, 250 bp, Glycine max
tcaacttgtgctacatgcaacattccgcatgaaagatcttggccaactcacatgttttttaggattggaggtacatcatcgatcaaatgacatatttttaaaccagcataagtacattcaagatttgataactttggctggtttggaaggcactacttcagttgatactcctatggaagtaaacgtcaaatacaggaaagatgaaggggatcttttggctgatccaactctctatcggtgtttggtggga

SEQ ID NO: 11008 - DNA, 265 bp, Glycine max
tcaacattcaatttcgagcgtctcgatatattacgggactcaatcaaacatccgtgaaaaaagttattgtcgtttgaatatgctcagaggttcaacattcaatttcgagcgtcttgatatattacgggactcaatcagacatccgagtaaaaagttattgtcgtttgaaatggctcagaggttcaacattcaatttcgagcgtctcgttatattacgggactcaatcagacatccgagtaaaaagtttttgtcgtttgaattggc

SEQ ID NO: 11009 - DNA, 405 bp, Glycine max
  unsure (1)..(405): unsure at all n locations
actcggatgtctgattgatgtccngtatcatatcgagacgctcgaaatngaatgttgaacctctgagccaattcaaacgacaataactntnttcacggatgtctgatcgagtcccgtaacatattgagacgctcgaaattgaatgtngaacctctgagccaattcaaatgacaataactttctactcggatgtctgattgagtcccgtaacatatcgagacgctcgatattgaatgttgaagctctgagccaatacagacgaaccataacttttactcggatgtctgattgagtcccgtaacatatcnagacgctcgaaagtgaatgttgaagctctgagccaatactaacgaccataactntttactcggatgtctgattgagtcctgcaacatatcgagacgc

SEQ ID NO: 11010 - DNA, 264 bp, Glycine max
tctgagttaaaagttattgcagtttgcatttgctacaagcttccgctttcaactacgagcgtctcgatatattactggactcaatcgatcatcagagcaaaaagttattgtcgttagaatttgttcagtgcttccgttttcaatttggagcgtctcgatatattacgggactcaatcggacatccgagtaaaaagttattgttgttagattttgctcatagcttctatttgaatttgctacgagcttccgttttcaatttggag

SEQ ID NO: 11011 - DNA, 394 bp, Glycine max
tctcgatatattatgcgcctgaatcagacttccgttacataagttatgaccatatgaatttctcgatatattatgcgccttaatcggactttcgtgtgacaagttatgtccatttgaatttctcgatagcattcgttgttcaatttcgagcgtctcgatatattatgcgcctgaatcggacttccgtgtgacacggtatgaccatctggattgttcaagagcatccgttgttagatttcgagtatctcgatatattatgcgcctgaatcggacatccgtgtgacaagttatggccatatgaatttctcgagagcattcgttgctcatattcgaacgtctcgatatagtctgcgcgttaatcgaactttcgtgtgacaagttatgaccatctgaa

SEQ ID NO: 11012 - DNA, 226 bp, Glycine max
  unsure (1)..(226): unsure at all n locations
ctctagaagcttggttgatcaatttcgagcgtgtcgatatgttatgcacctgaatcggacttccgtgtgacaagttatgaccatntgaatntctcgagagcattcgttgttcaatttcgagcatctngatataatatgcgtccgaatcggacttccgagtgacaagttatgaccatctgagattctcgagagctctcggttctcaatttagagcatctcgatacgt

SEQ ID NO: 11013 - DNA, 335 bp, Glycine max
  unsure (1)..(335): unsure at all n locations
ntgtgctcaatttccactggaagatgacatgcctttccaaagacaacccgataaggagacattcctatgggtgctttgtaggcagtccgatgcacccagagagcatcatcaagcctggtactccaatctttcctgcttggctgcacaatcttctctaaatttcgcttgatttctcggttagaaatttctgcctgtccattggtctaggggtggtatggtgtggataccctgtgtaccaccccgtactttttaagcagggcatgcattgtcctgttgcaaaaatgggttccttgatcactaacaattgctttaggtactccaaacctgcaaaacaa

SEQ ID NO: 11014 - DNA, 458 bp, Glycine max
  unsure (1)..(458): unsure at all n locations
gcttaccgatgtgcatgtgctgctgatcgaactggacatgctntattgttcactctctatggccaagctatgagacataatacccagtnntgtgtggaatatatngcattggatcttgtaatgaatagtgatggtaagttgttgcagacaacatcttgactacacttatattgcaatcaattaaactaattaagtcttagcattcattggccttgatgagtaaatatcccatgtacttcacattacttgatacaaattgtaattgtgttatctcttccaatggtaatggctctattaaacaagcattcaatggtagaaaaanatgtctgtcttggttgatgtgcaagttacctatttcttctatattgatatgantgcacttcgcagagtgattgcttgatatgacgatggacactacatcgttaagctgttcacaatttggccagggtacaatttct

SEQ ID NO: 11015 - DNA, 373 bp, Glycine max
  unsure (1)..(373): unsure at all n locations
tagtcctataccattgttcactgaactcttcagaactgatggggaacaggtccttaagtttcccacacctaaagtaattcaaggtagtacattaaaagcatattcctgatcctagcaatatttatattcataaataaacatggtaagctgatacatcttttgaaatgtnttttatttggaacagtgaatctgtctggatggatgactgatgaagagtttgcaagagagatgattgctggagtaaatccacacattattaagaaacttgaggtaaatttactattgaactgttaagtacataaaactataaacnatttatccacttgttaaatttgcagttgataaccttaactcattgcaaattatatttatt

SEQ ID NO: 11016 - DNA, 309 bp, Glycine max
  unsure (1)..(309): unsure at all n locations
cgagacacncgacattgactaaaggaagttgtcgagatattcacatggtcacaacttttcactcggatctccgattcacgcgcataatatatcgacacgctcgacattgaacaacggaagctctcaagacatctatatggtgataacattgtactcggatgtncaattccggcatataatatttctagacgctcgaatatgaataactgaagctctcgggacattcaaatggtcataacattctcgacagatgtctgattcatgcgcataatatatcgagacgctcgatattatcatcggaagctcact

SEQ ID NO: 11017 - DNA, 427 bp, Glycine max
tatcaaaatgcgcttaggcccactccaattcttttagcccagacttttccagaatccttaaagaggggacctatacttcaaacggtagtatgacttccattccatacaccaaagaaaacggatttgccccagttgatgtgcgcactaaggttcggtaaccatgcaacgcgaaagggagcatctcgtgccaatctttatatgacaccgtcatcatctgaatgatcttcttgatgttcttattggccgtctcaaccgccccattcatctagggcctgtaaggcatggaattctggtgttggatcttgaaatccttacacatttccatcatcatcttttattcaggttggtggcatcgtccgtgataatcttcatgggcaacccatactgacagattatctccttcttgatgaatctaaccaccacgctc

SEQ ID NO: 11018 - DNA, 390 bp, Glycine max
  unsure (1)..(390): unsure at all n locations
ntctcatttccagcctcttttcctgtcccatattttggtgttgatgtacataaagtccttccatcctaaatggtaggagaacataaattttagagttgaagatgcattgttatatatgaccttttacaatgatatggaattagaaaatntattgaacaaaaattcattcacaaaaagtttcacaagattaatacgtagctaataacaaatggtttataagaatggcgaaaaatattgttcatcacctgtccatataaagttgcatttacaacacctgaatgcatatgagcagtgccataaattagataacctcctttttccattgggatgttttctttttggacatgaggagaatcaccaccaccaccagttgctggaatggtatactct

SEQ ID NO: 11019 - DNA, 330 bp, Glycine max
  unsure (1)..(330): unsure at all n locations
gtcacacgggatatacataaccaannaatgactacaaattataaaggaggtctattttgttgtcangacaacttacaatgcaagcaaatagagggttntcaaggttcaaggagaatggtttccttaagatacanaattagttgggttgattggaacatataccaaataccagttaaggtttacatacttgattccaccgacaaagtgaggtcaaatggttccaaaatacttcatgattgtctggtagataatgtttccaagacagtactttatgataaaacaatatactcttcaatcttatagagtgagtgaacaanagtaaatctaatt

SEQ ID NO: 11020 - DNA, 399 bp, Glycine max
  unsure (1)..(399): unsure at all n locations
tcttctctttcacttcatgtatgctatangatacgaacaatcgtatgaagatgggtatagttgaagagagacatggcctctatcacctcataccagaccanacagacanaagccattgctcgaccattattcaccctanatgcaatattatcccaatagaatctttggcattttgaatgggccatctatcaacagaaagactgcaatgtatgaaaccttattatcccattatgagaaatgataanaactntgtgtgtaatacatgtcactatgcgaaacacaagaagcttnctttttctcgagcatttcacatgcatcacatacttttgattacttcacatggatatatggggtccttggtcanaaccatctatgcacgggcacaagtatttcttaact

SEQ ID NO: 11021 - DNA, 415 bp, Glycine max
  unsure (1)..(415): unsure at all n locations
tcatgcttatctatgtatggcaaaacttcattactgttgttcaagacatacaagtgagcttgtaacaaatcttctacacttggagtgatcacctgcagtcctcttgaacccttaccacccactctgtcatcatgctgacactcaggaagcccaacagctttagccttctctaagtattctaaacaaaattcaatggcttcttctgcaatgtacctctcaacaatagatgcttccggacgatatagattttttgtatacccttttaagatcttcatgtatcgctcaaccgggcacatccaccgtagataaacaggaccacaacatttgatttctctgaccagatgcacaatcaagtgaatcatgatgtcaaagaaagcagggggaaaatacatctncaactggcacagtataattg

SEQ ID NO: 11022 - DNA, 362 bp, Glycine max
tgccttcaatgccactctcaccctctccaatacaaggcattggaactttgcttcaacgtttccctcaaccgtttgccagcatccacaccaaaccctcttctgataagtcctccatataattccaccactactactccctcactttccaatgccttggttgcagccttcaaacgtgctcaggctcaccaacgccgtggatccattgatcagaaccagcagcaacccattttgactttaaagattaaggtggagcagctcatagtctctatccttgatgaccctagtattagtagggtcatgcgagaagctggtttctctagctcccttgttaaaacaagggttgaacaagctgtttcaatgga

SEQ ID NO: 11023 - DNA, 394 bp, Glycine max
  unsure (1)..(394): unsure at all n locations
gctgcccaagtttcatgatcttgtaggtgaagatcctcataagcatcttaaggagttccatattctntgttctatcatgaagccccctgatgtccaagaagatcatatctctctgaaggcttttcctcattctctggagggagtggcanaagattggctatactaccttgcgccccggtccattttcagctgggatgagcttaagaggggttcttggaaaattcttccctcatctacgaccactccattaganaaacattnaggcatcatacaacttagtnagagagcttgatgagtactggaaagatcaagacatgtggcgagctgcctcacaccgatttngcaaactcctctcatattctatgaggactggcactggaaggagatgattgtg

SEQ ID NO: 11024 - DNA, 332 bp, Glycine max
  unsure (1)..(332): unsure at all n locations
gctctcattatatgcgcctgaatcgactccgttgaaagttattccatttttatctctcgagagncttggttcttcaatntcgagcgtctcgatatattaagcacctgaatcggactgccgtgtgacnatgttatgaccattgaatntctcgagagcttccgatgttcaatttccagcttctcgatatattatgcgcctgaatcagacttccgtgtgaaaagttatgtccattggaatttctcgagagctgtcgatgttcgatntcgagcatctcgatatatcatgcgcctgaatcggacattcgtgtgacaagttatgacacattgaattct

SEQ ID NO: 11025 - DNA, 324 bp, Glycine max
gtgacctatcaaactcagctttcagcaaattcaaacgacaataactttttactcggatgtctgattaagtcccgtaatacatcgagacgctcgaaattgaatgttgaagctctcagcaaattcaaacgacaataacttttggctcggatgtctgattgagtcccgtaatctattgagacgctcaaaattgaattctgaacctctgagcttattcaaacgacaataactttttactcggatgtctgaatgagtcccgtaatacatcgagaagctcgaaattgaatgttgaagctcttaggctattctaacgacaataactttttt

SEQ ID NO: 11026 - DNA, 285 bp, Glycine max
  unsure (1)..(285): unsure at all n locations
tcgtctcgatatattacgagtctcaatcttacatctgangataaaagttattgttgtnntgaattgctgagagcttcaacattcaatntcgagcgtctcgatgtattacgggagttagtcagacatccgagttaaaagttattattgtttgaatntgctgagagcttcaacattcaatttcgagagtctcgatattgtacgggactcaatcagacatccgagtaaaaagttattggtcgttgaattagctctgaggttcagaatacaatttcgagcgtctcaata

SEQ ID NO: 11027 - DNA, 229 bp, Glycine max
gtgagccaattctaacgacaataactttttactcggatgtccgattgagtctagtaatatatcgacacgctcgaaattgaatgttgaagctctaagcctattcaaacaacaataacgttttactcggatgtccgattcagtgacgtaatatatcgggatgctcgaaattgaatgttgaacctctgagccaactcaaacgacaataatgttttactcggatgtctgattg

SEQ ID NO: 11028 - DNA, 424 bp, Glycine max
  unsure (1)..(424): unsure at all n locations
ggctatatagaaacaagtgcnttgattntcatgtggtgtttccaatttctgcaactctattacagatgttctcaaaacaatatgtggttgtcggtacgagtggcatgatataattttaagcttgagataaatgctttaaaaatgtgaccatttgctcaaaaaaaattctgcacacatcatttacttatatgtaatgcgttatacataaaacatgggattgtgacacaggatgactgattctgcattttatataatttattcataaatacataggaaagtaacacaaataggctgagtacttttaaaatcacaacttgtatttaaacaaactctattgaaaatatataaaatgccactatatcaaggcttataaagtattgtagatttttagttaaaatcagtattacagtaccatatgtatgat

SEQ ID NO: 11029 - DNA, 277 bp, Glycine max
  unsure (1)..(277): unsure at all n locations
ntagttcattgcttcaagtagtgctaatatgcttctagaggaaaacacgttgccaaaaagttactattaggccaagaagatattgtgcccgatgggtatggagtatcaaaagattcatgctttccctaatgattgcatactttacagacataagtttgaaggaatgcacaaatgccctaggtgtggggtatcacgatacaaagtgaaggatgatgacgagtgtagtagtactgatgaaaactcaaataaggtccccccagcaaaggtgttgtggcat

SEQ ID NO: 11030 - DNA, 357 bp, Glycine max
  unsure (1)..(357): unsure at all n locations
ntaaatatctgatgacgggaatcctcatctgggagtggtatataaatcaattggtgcagacgacctgttcgcagaagcgcgggatctataatgtctggtcgattagtggccccaatgatgaacacagctttctttgctgacatcccatgcatctctgtaagcaattgattcacaaccctgtcatcagcgccaccagcatttcttacactgctgcctctctgcaagatgaggcacacatgttttctacacataacaagacattactgtagtcttaagtactaagtcacactaattagctatgttttaaatttttttaaatacatacgaatgcctgagaaacccatacttctatctgat

SEQ ID NO: 11031 - DNA, 374 bp, Glycine max
  unsure (1)..(374): unsure at all n locations
atctanngtggaggaatcatccannattgagatgggcaagtcctctacaacaacaatagcctgtcccttatntccaaaatgttgctggtccaagcaagccatatgttcctcctccaatgcatcagtagtagtaacaacaacaacaaagacaacaagcaactgaggccccttcttaaccttccttagaggagttagtgaggcaaatgaccatctagaatatgcaatttcagcaagaaacaagagcctccattcanggtctgacanatcagatgggtcagatggctactcagttgaaccaagcttagttccaaaattctgacaaattgccttcacagactgtgcagaaatctgaaaatgtgagtgccatcaccttg

SEQ ID NO: 11032 - DNA, 345 bp, Glycine max
gagcgtctagatatattacgggacacaatcagacatctctagtaaaaagttattgccatttaaatttggtgagagcctctgtattcaatttcgagcgtcaagaattattaaatgactcaatcggacatccgagttaaaagttattgtcgtttgaatttgcttagagttactattctcaatttcgtgcgtctcgatatactacaggactcaatcggactttccagtaagaagttattgtcatttgaatttgttgagagcttctatattcaatttcgagcgtcttgaattattatgggagtaaattctacattcgaagtaacaattattattcgttcaatttgctga

SEQ ID NO: 11033 - DNA, 270 bp, Glycine max
  unsure (1)..(270): unsure at all n locations
ttgagacgctcannattgaatgcaggagctcttaccanattcanatgccaataactntntactcggatgtccgattgagtcccgtaatatatctagatgctcanaattganaacagaagctctgagcaaattcaaacgacaatagctnttgactcggatatccgattgagtcatttaataattcgagacgcctcaaattgaatacagaagctctaagcaaattcaaatgacaataactttngactcgaatgtcncgattgagtcatttat

SEQ ID NO: 11034 - DNA, 418 bp, Glycine max
tgtttcaaaccatagatggatttatttagtttgcaaaccatagactttgagtcacctgatacaaagttttctagttgcatcatataaattgtttcttcaatgtcaccatttagaaacacagtcttaacattcatctgatgtagctctaaatcataatgagctaccaatgccattattgttcaaaaagaatcctttgaagatattggaaaaaaggtttctttatagtcaatgccttccttttgggtaaatcctttagcgactagacgagcaacattgccctttgaatcccttttggttttaaatatccatttgcaaccaataggtttcacacttttaggcaattcgacgagatctcaaacgtcattgtcttgcatagatttcatctcatccttcatggcattcatccacatttgagagt

SEQ ID NO: 11035 - DNA, 348 bp, Glycine max
  unsure (1)..(348): unsure at all n locations
ctcagcttgccttgctccttgattattgagggactcatggtcactatgaatgacaaattccttgggataaaggtagtgttgccatgttttcaaagcccgtactaaggcatacaactccttatcataagttgaatagttaagggtaggaccacttaacttttcactaaaataagcaattggatggccttcttgcatcaacacagccccaatcccaacatttgaagcatcacactcaatttcaaaagatttttgaaagtttggcaacgcaagtatgggggcattagttagcttttgcataagaacattgaaagctttttttgtttnttttcccatttgaaaccaactttt

SEQ ID NO: 11036 - DNA, 287 bp, Glycine max
cttggagtttccaagtgccaattcgtcttcttcttttgtccagtcttcttctgacttcaattcatcagtgggctttccttctgtgtccagcatcttgggatgttcccagcctttgatgacagctttccaggttctgctatccagtgatttgaggaaggccaccatccttgctttccagtattcatagttggttccatccataattggtggtctgttcactggtcctccttctttctccatgttcatcagaatttatctccctagatctcactcagtgacttcgagtg

SEQ ID NO: 11037 - DNA, 344 bp, Glycine max
  unsure (1)..(344): unsure at all n locations
ctcgtggcttctntgagaagctntctcaagaagcttctntgagaagctagatccttacctatccacacncctctanttaactaaattaacctccttaaaataattatggatgaaaataacgcaacanataatcaaacaccaaacataattactaataatatatagatatatatatcagggtgttatagaacatgcagtttcagcaggagactagagcctcaattcagagtttaacaaatcagatggtgtagatggccacccagctgaaccaagctcaatcacaaaactctgacaagcggtcttctcaatctgtccagaatcccanaaatgtgagtgtcattaca

SEQ ID NO: 11038 - DNA, 401 bp, Glycine max
  unsure (1)..(401): unsure at all n locations
ntatcaaatggatgttaaaagtgcttttgtaaatggcttaattcaagaagtatatgttgaacaacctccaggttttgaaatatcagataagccaaatcatgtttatagattgaaaaaagctttacatggtttgaaacaagccccctagggcatggtatcaacgtctaagaaaatttcttttagagaaagatttttctagaggaaaagtggataccacactattcataaagagaaagtatgatgatattctgttggtttaaatatgtgttgatgatataatatttggatccactaatgattcattgtgcaaggagttctctcttgatatgcaaagcgaatttgagatgtcaatggtgggagaactaaattactttctatggttacaaatcaaccaaactaaa

SEQ ID NO: 11039 - DNA, 261 bp, Glycine max
  unsure (1)..(261): unsure at all n locations
gaacaccgagactatttagtctcacaaatgcaagaactacgtatgtctgagttcctcatcacaaattgaggatacgtaggagcaaaagccncgcttttgtcgaccacctcgccttttgctatcgtgacctgtgagaacggtggcacgcggaaacacccgatggttattcgcgcacactatatgctatcccatgacctatgagtccggtggcacgcggagacacccgatgggtatccgcgcacactctatgctatccaatga

SEQ ID NO: 11040 - DNA, 299 bp, Glycine max
atggcactcacatttttcggattctgcacagtttgtgaaggaaatttgtcagaattttgggactgagcttggttcaactgagtagccatctgccccatctgatttgtcagactctgaatggaggcttttgtctcttggctgaaatgcatattctggatggtcatttgcctcactaactcttctaaggaaggttgaggaggagcctcagtttcttgttgtcttttgtgtgattgctgctgctgtattggaggaggaacatatggcttgcttggaccagcaacattctggaaaggagggac

SEQ ID NO: 11041 - DNA, 344 bp, Glycine max
  unsure (1)..(344): unsure at all n locations
tcacctctaatgagctggtgaagaagaatgtgtgcatttacctgggtgaaaaacaagagcaagcctttgctttgctcaaagaatagcttactaaggcacctgttctagctcttcctgactnttctaaaactattgagctagaatgtgatgcctctggagtgggagttggagctgtattgttacaaggtgggcaccctattgcttatcttagtgaaaaacttcatagtgccaccctcaactaccccacctatgataaagagctntatgccttaataagagccctncaaacttgggaacattaccattgttccaggagattgtcattcatagtgatcatcaatcac

SEQ ID NO: 11042 - DNA, 432 bp, Glycine max
  unsure (1)..(432): unsure at all n locations
acagagaaacttttgaagatagttgaaaagntttttcaaccactgagtagcacatgagattttctcanagcctttttaccaaagaagttttactctttggtaatcgattaccagattattgtaatcaattaccagtagcagaatggttntcaaaaagctttcaactaaatttacaacatttcaattgatttcaaaatgttgtaatcgattacaatgttgtggtaatcgattaccagtgtgcttgagcgttgaaattcanattcaaatgtgaagagtcacatcctttcacaaaaaagatttgtgtaatcgattacactgatttggtaatcgactaccaatgatagtttctgaacaaatcagaagatgaacacttacatagttttgactcttcaaatcggttaagttttctaacgcataactttctatggtctc

SEQ ID NO: 11043 - DNA, 346 bp, Glycine max
  unsure (1)..(346): unsure at all n locations
atatatagagacgctcgaaattgaacaacagatgctctctagagatgtaaatggtaaaaatttttcactcggatgttagattcaggcacataatatatcgagacgtttgaaattgaacactaaagctctggtccaattcaaacggccataacttttaacatgggtgtatgattgacgcccatgatgtatcgagatgatagaaattgaataacggatgctctcatgatatacacatggtcacaagttntcactcgtatgtcagattcaggaacataatatatagagacactcgaaattgaacacggaagctctggtccaaatcatatggcctaaactattgacatgc

SEQ ID NO: 11044 - DNA, 400 bp, Glycine max
  unsure (1)..(400): unsure at all n locations
tctttagactgggctgttcatgcagtcctcttagacccttatctgccactatntcgtcatgccaaggctccagaaccccaacaggttttgcctattagatgtactcggaataaacctcaatagctncttccgcaatgtacctttcaacaatatatacttcaagacagtgtagattctttgtatacccttttaagatctccatgtattgctcaatcgggtacatccaccacaaataaacgggaccgcaacgattaatttctctcaccagatgaacaattaagtgaaccatgatgtcgaanaacgaaggagaaaaatacatctccaattgacacaagataatagcaacctcatnttttacctcatctaacttaagaggatcaatgactatgctacatttgac

SEQ ID NO: 11045 - DNA, 273 bp, Glycine max
ctaccatcctcaactcacggtcaaactgaacggaccattcaatccctggaggaccttttgaggtcatgtgtcttatagcaaaaggggagagctctctttcattgatagagttcacttacaacaacagttttcactctaccattggcatggctccctatgaagctttgtatggtagaaggtgtaggacacctctatgttggctaaagccctgagaagacctcaccttatgacttgaagtggtacatcaaaccaccgagaaggtcatgttgatcc

SEQ ID NO: 11046 - DNA, 356 bp, Glycine max
  unsure (1)..(356): unsure at all n locations
cttaatcgtcaccttattcaactggcgggagtctacacacaacctcatggtcctatctttcttctttactaacaacactggtgctcccatgggagatacactgggtctcacaaactgcttctccaaaaactcctctaactatntcttaagctcggctaactctataggagacatcctataaggcgctatggatataggtccagcaccaggtaccaggtctatggaaaactctatctctctcttgggtggtagaccaaatatatccttagggaacacttcangaaactctnctgacatagggagatcacacatggaaacctttgtctctatttccaggntagacaagatcatgtaca

SEQ ID NO: 11047 - DNA, 382 bp, Glycine max
  unsure (1)..(382): unsure at all n locations
ataaatagttctcggaggtccgattcaggcgcattatntatcgagacgctcgtaattgaacaacggaagctctcatgaaattcattggtcataacttttaactcggaggtccgattcaagcgcataatatatcgagacgctcgaaattgaacaacggaagctctcaagaaatttaaatggtcaaaacttttaactctgaggtccgattcaggcgcataatatatcgagacactcgaaattgaacaacagaagctcttgagaaattcaaatggtcataacttttaactcggaggtccgattcaggcgcattatatatcgagacgctcgaagatgaacaacggaagctctcgagaaattcaattggtcataacttttaactcag

SEQ ID NO: 11048 - DNA, 429 bp, Glycine max
  unsure (1)..(429): unsure at all n locations
tggtagaatatggtgttaaactatcaccttatattgcatgagtgttttctttgtgccaacatctcttaaagaccaactacgaagaataatgaatagcttttggtggggtttgaaatatgcaaattcaagagaataatttggttgaattgtgataaaatgtctatgaaaaaaagagtttggaggaatggaattccgcaacttgcatggatttaatcttgcaatgcttgggaagctagggtggcaatttaccacttataatgatgctaccatgacaaaaattctcaaagcaaaatattgccccaatggcgatttcttggatgcccaactngggcatagtccaagctatgtatgacatagcatccatgcttcacaggtcctcgttagaaaagggtttcaatggagattagatgatggtgataaaatcaacat

SEQ ID NO: 11049 - DNA, 204 bp, Glycine max
  unsure (1)..(204): unsure at all n locations
tatcttaagaaggggggggttgaattaagatattccaaacttttctcctaattaaaaatctatcttactntttacttaagttatgaattcccttaatgacaatcttcttaaatgttaattcagatgaagcaaccttgatataaatatatagcaataattatttaaggagatttagggaagagaaaatcaaactcagtttatact

SEQ ID NO: 11050 - DNA, 220 bp, Glycine max
gctgatgcaacaattgttagcccgggctatacgagacatcttgccaaacaaagtcaaggtagcgataactcgcctgtgctttttcttccatgctatatgtagcaaagtcattgattcagtcaagtttgatgagttggaaaatgaggccacaattatactgtgccagttggagatgtattttccccctgctttcttttacatcttgaatcacttgattatg

SEQ ID NO: 11051 - DNA, 338 bp, Glycine max
  unsure (1)..(338): unsure at all n locations
tggaatgaacaaggaagaaagatgatctgaggcnccacttcgaggagaatatgagtcaagaagaagctcaccaccatacgaagccatggataaaagcttgaaggtaggagaatatgagtggagagaaatggagagaagaagcacgaaattttgtgcctcacaagaggtctaaactctgaagtataattctcaaatgatcaaagttgaaaaaatacacacacatggcctctatttatagcctaagtgtcacacaaaattggacggaaatttgaatttctattcacatttcacttgaattagaaattgaatctgcggagccaaaatntcactaattatga

SEQ ID NO: 11052 - DNA, 373 bp, Glycine max
  unsure (1)..(373): unsure at all n locations
gtcacctgatgcatgcaagcatatacagatcttctagacttgggctgataacatgcagtcctcttaaacccttacctcccactttttcgtcatgccaaggctccagaaccccaacaggttttgcctatttgatgtactcggaataaacctcaatagcttcttccgcaatgtacctttcaacaatagatacttcaggacagtgtagattctttgtatacccttttaagatctccatgtattgctcaatcgggtacatccaccacaaataaacgggaccgcaacatttaatttctctcaccagatgaacaattaagtgaaccatgatgtcgaanaacgaaggagaaaaatacatctccaattgacacaagataat

SEQ ID NO: 11053 - DNA, 335 bp, Glycine max
tagagaaacatttggcgccaccgagctcatccaaaagctcgtcaatggtgggaattggaaagcgatcacgaacggtaatggcattcggggcacggtagtcgacaaaaaaccgccataacccatcacttttcttcactaacaacaccggagaagagaaagggctcatgctgggttgtatgaggcccttttggagcatgaggtccacctgaccttctggaaatgcaggtaacgatacggccgcatgttgatcggagttgattgtggaagaaggtggatatgatgatcaatgttgcgctccggcggtaagcaccatggttgttgaaacaagtgcgtga

SEQ ID NO: 11054 - DNA, 445 bp, Glycine max
  unsure (1)..(445): unsure at all n locations
agcttagactaagttcagcctaccatcctcagactgatggtcaaactgaacggaccattcaatccctggaggaccttntgaggtcatgtgtcttagagcaaaaggggagagctttctttcattgatagagttcacttacaacaacagttttcactctaccattggcatggctccctatgaagctntgtatggtagaaggtgtaggacacctctatgttggctaaagccctgagaagacctcaccttangacttgaagtggtacaacaaaccaccgagaaggtcaagttgatccaagaaaggatgaggactgctcagagtangtagaaaagttatcaggataagaggaggaaagacttggaattcgaggttggtgatcatgtattcttgagagtcactctgtggactgnngttggtcgagcattgaaatcccaaaaactaacacct

SEQ ID NO: 11055 - DNA, 373 bp, Glycine max
  unsure (1)..(373): unsure at all n locations
agctgcattcctctcttcccttanacttctnttatttattgctatttatctnttgctctaaagaagtctatattgaattgtcttatgagtaattcatgttaagggtgcattgttaatccgaaaagagagactgaaagcttaattgaggaatagtctttgtatcttaattcgacccctttttttcttaatgtaactgaggtcatttgtccaacatcctatttttgacaactcgcttctctaagaagacaaacattccggcatgataaaatgaggccacatgaacgtctgtatatttactcganaacacaatcaatcaaatgccctttttctttatgaacccctttttggtatttgatcttatgagattttttac

SEQ ID NO: 11056 - DNA, 333 bp, Glycine max
tcttcttcttcaccgaaacatgtgaagggcctaataacagaacaaaattctctgcctccatgaacaacatatctttcgcacttccttcggtggcgattcttcagcaacatttctcagggaagggcaataacggtgtttacaccacggacttcccagctgttcctctgagagcctttaactacacggggactccaccgaagaacaccattgtgaaaagaggaaccaaagtggtggtgataccctttaacacgaggatgcagttggtgtcgcaggacactagcattttaagtgcagagagtcatccgttacatcttcatggtgggtcaaggtttt

SEQ ID NO: 11057 - DNA, 342 bp, Glycine max
tatgttgcaaacatctacaatagacctcctctacctcagcagcaaaatcagccacaacagaacaattatgacctctccagcaacaggtacaatcccgggtggaggaatcatcccaaccttagatggtcaaatccttcacaacagcagcaacaacaacaacaaccttattttcaaaatgttgctggcccaagcagaccatacgttcctccaccaatccagcaacaacaacaacaacaacaaccccagaaacaacaaacagttgaggctcctccacaaccttcccttgaagaacttgtgaggcaaatgactatgcaaaacatgcagtttcaaaaagataccata

SEQ ID NO: 11058 - DNA, 398 bp, Glycine max
  unsure (1)..(398): unsure at all n locations
gtcacctgcggcatgccaagctttctttgtgggttgatgggttctgtcgcgtataatggcatgatcactggctaacatattctcaattagctcagttgcttcttccggngtcttcagctnntattttccccttgaagaagaatctagcagttgcttggtttgtggtctcagcccaactatgaacatattcaattgaattggctcggaaaactcatgggtaggagttcttctcaatanacctctgaacctctccaatgctntactcagagattcattanggaactgatgaaatgaagagattgtagctntcctttctgcagtcttagactctgggaagtatttctttagaaacttttcaacaacttcttcccaggtttttagaatgttacccttaaatg

SEQ ID NO: 11059 - DNA, 323 bp, Glycine max
tgtaatcgactacacatatacttttatcgattaccaaaacacattttcagaaaatattctcaacagtcacatctttctatgggggacttgaatggctatcaaaggcctatatatatgtgacttgagacacgaatttgcgaagagtttttcagaacaaaaaggtcttatcctcttaaaaagcaaaatcgttttatcctcttacaaattccttggccaaattacttgtgattcaataaggaattatttgagtgctcaaattgttcaatctatctctttcaagagagattgcttcttctcttcttcttcattctgaaaagggatta

SEQ ID NO: 11060 - DNA, 321 bp, Glycine max
tgggcattatcaaaatgaatgttcaacttgttaagattgagccaattatgctgaattcaatgagaaagaaaatgtgttgcttatggcacaagaatgctcgaaagaaaaggtgtatgatgagtcaaatgtggaaatgtggtttcttgactctgggtgcagtaaccatatggttggaagaaaagattggttattcaattttgatgatagtttcagagattttgtaaaattgggtgataactccaagatgcctgtcatgggaaagggaaatctgaagctgtatattggtggattagttcaggtggtaactgaggtttactacct

SEQ ID NO: 11061 - DNA, 330 bp, Glycine max
tcttagtttcagatgacgtagattggtttatggctacctcatgcactcctctaatgactatggcatcatttctggcgctaaactgctgggagttggaagccatcttctcaattaaatttctggcttcaacaggagtcatgtctccaagggctccatcactggcagcatctatcatacttctctccatattactgagtccttcataaaaatattggacaagaagttgttctgaaatctgatggtgggggcaactgggacatagtttcttaaatctttgccaatactcatacaggctctcttcactgagttgtctaatacctgagatatcct

SEQ ID NO: 11062 - DNA, 323 bp, Glycine max
  unsure (1)..(323): unsure at all n locations
agcttctcgatatattatgctcctgaatcggacattcgtgtganaagttatgaccattggaatntctcgagagctttcgatgttctatttcgagcgtctcgatatattatacacctgaatcggacttccgtgtgacatgttatgaccattttagtttctcgtgagcttctgttcttcaatttaaggcttctcgatatattatgtggctgaatcggacttccgttgtaaagttggaccatctgaatgtctgagagcttcggtgtcattttgagcgtctcgtatattatgccctgatcggactcttgtgacagtatgacattgaa

SEQ ID NO: 11063 - DNA, 337 bp, Glycine max
tctatagaaggttcgttcctaatttctctacagttgcatcacctctcaatgacctagtgaagaagaatatggcatttacctggggtgaaaaacaagagcaagcctttgctttgctcaaagaaaagcttactaaggcacctgttctagcttttcctgacttttctaaaacttttgagctagaatgtgatgcctctgaagtgggagttggagctgtattgttacaaggtgggcaccctatttcttattttagtgaaaaacttcatagtgccacccttaactaccccacctatgataaagagctttatgccttaataagagccctccaaacttgggaact

SEQ ID NO: 11064 - DNA, 334 bp, Glycine max
tatgctgcaaacatttataatagaccccctcagcagcaaatccaacaacagtagaataattatgatctttcaagcaacagatacaatccaggttggagaaatcatctaaatctgagatgggcaagtcccccacaacaacaacagcctgtccctcctttccagaatgctgctagtccaagcaagccatatgttcctcctccaatacagcagcagcaatagcagtagtcacaacaaagacaacaagcaactgaggctcctcctcaaccttccttataagagttagtgaggcaaatgaccatccagaatatgcaattttagcaagagacaagagcct

SEQ ID NO: 11065 - DNA, 335 bp, Glycine max
tggagtcaatttcattttgaatgtgttgatctgtgatattaaattgtttatttatcagttctttgcactttaaagattttaactttccaacctcaataggtgaaatgaatacatgaaatgatacaatacatttattgtcaactatgcaatgctttacactgaataaaatatttgaattttataaaagatatgcaaggtagagcgctgatttttttgtaactttaataggtatgtgtttattgtctataaaatatatttacactatttttatattgttattataacaataaatttattatacaaaatcaaaatgaatgttacaaataaaaaataaa

SEQ ID NO: 11066 - DNA, 324 bp, Glycine max
tatactatatcgagacgctcgaatttaaacatccgaatctcttgagaaattcaaatggtcgtaactttttacaccgatgtccgattcgggcgcataatatgtcgagaagctgcaaattaaacaacgaaagctcttgagaaattcaaatggtcataagttttgacacggatgtactatttaggcaaatcacatatcgagacgctcaaaattgaacaacggcagctcctgagaaattcaaatgctgataacatttaacgacccttaaaatggccgatgcaggcttatactataccgattctctcgaaatagcacgacacaagatcc

SEQ ID NO: 11067 - DNA, 368 bp, Glycine max
  unsure (1)..(368): unsure at all n locations
agctagaatgggacctcggtgtngaaagttatgactcattgaatttctcgagagcttccgttattcaatttcgtacgtctctatatgtgatgctactgaatcggacatctgtgtgaaaagttatgaccatttgaatttctcgagagcttctgttgttcaatttcgagcgtctcgacatattatgctcccgaatcgggcatccgtatgaaaaattaagacccattgaatttctcgagcgcttccgatgtttaatatcgagcatctcgatatattataagcctgaatcggacctcagtgtgagaagttatgaccatttgaatttctcgagagcttccgctgttcaatttcgagcgtgtcgacatattatg

SEQ ID NO: 11068 - DNA, 222 bp, Glycine max
aaagacttgggttggggctgggaagggcattaatctaattttcttgtattgcaagctttgttgtagattgagggtataagacaaaagcttgaacctattttctgagaaaagctaatgtaccctttttgcaaggatgtgcaaaaattgctgtaggttaatgttatagtgctattgattgaactaactgacttttttttgttattgggattgcaggtttggggt

SEQ ID NO: 11069 - DNA, 334 bp, Glycine max
tatcttgttattgcataatactttcttcttgcttatcacgcttatcttgagttcttttggatccctagcttttacctttttttcaaacccccaacaagaaagaactacaacttaggaaccaacatgtgtcatcattcatctagtgttaatggcgagggtactagtcataaggaccctttatcttgaatcttagatgagttgagttccctcaagttatggaaagaaaaaatataaagaaaaaaaaggaaaagagagggtaaaaacaaatcaagatgagagggaacaaataagggaagaagaaagaaggaaaatactaaaagagttaagaaaagaa

SEQ ID NO: 11070 - DNA, 363 bp, Glycine max
gctcgcagtagtctatacacattctgatgcaatcctaccacccaagggcattggatagaatactccaagaagattgcgccagagaatgccctatggttctcatgagccttacggtagattgtgggcccatgggctaagtatgagcccacttatctttgtacatattatatgaaggttgtattatttgtgggccttatattgagcgctccataatgtatgcagggtaccctataaatgtaagatttctcagccctcgtattttacgacatctagactagtatttgtatgaaggtgagttgtgtaattccacatgcattacatgaatatttgatgtgtgagatgagaaataaacttaattgaatt

SEQ ID NO: 11071 - DNA, 459 bp, Glycine max
  unsure (1)..(459): unsure at all n locations
tgtatcttatcattagatacgaatgaatgaacttgattagtaatctctatccagctgcaacctgggactcttgcatcacacttgtttcccatcattctacgaactctttccacatcactccaatgtctatgggaagcataaatgttagacatgactgcatagtttacattcttctctggctctatggtgaagagctnctctgcggcccatttagccagtcctatatttgcatggagattgcaagatgcaacaaatgctcctaatgtatttgattcagcttccattggcattgacctcaagaattcaaaagcctcatttataagaccgtatcgtccaagaaagtcaacaaggcaggtatagtgacctgaatcatgaacaatcttatacacactggtcattaagttaaagtagtgaagtctcttagtcacaatgccacaatgagaacaggcagagagaaca

SEQ ID NO: 11072 - DNA, 325 bp, Glycine max
tcagaattcaatttcgagcgtttttatgtatttcgagactcaatcagacatccgagtaaaaagttatctgtcccttgaatctgcttagagcttcaacattcaatttcgagcgtctcgatgtattacgggacttaatcagacatccgagtaaaaagttattgtcgtttgaatttgctgagagcttcaacattcaatttcgagcgcctcgatgtattacgggactcaatcagacatccgagaaaatagttattgtcgcttgaatttgctctgaacttcacaattttatttccatcatctcgatattttacgggactcaatcatacat

SEQ ID NO: 11073 - DNA, 317 bp, Glycine max
tattaagagttataaacagaattaataaatctttttttacttatattgaacatatgagttattattatctgttttgggccccttatctaagaaattttttaaacaatatgcagttcactttctgagtttggtgctcttggaattgaattgggttactcaatggaaaatcccaattcattgataatttgggaggctcagttaggtgattttgctaatggtgctcatgtcatattagacaatttcttggcttctggggaggctaaatggctgcgtcagactggtcttgatgtgctactttctcatggttatgacggcca

SEQ ID NO: 11074 - DNA, 327 bp, Glycine max
  unsure (1)..(327): unsure at all n locations
agcttctcttgcantgattccncaatatcatgagcctctngcaagggcatatccgatggcatgacaatatcaacctcaacanagtagtgagatccatatgtgtatgcccgaaccgtatcaatgtgccttacagccttatggtggttccagcataggtatgtaagtntctgaagatactctggtgctgctgatcttcccaccagggagttaacatttttcaacactgtcattgaccatgtgcgaatggtgtacaaagccagctgctgtagatgaattacacataagctaaacaagttaaatttatacaagtgaccacgtataaaatga

SEQ ID NO: 11075 - DNA, 310 bp, Glycine max
  unsure (1)..(310): unsure at all n locations
gccccagctcttactccttgattatgcgctaaacttaactcaacccttgtccaagcttgttttgctncggccaccgctatcttcatctcttaaaccttattatatcgatgataactatgtgggacttgtaccacgttctgaccgcggtggtgccgctctacgtggcgatgatcctggcctacgggtccgtgaagaggcggaagaacttcacccctgaccaatgcttcggcatacaccgctgtgtggcactattangaaatacactcctatccttgcacttcatcttcaccaacataccttatgccatgaa

SEQ ID NO: 11076 - DNA, 404 bp, Glycine max
  unsure (1)..(404): unsure at all n locations
tgcttaaccaccttntcccggtgaacgatccttcgacttctggcgaggcacctccccaagctgaggagggatgtgatgcttcaacttcaaccagcacaaagagtagtgatgatctgctgatgcctaaggagttagcagcagccaaccatcacattgagagcctttatatgaagagtaccatttcagctttgcatgttntgcagganattcgaaagggaagctcaacagttagcatgttntcattgccaccattgcagataagtggcttggaagaaacatggaacaaaatccctattctggaacaaacagccaagtaatgtgcttgatacattgnggattgaaaactagctagttntagtggcttgggagttcacctttatttattttttttacttttcaaatct

SEQ ID NO: 11077 - DNA, 420 bp, Glycine max
  unsure (1)..(420): unsure at all n locations
atcttaagtcacctgcggcatgcagctaggaggatgaagttgagctgaatgctatcttggtgaaattgtgcaaaaagtagaagtcatgaagctagtccaatttacaatgcagtgaataaccctacagttaactatagattntgtagtacttccttgaaaatcacattggttgttttatttagtggttntccttctttatcatgaataagaaatttcaatccagctttgctctgaactcttgataatgccacataaagttgaccatgactaanaactggttgaggaagatataatccaacacattgaagagattagccttgagatntattgattgtcatggcatatgacacaataagtgggaattgtcttctagtcatcttgaaaggccaaggagtntgagattgtgataatgacattcgt

SEQ ID NO: 11078 - DNA, 331 bp, Glycine max
  unsure (1)..(331): unsure at all n locations
agcttctgtccctgagatactggttcccagaagacatcagggagtgaagattgctgataaccctagccttgcaacaagtcctagggaagtagacacggagatggacaagaaaatccgcagtattgtgagtagcattntgaaagacgcctctgttcctgatgctgagaaagatgttccaacatcctccaccccggatgttgctattcctgatgctgagaaagatgttccaacatcttccactccaaatgctgaagtcctcccttcacccagtgaagaggaatcatcagaggaagaggatcaagccacagaggagacccctgcaccacgggca

SEQ ID NO: 11079 - DNA, 345 bp, Glycine max
  unsure (1)..(345): unsure at all n locations
agcttgtgccgaaacactctatggtggngtgctatgtatgccatagtggctntagttcagtgatagaagcaatggtcaatgactgccaactggtgctgttgcctttcaagggtgaccacgttttcatggccaaagatttggaggcaggggtagaggtgaataggggtgatgaagatgggttctttcacaaagaggatatattggaggcattgaaaactatcattgtgaaggatagcanagaaccagggaagcacacaagagaaaaccacatgatatggtgcaaggttttgtcaaataaggaaattcagaacanattcatcacaggtcttgctgcccagttgaagt

SEQ ID NO: 11080 - DNA, 325 bp, Glycine max
tatccaaacatatcctttatttaagttatgtcttcttattctcgtaggaccgtgaatggaggcaagctataactgctgctggatctggatgcgttgcagctttatcagttgagagatatcttgtgagcaatgatcttcttatagagttccatcaggtatttgacttctaagaactcctattttgttttcgcttatcgttctttaggtatctgacactgtaaattgagcgtacacatcacattaccaatttactgcatctctattatatgtcttaattcttgtacatttgcacagaatcagatgcaactttagcaagatttgcttg

SEQ ID NO: 11081 - DNA, 298 bp, Glycine max
  unsure (1)..(298): unsure at all n locations
tgacctctatcaacgatagaaaactctcccaactcctctattgctctaagacacacgccctcaaaaggtgcttcagcgactacatggtccattcaatttggccatcagtccgaggatggtatgctaaacttagtctaagcattggccccaacgctctgttcangctcccccaaaatctagaggtaaacctaggatctctatcagacactatgctagatggcacaccatgtaatctgacagtctcactaatatacaggganggcaactcttccaaagaaaatgtgatattaatgggaat

SEQ ID NO: 11082 - DNA, 363 bp, Glycine max
  unsure (1)..(363): unsure at all n locations
gcttctaaactntgtacaagaatgaagctctgatactcacttgttagacaagtggcctcagatatcttaagaagggggggttgaattaagatattccaaacttttctcctaattaaaaatctatcttactttntacttaagttatgaattcccttaatgacaatcttcttaaatattaattcaaatgaagcaacttgaattatgaatataaagcaataataaataaaggagattaagggaagagaaaatgcaaactcagttntatactggttcggccacacccttgtgcctacgtccagtccccaagcaacccgcttgagagttccactaacttgtaaattccttttacaagttctaaacaca

SEQ ID NO: 11083 - DNA, 333 bp, Glycine max
tcatgagagagtcatagatcaaattgagaggtataataatttctatgctaaacaagccatcaaagggagaaagaaggttgtcttcgaacccggagattgggtttgggtgcacatgagaaaagaaaggtttccggaacagaggaaatcaaagcttcaaccagggggagatggaccatttcaagtgcttgaaagaatcaatgacaatgcttacaaagttgagctgcccggtgagtataatgttagttccaccttcaatgtctctgatttatctctttttgatgcatatggagaatccgatttgaggacaaatccttctcaagagggagagaatga

SEQ ID NO: 11084 - DNA, 336 bp, Glycine max
tgaaggtaaactagacgccttggttaacctggtaacccaactggccatgaataagaaatctatacctgtcgcaagactctgtggtttatgctcctctgccgaccaccatacagacctttgcccttttgtgcagcaatctggagcaattgaacagcctgaagcatatgttgcaaacatctacaatagacctcctcaacctcagcagcgaaatcaaccacaatagaacaattatgacctctccaacaacaaatacaatcccagatggaggaatcaccctaatctcagatggtctagccctaaacaacaacaacagcaacctgctccttccttacaaaa

SEQ ID NO: 11085 - DNA, 373 bp, Glycine max
  unsure (1)..(373): unsure at all n locations
gagaacaatgacaattgaagaatcaattcatgtttccttntatgagtctaatgctatttctctaataaaggatattttagatgatattacagaatctttagaacaaatgcacattcatggacaagattctaaaggaaaaggagaaggaaacaataaagatccttcagcagaagtcaaagcaaataatgatcttccaagagagtggaaagcttcaagagatcatccccttgacaacattcttggtggcatctcaaaaggggtaacaactagacattctcttaaagatntatgcaataatatggcttttgtgtctatggctgaacctacaaatataaatgaagccataatagatgatcattggatagttgctatg

SEQ ID NO: 11086 - DNA, 414 bp, Glycine max
  unsure (1)..(414): unsure at all n locations
tcacctgcggcatgcaagcttctccacaggacatatactnntgtgtttaccatccttgcaatgaggcatttgaggagttgaggaagaagtttaccacctctcctatcttgtagccactagattgggagcttccttttgtgctcatgtgcgatgcctctagccatgcacttggggatattttgtcattgagagttggtagcctctcccacatcatngcttatggttcatgcactntagatgcaacctaagttaactacaccaccactgagaaggagctnttagctattatatttgctttagataaattcatatcttattttctttgctcccatatgatngtctntactgaacatgcagctttgatatacttattgaagatgcctgatgctaaacctatattgatcaagtgaaagc

SEQ ID NO: 11087 - DNA, 400 bp, Glycine max
  unsure (1)..(400): unsure at all n locations
ngctctcataacacttacttaaagtagctatgtnattatataagttcaaataagctggacatataaactcttccagtgcatattatcagcaaagactcacttgngggtaacatgcaacatgtaagagggtatgcatataaagcatactacctcagactagaccatcatataaacccatgcatgcataccttgcaatttctgctcgtcttctagcctcttcagccatctgattaagttctgtgtaacttgtacgttcattgaacatcttaggctctggtgggcgaaagccgtgaagcgtcctctgtgcatgtgcccatttaagttcacgttcttcctattcaaaatctatnttccttgtagaagcaatctgacacagaattcatattacagagtaagcaac

SEQ ID NO: 11088 - DNA, 333 bp, Glycine max
tgaaggaaaactggatgcattggttaacttgttaacccatctggccttgaatcagaaatctatacctgttgcaaggtttgtggtttgtgctcctctgctgaccaccatacagacctttgcccttccatgcagcaacctggagcgattgagcagcctgaagcttatgctgcaaatatttacaatagacctcctcaacctcagcagcaaaatcaaccacagcagaaaaattatgacctctccagcaacagatacaaccctggatggaggaatcaccctaacctcagatggtccagccctcagcaacaacaacagcagcctgctccttccttccaa

SEQ ID NO: 11089 - DNA, 386 bp, Glycine max
  unsure (1)..(386): unsure at all n locations
agcttatgctgcanacatctacaatagacctcctctacctcagcagcaaaatcagccacaacagaataactatgacctatccagcaacaggtacaatcccggatggaggaatcatcccaaccttggatggtcgaatccttaacaacagtagcaacaacaacaaccttattttcaaaatgttgttggcccaaccagaccatacgttccttcaccaatccaacaacaacaacaaccgcaacagccccagaaatagcaaacagttgagacccctccgcaacccttccttgaagaacttatgaggaaaatgactattgcaaacatgcagtttcaacaagagaccagagcctccattcagagcttaactaatcagatgggacagttggatg

SEQ ID NO: 11090 - DNA, 197 bp, Glycine max
  unsure (1)..(197): unsure at all n locations
tgtcacacacaatggagggnaatntgaatctcaattcannattcacttgaatctganattgaatttgtggagccaacacttggagccaanatttcactaattatgattagtggaatttagttatggttcagcccactaatccaagatcaattccaagattctccactaagtgtgcttaggtgtcatgagtaggggtg

SEQ ID NO: 11091 - DNA, 215 bp, Glycine max
  unsure (1)..(215): unsure at all n locations
ctaccaactacagaccctaagaaaactatattatctacacagaaagtacacttctctatatttgcatagagggtgttcttcctaaggactganagaacttgcctgagatgtcctaagtgatcatctacgctcctactgtacactaaaatatcatcaaaatatacaactactaatctacctatgaaatccctcaagacatgatgcataagcctcat

SEQ ID NO: 11092 - DNA, 211 bp, Glycine max
  unsure (1)..(211): unsure at all n locations
cgatggcctcaataacatctattctccacatggaanaaggccaaggagcggacataacgttcagaggatgtggcggaacatcgacattgtccgcgtatgctngacanttatgacacttccttacatgagcgcagcaatcgctttccatggtgagccaataataaccggccctaanggattntctggtcatagcatgcccattggcatatgt

SEQ ID NO: 11093 - DNA, 174 bp, Glycine max
  unsure (1)..(174): unsure at all n locations
atgatctttcaagcaacagatacaatccatgttggagaaatcatccaaatctgagatgggcaagtcctccacaacaacaatagcctgtccctcctttctagaatgctgctggtccaagcaagccatatgttcctccaatacaaaagtagtcacaacanagacaacaagcaactg

SEQ ID NO: 11094 - DNA, 313 bp, Glycine max
  unsure (1)..(313): unsure at all n locations
atcgctatgaatactatattgttgacatgatactacgtaagngaacttcatgtcagctaatgaatggcattgtgtccacagtgaccgctcaccagttgtactctccatgctctctagttctgcagccttgtaacctctcattaattctgtgaagtganatgacaatattaagctcagccaataatagataagggaatgatctctctntctctctntcaatgagatttccgcaatataccttcatcctttgccatatcaagaaaagcctgtagctccaatgcttgtcggatatacatcattcctcggacttcac

SEQ ID NO: 11095 - DNA, 399 bp, Glycine max
atacagtattccattataagtactcttatgcaaaccatacagttaatatcttgtatatatattgatacaacataagtgaatgaatgacaatttaaattaataatacatattaaacaataaacgccatatatatatattcacgtaattgtgtaaataattgattacattatatctgtaaaaattttagaaatcatttaacgtgaaggagtatatataaatatacaatatatgtgtatgatatgtacaataaaatgcaaagagattgtgtacttacataatataaagatgatttaaatcctaaaatttttaaatttatatatcagaataaagttctatcactctcttatttaatgtattgaaatcttaaatttatgaatgattattaaaaagttccttatt

SEQ ID NO: 11096 - DNA, 401 bp, Glycine max
  unsure (1)..(401): unsure at all n locations
tcaatcaatagacctctaatctttaatggagaggtgtaccactactggaaaacccgaatgcaaatttttattgaggcaatagacttacatttgggaaggcatagaaatatggccttatatacccaccacagtagaaagaaccacaatagatggaagcacaacaagtggaagcaccacaatagagaaacctatagatagatggtctgaagaggatagaagatgagtacgatataatttaaaagccaaaaacataattacatctgccctgngaatggatgaatattttanggtttcaaattgtaagagtgctaaggaaatgtgggacactctacaagtaacacatgaaggcacaacagatgttaaaagatctaggataaagacattaactcatgaatatgaac

SEQ ID NO: 11097 - DNA, 296 bp, Glycine max
agctttactaataaaacatttttcatgatttgatgttttatctaaaattatcatgtatacgttatttgttctatagcctatatgttttatatttttatcatgtttattttcaataacacaattatgagagtcaaatgatactacaaagcctttatcacataattgactaacacttagtagactatgcttaagaccatcaacaagtagaacattttcaatggaagtagatggattcgtacctatttttctgactccaagaattctacctttggtgttgacgccataagtcacatgtt

SEQ ID NO: 11098 - DNA, 315 bp, Glycine max
  unsure (1)..(315): unsure at all n locations
tcttcnggattataattgatgttatctcgcaacctttcttctatgaaactcacaatccaatcaacagaagcctgatggtgcccattgtttgcatttctcccacatgtatgtgtaccatcaatactgctaataaaaaatgctggggcattatggagcttgacagcacgaatccgccatggacagccatctgaggcacacttagcaaagtagcgaatcaggtcactcttaatagtacgaagctcaaaatgctgtgcaaaggcagcttctttaattgcattccgaaatgccttcacatcatggaactcttgaccgaca

SEQ ID NO: 11099 - DNA, 293 bp, Glycine max
agctttaaaatgattatggattgattggcagatagtcaagtcaataatatcatatcgaaattgatagctgctcatgaaaaagatggtcatgtatacaatatcccaaatgttcctgaagttgctgcacttattgttgatgattttgatccaagctcaaaaagagatattattgttgaaactcaaaatggagaactacaaagaatccatgaattgcactctagctatctaagcctacagtaccctctactcttcccttatggtgaaaatggatataaagctgacatactttaccg

SEQ ID NO: 11100 - DNA, 287 bp, Glycine max
agcttgtgaatgtatatctttcatttccaacttgcaagtaaggtcttgaagttgctccgtgggaagtccttggtaagggatgtattcggtggctataagaccactgtctaatttttccttaataaaatgtcgattaatctctatgtgctttgttcgatcatgttgaactggattgtgtgcaatgctgatggcaaacttattatcacaaaccagtcccataggaacttcatattttattttgaggtcatcaagtatgatattcatccataacaacttacaaacacctt

SEQ ID NO: 11101 - DNA, 420 bp, Glycine max
  unsure (1)..(420): unsure at all n locations
aagaattaaaaagtacatcgtctacaaattcgagattgacaaggaatattggggattttaaaaaataggagaaagaaaattacatcttagtcaaataaactaatgaggttatgctctatattcattnttcataattatcgtaattagattctttaactttctaatgagacttcgagatatttccacaaacttcaattttttaggtcaattatgagactaaatgatctatatattaatattataaataatcttttacatttttatctaataaaaaattaacaagtataataaatatatcaatctttataataatcatttttatgacattctaaaataatactttaaaaaacatgtaaactattgattcttattnggagatntatgtaaaattaactatgtacagaanatanactctttaca

SEQ ID NO: 11102 - DNA, 309 bp, Glycine max
agcttctaaactttgtacatgaatgaagctctgataccacttgttagacaagtggcctcagatatcttaagaaggggggttgaattaagatattccaaactgtttcccctaattaaaaatctatttcactttttactcaagttatgaattcccttaatgacaatcttcttaaatattaattcaaacgaagcaacttgaatatgaatataaagcaataataaataaaggagattaagggaagagaaaatgcaaactcagttttatactggttcggccacacccttgtgcctacgtccagtccccaagcaa

SEQ ID NO: 11103 - DNA, 305 bp, Glycine max
  unsure (1)..(305): unsure at all n locations
agctttgatggtgtcgagattaaattacatgtttgncatcgtaaaaaaggggtagaatgtgaatgtatgtatacatgattttgttagtgcttagctttactgagctttaaaagattggctaaaattttgttaaaacataagcacttatacaatgaaggaaagctggagttgctgcacatgatgtccaacgttatgtcaaggaatcagatcgggctgcacaatgcacaaggcaagatataatgtcaaatgaagaattgaagctgcaggatccacgatgtcggatacaatgtccaggacatcctgcc

SEQ ID NO: 11104 - DNA, 414 bp, Glycine max
  unsure (1)..(414): unsure at all n locations
tcttagtttcagatgatgcagatgggtntgtagctacctcatgcactcctctaatgactatggcatcatttctggcgctaaactgctgggagttggaggccatcttctcaattaaatttctgacttcagcaagagtcatgtctccaagggctccaccactggcagcatctatcatacttctctccatattactgagtccttcataaaaatattggagaagaagctgttctgaaatctgatggtgggggcaactggcacatagtttcttaaatctctcccagtactcatacaggctctctccactgagttgtctaatacctgagatatccttcctgatggctgtggtcctggaagcagggaaaaatttctctaagaatactctcttaaggtcatcccagcttgtgatggaccttg

SEQ ID NO: 11105 - DNA, 208 bp, Glycine max
agcttgcaacataatctgattgttgattatcttggagtcttggtggttaggccatgaaaacctatttagagagacttccttggagaaaggcattgttgaaatccaattgatgcatttgccaacatttgttcaaagccagtgtgagtataaattttatagtttgcggtcttacaactagtgtaaaggtctatttgaaatctacactaaa

SEQ ID NO: 11106 - DNA, 378 bp, Glycine max
ccagtccctgagaaactggttcccagaagacaacgtgtagtattgattgctcgaaaccctagccttgcagcaagtgctagggaagtacacacggtgatggacgagaaaatccgcggtattgtgagtagcattttgaaagacgcttctgtgcctgatgctgataaagatgtttcaacatctttcaccccaaatgttgctgtgcctgatgttgataaagatgtttcaacatcttccgctccaaatgctgaagcccttccttgacccagtgaagaggaatcaacagaagaagatgatctagcctcagatgagacccctgcaccactggcaccagaacctgctccacgtgatctcattgacttagaagaagtctaatctgat

SEQ ID NO: 11107 - DNA, 464 bp, Glycine max
  unsure (1)..(464): unsure at all n locations
ctatgctcttgtgtggtggatctagctacaaaaggagagagcaagaaatgaagagccaatggttgatacatggacagagatgaaaaagatcatgaggaagcgatatgtgccggctagttactcaagggacttgaaattcaagctccaaaaactaacccaaggcaacaagggggttgaggagtatttcaaggaaatggatgtggtcatgattcaagcaaagattgaagaagatgaggaggtaactatggctcgatttcttaatggcttgactaatgatatccgngatattgttgagctacaggagtttattgaaatggatgatttgcttcacaaagcaatccaagtagagcaacaattaanaaggaaaggagtggctaagaggagttntaccaactttgcgttcttctagtggaaagacaaaggtaagaaagatggggctgctacttctagtagttcctcaccta

SEQ ID NO: 11108 - DNA, 480 bp, Glycine max
  unsure (1)..(480): unsure at all n locations
atgccttggttaacctggtaacccaactgaccatgaataaaanatctacacctgtcgccatactctgtggtttatgctcatctgtcgaccaccacacagacctttgcccttctgtgcaacaatctgaagcaattgaacaacctgaagcttatgctgcaaacatctacaatagacctcctcgacctcagcagcaaaatcagccacaacagaacaattatgacctctccagcaacaggtacaatcctaggtagaggaatcatcccaaccttagatggtcgaatccttcacaacaggagcaacaacaacaacagccttatnttcagaatgttgctggcccaagcaaaccatacgttcctccaccaatccagcagcaacaacagcaacagccccagaaacaacaaacagtacagggctctccacaaccttcccttgaagaacttgtgaggcanatgactatgcanaacatgcagtntcaacaag

SEQ ID NO: 11109 - DNA, 299 bp, Glycine max
  unsure (1)..(299): unsure at all n locations
agcttgaaggtaaactanatgccttggttaaccaggtaacccaactggccatgaataaaaaatctgcacctgtcgccagtctctatggtttatgctcctctgtcgaccaccacacagacctttgcccttttgtgcaacaatctgaagcaattgaacagcctgaagcttatgctgcaaacatctacaacagacctcctcaacctcaacagcaaaatcagccacaacagaataattatgacctctccagcaacaggtacaatctcggatggaggaatcattccaaccttagatggtccaat

SEQ ID NO: 11110 - DNA, 323 bp, Glycine max
  unsure (1)..(323): unsure at all n locations
actcgtcaacgagaaaggtaacgtaggtgtggtattatttccacacataaacgcactctggccttagatagagattctgttgggaattcctctgaaagtaaggccttcctcactggtaggaagaagcacagtataaggcatctgaaccggtccattacagattctaaggcttgaatctntgttcctcgaattgattttggcctcaatttccttcagcttggttccaaacttttcaaaggcttgaattgccttttggtcatcactccaatcgtcactgtccctctttccaacgtagatatcatcacaagcatgtcttgacaata

SEQ ID NO: 11111 - DNA, 445 bp, Glycine max
  unsure (1)..(445): unsure at all n locations
tactcagctcagcaactctttctttntgtttagtcaagacctctaatgctcttaatctctcctcatctaaatcaaccaactcatctaacatcattgtccaataatggtcgattggaatgtccattagtttttgtaccctggctgattgcaaatgtatttcgaccggaagtacagcatcatgcccataactcagtcgaaatggagtagtattagttgattccttatgagaatttctacatgcccatagaacttgatctaacgttntattccaatttcttggctattgggcaatgtgttttttaatcaagttaattacaatcttattggctgcttcgacctgaccaattgcttgcgcgtaatatggtgttgaggttcataatcgaaagccaatattgtgggcaaatactttcatttttcgtgcagctaatactgaacctagatcagt

SEQ ID NO: 11112 - DNA, 338 bp, Glycine max
  unsure (1)..(338): unsure at all n locations
cgccaccacggagttntccaactatgctcttgtgtgtgtggaacaagctacaaaaggagagagcaagaaatgaagagccaatggttgatacatggacagagatgaagaagatcatgaggaagcgatatgtgccggctagttactcaagggacttgaaattcaagctccaaaaactaacccaaggcaacaagggggttgaggagtatttcaaggaaatggatgtggtcatgattcaagcaaagattgaagaagatgacgaggtaactatggctcgattcttaatggttcactaatgatatccgcgatattgttgactacacgagtgtattgaaatggat

SEQ ID NO: 11113 - DNA, 472 bp, Glycine max
  unsure (1)..(472): unsure at all n locations
tatgctgcanacatntataatagacctcctcagcagcaaaactctcntcagantaataattatgacctttcaagcaatagatacaatctaggttggaggaatcatccaaatctgagatggacaagtccttcacaacaacaacagcttatccttcctttctagaatgctgctggtccaagcaagccatatgttcctcctccaatacagcaacaacagtcacaaaatagacaacaagcaattgaggctcctcctcaaccttccttagaagagttagtgaggcaaatgaccatccagaatatgcaatttcagcaagagacaagagcctccattcagagtctaacaaatcagatggggcagatggctactcagatgaaccaagctcaatccaaattctgacaaatggccttcataaactgtgaaanatccaaanaaatgtgagtgtcatcaccttgaggtctggcaccaaattcaa

SEQ ID NO: 11114 - DNA, 302 bp, Glycine max
agcttgtaaatcatcagtaaaacaggccacgaactatggttgctgcttaagttaccataaggattcattccatcagaagcaagagcaacccttaggttccttggctcgtccctaaactctggatacaaacaatcaattgtcttccattatggagaatcggtaggatgtcgtagtaagccatcactttttctgtccactgaatgccatgaaaggttttttgaatcatgtctattagcaagcaatcgcttaaaccttggtatgattggaagataccagccaacctttgcaggacgacaattttt

SEQ ID NO: 11115 - DNA, 306 bp, Glycine max
agctttaaaaactttcattttaccctctgatcgcttaacatgcttaatgctttctctaattttgtttacaacaggaccgactactttcaacccctcttgaacaataaggtttaaaatgtgagcacaacatcggatatgaaaaaattcaccgccacttactaaaccattagtatgcaaaagtttttccttcaaatagtcttgcattttatcattggaagaagcatcatctagagttaatgaaaatattttctgctcaatccttcattcttccaaaaaaccatatataactttagccatcccatgccc

SEQ ID NO: 11116 - DNA, 306 bp, Glycine max
  unsure (1)..(306): unsure at all n locations
agcttgaaggtaaactanattccttttttaacctggtaacccagctggccttgaatcaaaaatctgcacctgtcgccagactctgtggtttatgctcctctgccgaccaccacacagaccttttcccttttgtgcaacaatctgaagcaattgaacagcctgaagcttatgctgcanacatctacaatagaccttctcaacctcagcagccaaatcagccacaatagaacaactatgacccccccagcaatagggaaaatcccgggtggaagaatcatcccaaccttaaatgggccaatccttcac

SEQ ID NO: 11117 - DNA, 297 bp, Glycine max
agctttcttgagagtgcttctttgagaagttaacgctttaactaccaatacacttctaataactaaactcacctccttgaaaataaaacatggataaaataacacaacaaatataattaaacatcaaatataattactaataatatttcagggtgcaacacccttctctacctctatctccactcatcttctcctacctttaagctcttatccatggcttcctatggtgttgaaaatgttcttggctaatcttcttcttgaagaggcgtcttccaacaccttttctacttcttcaat

SEQ ID NO: 11118 - DNA, 303 bp, Glycine max
agcttatgctgcaaacatctacaatagacctcctcaacctcagcagcaaaatcagccacaatagaacaattatgacctctccagcaacaggtacaatcccgggttgaggaatcatcccaaccttagatggtcgaatccttcacaacagcagcaacaacaacaacagccttattttcaaaatgttgctggcccaagcagaccatatgttcctacaccaatccaacagcaacagccctagaaacagcaaatagttgaggctcctccacaaccttcccttgaagaacttgtgtggcaaatgactat

SEQ ID NO: 11119 - DNA, 281 bp, Glycine max
agctcgggtacactaggatttctctttctatcctgaaacctcaagactccatcagttcccactctaaaactactctctctccctgcgactatggactctaactgggctgacaagaatggggcaaacttttgaccctcacggatctcgctcaagagttcgctggcgactctcaacatacccaacttaatgcctctagaggtgaactcacatgccatactcatgtctctaaactgctctaagaggtccaactctttaaccatcatagcagacatttgaaggga

SEQ ID NO: 11120 - DNA, 294 bp, Glycine max
agcttactaaggcacctgttttatcttttcctgacttttctaaaacttttgagctacaatgtgatgcctctggagtgggagttgcagctgtattgttacaaggtgggcaccctattgcttattttagtgaaaaacttcatagtgccaccctcaactaccccatctatgataaatagctttatgccttaataagagccctccaaacttgggaacattaccttgtttccaaggaatttgtcattcatagtgatcatcaatcacttaagtacattagagggcaaagcaagttaaaca

SEQ ID NO: 11121 - DNA, 310 bp, Glycine max
tcagcttctgtgtcctatgaccataaggctatcattatcaatggacagagaaggatacttctttctggctccattcactaccccagaagcacccctgaggtattacactcaaatgtatttcaggtttctttccattttggcctttttttttttttatcaaatgggcaccttaaagtatcttccttttttcagatgtggccagatcttattcataaggcaaaggaaggaggtttggatgtcattcaaacttatgttttctggaatggacataaaccttcacctggcaaagaaatgaataatgtttgcttgc

SEQ ID NO: 11122 - DNA, 372 bp, Glycine max
ctaagctttgagccattcaaacaacaataactttttactcgttgtttgatatagtcccgtgatataacgatacgctcgaaattgactgttgaagctctgacctgatcctaactatcatatgcaatgactcggatgtctgattgaggcccgttatatatcgagacgctcgaaattgaatgtggaagctctgagccaattcaaacgacaataactttttacacggatgtctgattgagtcccgtcatatatcgagacgctcgaaattgaatgttgaatctctgagccaattcaaacgacaataactttttactcggatgtctgattgaggcccgtcgtatatcgagacgctcgaaattgaatgttgaagctctg

SEQ ID NO: 11123 - DNA, 345 bp, Glycine max
agcttcaacattcaatttcgagcgtctctatatgtgacgagagtcaatcagacatccaagtaaaaagttattgtcgtttgaattggctcagagcttcaacattcaatttcgagcgtcttgatatattacgagactcaatcagacatccgagtaaaaagttattgtcctttgaatttgctcacagcttcaacattcaattttgagcgtctcgatatatgacgggactcaatcagacatccgagtataaagttattgtcgtttgaattagctcagagcttcaacattcaatttcgagcgtctcgatatgtgacgagactcaatcagacatccgagtaaaaagttatt

SEQ ID NO: 11124 - DNA, 281 bp, Glycine max
agctctgtcttctttggatgcttacttgtggcaatatttcattaataatgagatggattctttagaatctaacaaaacccggcatttagtagacttgcctcctggctgcaaaccaattatatgtgaaatcattgttgagaaacaactttgatatgaaagaccttagagaagcatgtgtaatccttggtattaagattactaggtcaaaagaggaaatttatatgaatcaatctcactacattgagaagatcttaaagaaatagattactttgaactgtaaa

SEQ ID NO: 11125 - DNA, 337 bp, Glycine max
agcttgtaatcgattacacaagtatgggattttcagaaaataatttccaagagtcacatctattcaaatggtttatgaatggccatcaaaggtgacttggaaacacgaattaaaagaaaattttcattgcccaaaaagttttatcctctcaaaagaaaaatttttctgaactgaaatgtcttatcctctcaaaaagattccttggtcaaccacttgtatattcaataaggaattttgattgatcttcattgtacaatctatctcttttaagagagatttcttcttttcttcttcttatttctgaaaagggattaagagaccgtgggtctcttgttgt

SEQ ID NO: 11126 - DNA, 337 bp, Glycine max
tgaaattgaacaacagaagctcacgagaaactacatatggtcataacatgtcacacgaaagtccgattcaggtgcataatatatcgagacgctcgaaatagaacatcggaagctctcgagaaattccaatggtcataacttttcacacggaagtcctattcaggcgcataatatatcgagaagctggaaattgaacaacgaaagctctcgagaaactcaaatggtcataacttgtcacacggacatccgattcaggcgcataatatatcgagacgctcgaaattgaacaacgtatggtgtcgagaaattcaaatggtcataacttgtcacacggaag

SEQ ID NO: 11127 - DNA, 331 bp, Glycine max
agcttgaatttgaactacagaagctcttgagaaattcaaatggtcataacttatcacacggaagtccgattcaggtgcataatatatcgagaccctcgaaattgcacaacggaagccctcaagaaagtcaaatggtgataacttttcaaacggaagtccgattcaggtgcataatatatcgagaaacttgaaattgaacaatggaagctctcgagaaattcaaatggtcataacttatgacacagaagtccgattcaggcgcataatatatcgagacgctcgaaattgaacaacgaaagctctcgagaaattcaagtggtcataacttttc

SEQ ID NO: 11128 - DNA, 366 bp, Glycine max
ttactatgcaaagaataaccaaggaaaattctttcatctgacttagcatcaaactttcctaagctttcttttccattgtttaatacaaaacacttgcaaccaaaaacatgaagatgcgagatgtttggtttcctaccattgaatagttcatatggagttttctttaaaattggtattattaaagccctattcatgatatagcatgcagtattagcggcttcagcccaaaaatattttggaagaggagtatcatttaataaggatctagcaatttcttctaaagacctatttttcctttcaacaactccattttgttgaggggttctaagtgcagaaaagttatgttcaatgtcatgcttatcacaa

SEQ ID NO: 11129 - DNA, 374 bp, Glycine max
cttgcgtgcacgactttcttatcttcaaagttattttattagctcatattataaaatgacatacaaacatatgagtccagctagctatcttaaacaatatgaaacttaattttttgtgatagccttcaaactacaacaatgattattatcttcttttttaacaaatctatatttttttattacaacgtagctaatgtggtttatgttgaattcaaatttctaatatcaatttttaggatgttttagattttaaagatactatccaatctttttaagatgtttattttagaaattaatgtgttttttatgttaagtttatgatttgttataaaatagaggttttataaaaaaaattatcaagcatggaatagata

SEQ ID NO: 11130 - DNA, 331 bp, Glycine max
agcttagacaattacatatccttcttctttgatacaactaattcaaaataatctatttcatggtctacccaatgaagacccttatgctcacttggccatctatatagagatatgcaatattatcaggttggtgggtgtgcctgcggatgcaatcaggttgagtctgttctcattttctttatctggagaagctaagagatggcttcattcttttaaaggaaacaatctgaagtcatgggatgaagtagtagaaaagttcttaaagaagtacttccttgaatcgaagactacagaaggcaaagctgccatatcttttttccaccagttacca

SEQ ID NO: 11131 - DNA, 349 bp, Glycine max
actcaagcttcaccatgtaagcagagcataaaatattatgtttctgtaagagaaaaatatatacagaagaatttcttgaactcttaccaatcagtttttcatcactttatgaagaaaatcataactgtacagcaaaaaaaattctattatccctctatcaatcccttgccttctatattctttttattagagattctattgatgcttggattctacttccttctgtttgcctcactgcctgagatgcctcatgcagatgctgaatcccacgacctaaactagcaatggagggggctgcagggagagactcaacagcacactcaatcccatcaccatacaaaagcagctt

SEQ ID NO: 11132 - DNA, 319 bp, Glycine max
agcttatttattcaatttcgagcgtctcgatatattacgagtctcaatcaaacatccgagaaaaaagttattgtcgtttgaatttgctcagaggttcaacattcaatttcgagcgtctcgttatattacaggactcaatcagacatccgagtaaaaagttagtgtcgtttgaattggctcagagcttcaacattcaatttcgagcgtctcgatgtatgacaggactcaatcagacgtccgagtaaaaagttattgtcgtttgaattatctcacaggttctacattcaatttcgagcgtctcgatatatttcaggactca

SEQ ID NO: 11133 - DNA, 340 bp, Glycine max
tcgaagccattgaacccacccaaaagggagcgttgtcgtagaagactcaatcgggtttggaagattcgagaaaacgtttcagcggttcttggagaacgtcgtaggcttctttgaggtgttcaaagacgtcgtaggggatgtcagtgttggcttctgcgttttctggaaggttttggactttaggcagtggaaggttcacgaaattgatatcaagtgtgtttagtgacggttttggaagacgctctatgtttcttgggtggatacgaaactcacgtggtgacccttttgagcaatgagtttggccagctcaaggtttgggatcatgtgaccaaaggctagc

SEQ ID NO: 11134 - DNA, 333 bp, Glycine max
agcttgaaggcaaactggatgcattggttaacttggtaacccaactggccttgaatcagaaatctgtacctgtcgcaagggtttgtggtttgtgctcctctgctgaccaccatacagacctttgcccttccatgcagcaacctggagcaattgagcagcctgaagcttatgctgcaaatatttacaatagacctcctcaacctcagcagcaaaatcaaccacagcagaacaattatgacctctccagcaacagatacaaccctggatggaggaatcaccctaatctcagatggtccagccctcaacaacaacaacaacagcatgctccttcct

SEQ ID NO: 11135 - DNA, 331 bp, Glycine max
agcttatgttgcaatcatttgtaatagactccatcagcagcaaaaccaacaacaacaaaataattatgacctttcaagaaatagatacaatccaggttggaggaatcatccaaatctgagatggacaagtcctccacaacaacaacagcctgtccctccttttcagaatgctgctggtccaagcaagccatatgttcctcctccaatgcagcaacagcagcaacaatcacaacaaagacaacaagcaactgaggctcctcctcaaccttccttagaagagttagtgaggcaaatgaccatccagaatatgcaatttcaacaagagacaaga

SEQ ID NO: 11136 - DNA, 321 bp, Glycine max
agcttaatagagctcattatggtctcaagcaggcccccaggcaatggtttgaaaggcttcagactaccttacttcagtttgggtttgtggcaagtaaatgtgatctctctctgttcatttacaagaccaagtctcacactgtatatctccttgtgtatgttgatgatattataattactggaagttctattcctttaattcaacatcttacctctcagttgaactcaaaattctctctcaaacagcttggtttgttaagattattttcttggaatagaggtgaagactctggccgacaaatcaatactgcttactcaaagc

SEQ ID NO: 11137 - DNA, 366 bp, Glycine max
tctaagctttgagcaaattcaaacgacaataactttttactcggatgtctgattgagtcccgttatatatcgagacgctcgaaatggaataccgaagctctgagcaaattcaaacgacaataactttttactcggatgtcagattgagtcccgtaatatatcgagacgctcgaaatggaataccgaagctctgagcaaattcaaacgacaataactttttactcggatgtctgattgagtcccgtaatatatcgagacgctcgaaattgaataccgaagccctgagcaaattcaaacgacaataactttttactcggatgtctgattgagtcccgtaatatatcgagacgctcgaaattgaatacc

SEQ ID NO: 11138 - DNA, 342 bp, Glycine max
agcttctacattcaatttcgagtcttttcgatatattacgggactcaatcggacatccgagtaaaaagttattgtagtttgaatttgctcagggcttcggtattccatttcgagcgtctcgatatattacgggactcaatcggacatcagagtaaaaagttattgttgtttgaatttgctcagagcttcggtattccatttcgagcatctcgatatattacgggactcaatcagacatccgagtaaaaagttattgtagtttgaatttgctcagggcttcggtattccatttcgagcgtctcgatgtattacgggactcaatcagacatccgagtaaaaagt

SEQ ID NO: 11139 - DNA, 366 bp, Glycine max
tcaacattcaacttcgagcgtctcgttatattatttttctcaattagacatccgagtaaaaagttattgtcgtttgaatttgctcagagcttcaacattcaatttcgagcgtctccatatattacgggactcaatcagacatccgagtaaaacgttattggtgtttgaatttgctcaaagcttcaacattcaatttcgagcgtctagatatattacaggactcaatcaaacatccgagtaaaatgttactgtcgtttaaatttgcttagctctccagctttaaatttcgagcggctcgatatatgacgggactatattatacatccgagtaaaaagttattgtcatttgaatttgcttagagattc

SEQ ID NO: 11140 - DNA, 372 bp, Glycine max
  unsure (1)..(372): unsure at all n locations
tcaagaaaaatggcctcagcaaatttcttattttcaaaaggaaattctatcaatagacctccaatctttaatggagagggttaccactactagaaaacccgaatgcaaatttttattgaggcattagacttaagtatttgggaagccatagaaatagggccttatatacccaccacagtagaaagaattacaatagatggaagcacatcaagtgaaagcataacaatagaaaaacctagagatagatgatctgaagaggatagaagacgagtacaatacaatttaaaagccaaaaacatcataacatctgccctgngaatggatgggtttcaaattgtaagagtgctaaggaaatgtgggacactctacaat

SEQ ID NO: 11141 - DNA, 337 bp, Glycine max
agcttgcaaattattttcccttgctagagatcaatcaaaacccctcctacataaaggaagggctttcccaaaataattggaatttcctaatcctcctttatgtccatgatcacaaaatcagcttgaaaaatgaatttaccaactatgataagcaaattctccactattcctttcagataagtaatagttttatctacaagcacaagagaaatgttaatgggttggggttcttgtaactcgaacttcttataaacaaaataaagcatcaaatcaatgcttgcaccaagatcacataaggctctatcgattttcaagctaccaatagtacaagggattg

SEQ ID NO: 11142 - DNA, 371 bp, Glycine max
tcattaaaaggcttcctcctgaagctttcttgtggcttctttgagaagctttctcaagaggcttctttgagaagctagatccttatctatccacacccctcttttaacttaattaacctccgtataaataattacggatgaaaataacgcaacaaataatcaaacatcaaacataattactaataatatatagatatatatatctgggtgttacaactctcccacccttttagaaatttcgtcctcggaatttaccttactcaatcaaggatgggtgagcttctcgcatctgactttctaattgccacgtggcatcttctcctgatgcacctccccagatcaccttgaccagcggaatctctttccctctt

SEQ ID NO: 11143 - DNA, 321 bp, Glycine max
tgacggagtttgtagcatcagggaacaattttattttaaaagtgggtcccaattggcgtcctaattttcggctttcctatttggatgtgacatcatggcagttaagtcccaactttccatcgtggattcagtcacaaaacaaacttcaatatgttggactgtctaacacggggattttagattctattcccacctggttctgggaaacaccttctcagattttgtatttaaacctctcttataatcatatccatggtgagattgagactacattaaagaatccaatatctatccaaactattgatctaagctcaaatcact

SEQ ID NO: 11144 - DNA, 324 bp, Glycine max
agcttccacatacttgatacctattctacattttcagcaatcagagaatttaaataataacttgcgaggtcaagatagaccaaattggagagattcccaatctgagatggaatcttccccatgaatccattaccagagaggtcgaggtgagtcaaggaagtcattgtcccaaggaaagaaggaattgacataccttctccaagaaatctattgccgctcaagtccaagtaattcaaatgctttaaatcagccaaacaaggacttatctctccaccaaactggaatcccctataagcttccctatcaaagtagccatcatagtaa

SEQ ID NO: 11145 - DNA, 361 bp, Glycine max
agctcgtcttttctagaaaacgaggtgccacacgatcacttccacttgagatccccacattgcttctcatgtgtcctcagatcagagagcaccgagaactgcttctggttgcacctcttgcacacgtacattttggggcagtggcttctcttgtaatggttcttggcacaaatcattgacttcagtggctggaacttggcatgcctctggttccacctacacccctcttgaggacacgaatacctctttggcttcacactcatcaaacactctagatctctttggttcttaattgggttactcaaagcagcattggtcttgtactcatccccgtgagccctcatgtgcatcctcaaattcg

SEQ ID NO: 11146 - DNA, 329 bp, Glycine max
agcttgtagggttaaagtctcacgattgtcatgtgctcatgcaacaattgttagtcgtggctatacgagacatcttgccaaacaaagtcaggttcacgataactcgcctgtgctttttcttccatgctatatgtagcaaagtgattgatccagtaatgtttgatgagttggaaaatgaggccgcaattatactgtgccagttggagatgtattttccccctgctttctttgacatcatgattcacttgattgtgcatctggtcagagaaatcaaatgctgtggtcctgtttatctacggtggatgtacccggttgagcgatacatgaag

SEQ ID NO: 11147 - DNA, 334 bp, Glycine max
agctttttatggaatttatgatatgaatccagataaggtaaagtaactgttttttatggacgattttccattaggccatggaaaatctagcatgatattccattcttgattttaaattacttaccaaatgaaacttgtgtactgatgtaggtccttcaatcaatgattcaaatgggtgttcttgtcccaactggagatatgactgctgttaaacgaacagcacagttcttcctcaacaggtagtttatcaaatccatttagtgggaatacataaaacaatcaaaacacctacatagatttagcagtagtatttctatatatcaatatcattaga

SEQ ID NO: 11148 - DNA, 341 bp, Glycine max
tgtcacagttctgccatcactggtggtgacttgaaaagagagggattgtccattgaggtatgagttgctctgccagttttgcccccagtttcttgacatgggctgccacccagttttggaccctttaatggacactgaattcacatcaccagctccagccacattggtgatcaaaactaggttgaagtaagagtggccattgattgtgaaccttattcctccctttttcacacaaggaaccctgccatcatcaccaaaagtttagtttagtactagttaaacatatgagcaattgaaaattaaatatccgagataaattaagtaatctcagtcgttaatga

SEQ ID NO: 11149 - DNA, 336 bp, Glycine max
tcaacattcaatttcgagcatctagatatgtgacagtgttcaatcagacatccgagtaaaaagttattgtcgttcgaatttgctcagagcatcaacattcaatttcgagcgtctcgatatatgacgggactcaatcagacatccgagtaaaaagatattgtcgtctgaattggctcagagcttcaacattcaatttcgagcgtctcgatatgttacgggactgaatcagacatccgagtaaaaagttattgacgtttgaatttgctcagagcatcaacattcaatttcgagcgtctcgatatgtgacgggactcaatcagacatccgagtaaaaag

SEQ ID NO: 11150 - DNA, 339 bp, Glycine max
agctttgagccaattaagacgacaatatttttttactcggatgactgattgagtcccgtcatatatcgagacgctcgaaattgaatgttgatgctctgagcaaattcaaacgacgataactttttactcggatggctgattcaatcccgtcacatatcgagaagctctaaattgaatgttgaagctctctgccacttcaaacgacaacaactttttactcggatgtctgattgagccccgcgacatatcgagacgctcgaaattgaatgttgaagctctgagccaattcaagcgacaataactttttactcggatgcctgattgagtcccgtcatatat

SEQ ID NO: 11151 - DNA, 328 bp, Glycine max
agcttttatccatggcttcctatggtggtgagcttcttcttgactcatattctccttgaagtggtgcctctaatcatctttcttccttcttcattccactgccattaaacttttagaagcaaatgacttcatggatgaagaagatgcaaggcctacaagcttcacatggagctacatcatgtggtatcaagagcatcttcgtctaggtgatgttcttttgcttcctctatttttttgtttggtcaattcactttaattcctttttcttcattttattctccatgtatatcctccattgtcttgtggtttggtgctgtttagagtagat

SEQ ID NO: 11152 - DNA, 316 bp, Glycine max
agctttaaaaggtgttttatctctacaaaaatatatgtttttgcactagtaatcgattaccatatattgtaatcaattaccagagacagattacataattttttttttaaaaaagttttcttttgaaatttgaattttaaatgttctaatcgattaccacttgtatgtaattgattaccagtgatgaaacttcagaagttaactttgaaaagtcatgacccttcaaaacataattgtgtaatcgattaccaagaatttgtaatcgattactagtgagagaatttttgaaaaatattctgaaaagtcacatctcttc

SEQ ID NO: 11153 - DNA, 326 bp, Glycine max
tttatgggataatctcttcattcggggttgatgaaaaccccatggatcaatgcatataccacaaagttagtgtgagcaaaatatgctatcttgcttcatatgtagaagaatatcttacttgcagccaatgatcggggtttgctacatgaagtgaaacaatttctctcttataattttgacatgaaggatattggcgatgcatcttatgtcatcggcattaagattcatagagatagaactccaggtattttgggtctatcacaggaaacccttataaccaaacttcagagagatttcgatgaaagattgtcaccatgtgttgctcc

SEQ ID NO: 11154 - DNA, 346 bp, Glycine max
tatgctgcaaacatctacaatagacctcctttacctcagcagcaaaatcagccacaacagaacaattatgacctctctagcaacaggtacaatctcggttggaggaatcatcccaaccttagatggtcgaatccttcacaatagcagtaacaacaacaacaacaacagcagcaacagcaacagccccagaaacagcaaacagttgaggctcctccgcaaccttcccttgaagaacttgtgaggcaaatgactatgcaaaacatgtagtttcagcaagagaccagagccttcattcagagcttaactaatcagatgggacaattgtctacacagttaaatcaacaac

SEQ ID NO: 11155 - DNA, 371 bp, Glycine max
agcttctcgtcagtggtaccttatgtttcatgggataatttcttcatttggttttgatgaaaaccccatggatcaatgcatataccacaaggttagtgggagtaaaatatgctttcttgttttatatgtagatgatattttacttgcagccaatgatcggggtttgctacatgaggtgaaacaatttctctctaagaattttgacatgaaggatatgggtgatgcatcttatgtcatcggcattaagattcatagagatagatctcgaggtattttgggtctatcacaggaaacctatattaacaaaattctagagagatttcggatgaaagattgttcaccaagtgttgctcccattgtgaaaggtgata

SEQ ID NO: 11156 - DNA, 271 bp, Glycine max
tcttgtttgatcttacattttagagccaaggtttcaaaacatactccctaacaaaacgctcaagtaggtgagtaaattaatgatagggcagtgtatcgagttttgcgccaataagacctatgttgtttgcaccagcaagccatgccttgcatgaagaaagaagttgagtattgcgaaggaaaataaaggtctttttaaccaggggctggagtactcaattctttaacaaggtctttgtttctcctgagacagaaagccgaaaaccattttc

SEQ ID NO: 11157 - DNA, 374 bp, Glycine max
agcttgaaagaaaactggatgcattgtttatcttggtaacccagctggccttgaaccagaaatctgtacctgttgcaagggtttgtggtttgtgctcctctgctgaccaccatacagacctttgcccttccatgcagcaacctggagcaattgagcagcccgaagcttatgttgctaatatttacaatagaccttctcaacctcagcagcaaaatcaaccacaacagaacaattatgacctctccagcaacagatacaaccctggatggaggaatcaccctaatctcagatggtctagccctcagcaacaacaacagcagcctgctccttccttccaaaatgatgctggcccaagcagaccatacattcctcca

SEQ ID NO: 11158 - DNA, 345 bp, Glycine max
tactcaagctttcaatgaaatgctggtcaagggcgtaagatgaaacgtgaagacatattctgcaattatttctggtttatccaaggaggggagagcagatgaagctcttaagttgtatgatgagatgatgagaatgggtctaatacctgatgacagagttttcgaggcacttgttggtagccttcataaacccagttctcatgctgccctgaaacaaaatgagtatggggaactgaaaataaacacttctgatacctcgagcttgccaaacactggtttgtcaatttcacacaggaaggtggtacatacatgataatcttgtccttgaagcccaagtaaaaaacc

SEQ ID NO: 11159 - DNA, 377 bp, Glycine max
agcttccctttctttggccaatgctggacttgcttggcagtgatttccttggcaatttgatgctcagaaacagcaatatccaccactccttcagttggtctgcccaggtatttgttgattacagcaggggagaatttaatacattttcctctgacaaacactttctgatactcatcactctttctgtttgttatgtcagagggaatgttgacaatgaattctctgactagactttcatagcaatctcccaacttggtgacagttttcagcagtccagcagccttgatgaggtccatgatctccttgcaatccaaggcatctcttcccagttctctttctaaggcaagtctgcgttgatatacaaatttccacctttc

SEQ ID NO: 11160 - DNA, 356 bp, Glycine max
agcttgtatggataaagtctcacgattgtcatgtgctcatgcaacaattgttagtcgtggctatacgaaacatcttgccaaacaaagtcaggttcacgataactcgcctgtgctttttcttccatgctatatgtagcaaagtgattgatccagtaatgtttgatgagttggaaaatgaggccgcaattatactgtgccagttggagatgtattttccccctgctttctttgacatcatgaatcacttgattgtgcatctggtcagagaaatcaaatgctgtggtcctgtttatctacggtggatgtaccccgttgagcgatacatgaagatcttataagggtatcaaagaatctat

SEQ ID NO: 11161 - DNA, 329 bp, Glycine max
cttaaaaggagccataccaatactggcttgttttctattgttgtaagtgaactcaatcaatggcaaacaatccatccagctaccttgttgctctataatacacgcccgaagtatatcctctaaagtctgaatagttcgttcagtctgaccatttgtttgaggattattagctgaactaagcttcagctttgtccccaaggcttcatgtagacttgtccaaaatcgcgaagagaaccttggatccctgtcagatacaatactagaaagaattccatgcaaccttactacttacttgatatacaactacactagcttttccattctatacc

SEQ ID NO: 11162 - DNA, 297 bp, Glycine max
tacgctagcttcaaactcgaaggtggaggaccatgaaccaaaaacaattcatggggctccgaaaaaggggttgagaatggataattactctaagcaatcactacgcatagctccaaactctaaggtggaggacacattaacgataacgctattcatggggctccgaaaagagcgagaatggagaattgcactacacaatcactacacatagctccaaacgcgaacgcggaggactcattaatgaaaacgcttttcatggggctctcaacagattgataagtggataattgaactaat

SEQ ID NO: 11163 - DNA, 370 bp, Glycine max
agctttgatattggtaagttaatgcctcaaaacttctattatatttcctgtttctgaagtacgttttttctcactaacatctctttttataacattaatctctttaatcctctcatttgtactaattactttatcttacatttttcttccttttcttctcatctccttttctattaaaaaagttgcccgattttgatttataaatgcaatttctcttttcattttaccaaactttatataaagatattttatttgattcaccaggacatatttgctgctggaactgatacttcagcatcaacactggagtgggctatggcagaaatgatgagaaatccaagagtgagggagaaagcacaagctgaattga

SEQ ID NO: 11164 - DNA, 328 bp, Glycine max
agcttgtagatttctgtcttgtatctgtttaatcgattacaaccctctcgtaatcgattataaagttgtttttgatgtagctccacgtggagcttgtaggccttggatcttcttcatcaatggagtcatttgcttcttgaagatcaatagtagcggaatggagaaggaagaaagatgattggagacgcgacttcaaggagaagatgagtcaagaacaagctcatcaccataggaaactgatggaagcttgcttgtaaggcttctatggaggctggatctttgaacttcaatgaggtcctttaatggtgattttccaccatggagatgc

SEQ ID NO: 11165 - DNA, 346 bp, Glycine max
tttaatcatatgtaacaacattcattcaatatatgatttttctagatgttggtccatgaccatcataattgattatgggaataaaaatgtcaaaattatctacaatttgaaatttaattttattgcttattaatagaaaagacttttgttaatgtcatgtgagaaccgaattaacatgcttaaactatgtcaatagttgttagaggtaaaacttaattaggaaaaaaacagataattttaatgaacattttatgtgtctatgattcaagacaatgaaaaaataataatcatgaaaaatttacatatttaatgatagaaaatgaaatgattaaacaatttataatat

SEQ ID NO: 11166 - DNA, 363 bp, Glycine max
ctttatacaatgggagactgttcatttcaagtgctcgaaagaatcaatgacaatgcttacaaagttgagctgcccggtgagtataatgttagttccaccttcaatgtctctgaattatctctttttgatgcagaaggagaatcccatttgaggacaaatccttctcaagaaggagagaatgatgaggacatgaccaagagcaagggcaaggatccacttgaaggacttggaggacctatgacaagggctagagcaaggaaagccaaagaagctcttcaacaagtgctggccatactatatgaatacaagcccaagttttaaggagaaaagtccaaggttgtgagttgatcatggcccaaatgg

SEQ ID NO: 11167 - DNA, 376 bp, Glycine max
agcttatagttattggagggagaatttaacaatccaaaatcaattgtacctttcaagtaacgaaaaattctttttgcggcttttagatgaggagaggtaggagcctccataaagcgacacacaactcccaccgcatatagaatatcgggccttgtattggttagataccttaaactccccacaagactcttgaagatcgtggagtctaccttctctccttcatcaaactttgataacttcaagccaccttccataggggtgttcacgggattgcaatcaagcatattaaatttcttcaacacttcttttgtgtacctttcttgtgagacaaagataccattctccgtttgcttcacttccattcccaagtaatatg

SEQ ID NO: 11168 - DNA, 373 bp, Glycine max
agcttgtgccttttcacgtctggattattaatgtagcatatagatccaaagacccttatgtgctttgttgatggcttcttctcgttccaagcttcacttggagtcttgtcttttacagacttagttggacatctgttgagtatgtaaacaacagtgtagactgctttagcccaaaatgtgttaggtattcccttctccttgagcatccatctagccatttccataactatgcgattctttctctcggacactccattttgttgaggagaatatgcgactgtaagttgtcgctcaatgccttcatcctcacaaaatctttcacactcgcgagaggtgtactctttgtcatgacacttcttagtacttttatccg

SEQ ID NO: 11169 - DNA, 341 bp, Glycine max
tctgttttcaattacgagcttctcgatatattacgggactcaatcggtcatccgagtaaaaagttattgtcgcttgattattctcagagcttcagtttttaatttcgagcgtctcgatatactacgagacacaatcggacacccgagtaaaaagttattgtcatttgaatttgctcaggcttctgttttcaattaccagcgtttcgatatattacgcgactcaatcggacatcccagtaaaaagttattggcgtttgaatttgctcagggcttctgttttcaatttccagcgtcttgatatactacgggacacaattggacacccgaggtaaaagttattg

SEQ ID NO: 11170 - DNA, 344 bp, Glycine max
ttgagcaaattctaacgacaataacttttttcttggatgttcgataaagtcacgtaatatatcgagtcgctcgaaatagaatccagaaggtgtgagaaaattctaacgtcaataactttttactcggatgtccgattgagtcacgtaatatatcgagacgcccgaaattcaatacaaaaactctgagcaaattctaacgacaataattttttacttggatgtccaattgagtcgcgtaatatttcgagacgctcgaaattgaatacataagctgtgagcaaattctaacgacaataactttttacttggatgttcgataaagtcacgtaatatatccagtcgct

SEQ ID NO: 11171 - DNA, 375 bp, Glycine max
agcttaacaaaaggcatgcgaagtgtgtggtattcctagagcaattcccttatgttatcaaacataaaaagggaaaaggtaatattgtagccgatgctctttctcggcgtcatgcattactttctatgcttgaaacaaaattgaatggtcttgaatgtttgaaaagcatgtatgaaaatgatgaaacttttggagaaatttttaaaaattgtgaaaaattttcagaaaatggtttctttagacatgaaggctttcttttcaaagaaaacaaattgtgtgtgcctaaatgttctactaaaaatttgcttgtttgtgaagcacatgaagaggtttaatggggctatttggggtccaaaagactctagaaacattaca

SEQ ID NO: 11172 - DNA, 344 bp, Glycine max
  unsure (1)..(344): unsure at all n locations
tgcttcataccgnatattgatttctttaatttgcacaccatgtgttcctttccttcaactgagaatcccattggttgatccatataaacattctcctctaaatttccattaagaaaggcagttttcacattcatctgatgtaactctaagtcataaagggctactgatgtcatgataatcctaaaagaatccttttgtgagatcggtgaaaatgtctctttataatcaatgacatctttctgagtaaatcccttaacaaagccttgtaacgttcaaagttgtcatgagagtcacgtttaatcatgaagacccacttacaaccaactctcttaataccctttggc

SEQ ID NO: 11173 - DNA, 347 bp, Glycine max
tgcatacaagattctccttgcctggcactttataaccttctggttgggtcatatagatgtcttcctctaaatccccatgcaagaatgcagttgtaacatctaactgctccaagtgaagattctctgcagctactatgctcagaataactctgatggtagtcatctttacaactggagagaagatctctgtgaaatcaatcccttgtttctgctgaaaccctttcaccacaagtctcgccttgtatcttcttctaccgacagattcttcctttagcctatagacccacctattctgtaatgcctgctttccttctggcaatttagttaaagaccacgtcttattcttt

SEQ ID NO: 11174 - DNA, 375 bp, Glycine max
gcttcctcaatcaccttattgagaatttatatgccatgaaggatatgtctgtctttgatgaaagttgtctgtctctcatcaataaggatagatataacatgcctcaatttgtttgctaataacttggctatcaccttgtacatacaaccaatcaaggagattggtctgtaatcatcaaaggactgagggtgttttactttgggaattagagccagaaaggaagcattactacctctagggaagctgccatgcacatggaactcatccacaaatcttctgaagtcaggtttcaccactccccaaaattctttaataaaattgaaattaaaaccatcaggcccaggacatttgtccccaccacagctttcttgatct

SEQ ID NO: 11175 - DNA, 333 bp, Glycine max
tagcttcttctgtcaactaacgaagactgtctctccgttagtcggtaactcatccacaactattacctgagccgatcctatgagatattgagggatgctgggtggtttccggtcaaaggttatttcgaatggagagatactagttgcgaagtgaattgaggtgttgtaggacattccgcccacatcaagaattttccccaagtggttggtttcgagtgaacaaaagcgcacaagtactgctccactacttaattgatgacctcagtttggccatttgtttgaagatggtaagccgaactcatgcgcagtcacatgccactcaaacgaaagagc

SEQ ID NO: 11176 - DNA, 351 bp, Glycine max
ctgcaatcttacatcatgagccatgttttttatcttgatttggaatctgctttggcaagtttatattttatagttgaatggtcagtgtgcacaatgatctttgatcctactataaatgatcataactttttgaaggcctaaaccactggtaacatatccttcttcactactacacagttgatttgggcttcatttagcattttgttggcatagtaaatagcatgaaatattccactccttttttgttctaatactacttttaccacataattattcgcatcacacattaagtcgagttcttgcccccgattgggagccactatagctggagtggttactagcctttttttc

SEQ ID NO: 11177 - DNA, 337 bp, Glycine max
tgttcatatggcttgaaacaagcatcgaggcagtggtacatgaagtttaatgagtttaagagcaactcaggattcaaaagatgtgacatgaaccattgttgatatgttaagaaatatactaatagttatgttatccttgtcgtgtatgttgatgacatgttgattgcaggatctagtatggtagaaattaacaggttgaagcaacagttggcagaaaacttttaaatgaaggatcttggtccaactaaacaaatccttggtatgagaattcttagaaacatatcagaaggaattttgaagctgtctcaggagaaatatatacacaagttgcttgaca

SEQ ID NO: 11178 - DNA, 316 bp, Glycine max
gcttatatatatcgacacgctcgaaattaaacatcgggaactctcgagatattcaattcgtcatcatttttcacacggatgtccgattcgggcgcataatatgtcgagaggctcgaaattgaacaacggaagctcttgagaaattcaactggtataacctttcacacggatgttccaattatgccaattacatattgggacgcttcgaactgaacaacggaagcttctgacaaattcaaatggtcataacttttcactcgaatgttcaaatcaggcggatcacctatagagacgcttggaaatgaacaacggaagc

SEQ ID NO: 11179 - DNA, 377 bp, Glycine max
agcttgaataggacctcagtgtgaatatttatgaccattttaatttcccgagagcttccgttgttcattttcgagcgtttctatatgtgatgcaccttaatctaacatccgtgtgaaaagttatgaccatttgaatttctcaagagctttcgttgttcaatttcgagtgtcttgatatgtgattttccagaatcatacattcgtgtgaaaagttatgaccatttgaatttctcaagagcttccgttgttcaatttcgagcttctcgacatattatgcgcccgaatcgcacatccgtatgaaaagttataactatttgaatttcgcgagagttttcgacgttaatttcgagcgtatcgatatataataagcccgaatc

SEQ ID NO: 11180 - DNA, 368 bp, Glycine max
agcttgcttatgcgggcatcgtattatatcaccataacatgatgggtttggtttaatttcattttggaacacttgccgctatctttgctcttagatccttgcgcaagattttgcctgacggtgacttgggaattgcatcaatgaagaatactcggtttattcttttgtaaaacaccacctgcacaattccacaactcattacattccttattttgtggctaagaaaggtacagtacacatcataaacctgtaaaaaacgcatattatatctgatagtgacccagacatttataattaggtgggaagaagcggtgtgggtcagttataagataaaatgagaaattatatttatacggggtgaatgagat

SEQ ID NO: 11181 - DNA, 369 bp, Glycine max
agctttaaggatggaaggtttctttttatctcttgcaaggatattagtgtcattcagacaaatgttttaagaatcaaaccagtcattaaattgatcgagatgttggattaatgaattaccgatataattatatcagtggatcagtattcaaatctgtttgacttgatatatattagcaaattttttaaaatataatataattatcataatttaatcaagttgatactctaaatttagaaactaatatcaacatatgagatttacactacaagaaaaatgacctatgcctatagacacttttgcctacatgtttaatctagtgtaggtaaaacctaagaaatacttttacctacaaatatttatcgtacg

SEQ ID NO: 11182 - DNA, 372 bp, Glycine max
agcttatgctgcgaaatattactatatacctcctcaacctcagcagcaaaatcaaccacagcagaacaatcatgacctctccagcaacagatacaaccctggatggaggaatcaccctaatctcagatggtctagccctcagcaacaacaacagcaacctgctccttccttacaaaatgctgctggcccaagcagaccatacattcctccaccaatccaacagcagcaacaaccccagaaacagccaatagttaaggcccctccacaaccttccctcgaataacttgtgaggcaaatgactatgcagaacatgcagtttcaacaagagaccagagctgccattcagagcttgactaattagatgggaccatt

SEQ ID NO: 11183 - DNA, 379 bp, Glycine max
gcatgcaagcttgtgaataaaattctgtttctgaagaggactataatgacctgcgaagagctggtttacgcagttgtttgctcggaggcctgccggattggcttgttgcgtatgcggatcgccttgtatgagccttcatctgacaacaatggtttcatgttcatgtggttctttgcggatcaattttccctaacatatatgctatggcgaaggtgagaatcatcaattattgaaagaacaaaacttcctgaagaaattctaaagcataatccataagaaaaaagagaatatttctcaaatataattctcgaagttgaaaggagcgatgcctgaggtcacggtccctctttggccgtggggatacattcctttatacact

SEQ ID NO: 11184 - DNA, 323 bp, Glycine max
  unsure (1)..(323): unsure at all n locations
ntacaaaaaatgtcactctactctaagttttttaaggatatgttcacaaggaaacacaagtatattcaccaggaaaacattggtctggaaggaaattgctttgttgtgattcaaaagatccttccacccaagcataaagaccttgggagtgtaaccattccttgttcaattggataaatcactatgggaaaggctcttattgatttgggagccattattaacttaatgttagtctccatgtgcataaggttgggagagttggagatcatgcccacttgaatgattttacaacttgctgaccgctccattaccagaccatattg

SEQ ID NO: 11185 - DNA, 209 bp, Glycine max
  unsure (1)..(209): unsure at all n locations
tgaatcggacctccgagtgatatagtatgatccattgaattgctcaagagcttccattgggtcaattcgagcgtctcgatatattatgcgccataatccgacctgcgagtgagaattatgaccacttgaattctcgagagcttccgttgtcaatntcgagcgtctcgatatattatgtgcctgaatcggacctccgagttagaaggatg

SEQ ID NO: 11186 - DNA, 367 bp, Glycine max
  unsure (1)..(367): unsure at all n locations
gtagaaattgctattctaagctcacttttgcgattcacatcccacgtggctttaaacaatatttccaataccttttaacgaaacatgttctgtnttataaatttatgaaaaatgggtaataatatatatatagctaatttttacantaatagataagtatatttttagtatcttaattaatatcatatataataatcgatactctataaatggaagctatatctaataatttatgctattaaaaatnaatcttatagactgactactataaaaagggaattgatctaaataattaatttacgtttaaaatatgattatatcatataattgatatctcataaaaattctatataattaaaatgtaaat

SEQ ID NO: 11187 - DNA, 386 bp, Glycine max
  unsure (1)..(386): unsure at all n locations
atataagtgatcatgattaataagatatgaacgacagaaagaagaagatttccttaaattgttaactgccattctaacaaattncataataaaaaattaacatcatttgataatacaaacatgcaatcaatggtgaaatatttcaataatagacttaagttaagtctagttacatatatacattaatcttgaagaaatttgtatcataacatctatccaatgacaacaatattcataaaaactataacatttataattaaacctcatcttttatagaaaataccttattatttatatacgtgtctataacaataaagataaattattatttcctgtgttaataattgcaaacttactattatactatagtctacacacactatacc

SEQ ID NO: 11188 - DNA, 294 bp, Glycine max
agcttgagctcggcttgagttgaatacgtaaagcttgagttgacataggctttttttaaggctctgctcgacttacataaaagtctgacttacgagcctatttaaaagcttgcttaaagacgtcttttattaattaattattttaaaacctagtgaaatactaactaaaaaaagaaacttataaaatttcgtataaataatgtacaaatctaaaaataattgataaacaaaattatattgaattcaagtcgttaaagcacaaagtatataaaaaaaataaaaatagcataatat

SEQ ID NO: 11189 - DNA, 283 bp, Glycine max
agcttgtcgccgttcgagacctctttcgggtttaggcctttggttatggggagaaggagcaacggtgctgttgttttcgcttctgaaacctgcgcgcttgacctaattgaagcgacttatgaaagggaggtttaccctggtgaggttcttgtggtggataaaaacggtattcagagtctctgcctcatgtctcatcctcaaccaaaacaatgcatttttgaacatatttactttgcacttcccaattcggttgtttttgggaggtctgtgtatgagtctcgta

SEQ ID NO: 11190 - DNA, 406 bp, Glycine max
tgtacacctctgtttctctacctttcatcacaaaccctgttggttgattgacaaaaacttcttcttctagtgagccattaagaaatgcagattttacatccatttggtgtacttcccagcaattgaagctagccattgctattacaagtttcactgtttccaacctagcaacaggggcaaatacttcatcataaaccagaccttgcttttgcaaaaatccctttgcaaccagtctggctttgaactttgttacttctcctctaggattcaacttagttttgtagacccattttactgctatggctttctttcctattagtagctttgtgagactccatgtcttgtttctctcaataaacctcaactcttcttccattgcttcaacccaatgtgagtgcttcaaagc

SEQ ID NO: 11191 - DNA, 402 bp, Glycine max
tataaatcattaaaattgattagttttgttatctatattataatttgatttcacgtgcatcaaaactttgttttgttttaaaaaattatccattaggaaacaattgtgtgtaatatcgcattatttctacaatatgtcgtttcaaatgatttctttataattataaagctgaagttttccgacccaagaattaaaggtctccctagtgaaatatcattttaacttacgaaataatttgggtcagtttatttgttaaaaagtagagaccattgttatctataaaagatgaattgatgtaaataaaaagactaaattgatcgatttttttattgtttaacaacaaaattggtaattttcattcttccacggaatatcaatcttaaatcttggaagggccaaaac

SEQ ID NO: 11192 - DNA, 421 bp, Glycine max
gatgctattgtcctacaacagatgttgcgcatagggcattgaatgctggactgcagcaatctcaaataaagatttttggtctacctgtccgaccttcctttgttaagcctgtccagccaaaggtatgtaatattcttatagccattacttgaatttattcgcaaatttacttacaattctggaattggaatacaacatgatgtgctatatatattattcccaaacaaatgtcagtggattgtttgaatttatgctgtaggatgaactaaggagagaattaggaatggatgaggatcttcctgctgtattattgatggggggaggtgaaggtatggggcccattgatgctactgctctggcacttggagattcattatatgacgagaatattgtggctcccgtacgtcagatccttgagatc

SEQ ID NO: 11193 - DNA, 424 bp, Glycine max
gtccattctcttggaagttcatcattggattcgacttcttctagagtatcttcattgcgtcctttatcatttcctttggaattttgttcatgaatgttcatatgttctaaagaatctgcaatgtcatctagcatattctttcttgacaatatatcattacattcatcaaaggtaacatgaatggattcctcaatattcatagttctcttattatatatcctatatgctttgctttgtaatgaatatccaagaaaaatgccttcatcagattttgcatcgaattttcctagattatctttaccattattaagtacaaagcacttgcaaccaaaaacatgttgatgagagatattacgttttctatcattaaataactcatatggggttttctttaaaataggtcttatcaaagccctatacatga

SEQ ID NO: 11194 - DNA, 327 bp, Glycine max
ttaatggagtgtggaaccggccactggcgtactggcttctacttggccgccactggttcaactcctttcttggaaaccatgtgcccgatgtactccacttgttgttgtgcgaaagaacatttggataatttgagaacaaaatgattatccaaaaggacctgaaaagcttgttccacatgtgctacatgctcctcaattgttgcgctgtagatcagtatatcgctgaagaagacgatcatgaaacgacgaaggaacggtctgaagatcatgttcatgggtgcctgaaacgatgagggagcattgcataaaccaaaaggcgttaccttg

SEQ ID NO: 11195 - DNA, 211 bp, Glycine max
tgtacgccttggatcttcttcatcaatggaatcctctgtttcttgaattttgatggcagcggaatggagaaggagaaagatgattggagacgccacttcaaggagaagatgagtttataagaagctcaccaccatgggaagccatggataagaacttgaatgtaggataaaattaatgggggaagatggagaaaaagaacaccaaatttat

SEQ ID NO: 11196 - DNA, 412 bp, Glycine max
  unsure (1)..(412): unsure at all n locations
ntgaatgcactattcaatggagttgacaagaacatcttctgactgatcaacacttgcacagtggccaaagatgcatgggagatcctgaaaatcactcatgaaggaacctccaaagtgaagatgtccagattgcaactcttggctacaaaattcgaaaatctgaagatgaaggaggaagagtgtattcatgacttccacatgaacattcttgaaattgccaatgcttgcactgccttgggagagaggataacagatgaaaagctggtgagaaagatcctcagatccttgcctaagagatttgacatgaaagtcactgcaatagaggaggcccaagacatttgcaacatgagagtagatgaactcattggttctcttcaaacctttgagctaggactctcggatagggctgaaa

SEQ ID NO: 11197 - DNA, 284 bp, Glycine max
agcttgtagggttaaagtctcacgattgtcacgtgttgatgcaacaattgttagccgtggctatacgagacatcttgccaaacaaagtcaggttagccataactcacccgtgtttttcttccatgccatatctagcaaagtcattgatcttatcaagtttgatgagctgaaaaatgaggccgcaattatactgtgccagttggagatgtatttcccccctgctttctttgacatcatgattcacttgattgtgcatctggtcagagaaatcaaatgttgtggtc

SEQ ID NO: 11198 - DNA, 284 bp, Glycine max
agcttgctaacccatggttttttcctaatatctcccacactttttggggttggccattcttggacggccttgattttctcatggtccacatggacctcatttctaccaactacaaacactaagaaaactatattatctacacaaaaagtacacttctctatattttcatagagggtgtttttcctaagaactgaaaaacttgcctgagatgtcataagtgatcatttaggctcctactgttcagtaaaatatcatcaaaataaacaactacaaatatacctctg

SEQ ID NO: 11199 - DNA, 281 bp, Glycine max
agctttggagtttccaagtgccaattcgtcttcttctttagtccagtcttcttctggcttcaattcttcagtgggctttccttctgtgtccagcatcttgggatgttcccagcctttgatgacagctttccaggttctgctatccagtgatttgaggaaggccaccattcttgctttccaatattcatagctgcttccatcgagaattggtggtatgttcactggtccgccttctttctccatgttcatcagaatttatctccctagatctcactctgtga

SEQ ID NO: 11200 - DNA, 391 bp, Glycine max
  unsure (1)..(391): unsure at all n locations
ntacagcagatgcccctttactccatgttcttgaaggatatgttaacttggaaacataagtatattcaccatgaaaaaattgtcgtggaaggaaattgtaatgttgtgattcaaaagatccttccacccaagcataaagaccttgggagtgtaactattccttgttcaattagagaagtcactgtgggaaaagctctgattgacttgggagccagcattaatttaatgtcattctccatgtgcagaaggttgggagagttggagaccatgcccactaatatgactttacaactggttgaccgctccattaccagaccatatggagtaattaaagatgtgctggtcagagtgaaacattttaccttcccgacagactttgtggtaatggata

SEQ ID NO: 11201 - DNA, 286 bp, Glycine max
agcttgctgtttactacatgctttgtaaccttctattgtatccttcttgggcatatgctattccttcgcggattctcaaaattcccgatacaattgtggaggttgctgtttgggtattcctcacctactatggtattggatttgacccaaatgttgggaggtaaagaaactactttaaacatttaggagcatgcgaatgttgttgcttctactaatttgcgtgttacttatgatgtgagctcttgaattttgtgcaggttcttcaagcagtacctcgtgctattaa

SEQ ID NO: 11202 - DNA, 286 bp, Glycine max
agcttgtaaaggagtgtgaatctttgctggaccaccttttccctgtgaatgatcctgctccagtttccactgagacaactccccaagctgaaggttttgatccttcaacttcaaccactaccaagagtgatggtttggtgattccgaaggaattagctgagatcgagtacatggagagcctttatatgaagagtactgtatcagcattgcatgttttgcaggaaattagaagtggaagctcaacagttagcatgttttcattgccaccgttgaagataagtggttc

SEQ ID NO: 11203 - DNA, 405 bp, Glycine max
tgccttacctgcaaaatctttcggtatatgttcttaaattacgaagttgtcgtccaccaccatactcattctctccacttgattcttgtgttgtctatcttatatgtcgcaaggcatgcatagtcaatttcacaattctcactcactaatctttgaataagttaaacataactaattcatttaccaagctactccttacttgtacaactattggccatttttgaggcaagaactttcatgattacaattcatacaatggcctgagtacttcatgcacactctatagttgcatacaataacttactcaactctagaacataggtgctacgatattgatatgctgaaaatgacttgcgatacttttatatcacttacatctaagtctatatgatctacaatctgaca

SEQ ID NO: 11204 - DNA, 410 bp, Glycine max
tgttactactattagatagctactaatactattgcaaactgttattgtttttttaacttaattatattacacttgtttatgtatgtgtttttctcttgacttaaatataattttggtcattttattttactcaatacgtaattttggtctctctattttaaaattaaaatatttgatactcctatttttaaaaatctacaattttggtctctctattttaaaatacaaacattttgtccctatattttagaaaattcataattttgattctcatattatagaaaattcacaattttggtttaatatataattattcctatgttttatttcttttattttttactttgtagttaattaaatcatttcttgatgatatcttaaatgaatatgtagatttaggatttaattag

SEQ ID NO: 11205 - DNA, 428 bp, Glycine max
  unsure (1)..(428): unsure at all n locations
ntgcttctacatctcttatagagttattcgagcttaatataacaaatagaagagtttttgggtagtagttcatgagacccaacatgtctccacggggagtgccagtgttgttagtgaagaagaaagatggaaccatgaggttgtgtgtagactatcgccagttgaataaggtgatgatcaagaacaagtaccatttgcctagaatagatgaccatacggaccaggtgataagaacttatgtgtttagcaagatagaccttaggtcaagttaccatcagatccgagtgaagtctgaggatatcctgaagactgcctttaggacctgttatggtcactatgagtatctagtcatgcctttcagtgtgactaatgcccttggtgtgtntatagattacatgaatagaatctttcacccttatcttgatagg

SEQ ID NO: 11206 - DNA, 390 bp, Glycine max
gtaacatcagaccacttcaagggtgctggaacttcttcacatggacttgatggggcctatgcaagttgaaagccttggaggaaagaggtatgcctatgtcgttgtggatgatttctccagatttacctgggtcaactttatcagagaaaaatcagacacccttgaagtattcaaggagttgagtctgagacttcaaagagaaaaagactgtgtcatcaagagaatcatgagtgaccatggcagagagtttgaaaacagcaagtttactgaatactgcacatctgaaggcatcactcatgagttctctgcagccattacaccacaacaaaatggcatagttgaaaggaaaaacaggactttgcaagaagctgctagggtcatgcttcatgc

SEQ ID NO: 11207 - DNA, 235 bp, Glycine max
tagcttgcctcgaaggtttatttctatgatccgctggaggcggcgcatcttcactgcgggtgcggcgcgtggggtgttttcttcacgggattgtttgcgaataaagtgtacgtggaggagatttacggtgttggaaggccgttcggggctttgatgggtggcggagggaggctgttggcggcccacgtgatttaaatattggtggtgtgcgggtgggttactgtgaccatggtcc

SEQ ID NO: 11208 - DNA, 424 bp, Glycine max
aaactacgctttgaaaattaaacacaataacttttactcggatgtttgattgagacccgtaatatatcgagtcgctcgaaattgaataccgaagcgctgagcaaattcaaacgacaataactttttactcggatgtctgattgagtcccgtaatatatcgaaaagctcgaaattgaatgttgaagctctaagcaaattcaaacgacaaaaactttttactcggatgtctgattgagtcccgtaatatatcgaaaagctcgaatgtgaatgtagaagctctgagcaaattcaaacaacaataactttctactcggatgtctgattgagtcccgtaatatatcgagatgctcgaaatggaataccgaagctcggagcaaattcaaacgacaataactgtttactcggatgtctgattgagtcccgt

SEQ ID NO: 11209 - DNA, 281 bp, Glycine max
agcttctacattcaatttcttgcttttcgatatattacgggactcaatcggacatccgagtaaaaagttattgtagtttgaatttgctcagggcttcggtattccatttcgagcgtctcgatatattacgggactcaatcggacatccgagtaaaaagttattgttgtttgaatttgctcagagcttcggtattccatttcgagcatctcgatatattacgggactcaatcagacatccgagtaaaaagttattgtagtttgaatttgctcagggcttcgg

SEQ ID NO: 11210 - DNA, 416 bp, Glycine max
ttagtgtactgctttaagtagtgcacgatatgcttccttaggtaaacacgttgcctaaaagttactatcaggccaaaaagatattgtgtccgatgggtatgaagtatcagaagattcatgcttgcctgaatgattgcatattatacagacatgaatttcaagaaatgcccaaatgccttatgtgtggggtatcacggtacaaagtgaaagatgatgacgagtgtagtagtgatgaaaactcaaaagacctaacatggcatgcaaatgggagaaactgcgatggaatgctccatcatccggctgattcctcccagtggaagaagattgatcgtttgtatccagatttcggcaaagaggcaagaaatcttatgcttggactatccactgatggaatgaatccatataggtagttaagt

SEQ ID NO: 11211 - DNA, 283 bp, Glycine max
agcttgctagctgattctctttttaataatttttcagatatgttctcattcttatgagaccaaagcacagctgcatatttgaccactttagatgtatcacacaatcaaataaaggggcaactcccagattgttggaaatcaataaagcaattagtgattcttgatttaagcagcaataaattgtcagggaagattcctatgtccatgggcgccctaattaatatgaatgccttggttttacgaaacaatgggttaatgggtgagttgccttcttctttgaaga

SEQ ID NO: 11212 - DNA, 285 bp, Glycine max
agcttccctcttagtaatgtcttagtcatcatatcagcaccattatcatcagtatgaattttggccaactccaacagcttagcatccaaagcacctcgtatccaatgatacctcatatcaatatgcttagaccttgaatgaaaagttgagttcttaccaagatgaataacactctgactatccataaataatagatatttatcctgaacaaaaccaagctcctacaagaatatcttcacccatagcaactccttgcatgcttcgataatggcaatgaattctacc

SEQ ID NO: 11213 - DNA, 282 bp, Glycine max
agcttctggtgggacatcttgacttgctttccaatctgacattcaccacagattctgccttcttctattttcagattgggaatgcctctaacagcacttttgtcaaggattttcttcatgcctcttaagtgcagatgtccaaacctttgatgccatattctgacttcatcttctttggaggatagacatgtggaggagtagctggtttcttggggtgtccataggtaacaattgtcctttgatctgctgcccttcattagaacttcactcttctcatttgtc

SEQ ID NO: 11214 - DNA, 371 bp, Glycine max
tttcagtggaatgcttgatagcatcttgcatgcaccaatgtcattctttgacaccactccctctggcagaattttgagtcgtgtgagttttaattaacacccctttttcacattaatttctgctagtaaacaacgtaaactacattctttaaattatattgtttggacttactgtcttatgaaatgtttaggtatctactgatatactttgggttgatatatcaattccaatgttagtaaacttcgtcatgatcacgtacttttcagtaatcagcatcctcattgtaacatgccaaaatgcttgggaaacggtcttcctcttaatacctctgttatggctgaataactggtatacggtatgatatgcctac

SEQ ID NO: 11215 - DNA, 285 bp, Glycine max
agcttgtcaagggaacaattatgcatgaattcatagatgagagctttcttgcgtccttccaaacagaatcaaagaagtatgacaacattaacatgagaagttctactgatacactattagaaaatatgttttctacatcggttatttatgactttcaacatcggtttttcaaccgatgttgaaagtaccgacgttgatagtattatcgttaacatcgggttttgaaaaaccgatgttaacgtaaaattaccaacatcggttatataaataaccgatgttgctaat

SEQ ID NO: 11216 - DNA, 404 bp, Glycine max
  unsure (1)..(404): unsure at all n locations
tctcgcaggaactctgtgatatttctagtactcaactttctagccattttcactggtatttacctcctcctctttggctcaacaacttgtgatgaatccacgtcgaggctctactttggtggtgccattttgctcctcatttccccactatgtatccctggaactatatatgctcgagattggtttcaccatgccatccattccagctttcggatggaaggttccggcttcattcttgttcatgttgatgatcttgagcttcataaggaactcctcacatgtcaaaacagcgctctaagtctcagtaatggggacagtcatggcctgctgagtgagaatggatccatttatgtaattagttagagtgcaaaatctagtgatntgtgttgtgacaagatgtttgg

SEQ ID NO: 11217 - DNA, 387 bp, Glycine max
  unsure (1)..(387): unsure at all n locations
ngcattctagaatttgaaagattgcacaagtctcatcaagttacaattttttggagaggctctatatcttgaaacgttaaatctagaaggatgtacacaactcaggaagatagatccattcattggtcttctaagaaagcttacaattttaaatttaaaagattgcaaaaatctagtaagcttacccagcagcatactgggtctcaattctcttgaatacctaagtctttctggctgttaaaaaatgtacaatatacagttatttgatgaaccaagggatgatgagatttcggagaagctttgtataggtgaagctcctactcaatcccaatcaacatcctccattttgaaaaggttgttnttcaggcctttacatttggtgtatgc

SEQ ID NO: 11218 - DNA, 265 bp, Glycine max
gaatgctctattcagtgtagtagactagaatatattcatacggatcaacacatgcacagtggtcggagatgcatgggtcatccagagaaccactcacgaaggaacctccaatgcgaagaagtcctgatttcatctgtcgcctacaaaagcctacaatcttaaaatgaaagaagagcgaatgtttaatgactttacacctgaacattcttgagattgcctacgcttgcactgcctagcgacaaagaatgacaaatgaaaagctggt

SEQ ID NO: 11219 - DNA, 285 bp, Glycine max
agctttcattaagatgggggagttcaccgggagtggtgagtatgtgactcacggtgaattaccttcctccaggccaaatcattcaaggaaagttacagatcttcctcttgtgctgctgatcttctatgagggttcaggggggcctttcggggtggaggatactgtgcacgcagcaggtcctctgttagccctcattggattcttgcttttcccattgatatggagtgctcctgaagctttgatcactgctgagatgggtaccatgttccctgaaaacagtggtta

SEQ ID NO: 11220 - DNA, 279 bp, Glycine max
agctttaattcctccggaataataagttgtccagatgaggatacagtagcacaaaatttacggtatgaaaatagtgcattgatgcaaaggtttgtcacttgttcccgaacaagtgggagtggctttgacggaatctcactagcagctgcaagaaaaaaaaaaatggtaaaattcctacacccaaaaattatacctataaacaccatttaaaatattaacagaatgacaccaccatgggaacatttaaaataaataaagccaacaaaatttaatatagag

SEQ ID NO: 11221 - DNA, 322 bp, Glycine max
tgtagttgagcccttatgaccctggttgaaccttgatatttttgcttcattgaatcccatatatttattgtcatgtccctcttgaggattgtttcaaggacttcactatctattgcctgtaaaaggtaattctttacctttaagtccttcaacttctgctcctcgatcaatttgcattgtgcctccgtaagctctattccatctgccaccatcaatatcccattctcaatgagatcccaatattctttggagcagagaaaattctccatcaacattgcccaatgatcataatgaccattaaaccttggaattgcaggctgca

SEQ ID NO: 11222 - DNA, 269 bp, Glycine max
tggagggactcactggacactgtttttgagttttttatattgtgggcttatgcaggacgactcaggctagatgggctatgagaaatgcttcagtaatatgggtgaagatttaccatagaatacgcggagagctgtagatgacctttgctcagagtctagtgaataaagtgcttcttgtgccaatgcaacatttaaggtgtgatgggaacgacagccagactattatttgagacactggagaacatgaatgctttgactaggatgttcaa

SEQ ID NO: 11223 - DNA, 286 bp, Glycine max
agcttcatgttattggaatgtattctattgacttcaagccttccaacttctaatgagcaccattatcaatttcactatcaaagctaccagaccttttcaatgcggggccaatgctatctggtcgatttgaaggcagaggccatgaaatttacctcaactatatatcaaatgatatacacctcatatgccgcttggggctataatctacacataaaggaacaactaaaaatctattgaggaacaggtagagaaactaaagccaccaataagtgtaaaatgctcacat

SEQ ID NO: 11224 - DNA, 315 bp, Glycine max
taacctccttcaactgcttattgtatttaatatttgaagagaatccttgtggagccttcacccgacgactaaactgataaataattatccttggcttctcggacaaagtttggcacgctgggggcaagattaatcttattacaatgagaccttggatgccatcgtgatcttatacccgtgagaggttgatcttgacgggtcgggaagccatccttcgccttgccttgaatgttaaggagcgtcccaatcacactgtcaccaacatttgtgtccacatgcataacattaatacactgtctaacgtcaagatctcac

SEQ ID NO: 11225 - DNA, 382 bp, Glycine max
taaagcatggtaagctttagcctattgagtggtatattaaatgaaaaatatccaataatatctttgattatatttttagaataacttagagtatcttatattttgttaagattattctctatatttcctaatatttcatgatttgtttccatattgactattagtataaataaggattagtgctttatgttttagtcatactataacacatcatatcaaataaagtcaacatcaataatctcactgtattcagtttcttaattcctattcctctctctctatacctaaatccatatagttttaacacacgtaatgtatcagttcacactagcataaatttaaaaacaaaatccaaatgatgatcataagtggcgcacatgga

SEQ ID NO: 11226 - DNA, 373 bp, Glycine max
ttgcctcaaaacaaagtgtttccattacatgcattgctctggtaatcgattactaggcagtgtaatcaattactagaagataagtttgaaaaatagctgtttaaaagggttttgaatttgaaaattgaacctataatcgattgccagatgtgtgtaatcgattaccagcaacgatactctttaaattcaaattcaaaagtcatgacccttcaaaatataactgtgtaatcgattaccagaaacctgtaatcgattactagtgaagaaattcagaaaaagctttttgaaaagacacatctcttcaaaccattttgaaaaggcacgaagggcctatatatatgtgtgtgtctgacttcaaaaagcaagagagaga

SEQ ID NO: 11227 - DNA, 327 bp, Glycine max
agcttatcaacatcaaacttgtagaaagagttcttggggtcaagacatgagaagcaatcaagtataatgttacttccttcactaaagcggtgatccatctccacacatattttatcaatagcaacataaaaaatctctgcacggtaatgatgaagattagtgatagtcctcccttctgctcttgaacgaccccgaactggtatttcgtcatccatatttggtaccagaatacttttagcaacacaaaatccttggacatcggcaaaaaaattattccagccactctctctcattgtgcccaaccgagctttgacaacatcaactaat

SEQ ID NO: 11228 - DNA, 385 bp, Glycine max
tattgaaatcaaacaagataataaattatcctcactttataatagaagcatatgttcataaataacaaataagtcataagtcatcaaaacataaatcatttgtctaagtcacttgcatctagaagtcctaattctcttctaatggtgtagaaagaatctttggttagtggttttgtgaagatgtctgcaagttggtttttagtatctacaaatttttaaaacacaatcacctttttcctaagactaagtgctaattgactatcaacacttaccaagataagtttttattaacatagaaggttttatcatatcaaaataattttatttgaaataaaatataataattttgaaaagcataaaaaatattttaaacaatcaatcaagt

SEQ ID NO: 11229 - DNA, 322 bp, Glycine max
agcttctggtgggacattttgtcttgctttccaatctgacattcaccacagattctgccttcttctattttcagattgggaatgcctctaacagcacctttgtcaatgattttcttcatgcctcttaagtgcagatgtccaaatctttgatgccatattctgacttcatcttctttggaggatagacatgtagaggagtagctggtttcttggggtgtccataggtaacaattgtcctttgatctgctgcccttcattagaacttcactcttctcatttgtcaccaagcattctgactttgtgaagtttacattgaatcctt

SEQ ID NO: 11230 - DNA, 305 bp, Glycine max
agctttggcagaacaacttccttttgccattccctcgaggcttggccaaaatggtaaactggctgagcttgacctctcaacaaacaagctcactggattggtgcctaaatctctatgccttgggaggaggctcacgattttgatcctgctcaacaattttctctttggatctttgcctgctgatcttggacaatgctacacactccaaagagttcgttcgggacagaactacttgacaggatcaattccaaatggttatctttacttgcctgagtaggcccttttggaattgcagaacaattacc

SEQ ID NO: 11231 - DNA, 316 bp, Glycine max
agcttgtttcttggcactacatttagtggggatacaggtaaatgtacacctttaaccttttcttgtatgtgatagtagatgggtctaatgtgtcaataacttcttaattcgggcaaaaatctaatcacgcgaaatttagatgctttattattaattcagctagatctaataccttcttgaccctggctctgcaggtcacgtgtcattgacctgcttgtattaggtgccaagaaatctttttaaggtggtgtactgcaaaattgcttgtctacacattaagagcttgtctaggagcgatttaatgacttgctcgggc

SEQ ID NO: 11232 - DNA, 374 bp, Glycine max
  unsure (1)..(374): unsure at all n locations
tgaatcattataaataaatgtgagaattcaatcacatgtttgtattacacctatcaaaggatacaatacacatgtcaatcacacaaaaatttagataacacatgttatatggtgcttcataaatatttggtttgattacaaagcataattaaaatgattagatttatcattttatatacctgaaatattaatttttgtaaccaatctgaacttttatgcaatttatacatgtatttcaacctttgaaagctactctacacgtgtaatccgaacctatgatcgaattatcatatttatttaaaatgatttgcagaataaattttatgttgattagttnttttttccaatgcctatatttatcgattggtttaaat

SEQ ID NO: 11233 - DNA, 319 bp, Glycine max
agcttctgacccctttccatattctgataaggcagcaaggtgtctctataatcatcaaaactctcccaagtactgctggaggcaccatcaagaagcacaaggttgccagtgtcattgaacacaccactagaaactctagcagtgaagccaccagtgttccataacttatcaccatttggggcagtgagaaccaacccatcatcagcagaaagctcaacttttgagccctttggtgcaggcttgttgtccctattggcaaaccaaactatggttctgtcttgaatgttggcataccaaatgcaaagtatgaaatgatcag

SEQ ID NO: 11234 - DNA, 378 bp, Glycine max
  unsure (1)..(378): unsure at all n locations
tatcattctatctctcaaaaagtatgaaaggaagttcaagagatgcaggtaaagcatacccctagtagacaaatatttctatcttaccttcatgtagacatctgtatctggatcaggtgtaatatttgcttctttttctcttctgaacacctctgctagcaaatctgcagaatgtgaaataattttagttaaaacttgatttttcatatgaattttggctcgatttccaaattgcagctctgtgggctaaccataaggaggcccaactccttggactcatgctgagaaggccagggtttctctgactgtcatttctccaatatgaagatcattntgacttacaaactcattcatcccatgaccattataagtcacctt

SEQ ID NO: 11235 - DNA, 322 bp, Glycine max
agctttgcagaaaaagactccttttgaagcatggcacgactacaaaccaaagctaacaaatctgaagatatttggctgcctttgtttctcttacatacctcaagtaaagagagacaaacttgacaagaaagcagaacctagaatttttgtaggttatagctcaacttcaaaggcctacagaatctacctaccacaaagcaacaaagtaattgtcagaagggatgtcaaatttcatgagtcagatagttgggactggaaaaatgataagaggtctgagtttcaagaggagaatgaagatgtagatgaagaacccatgagagga

SEQ ID NO: 11236 - DNA, 375 bp, Glycine max
  unsure (1)..(375): unsure at all n locations
tggtccccaaggctttatgaagactctcccaaaatctataggtgaatctgggatctctatcagaaactatgctagaaagaacaccgggtaatctaactatctcactgacgtacaagctagtcaacctctctaaagaatatctgatgtttattgggatgaagagagcagatttggtcaacctgtctacaataacccaaatggaatctaaacctttgggggtcctaggtaaccccactacgaaatccatggagatgctatcccacttccactcaagtatctctaaaggttgcaacttccctgaaggcttctggtgttctatcttagctttctgacacactangcatgcaaggacaaactcattaacttctttcttca

SEQ ID NO: 11237 - DNA, 321 bp, Glycine max
agctttagttttgtttaagaagttatattcaatgcatagggagacagagataaagaattccattgccaatgcagttcatggtatggaagttggggagtttgctacatttatggcacttggtttgcacttcgtggtcttgcagcggcgagtaaaacttacactaattgtgctgccattcgcaaaaccattaaatttctactttcaacactgaaagaggatggtaggtggggagaaagctatctttcatgcccaaaacaggtttgtcattgaatggtcatggtaaacaggatactatatggtttattaaactgtattaaatat

SEQ ID NO: 11238 - DNA, 381 bp, Glycine max
ttgaatggaggctctggtctcttgttgaaatagcttgttttgcatattcatttgcctcaaaagttcttcaagggaaggttgtggaggggcctcaactgtttgctatttctgaggatgttgctgttgttgctgctggattggtggaggaacgtatagtctgcttgggccagcagcattttgaaaataaggctgttgttgttgctgctgctgttgtgaaggattcgatcatctaaggttgggatgattcctccatctgggattgtacctattgctggagaggtcataattattctgttgtggctgattttgctattgaagttgaggaggtttgttgtagatgtttgcagcataagcttcaggctattcaattgcttcagattg

SEQ ID NO: 11239 - DNA, 376 bp, Glycine max
tatatgatttcaattccatttcatttcaatgtccgtgtaatccttttgatcataaaggaaaatggaaggcatgtttttttttaagatagccctttaattcgtataacgtgagattaatatgattcttcttcatttaatattgcagtcattgccagtgttcatatttgcaaatcaagctggccttgacatgttggaaacaaccctagttgccttacaagatatcacattggataaaatatttgatgaggctggacgcaaggcattgtgtacagactttgccaagttaatggagcaggtaataataacttctagtgatcacaaaattttcaagttacaactacattgtcattttgaaaattgctgaattgttttctgc

SEQ ID NO: 11240 - DNA, 299 bp, Glycine max
cgacactctagaaactccaagctttcaagaaattcgaatggttataacttttcacattaatgtcctattctgggacataactcatctttacgctcgaaattgagcaacgcaagctctcgagaaattcgaatggtcataacatttcgcacaaatgtccaattctgggacataatatatcaagacgctcgaaattgaatatcggaagctctcgggaaattcaaatgggcataacttttcacatggatgtccgatttgggaaaataatatatttatatgctccagattgaacaacgaaagct

SEQ ID NO: 11241 - DNA, 323 bp, Glycine max
agcttgtttcataaccacctgttttatattatccatttacagtctataaaaacttcaggatttttcctgcacattatgttataatggtctcatgtgtcattttagaggggctattctccattcagcatcatggcacacatagagttgctttcttgtttgctccagttgttgcaacatggcttttgtgtattagcagtattggtatatacaacatattccactggaacccaaaagtataccgtgcactttctccaatctacatggcgaagttcatcaaaacaactgggattgaaggatggttgtcattaggaggagtggtgctt

SEQ ID NO: 11242 - DNA, 321 bp, Glycine max
agcttttgatgctctagtttattcctttttttgaatgaatatgttcaaatacactctaattcctttcacaagctgaagcactataagtttggcttaaaacacgaatagccaatttttgcaattatggaacactacatccataacaatcccaccattgatctaggatacaacatataaagaaataaatcaatataatgaatatattatgactcgctaaaataaatcacaaatcagtaatgttatcaaagtatcaaacactaaatttacctggcatgactatgttccgttcacatattgcagctcgtcatgcaaaatatcctt

SEQ ID NO: 11243 - DNA, 324 bp, Glycine max
agctttagcttaactctgcatgtagatctacatgagcaacattctaaaaaataaatacatgtgaaattttaacgtattataacaaatttaatataataataatactaacaatgaatatttattcctttaaaaaaacattgagtattaatttatgatttattaaataaactagcctcttgaatgacctaagacctaatttgtttaactaaataggttttaataaaaccttttatttggtctaatttgagtctgatgtaaaataatgacgattctgtaaaataaaataaaattactatgcacttttatatagacagcacatccgta

SEQ ID NO: 11244 - DNA, 380 bp, Glycine max
tagtgagacaccagattcagcactttacaaaatcttctttttcacctgaaatagaattgaaatttacattaattacaagtggaacattataatgagtaatgatcaatttattaaccaaaagtatttacaatcctacaaaaagaactgcaacttggaggaattctatataattatcaaaagtttctatacaaaagtttgtcgtataaaatgactaacaccaaaccatagctaaaattcactaatcataattagtgaaattttggctccataaattcaagtgaaatttgaatagaaattcaaatttccctccaattttttgtgacacttaggctataaatagaggtcatgtgtgtgcatttttcaactttgataatttgaga

SEQ ID NO: 11245 - DNA, 375 bp, Glycine max
tcctcttattagtgcatagctcctttaagaattctgcatatcttggaatttgctttattgcatccagcagaggtatgtttacctctacttttctgaatgtttccaagatctttttctctgcctcttccatttttttgttggaaactgctcttggagggaatggaagaggagggatgtgttgcttctgcaaatcagaattaccagtggaagattcacctgcacataaattgttaggtaaatttttgtcattacctttttctgggttagagtgaagttgggcaggttcatttgcagatgaggaaggtgctacgggttgaggtccttgacactgctttcccgacctcaatgaaatggcactgacatttttgggatttt

SEQ ID NO: 11246 - DNA, 360 bp, Glycine max
actcaagcttaacttgattgaattggcactctaaaggactttcttcatttatatcgacgaacccgttcttatcgccaaatgttaaatgttaattgtcagtagtgagatgtgaactcacgacctcatctcactcccttataactcttgttcatattgatattgatatcttaattggtaatgcggtcttgtgtgctggaattgcaactggagaaattcatcactcacacagttccattctcagagattaacaaggcttttgattacatgctgtaaggggagtccatcagatgcatccttcgaatgggggagtaaatctatatcacaccaatgatgacatgaccttgtccctgttgggggact

SEQ ID NO: 11247 - DNA, 319 bp, Glycine max
ctgatttcctttgttccggaaacctttcttttcttatgttctcccaaacccaatctccgggttcgaagacaaccttctttctccctttgttggcttgtttagcatagcttttatttttcctctcaatttgatctttgactctctcatgaagcttcttcacatagtccgcctttgcttgaccttctttatgcttaaaaacagaaacattatgcataggcaaaagatcaagaggagttagtgggttaaaaccataaacatcttccaaaggagaacaattagtggcgctttgaacagctctattgtaagcaaattcaacatg

SEQ ID NO: 11248 - DNA, 374 bp, Glycine max
ctgtcaagctcagagcagagattagttgctgttttaagtgcagagaaattcactacaacccaggtgattgggtgttgctcagattgagaccacgacgtcaaacatcggcgaagggttctctgacgagttctgggaaattagccaaacgatattatgggccattccaggttatagaacgggtcggagaagttgcttaccgtctccagctaccggcagaggaaaaaattcattcagtgttccactgttcttgtcttaaaccatttcacaggtcaccggagcaggttgacacatcgcctttaccacagcaattcgtgggagatcaacccatggttactcctttagctatcctggattatagacgctctccggtagac

SEQ ID NO: 11249 - DNA, 319 bp, Glycine max
agcttaaataggaatctttctttggggggacttattattttaaaaaaatgcataagtatataattgttttacttgttatttcagttttcttgtataaacttctaagctatttttaaaattttaagattataaatgttttaaatttattctgtttcttaatgttaatcatgatcaactattacttaaagtgaaagcattttttaaataaatttaatctttgcctacaatcataagctagaagtttaaaaatgttattaaaaaacatcaaatttactccaaagataattagagaagcaatttgttgcaaaaatcatatatt

SEQ ID NO: 11250 - DNA, 305 bp, Glycine max
actcggtatattatgcacctgaatcagacctccgtttgacaagttatgaccatttgaatttctcgatagcttgcgttgttcaatttcgagcgtctctatattttatgcgcttgaatcggaccttcgagtgaaaagttaggaccctttgaatttctcagaagcatccactatacaatctctaccggctcgatttcttatacgcctgaattggacctacgagtgaaaagttgtgaccatgtgaatttctcgagagatacaggtgttaaactactagcgtgatgatattctatgtgctttgctctgac

SEQ ID NO: 11251 - DNA, 397 bp, Glycine max
ggacatctatgaaactcagctttcaggttctatccctccttccctgtgaaactgtttaatgcttcagtccctggatattagcaacaattccctcagtggtaaaatccctcctagtttagcaagatcttctaggatattcaggatcaatttgagcttcaactcactttccggatccattcctagtagtctcactatgtctccttctctaaccattcttgcacttcaacacaacaatctctctggttttatcccagattcttggggtggaactggaaagaagaaagcttcccagcttcaagttttgacccttgatcacaatcttatttctggaaccattcctgtttctctagggaagcttgctttgcttgaaaatgtttctttgagtcataaccagatt

SEQ ID NO: 11252 - DNA, 315 bp, Glycine max
agcttgtcaaaatgaccttattttattcctccattaactgtacaaactccaataaaccttgtgacacttgtcattttgccaaacaaaagaggctaccttttcctgatagcattattgtttcttctcagaggtttgatttgctgcacatggatatctggggcccttatgcttatccttcattacttgggcacaaatattttcttactattgctgatgataaaagtagatatacatggatcatttttctaaaactaaaatcaaaagttgcaaatcatatcaaacaatttgtatctatgattgaaactcatttttctg

SEQ ID NO: 11253 - DNA, 377 bp, Glycine max
  unsure (1)..(377): unsure at all n locations
tcttatccaaggtaattcttggtggtgaagctccttcttccttgtcttattccatagtggatggtgcctcccctctcctcttctcctttgccttccgctgcatctccagggtgtaaaatcaccattaaaggacctcattgaagctcaaagatccagcctccatagaagctctacaagcaagcttccatcacaatatatataaattatcatccgggaaatcatcccgaatgggtaagtcctcatcagacacatgttcgatccgactcaaatgatcagcaactaaattttatgctctgctcctatcacggatctccaagtcaaattcttggagccaaagcatccatcagatcaacctaggctntgaatcagccttctgc

SEQ ID NO: 11254 - DNA, 300 bp, Glycine max
  unsure (1)..(300): unsure at all n locations
tctaaactntgtacaagaatgaagctctgatacctcttgttgaacaagtggcctcagatatctcaagaatgggaggttgaattaagatatcacacactattccgccattggaaattctactttgattgtaacccacgtcccacgattccttttaaaatgaattcttatataataattcaaattaaacttattgaatagaaacagtaagcaacatgacataatagagtttaagggaagagaaattgcttacacagtttttatactatgacggcaaagtccgatgcctacggccaatcccca

SEQ ID NO: 11255 - DNA, 297 bp, Glycine max
agcttgcttccttgctttctttttttggttccttgcttcctttgcatctttggttatctgctgcttgcaacttcttggtaagtttattttaattgataataaatccgatgcatgtttaagttataaattctaagtgttatgagttaaatatgtttaggttaactgtgttttatatgttaatgttatatatgtataagtgctatttataaattttaagttgccatttgaaatattgatattatttatattgtatgtatatgttataattttagatagtgggtacagatttgtattata

SEQ ID NO: 11256 - DNA, 318 bp, Glycine max
agcttgaaggtttactatatgtattggttaacctggtaacctaactggccatgaataaaaaatctgcacctgtcgccagacttcgtggtttatgctcctctgtcgaccaccacacagacctttgcccttctatgcaacaatctaaagcaattgaacagcctgaagcttatcctgcaaacatctacaatagacctcctcaacctcagcagcaaaatcagccacaacagaacaattatgacctttctagcaacaggtacaatcccaggtggaggaatcatcccaaccttagatggttgagtcttccacaatagcagcaac

SEQ ID NO: 11257 - DNA, 256 bp, Glycine max
gttgtcatttgtgttcctttatgaatggcacaatattagtggttgtgcagatgtttctcaacgtggaagggaaaatggaaactttgactctagtgctagagtttatcataaagtcactcccaagaaattaggggctttgggttccaatgaaggagctgcttaccatctgggattgcatcacaaacagctatatgtgtactgtctggtacaagtgttctaaatgctagaccacgtagtgctacttcgtctggactac

SEQ ID NO: 11258 - DNA, 443 bp, Glycine max
  unsure (1)..(443): unsure at all n locations
tcatgatgaatcaagaatgattcaaagatgtnttgattctattatatatgatgacaaaggtgatgacaaaaagctcaaaggtcaatcaaagaatgagttcaagatgttcaagaaagaatcaagaacacttcaagattcaagaggaaagttgatttcaagaatcaagactcaagattcaagaatcaagagaagacttaatcaagataagtatgaaaaggttttttcaaaaactgagtagcacatggatttttctaaaaaaatgtttaccaaagagtttttactctctagtaatcgattaccagattattgtaatcgattactagtagcaaaatggatttgaaaaagttttcaactgaatttacaacgttccaattgatttcaaaaagctgtaatcgattacaatgttttggtaatcgattaccagtgcctttgaacgttgaaat

SEQ ID NO: 11259 - DNA, 313 bp, Glycine max
gctggtgaagaagaatgtggcatttacctgcggtgaaaaacaagagcaagcctttgctttgctcaaagaaaagcttactaaggcacctgttctagctcttcctgactttttctaaaactttgagctagaatgtgatgcctctggagtgcgagttggagctgtattgttacaaggtgggcaccctattgcttattttagtgaaaaacttcatagtgccaccctcaactaccccacctatgataaagagctttatgccttaataagagccctccaaacttgggaacattacctctgttccaaggaatttgtcatt

SEQ ID NO: 11260 - DNA, 461 bp, Glycine max
  unsure (1)..(461): unsure at all n locations
tctggtgggacatcttgacttgctttccaatttgacatcncttcacagattctgccttcttctattttcagattgggaatgcctctaacagcacctttgtcaatgattttcttcatgcctcttaagtgcagatgtccaaacctttgatgccatattctgacttcatcctctttggaggatagacatgtggaggagtaactggtttcttgaggtgtccataggtaacagttgtcctttgatctgctgcccttcaatagaacttcactcttctcatttgtcaccaagcattctgactttgtgaagtttacattgaatccttcatcacacagctgactgatgctgatcaagttggcagtcagtcccttcaccagcagtactttgtccagactaggaagtccatcatggactagctttcccattccagtgatctttcctttagagccatacttcaatgtcacata

SEQ ID NO: 11261 - DNA, 390 bp, Glycine max
  unsure (1)..(390): unsure at all n locations
tgcagactaagtgctcactaacacntagaaataatccttctttttgtaccacgnaaacctcttcttctagatcaccattcaggaacgtcgatttcacatctatttgatgcaactcaagatcaaaatgagctactaatgccaaaattactcgaagagagtctttcttagatacaggggaaaaggtctctctgtaatcgactccttctctctgagtgaatcctttagcaacaaatcttgccttatgtctctcaatgatgccttctgagtctntctttgctttgaagacccatctacatccgatggctgttacaccatgaggaaactcaacgagatcccaaacttggttagatgccatggaatccattctattcctcataggcatataccaca

SEQ ID NO: 11262 - DNA, 379 bp, Glycine max
attctaattattccagtatagataattgtactcatctgttatttccaaaatgtattatggcttttgcagacaggaatagagccagcatttgtcttattttttgattgccctgacgaagacatggagacgcgacttcttagtatgaaccagtgtggatgcgtttctctttttaataatctgtatttacttgtgctactcatcacttgagacttttttgtccatcataattaagggttctgaggatgacgctcttgctacagattggaagcggtttaaggttttctcggagactagtcttcccgtgatcaattattatgatgccatgggaaaagttctctagcgtactgatgcatgtgattctaccatgttgatcacatat

SEQ ID NO: 11263 - DNA, 376 bp, Glycine max
  unsure (1)..(376): unsure at all n locations
ctgacattcaccacagattctgccttcttctattntcagattgggaatgcctctaacagcacctttgtcaatgattntcttcatgcctcttaagtgcagatgtccaaatctttgatgccatattttgacttcatcttctttggaggatagacatgtggaggagtaactggtttcttgaggtgtccataggtaacagttgtcctttgatctgctgcccttcattagaacttcactcttctcatttgtcaccaagcattctgactntgtgaagtttacattgaatccttcatcacacaactgactgatgctgatcaagtttgcagtcagtcccttcaccagcagtactttgttcagactangaangtcatcatggact

SEQ ID NO: 11264 - DNA, 251 bp, Glycine max
ctatgctgcaaacatctacaacagacctccttattctttgcttgcaaatcagccacaatagaataattatgaccctttcagccacaggtacaatcccgaatggaggaatcattccaaccttagatggttgaatctttcacaacagcagtagcaacaacaacaaccttattttcaaaatgctgctggcccaagcagaccatactttccttcaccaatccagcagcaacaacaacaacagccccagaaacagc

SEQ ID NO: 11265 - DNA, 416 bp, Glycine max
tcaagaaaatgatggcctcagcaaattccttttttttgtgcataaccatagaaaaacctagagatagatggtctgaagaggatagaaaacgagtacaatacaacttaaaagacaaaaacataataacatctgccctaggaatggatgaatatttcagggtttcaaattgtaagagtgctaaggaaatgtgggacactcttcgattaacacatgaaggaactacagatgttaaagatctaggataaatgcactaactcatgagtatgaattatttagaatgaatgcaaatgaaaatattcagagtatgcaaaagagatttacacatatagtaaatcatctagcagccttatgcaaagaatttcaaaatgaggatcttataaacaaggtgttaagatgtttaagtagagaatggcaac

SEQ ID NO: 11266 - DNA, 449 bp, Glycine max
ctcttgagaaaacttccttgagaagcttctttgagtttactttcttgagaagctagagcttagctacacacacccctctcataactaagctcacctccttgagaagcttccttaagaagattcctaaagatgcttgagcttagctacacatacctctctaatagctaagctcacctccttgagatgagaagctagagcttagctacacaccccctataatagctaagctcacccctatgacaaaaaacatgaaaatacaaaaaaaaaaagtccttactacaaagactactcaaaatgccccgaaatacaaggctaaaaccctatactactagaatggccaaaatacaaggcccagacaaaggaaataactattctaatatttacaaagataagcgggctcatacttagtccatgggctagaaatctaccctaaggctcatgagaaccct

SEQ ID NO: 11267 - DNA, 450 bp, Glycine max
  unsure (1)..(450): unsure at all n locations
tgtatggtagaaggtgtaggacacctctatgttggttagatcccagagaaaaaacctcatcttaggacctgaagtggtacagcaactgccgagaaggtgaagttgatccaagaaaggatgaggactgctcagagtagacagaanagttatcaggataaaaggaggaaagacttggaattcgaggttgatgatcatgtattcttgagagtcactccgtggactggggttggtcgagcattgaaatcccgaaaactcacacctcgttatatcggtcctttccaaattcttaaaagagtcggtcctgtggcataccaaattgcattacccccatcactttctaatcttcacaatgtctttcatgtgtctcaactccgtaagtatatccatgatccatctcatgntgatcaaatggatgacgtacaagtaaaagagaacttaacatatgaaaca

SEQ ID NO: 11268 - DNA, 454 bp, Glycine max
actaagctttacctgcttacaaaatcagagcctatcagtcttttaaacatggtaccagctggagagttaatcgaaaaattaatgatgcatctttgtttctgatcagtccatgcatcggacataatagtacaaccatacttgacccattgctccctatggcctttcatcaaattttcagtatattcaacttccttcttcaagagtggaactctgatgtcatgatagctaggaatgggcaaatgtggcccatattgaccaatggctgcaaccatgttctcaaagcttttcaatttaatgaggttgaatgaaaaacctgcttggtaccaaaagcgagcaatatgtagatgcaccttcaatacttcattcttatccattgactctcttatgttcatttgcctcagcatctccatttttctccgattgattgcattatctggattcttacaaaatttgt

SEQ ID NO: 11269 - DNA, 323 bp, Glycine max
  unsure (1)..(323): unsure at all n locations
cattcttcatctagctngaagacggcttctttattcagcaagttgctcaatggtctagcgattntgaagaagtccttgatgaacctccgatagaagcctgtgtgtccgaggaaactcctgatacccttagcatttactagtggtggtaacttctcaatgacgtctatttcggttttgtccacctcaatcccttggttgaaaccttatggcctaatattatcccttcctggaccatgaattgacacttcttccagttcaacaccaattttgctttaacacatcttcgcaacatgagctttagattggtcgagcatcagtcaaag

SEQ ID NO: 11270 - DNA, 447 bp, Glycine max
  unsure (1)..(447): unsure at all n locations
tatatatactctngagctttngaactttgtttcgttagcttggcgcanaaagntaaaaaattcaggagatcctttattctggaatttggacatgacacatggagcgtagttaatactgtttttagtaagctaaataaattatatgataaaatgtgattttcctctcttgaaatattttggaatgttactgtaaatttttttttggaatgttgattttaatccctttaaaaaattaatacatttttaattacctataaacatgtatttcactatccgtgacgaagaactaaaatctattacttttgataaatgcaaagactaaaaatatgttaaatttttataaaaactaaatctaatatcacaaaacaatttgagaggcaatacttatttaattttatcctanaatatattatgaatagttgactaactttactactctactcttta

SEQ ID NO: 11271 - DNA, 402 bp, Glycine max
tctgcttgaagacttttgtcaccatgtctggtctctcatcagatcgtaaatacaagatcttgacatttctttcaatttcaggccaatttggattacatgtaaatgtcaagaacaaatcaggaaatccaagctgtccacaaatagtcattacatcaaagtagagctgctccatatatctacgtgatccaacaaaagattatggcaatataataatctttcctctctgattgccttgagtttgagcatgatctatagattgactcaaattcatatgtttgtcaacccttaaatcttgttgatgatctctcacaatagttagtctttgggattcaatcatggtgtagccatctactacaaattggtggagcaatctccctgatcttagaataggttgagcctcat

SEQ ID NO: 11272 - DNA, 421 bp, Glycine max
  unsure (1)..(421): unsure at all n locations
ntcataaaacgtcgatgccaaggggatantgttttctcccttgtntcagnnatacgtagctggtctcttcttcacagataaggcatgcacgatggcccttaacattgtatccactcaaattcccatatgctagaaagtcattaatggtaaaaaaatagcaatgcacacaacttgaatgtctcattttgatacccatcaaacatagcaaccccctcaccccacaactttgttaagtcttcaatcaagggactcagataagcatcaatgtcatttcttggttgtcttgggcctaataccatcacaaacaacatcatgtattttcacttcatgcacaaccaaggaggcaagttgttaattactagtaatataggccacatactgtgctgagtgcttaaactgccatagggattcattccataag

SEQ ID NO: 11273 - DNA, 418 bp, Glycine max
  unsure (1)..(418): unsure at all n locations
tgcagctgattgccaatgtgcttttcatttgttccagcgccccagtattggctcgcagatacaaataagtcgccttaaagtacaattgaatttgattgtgaattcaatgtattcatttgaaattcacttagttttaccgacttctttaagcatctctactggatgatatttcattgttgcattcatataaatcaaatttatcattnttctgaatgttggtttttgaaatatttacagttgaaaatcctatntaccttagccatctgtcatgttttcttattgcagagacacttgttcattctacactggaaccctgtgatgatgcggatttcacttttactgtctttttcaatttgaaagagtacacagtatatgtaaaacagaggccttatctccacgcattcttggagagagtatc

SEQ ID NO: 11274 - DNA, 447 bp, Glycine max
  unsure (1)..(447): unsure at all n locations
tctctaatgagtttgaagacaacataattgttaagtatctggtgtgaaacttgntagatcaaggccagtgtctaacgctgatgaaagacaaattggcactactagaaagaatggttttaacatcactatgtaaacatcggttttatcaaaaattgatgttaacaaaaaccgatgttaatgtaatcatcttaacattcaaggcaagaaaaaggatggtttgaatactcatcaagatctaactgagatgggtatatgtgaacagttacatccaatgtttgatggtaacaaaatatacttgcctccagcttgtcatactttgtcaagaaaggagaagacaagtttttgtcagtgtatgctttgtgtcaaagtgtcacagggatactcttaaaatattaagaaccatgtgcaactgaaagatctgaaatagttggctaaagtctcatgatg

SEQ ID NO: 11275 - DNA, 351 bp, Glycine max
ttatttggtcatcattcacatcaaccaaaatactagttgtgttcatgaagggtcttcccaaaataagtggcacttcagagtactcttccatgtccatcactacaaagtcgacaggaaaaatgaatttatccaccttgacaagtacatcttcaagaacaccatatggatacttaatggaacagtccactaattagagggttatctgtataggcttaagttcaagatcaccaatttttgctgataaagagataggcataagattgaggctagctccaaggtcaagtaaagctctccccaccttgagttttccaataattattggaatagtgaagctactagtatcttggagtt

SEQ ID NO: 11276 - DNA, 351 bp, Glycine max
ttaaacttgcctcttagtaatgccttagtcatcatatcagcatcattatcattagtatgaatttcggctgactctaacagcttagcatccaaagcatctcgtatccaatgatacctcacatcaatatgcttagaccttgaatgaaaggttgagttcttaccaagatgaataacactccgactatccacaaatagtagatatttatcctaaacaaaaccaagctcctggaagaatttcttcacccatagcaactccttgcatgcttcagtaatggcaatgaattctgcctctgtagtagacaaagctacacacttctacagcttggactgccaagtcacaactccccctgca

SEQ ID NO: 11277 - DNA, 325 bp, Glycine max
tttatccgtggcgttctatggtggtgagctttttcttgactcatcttctccttaaaggggcaaatccaatcatcggacttccttttccattgcgctggcattgatcttcaagaaccaaaggactccattgatgaagaagatccagggcctacaaactccacatggagttacatcaatgtctataggggagatgacatcacaagggtacaaatatgttgcttcacagtggggacgcaaagtgtataaatggaaacacttggtgttgcatggacagataaataaaggctaccttagctattcggatggtcaagtttcgaagaggaac

SEQ ID NO: 11278 - DNA, 339 bp, Glycine max
tctagatgagttatgtctgcgaatcggacattctgtgaaaagttatgaccatttgaatttctcgagtgcttccgttgtttaatttcaagcgtctcgatattttatgtcctcaaatcagacatcggagcgaaatgttatgaccattcgaatttgtcgagagcttccgtttttcaatttcgagcgtctagatgagttatgtcaccgaatcacacatctgagtgaaatgttatgaccattcgaatgtgtcgagagcttccgatgttcaatttcaagcgtctatgatgagttatgtcaccgaatcggacatccgtgtgaaaagttatgacgattcggctttgt

SEQ ID NO: 11279 - DNA, 350 bp, Glycine max
tcaagaattatggcctcatcaaactacttgtttcccgagggaaattttataaatagacctcccatctttaatggagtgggttaccactactgaaaaacccgcatgcaaatctttatagaggcaatagatttaaatatttgggaagccatagaacaaggaccttatgttccctctataatagtcggaagtgaaacaatagaaaaacctagagcagattggactgaggaagaaagaagattactacaatataatttaaaggccaaaaatattattacatctgccttaggaatagatgaatactttagggtttcaaattgtaaaagtgctaaggatatgtgggatacactaca

SEQ ID NO: 11280 - DNA, 334 bp, Glycine max
ttgatgcaacatttttagaggttaatgaaatttcgagatgatgcgctccatgagaggttggatcaaatggagaatagagatcataatgaagaagaaaggaggagaagagagaatgatggtgttcctagacaaaaccgaattgatggtattaaactcaacattcctccatttaaaggaaagaatgatccggaggcctacttggagtgggagatgaaaatagagcatgttttctcatgcaacaactatgaggaggaccaaaaggtgaagcttgccgccacggagttttccgactatgctcttgtgtggtggaacaagctactaaaggagagagcaa

SEQ ID NO: 11281 - DNA, 341 bp, Glycine max
tgcttctacaaggacaatagcatcatttcttgcactgaattgttgggagttggaagccatcttctcaatcaaattcctagcctcagcaggagtcatatcaccaagggctccaccactggtagcatcaatcatactcctctccatgttgctaagtccctcatagaaatattgaagaaggagttgctcagaaatctagtggtgagggcagcttgcacacaatttcttgaatctttcccaatactcatacaagttctctccactaagttgcctgatgcctgaaatgtcttttttgatggcagtggtcctagatgcagggaataatttgtccaagaacaccctct

SEQ ID NO: 11282 - DNA, 330 bp, Glycine max
tatgcagatgtaattttgacaatggaaggaataaaaattgtatattgtatacaaaataaataaataaacaaaataatgcatatgaattatgaaagaccatgggcaaagagcattttatatgcaccttgatgccaagtggattagcaactcctctcaagaattcaacatgagcaccatcaagttggcgggtacgttccccaacccatagcatgtgagctgagcaatcataatgaagcccagtagtagaatcctccctagtaagtgcttgctcataagggagaagcaaacactcatgggaggtccaaaagtctgttgtactcatgatgggat

SEQ ID NO: 11283 - DNA, 353 bp, Glycine max
tgagaagttgttgtgcttgaaatagttgggatgaagatctctagcaaattctgggggcctcctcacaacaaatgtagtttcatcatcaccccaagacacaatgtggtcagtgcgagggtcatcaacaagttggtatgtctttgtcagaaagggagcaggcactgacttgtgagattccatagtgaacaccatgctatcttcacacctgtctagtgtgaaagccatcactgaattaccaaatagtgctagctgcttccaatattattctttgatggtactctccttttcattcactttttgcacaccaccaagttttaaagaacctctctcactctctatcatattataatttg

SEQ ID NO: 11284 - DNA, 338 bp, Glycine max
tcgtaaatgcggctattatgttgacacctgtagcaatgaaatcaggcttcaatacctctggtgttattgggtttgggccccgagagctaaatgctgcaacaactggcgacggctcaattccaacctttgttccctcaaacataagcctagatgttggttttcgagcatcttgtaagtacaacttgatgagtttcccagccttgaaacccactgcagttgttggtaaaagatgggcatctgccaccaattcctctccgtcggattccgaatttgctaacaccatgcccacaccgccggcagatttcaccacaagtcctttctctaccctagaactattt

SEQ ID NO: 11285 - DNA, 350 bp, Glycine max
cctatgaatactcagcttcactcgaccctttcgggtgctggatctacttcatatggatttgatggggcctatgcaggttgaaagtcttggaggaaagaggtatgcctatgttgttgtggatgatttctccagatttacctgggtaaattttatcagagagaaatcagaaacatttgaagtattcaaagagttgagtctaagacttcaaagagagaaagactgtgtcatcaagagaatcacgagtgaccatggcagataatttgaaaacagcaggctcactgaattctgcacatctgaaggcatcactcatgagttctctgcagccattacaccacaacacaatgggatag

SEQ ID NO: 11286 - DNA, 335 bp, Glycine max
tcgcacttgataatggagacacatgaacagtgctaggcaacgacattcatggcgctccgaacaaaggtggagtatggaggattgccttgagggtccgcacttaggcaatcatgaaactaagctccaaactcgaaagtggaggacacatgaacaaccctaagcaataatattcatgtggctccgaaaaaggatgagaatggaggattgccttgagggtcctctcttaggcaatcatggaacacagctccaaactcgaaaacggaggacacatgaatgaaaccgcaattcattcacgtggctccggaacaggatgagaatggaggattgccttgagg

SEQ ID NO: 11287 - DNA, 338 bp, Glycine max
tccattgttcaatttcgagtgtctcgatatattatgcgcctgaatcggacctccgaatgaaaagttatgaccatttgaatttctcgagagctacctttgttcaatttcgtgcgtctcgatatattatgcgcctgaatcggacctccgagtgaaaagatatgaccattggaatttctcgagagcttccgttgttcaattttgagagtctcgatatattatgcgcatgaatctgacctccgagttaaaagttatgaccatttgaatttcttgagagcttccgttgttcaattttgagcgtctcgatatattatgcgcctgaatcggacctccgagtgaaa

SEQ ID NO: 11288 - DNA, 340 bp, Glycine max
ttataagagataactatccataatagaaggtctgtatggaaacgtacatctagtccactcaatataggctctagctaatcatcatgaatggagatatatgttagacaagtggccttagatatcttaagaaggggggagagattgaattaagatattccaaactacttccccaaataaaaatctatttcactttttattcaagttataaattcccttaacaatgaacttcttaaatattgattcaaataaaacaatttgaatatgaatgtaaagcaataataaataaaggagtttaagggaagagaaagtgcaaactcagatttatactggttcggccaca

SEQ ID NO: 11289 - DNA, 339 bp, Glycine max
ttcaatgttcttaatcaaaagctaactaatgtcccccattcttgcgttgccaaactttcaaaaatcttttgaaattgagtgtgatgcttcaaatgttgggattggggctgcgttgatgcaagaaggccatccaattgcttattttagtgaaaagttaagtggtcctacccttaactattcaacttatgataaggagttgtatgccttagtacgggctttgaaaacatggcaacactacctttatcccaaggaatttgtcattcatagtgaccatgagtccctcaaatatatcaaggggcaaggcaagcttaacaaaaggcatgcgaagtgggtggaatt

SEQ ID NO: 11290 - DNA, 336 bp, Glycine max
tctacattcaatttcaagcttttcgatatattacgggactcaatcggacatccgagtaaaaagttattgtagtttgaatttgctcagggcttcggtattccatttcgagcgtctcgatatattacgggactcaatcggacatcagagtaaaaagttattgttgtttgaatttgctcagagcttcggtattccatttcgagcatctcgatatattacgggactcaatcagacatccgagtaaaaagttattgtcgtttgaatttgctcagagcttcggtattccatttcgagcgtctcgatatattaccagactcaatcagacatccgagtaaaaag

SEQ ID NO: 11291 - DNA, 330 bp, Glycine max
tatacgacctaagatgtggttttgtgagtatattcaatttagacacaagtcttgcacttgccacattggtacaactccttccatcaatgatcaccatgcaaactttgccattgatcaaacatctagtgtggaaaatgttttctctttgactttcctccattgacttcaattgatggccaagtaaccgcctaatcatcaacaattctccctccggtgttttctccacttcctcctcactctcttctcccttttcaacttcggactcactaatttactctccatctctaagaatcatggctttcttgttagggcactcatatgcataatgtc

SEQ ID NO: 11292 - DNA, 347 bp, Glycine max
tcaacctagaggagacggaccattccaagtgttggagaagatcaacgacaatgcctacaagattgacttgcctagtgagtataatgtaagtgccactttcaatgtgtctggtctatctctttttgatgcagatggaggagccttggatttgaggacaaatccttttcaagaaggagggagtgatgaggacatttgataaaatttggtgagagtttctctctgggttccttgttgaaccaattatcagacttatcaaggtaatccttgtggcgtctacccagacttatcttccttcattggaagtggcgtctacccggacttatcttccttcaccggaagtggcgtct

SEQ ID NO: 11293 - DNA, 352 bp, Glycine max
ttagaacagttattgagaggtggtccacacatttgagagtttccaacaaaagaagtgtatggataattgttgatggaatttggaattgagccattcaagttgttatagctcaaattcaaatacttgagacttgtaaggtttttaaagtcagggatagctccagagattgaattgttttggagatacaaccaggtgagtctactaagattctgaaaggtagttggaatactgccagagaagttgttagaggaaatatccaatgctatgagttttggtgagatagaggaagggattaggcctgagaagttattctgctgcaggtttacatattggagtgaaggaatggagagaa

SEQ ID NO: 11294 - DNA, 335 bp, Glycine max
taatggccatggtgattgagaaggagacattcattatgggaatgcaaatcatgcttccattttgctttttagacatgactcttgcttcaataacatggtttgctagtcttgtaaccaccaacctagtaccattgcataacccttgtgattgatacatgttccttaaaagcattattggggtacccacctttagttttatcttatgattaggaagaccaaatgttctcaaactattgagaaattcacttgtgaccacttcaagtgcatttcattcaaccatttttgacttgtcaattgaataagaacttagatattccctttgatcacctgaaaac

SEQ ID NO: 11295 - DNA, 348 bp, Glycine max
ttgaagggatgtatttgctggctataagaccactatccaatttctccttaatgaaatgttgatcaatctgtatgtgctttgttcgatcgtgttgaactagattgtgtgcaatgctaatggcagacttattatcacaaaccagtcccataagagcttcatattttattttgaggtcatcgagtatgaccttcatccataacaactcacaaacaccttgagccatagctatgaattctacttttgcacttgatcttgcaaccacattttgcttcttactcatccacgttactaaatttccacccaagaacatgcaatatcttgtggtagatctcctattaacaattgatc

SEQ ID NO: 11296 - DNA, 347 bp, Glycine max
tcaccaccaacagagtgccttggataagaatctgagagcagaagcttcaatagaggaagagaatgagggagagggagaaagagagagagtggcgtggaaattgaaggagaatatgaagtgatgcaatcctatcccccaagaagattggaccaaagatgcaagagaaggccctatgattctcataagccttagggtagattttgggcccatgggctaagcataagcccacttatctttgtacatattaaattaagatttcattatttttgggccttgtatttagggctccataatgtaggtcgggtaccctagaaatgtaggatttttcagcctttgtattttatggc

SEQ ID NO: 11297 - DNA, 435 bp, Glycine max
agctagttataagtcgtgatgttaatttcatgaaagaccaaatcattgaaggcattgataaggtggagaaatctacacccaaggaagacaatggtgtggctgattttgaaccaactcatcagcctattcagaatctgaatattgatgttcaaaatgatgttggtgtccaacaacctaaagatgaagtatatgttcctgttgatgatgaagaagaggagcatgacatgtcacaagatgaaaatcttggtgatgctactgaaccacctcaagttcaactcaggaggtccaacaaggagagacaaccttctatgaagtattcttttaatgagtatgtgatcctaatagatgaaggagaacctgattactttagagaggccatggaaagtgaagaatagaaaaagtagctagatgtaatcaagtttgaagcttgttggg

SEQ ID NO: 11298 - DNA, 540 bp, Glycine max
agcttcttatccaaggctcatcttggtggtaaagctccttcttccatggcttattccctagtggacggcgcctcctctcacctcttctcctttgtcttccgctgcatctccatggtgtaaaatcaccattaaaggacctcattgaagctcaaagatccagcctccatagaagccccacaagcaagcttccataaaaaagcaagagaaaagagtaaagaaatagcttcagatgagggaaaagaagtgtcataccctttggtaccttccaagaaagataaggaacgccacctggcgagattcctagatattttcaggaaactggaaataactatgccatttggagaagctttgcaacaaatggcactctactcaaagtttttaaaagacatgttgacaaggaagcacaagtacattcaccaagaaaatataattgtggagggtaattgcagtgctgtgattcaaaaaattcttccaccaaagcacaaagaccctgtgagtgtgaccattccttgctcaataggtgaaatcacagtgggaaag

SEQ ID NO: 11299 - DNA, 304 bp, Glycine max
actaaattcaatttatacacaagtcttgcactttccatattggtacaactctctccatcaatgatcaccatgaaaactttgccattgatcaaacatctagtgtggaaatttttttctcattgactttcctccatagacttcaatagatggccaagtaaccgccaaatcatcaacaattctccctccagtgttttcttcacttcctcctcataatcctcactctcttctccctttttaacttcagactcactaatgtactctccatctctaagaattatggctttcttgttagggcactcatatg

SEQ ID NO: 11300 - DNA, 446 bp, Glycine max
agcttcattggagcttgtatgcctatgatcttcttcatcaatggattcctttgcttcttggaagatgaatggcaacggaatggagagggaagggagagaggagacgccacttcaaggagaagatgagtttagaaaaagctcagcaccataggaggctatggataagagctttgaggaagaaggaggtgaatgaagggagaggaagagaagagcacaaaattttgtgctctaaaagagctttgaaatctgaagtttaattttcaaatgatcaaagttcaaaaaatgcacacacatggcctctatttatagcctaagtgtcacacaaaattggagggaaatttgaatttctatttcaaatttcacttgaaattgaaattgaatttgtggagccaaattttggagccaaaatttcactaattatgattagtgaattttaactattgttc

SEQ ID NO: 11301 - DNA, 415 bp, Glycine max
aaatttttccaaagatgcagggcataaaatctatgaggtgcaccaggcatgacttcttgcaaagctggaataagtccctgaaaaaataaagtagtccataacttatgtcattaactgcaattaaatccctaacttatgataataattgcaaatcatttcatgtcataccttttgcatgtctgacatgaaattccacccattctgtacataatccccaagatctttatgcaacaaagttaaaaaacatttccaattttctttgttctccacgtctaccacaacataagcaataacaacgatgtggttattagcatcaaccccaacagtaaagagcaagtttcctccaaatgcactttttaggaaacatccatctagacctatgaatggtctacatccagcaacaaaccccttttta

SEQ ID NO: 11302 - DNA, 462 bp, Glycine max
  unsure (1)..(462): unsure at all n locations
ctcagcttgtggccttggatcttcttcatcaacggagtcctttgcttcttgaagttcaatggaagcggaatggagaaggaagaaagatgattggagatgccacttcaaggagaagatgagtcaagaacaagctcaccaccataagaagccatggataagagcttgaaggtaggagaagatgagtggagggagaaggagagaaggagcacgaaatttagttcctcaaatgaggtatgaactttgaagtgtaattctcaaatgatcaaagttcaaaaaatacacacatatggcctttatttatagcctaagtgtcacacaaaattgtagggaaatttgaatttctattcaaatttcacttgaatttgaaattgaatttgtggagccaaaatttcactaattatgattagtgaattntagttatggttcagcccactaatccaagatcaagtccaagattctcca

SEQ ID NO: 11303 - DNA, 348 bp, Glycine max
atgcatgggatatcctgaagaccactcatgaatgaacctccatagtgaagatgttcatattgcgactattggccacggattttgaagatacgattatgaaggaggaagaatgtattcatgacttgcacatgaacattgttgaaattgacaatgcttgcactggctagtgagagaggatgacagatgactagctggtgacacatatccttagatacttgcctattagatttggcgtgagagtcactgcgatagatgaggcccaagacatttctacttgagagtggatgaactaattgtttccctactaacctttgagctaagaccctcggatggggctgaacacaagag

SEQ ID NO: 11304 - DNA, 217 bp, Glycine max
tttaatgaaccccttcgcttcccgaacatcaatggcaaccggaatggacaagggggaaaggcgattctagatgccacttcaaggagaagatgaatccagaacatgctcaccactataggagaccatggatcctagcttcaaggtcttgaaagatgaatagactgagagggagagaggggcgcaccttacttgagacttgacatacttaccaactttt

SEQ ID NO: 11305 - DNA, 335 bp, Glycine max
gtttggcggttgttctggagtggcagtgagtgttataattggaattggaagggttcgggcgagttcgagttcttcttcttctgaggaggaggaggaggcagtgagtgtgcagtcaaaagtgactcagaaagtatacttcgacgtgagtattggaaatccagttgggaagtttgtgggacggattgtgattggactgtacggcgacgatgtcccccaaacggctgagaacttccgtgccctttgtactggcgagaagggctttggatataagggttctaccgtccatcgtgtcatcaaggatttcatgattcaaggaggagactttgacaaaggaa

SEQ ID NO: 11306 - DNA, 393 bp, Glycine max
  unsure (1)..(393): unsure at all n locations
acaacagtgtagactgcttcagcccagaatgtgttaggtagtcccttctccttgagtattgatctagccatttccataactgtgcgattctttctctcggacactccattttgttgagtagaatatgcgaatgtaagttgtcactcaatgccttcatcctcacaaaatctttcaaactcacgagaggtgtactctttgccgngatcacttcttagtacttttatccgttttccactttgattttcaataagggccttgaactttttgaatactccaaagacttctgatttttcttttagaaaatatacccatgtcattctagagaagtcatcaatgaagagtatgaagtacctgttgttctcatgtgatggcatactcattggtctacatgct

SEQ ID NO: 11307 - DNA, 466 bp, Glycine max
agcttgaaggtaaactagatgccttgtgatgtaagctccattggagcttgtaggcctaagatcttcttcatcaatggatttctttgcttcttggaagataaatggcagtggaatggagaaggaagagagagaggagacgctacttcaaggagaagatgagtctagaagaagctcaccaccataggaggccatggataagagcttggaggaagaaggagatgaatgaagggagagggagagaagagcacgaaattttgtgctctaaaagagctctgaaatctgaagttaatacttaaatgatcaaagttccaaaaaaattcacacacatgacctctatttatagcctaagtgtcacacaaaattagagggaaattcaaatttcacttgaatttgaaattgaatttgtggagccaaaatttcactaattatgattagtgaattttaattatggttcagccccactaat

SEQ ID NO: 11308 - DNA, 556 bp, Glycine max
  unsure (1)..(556): unsure at all n locations
tgcttccattttcagtcatcaaagtcacctcccctatgccaacaatcttgcttgtaacatggttgcccatcttcatcataccaaaatcccctttttgacatgacgagaaaaatccttcatgaggagtaacacggaaggatgcttcagagtcgattatccatatacaatcattaaatacaatatttaaataattttcattactgataagaaaaacattctcatcgtctgatgccacagcagtagtggttccaccttcattctttttctttgggtcaatttgattagcatggacagttccagccttctgatctctcttcaagaatctgcagttaaacttcttatggcccaactttgcagtagtagcaactcaagcctttgggacgagacttggatcttcctcgtgatttcccatggccttctttaccatggtgctcgctcctccctttattttcaacaacatttgcttcggagtgactactcaagcctctcttatttcgtctggactcttcatttagaaaactatntgtgacatttatccatgtaacctttccatctg

SEQ ID NO: 11309 - DNA, 468 bp, Glycine max
tggcgggagtgactgacaccctatagaattggcaaaggcccgtgatcaaatctggaaaccccaatgcctgttggagttctctcggtccactgggtgtctatgaggcgtgatccctgcaaactgatatatagcatctgagatcaattgagccacatgggtactcacctaggtcaggatggcgtagaccagctgacaattcggcagggggaggttggaattatggttgctagggagaatgttgctaagcagcaacatcatccaaatctgtgtcatgatccgcacccgtctccctgccacacttcaggcaatgactcctcctgatgcaagctccattggagcttgtaggcctaggatcttcttcatcaatggattcctttgcttcttggaagatgaatggcagcggaatggagaaaggaagagagagaggagacgccacttcaaggagaagatgagtctagaagaagctca

SEQ ID NO: 11310 - DNA, 382 bp, Glycine max
agcttcactaaataggtgttgttattgaagaacatgcttcctgaacataataaattgccaaaaaatcactacgaggcgaaaaagattttatgtcctgtgggaatggagtaccagaagatccatgcatgccctaatgattgcatattgtgcaaaaattagtttgcaaaaatgcggcagcgccccacgtgtagggcatcacaatacaaagtgcaacatgatgaattaagtgatgatgcaactaccacaaattggggtcctgcaaaggtccactgatatcttcgcgtaataccacggtttaagcgattttttgctaatggacatgatgcaaaaaaccttacatgacatgcagatgaccgaaaaagtgatggattgctttatacat

SEQ ID NO: 11311 - DNA, 554 bp, Glycine max
tgtatgtggataacatacttatttttggtacatgcaatgatatagtttttaaaactaaatatttattagcatctaaatttgatatgaaagacatgggtgaagcaagggttaatttcggagttaaaattaaaaggaagggagatagtatattactatcctatgagcattatgttgagaaacttctcaagaagtataaatattatgactttaagtcagtgagtaccccttatgatgctaactctcaattaaagaaaaacatatgaaaactaattgctgaaactcaatatgcccaaatcattaggagcttattgcatttgatgaacttttctagatctgatattgcatacgcaacaggcagattgagtagatatacccataatccaaatcagaaccattgggatgcacttgctagactcatgagatatctgggaggtaccatggattatgctattaatacagtggatttcccacagtactcgaagggtatagcgatgctaactgggtctctgattcagatgagagaagatccattagtgcttatgtgtttactcttg

SEQ ID NO: 11312 - DNA, 558 bp, Glycine max
  unsure (1)..(558): unsure at all n locations
gcttgaggcatctacctcttgaagaggcagaggtaagggcatagggataagttttataggtagaggacggggagatcaaacactattagaaaatacactttcaacatcggttatttggggccttctacatcggttgtaaaaccgatgttgaaagcatcgatgttgaatgtattgttgttaacatcggttttaaaaactgatgttaacataaaaatattaacatcagttttataaataaccgatgttataaagaaagaagtacaacaaaataagtgtatgcgtgagggacgttggcatcagttttctgtaaaaaccgatgtgaatatgttatattaacatcagtttttagaggaaaccgatgtgaacgttcatcattcatgcacctattttgctatagtaatttatgtataacattggttatttataaataaccgatgttattgcatacagtttaacatcggttatntataaataatcgatgttaacctatgtacattaacatcggttggttataaataaccgatgttaacctatgtacattaacatcggctgtttata

SEQ ID NO: 11313 - DNA, 416 bp, Glycine max
actaagcttaagaataatggcctcagcaaacttcttattccctgaaggaaattcattaaataggcctcctatttttaatggagagggttaccactactggaaaacccgaatgcaaattttcattaaggcaatagacttaaacattttggaagccatataagttggaccttacatacccaccatggtgactggaaatgcaacaatagagaaacctacagaagagtggactgaagatgaaagaagattattgtagtacaatttaaaggccaaaatcatcattacttctgccctaggaatggatgaatattttatggtttcaaataataggagtgctaaggatatgtgggacactctacaagttacacatgagggaacaactgatgtcaaacgatatacgatagatactttacctcatg

SEQ ID NO: 11314 - DNA, 481 bp, Glycine max
tgtccctcaagtcatcaagttctttccgcacctacacaaaaaacatcttaattcttatctcattaaatacaaaaaaaaaaaaaaaaaaaaccattaaactaaaactcaaaaatgcaatcaaataaatacatacttcaacaagacgggctttgctagccttgtctttctctttctccagagcatgaagttccacttctagctgcattctcttcctttcaaggttatcaatttcctcaggctgactatcaagttgaaccctaacatttgcacaagcctcgtcaaccaaatcaattgccttgtcaggaagatgacgccctgaacaatcacaaaaaatataagcacacatcacactaacaaaaccacaagctttcaaaacaaacgcacacacaccaaaagagtacagattccataccagttatataccggttagacaattgagctgccataaccaaagcacggtcctgaattctaacaccgtgat

SEQ ID NO: 11315 - DNA, 187 bp, Glycine max
agcttgtctgaccttcaacagatgatttgaacacaatacttccatttccagatgctttaagaagaggataagcaagttggctcaaatggtatgcagaatccaagttagttgccattaattttgaatattcttcggctgtatactcaattgttggtttcctcacatttgttccaacattgtttaccta

SEQ ID NO: 11316 - DNA, 661 bp, Glycine max
  unsure (1)..(661): unsure at all n locations
gctttggggcagtggaatggactacaacccttatggtgtggactacggtttatgttgtattttgtcatgaccaacatcgaaagctgccactattcagaagggatgtcatcatttttccatggtcgtactggttaccatagtcatgatgaatgtaccaagactatgatcaagtgacagagtctttaagtctttatattaaagtggatatttntactcttttcacttaatngagtagttatacttcagcaagacaaaactagcacccaaacacgagttttgctaagaaaatgcatgcaactggcataaaagctcacaaaatatcactgtaaatgtggtttatcaatcatcattcaaagatcttgtgtctggcattaattgatgatgactgaatcattgcaatggaagaagaacttcaccggttcaccaaaaatgatgcctggacacttgttcccaatcctgagaatanaagcattatntgaacaagatgagtattcaaaaataagctagatgaacangggtaggtagtaagaaacaaagctaggttagtagcttaagtctataaccaaccagaatctatnaagttcacagaaacctttgatccctatactagacttgaagatataagaatcgtgcttccctttgcttgcccataaaatataaa

SEQ ID NO: 11317 - DNA, 443 bp, Glycine max
gaaactctattcacaagacgattaaaatcagattgttcgatgttactcccctaacaagggaatacccaggtaatgtcccacggaagtaacttcagaaaagccactcatttggaccaactgtcttctactactatgactgacattctttgaaaagaatatcctagctttctcttggctaatatgctggcctaacatctctccaaacaaatgcatagtgtccaaagtacatttcatatgcttagtagaagcctgaccacacaataataagtcatccgcaaacatgaagtgcgagatgagggggccctttcttcccatacaaaaaggtttccaagcttccactgctttcaagataatgtgggagagtttgttcatacctaacacaaagaggtaaggtaatagcacatcacctttgcgcaaccccttattaggagcaaacatgggag

SEQ ID NO: 11318 - DNA, 565 bp, Glycine max
agcttgtaaagcaggttatgcgcacgcctaattataagtaatttttataaagacaaatgttataaaaagtgaggctgaattatgattttagaagaagaaagattgaagcctttttttgaggaaaaaaagttaacgtgttaaagaaaaactttgttagaaaaataataaatttttacaaaaacttgtttagacaatgaaaatagatttcgcaaaacataaaggattttcaagatgaaatgaaattcaaacccctatattaatttaaagcaaaagataaatacactaaagacatatgagatataaagaattatactagtttatctttaccactaaggctatgtttaagttttgattaatcactaagtttcactaacttatcacaaatacaaggtttacgtcacagtcatttctcgctctacagatcaagatttaccctaagtttgttacaactcaatattttttgtcccaaaaggttctatttgactctatgcaaatcagaaagatttgttgattggttacacgacgactaactcttatttcggcttaataaatggatctgtatttt

SEQ ID NO: 11319 - DNA, 363 bp, Glycine max
tgcggcacaccagactgcctcaaaacctcaatgtttggaaccaagttcattgtgtcaccatatgtaaaaccaaatcgggaatttgttatagctctaacaacttcctgatcatcaccaagtacacgtctgaggatctcataacgtgggatgaagaattttttcaagctcctgttcaaggtatggttagcaattaaaatcttacgcatatcagtgttggaaagcccaatagaacggaagaacttgagtttaggcaaaagggtattctctgcatccgcaacaagcaccaaagggtgtttctccacaagttttgcaagatgggttttggtgaagccatacttgttgagacgatcaataacagcattt

SEQ ID NO: 11320 - DNA, 543 bp, Glycine max
  unsure (1)..(543): unsure at all n locations
tggagacaaaatcatgaaatttgggtggtgccaatgctttggtgagaaaatctgccacttgatcacttgttgaaactggtagtagctttagagtgcccttcaaaagcttctctcgcacaagatggcaatcaatttccaagtgttttgtgcgttcgtgaaaaaccggatttgaggcaatgtggactgcgctttggttgtcacagtaaagagttggagttctggtaagctgaactctcaaatctgcaaaaagatacaacagccattgcaactcacaagcagttgaagacagagccctgtactctgcttctgaagatgatctggacacagttgcttgctttttagcacgccatgacactaaagatttgcctatgaagaaacaatatccagatatggattttctagaatccatacagcctgcccaatcagcatctgaataacctataagttgcatttctgaagttctgctaaagaaaataccttggcctgggttgttcttcaaatacctcaatactctacatgctgcattngaatgaacatttgtgg

SEQ ID NO: 11321 - DNA, 592 bp, Glycine max
tactaagcttataacatcaaacttggagaaagagttcttggggtcaagacatgttaagttgtcaagtataatgttacttccttcactaaagcggtgatccatctccacacatattgtatcaatagcaacataaaaaatctctgcacggtaatgatgaagattagtgatagtcctcccttctgctcttgaacgaccccgaactggtatttcgtcatccatatttggtaccagaatacttttagcaacacaaaatccttggacatcggcaaaaaaattattccagccactctctcattgtgcccaaccgagctttgacaacatcaactaattccatggcattcacaatattaagatcttttctttgcaatatatttgaaagctcgtttgtgataccaaacaactgtaacattaacctcaaaataaaagcaaatttaaagctcttccatttttctatcagacctgctgcttgagatggtccacgttcatcttcatcaaccatactaagcaccttttacacggaggaccacatatgatccagacgaagcaatgtagtatgatgtgaaccccatctagtatccccgggtctagtgag

SEQ ID NO: 11322 - DNA, 545 bp, Glycine max
  unsure (1)..(545): unsure at all n locations
tcaagaatcaagtttcaaataatcaagattcaagaataatcaagtctcaagattcaatagagtttcaagaatcaagattcaagaacaatcaagatcaagattcaagaatcaagagaagacttaatcaagataagtactagatttttttttcaaaacattgagtagcacaagaatttttcacaaaatcttttaccaaagagttttactctctggtaatcgattaccaaaaggtagtaatcgattaccagtagccagcattgttttcaaaactgatttacaaagccataattgattaccataatcatgtaatcgattaccaatgttttaaaatgttagatttccaatttcaagagtcacaactagtgataaaacattttcaaatcattttaaacttgtggaatcaattaccaatgtttctaaacattgtgattttcaaatttaaacatgaagagtcacatcttttgatgtgtaattgactacactataatggtaatcgattaccagtgactgatttcgaaaaataaatntccaaaagtcacaattct

SEQ ID NO: 11323 - DNA, 597 bp, Glycine max
  unsure (1)..(597): unsure at all n locations
taagcttattgagttttacacactctccactgttggtcctcaatttattgttaattatataatcagaataatgactcatcatatgagtagttggacctgtaaaatttgtgatttttaagaaatttgagccaacaaaaaagagtgttcaagagaatgtgttagagacagtgttgctaccatttctctgtttaggaatggtgtttgtagttattagtgaaaatagaaatagaaaatactttccttatgtcaaacaggcttctgcattactatttttagtttttacaacattatgatagatcattatatattttttctttctctaaaacaaatgatttgtttattgtcttggggtggtgtatataaaaactgatcaacacattttacttttctttttttgcctgttcattccaatgtacaaatgattggcttatgatgcaacaaaatctaaatcaggaactaagtagctcttttaatataaaacatgtnttctttatcttttacttttctacaacattcatgtccctttnctttgatgtctangctgatgtgctcngtgatatattgaagatctatttgagaatngtgatataatgctct

SEQ ID NO: 11324 - DNA, 381 bp, Glycine max
  unsure (1)..(381): unsure at all n locations
tctatagaaggttcgttcctaatttctctacaattgcatcacctctcaatgagctagtgaagaagaatgtggcatttaactggggtgaaaaacaagagcaagcctttgctntgcttanagaaaagcttactaaggcacctgttctagctcttcctaacttttctaaaacttttgagctagaatgtgatgcctctggagtgggagttggagctgttttgttgcaaggtgggcaccctattgcttattttagtgaaaaacttcatggtgcgacccttaactaccccacctatgataaagagctntatgccttaataagagcactccgaacttgggaacattaccttgtttccaaggaatttgtcattcatagtgatcaacaat

SEQ ID NO: 11325 - DNA, 473 bp, Glycine max
atttacaacagtcattagaaattctaattaacatcttacaatgtgcaatcggctacacatgtatggtaatcgattaccagcatttacagaacgttttaaatcaaattttaaagcctgtaatcgattacacaaatcgggtaatcgattaccataggagcttttcaaaaaatattttcaagagtcacatctgtccaataggtttatgaatgaccatcaaaggtctatttatatgtgacttgaaacacgaagttgcttagagtttttcagaacaaaaaggtcttatcctctcaaaagtaaaaatatcttatcctcttaaaaattccttggtcaatacacttgcaattcaataaggaattattttgagtgctccatttgtcaatctatctttttcaagagagatttcttcttttctttatcttaatttctgaaaaggtattaagagattgatgatctctttgtgaaagcaatttgac

SEQ ID NO: 11326 - DNA, 526 bp, Glycine max
agcttcacaaaagtttgtatggtttgtttcaagcaccgagatagtggtacaagaagtttaatgagtttatgagcaactcaggattcaacagatgtgacatggaccattgctgctatgttaagaaatatactaatagttatgttatccttatcatgtatgttgatgacatgttgattacaggatctagtatggcagaaattaacaagttgaagtagtagttggcagaaaactttgaaatgaaggatcttggtccatctaaacaaatccttggtatgagaattcttagaaacagatcagaaggaattttgaagctatctcaagagaaatatatacacaagttgcttgacaggttttatcttgaagattctaagaccatgaatacccctttgggatctcatttgaagttttcaaagaagcaatatttgcagacaaatgaagaaaaatgttacatgtcaagagtaccatatgcattaacagttgggagtttgatgtatgctatggtatgtaccatacctaacatagcaca

SEQ ID NO: 11327 - DNA, 581 bp, Glycine max
  unsure (1)..(581): unsure at all n locations
aagcttgtcaaatgaatcactgcatattgtgcagtccctatcatccttcagaggaatgtataagagagtaggcttgcaaacaaggttccaatttggacaaaagtgtaaaactacttattaattagaattttatgaatcattgtttggaatattgaagaaaaaagacaacctgacaaccagctgccctgaaggaactaaaatcatggcatccaacaagaactctgcatgcttcctgcatggatatcatcaataacttgaatagctgcaagattgagaatctagtaagtataaggagctgttaactaacttgcatagctggaagactaagctcctcaggtacatgccatgctcgatctttctcgaaggttgacaaatgctctggcccagaaagcaaccgatagaagtatctgaatagtagttccaaataactatcaattactgcatatggtcataaacagaacaaaagaagttccatgacaatgcatggaaatgtagccagattcagaagatctaggatgaaccttactgtgatactctccagtgtcactatttattattantatagagtacaatttcatgga

SEQ ID NO: 11328 - DNA, 384 bp, Glycine max
tagaagcataaatctgcgcatactcacgaatccttcatcttttactatctaaagcgcatgcgaatataacattccctttctgcggctgaaaaacatcctcgttatcgtcgtagtcctctagggtctcgccggtggtggtgccggtgccggtgccggcgaagagggaatccacgtcggtgagatactttgcggatttataagcgctgactattccgttgacctcgtgaacgattcgtaagaggcgcgtgtatgcctcggagggggtaagtttgagctcggtgattaatcgggcgagtttgttgaggacgaggcagggggtgaggcgctcgatccatcactggcggaggacggcgtgtgtctagatgtggactccttctaccgcgt

SEQ ID NO: 11329 - DNA, 546 bp, Glycine max
agcttcctactggttgttgtttttacaatgtatcagctaccacattctcttttccttgcttttactcgacgctaaagtccagtcccatcagcttttcaagtccccaattctgcattaaagttgttggaggtttttctagcaagtgtttgagtgccttttgattagttttgatgataaagtgttgccccagaaaataatgttgccatttcttgactgcaaacaaaatggcattgaacttcttttcatatgcagacaaaagctggtattttggccccattgctttgctgatataagctattggatgaccttgttgaattaagacatccctaatgccaattccagaagcatctgtctccacagtaaagggttgaccaaaatcaagtaaggccagtataggggctgagatcaaggctttcttttgtggaagaaaagccctttttgtgtcccattccacttgaagtcagtattttttctgaagcaactgtgtcaaaggttgagctatcttcccataatttttgataaatctcatctaaaattctgataacc

SEQ ID NO: 11330 - DNA, 317 bp, Glycine max
ttgagccaattcaaacgacaataactttttactcggatgtctgattgagtcccgtcatatatcgagacgctcgaaattgaatgttgaagctctgagccaattcaagcgacaatatctttttactcggatgtctgattgagtcctgtaatatatcgagacgctcgaaattgaatgttgaagctctgagcaaattcaaacgacattaactgttttctcggatgtctgattgagtcctgtcatatatcgagacgctcgaaattgaatgttgaagctctgagccaattcaaacgacaaataacttttactcggatgtctga

SEQ ID NO: 11331 - DNA, 433 bp, Glycine max
gctctttcaactgcacaagcctattgatatttgcagagtattcttgtggaaccttcacccaacgaagacactgacaaaaacttatcttctccttcttggacaaaatatggcaggctggtggcaagtaaattttcttcccatcagaccttggatgcaactgtgatcgtatacccatatcagctagatcttgacgggtattcaagccatccttcgtcttgccttgaatgttaaggagcatcccaatcacactgtcacaaacattcttctccacatgcataacatcaatacaatgtctaacgtcaagatcacaccagtactaaagatcaaagaaaatggacctcttcttccatatgcaactctgactattatgcttcttttgggtctatccaaatacagtattcatgtgttgaacccattgatatacctgctcacc

SEQ ID NO: 11332 - DNA, 263 bp, Glycine max
ttctattggataagattcccttaaaactattacttttacttcctataatctaacgggtaaatttataccttataacatatttataaaatgaaaaaaattacaactattaataaataattaaagaatatttttttaatttatgaatttttctgtttattgtagtttaacacatgattaaaaaattcctaccaatattcattatcattgtataaaacaaatctactctttatcatggaaaagataatagtgtggaaaataaaaaa

SEQ ID NO: 11333 - DNA, 295 bp, Glycine max
atggtgttatcgattacaatatattggtgatcaattaccagtgtatctgaacgttgtaattcaaattcaattgtgaagagtcacatcttttcataaaatgctttgtgtaatggattacatggttttggtaatcgattaccagtgacaagttttgaataaaaagtcaagagatgtaactattccaatgggttttaggttgtctcaaggctataactcttccaatggttctcttgaccagacatgaagagtttataaaagcaagaccttgattttcattttataactttttcataac

SEQ ID NO: 11334 - DNA, 357 bp, Glycine max
agaatggtcataagctttcactcggaggttctattcatgcgcataatatatcgagacacacgaaataaatcaacagaagctctctagaaattcaaatggtcataacttttcactcggaggttcgattcacgcgcataatatatcgagacgcaccgaactcaacaacggaagctctcgagagattcaaatggtcataacctctcactcagatgtccgattcaggcgcataatatatcgagacgcacgaaattgaacaacagaagctctcgagagattcaaatggtcataacctttcactcggaggttcgatacatgcgcataatatatcgagacgcacgagattgatcaacagaagct

SEQ ID NO: 11335 - DNA, 337 bp, Glycine max
cttcttgaaggtggcagtccatgaggaatctccttgggaaagacatctttaaattcctgcaataagggttgaacactatgagaaacataaatagttaactgattagaattatcactctctctctcttgtgtatcactcttttcctcaggtgtatcactcttctttttcgtattccattgtggcgcctcactattttctttctcttgttcaatttcgagcgtctcgatatattatccgcctgaatctgacgtccgtgtgaaaagttatgaccatttgaatttctaaagagctttccgttgtcaatttcgagcgtctcgatatattatgcgcctgaatc

SEQ ID NO: 11336 - DNA, 348 bp, Glycine max
aatgaagatgatcaaaaaagtattagtggatttgtgtttttcatggggaatacgaccttcacttggatgtaaaaaagtactcgatagtcactcttttgacttgggaggcagaatacgtagcagctacttcatgcgtttgtcctgtagtctggcttaggaatttgttaaaagagttggacatgtcacaagacgagcagaccaagacctttgtggataataagtcaaccattgctctagtaaagaacccagtgttccatgatcgaagcaaacatattgacactcgttaccactacataagatagtgcatagcaagaaaggatgtacatccagaatatgtgaagtctcgag

SEQ ID NO: 11337 - DNA, 418 bp, Glycine max
  unsure (1)..(418): unsure at all n locations
tgttanaagaatgggttcagaacgctataaacctctttatgttacccttcttgggctactctgggcttgcaatcatgccagtcttgttgatgagggctactcatatttcaatcgggcctggcttgacagccccaggttgctgaagtctgagcattatgcttgtatggttaacttgctcgctcgctctggacggtttgcagaagctgaggattttcttcacagtgtacctcttgaccctggacttggattttggaaggcattgcttgcgaggtgtcaaatccactctaacctgaagttgggagagctggcaacaagaaagattctggctctggatcctgatgatgtatcgtcatatgtgatgttgtcagatgctcattctgcaacaggtaagtggtcagatgtggcaaccgtaatgact

SEQ ID NO: 11338 - DNA, 486 bp, Glycine max
  unsure (1)..(486): unsure at all n locations
ctaagcctgccaacagagtgctaggttccttgcactngatggtctatntttatcagcatatactaaggaatcacatctagaaagcttagcaaaaggtgttttaatcgtgttatcaatagatactaaatgcctttcaacaagatttgctcatcattttctgctcaaaatttgtacaaatacacttcattgtcagtctcagataaataaataggtgctattctatgttaaatgttatatcatatataaaaaaatcaatattttctctgtaatattaagttattctgattcactatcctaaagaagcgttgatgacttatagtggtaaacaaaccaaatgaaattattttcacatgatctacagttccttttttaaaacaatatgaaaatctaattcttaaacagataaaggttggtaccttgacataactatggatttcacctctcatttgatggcatagaacttgagaattttataaaagaacttct

SEQ ID NO: 11339 - DNA, 454 bp, Glycine max
ttccaattttgaatgggaccaaagtaatggattgccttctacgtttcttcctaaactattgggattttgattgggtatttctctcacttttagtcaaagttcataaaaaataatttgactttgaaaaaaaaggaaaatatgaataaatatttaatgtgtcaaagatttaaaatatatactggttcaagttttaaccattaaatatttatttactacacatatttgatattattaaaaagtcaatgaagtgaataattcataattacaaataattttcatgaaattaatataactagtattttgacctatggattaaattatactttatatctataaaaaaaaataaattgcaatataatattacttttaattattggtggttttttaaaaatattaaaaattatttatagagaatttaaaggataaggataaaatgatagttgagatatattct

SEQ ID NO: 11340 - DNA, 413 bp, Glycine max
  unsure (1)..(413): unsure at all n locations
tagcatccaatatctgctcgggagtatccgctcttactggagctctatgaacccatttcaccaaatctacaccttcaccaaaatcctcatcaactggtagtctagttgtaaggatatgcagcagaacaacaccatagctataaacatttcctggtgctgtgacttgcatagtatatgcatattctgcattacagaagaaatgtcacatgaagcatgctaaacataataaaagttaagagtttaatttttatgcaatgtcagtataattttttttaccctctcaatcaattaaaaatcatcattatggtttttaacgtaatattgtaaaatcaacanactaaccatacatgacgatttgtgattattagatgatagtgtanagactatntactatanagagtaatacgaagaat

SEQ ID NO: 11341 - DNA, 506 bp, Glycine max
  unsure (1)..(506): unsure at all n locations
cgtcttctacaaataaatcanaatcgatcctctaatcttcaaagcccatttctagtttctttcttcccatgtcaactacacagcttgcagttaacataaatggtcttcccaagattaagggaatgtcattatcttcacagatatccattacaacaaagtctgctgggaagataaaatgttttactctgaccaaaacatcttcaattactccatatggtatggtaatggagcggtcagccaactgtaaagtcattctagtgggcatgatttccaactctcccagtcttctgcacatggagagtggcatcagattgatactggctcccaagtcaatgagagcttttcccactgtgacttcacctattgaccaaggaatggtcacactcccagggtctttgtgcttcggtggaaagattntctggatcaccgcactagcattacctttcataactatattctnctggtgaatgtacttgtgcttctttgtcaacatgtcttttaaaaac

SEQ ID NO: 11342 - DNA, 442 bp, Glycine max
tgatgttcgttagtcgtcattggatgtcgagagtgtcatcttgttggattctgagaagaagatcaataaaatcttggtcctctaattcagctccatcttcttttgcaattttgttcttttcttgatgctctctgatgatgttttccaggaccttgtcaacctgcttgtgcaacttcttcaatctggtcatctttccagttaggaaatataagaatggaattgaaggaaagacatcaacaaggtcgaatcctcccccggattctacgatttttcggatcaaagacacaacaaactcatcttgctccttgtatatgccaccgaatgctaccctggaaatagaggcacatatcaatgagaaaattctactggtgagaatgataggcgaaccagcagattcgcgaatggagttgataaactttgctgcctcgtcttctctaatgga

SEQ ID NO: 11343 - DNA, 364 bp, Glycine max
acatctctttttataacattaatctctttaatcctctcatttgtactaattactttatcttacatttttcttccttttcttctcatctccttttctattaaaaaagttgcctgattttgttatataaatgcaatttctcttttcattttaccaaactttatataaagatattttatttgtttcaccaggacatatttgctgctggaactgatacttcaacatcaacactaaagtgggctatggccgaaatgatgagaaatccccgagtgagggagaaagcaccagctgaattgagacaagcttttcgagaaaaagaaataattctgaaagtgatctaaagcaacttacttatctgaagttggtg

SEQ ID NO: 11344 - DNA, 315 bp, Glycine max
  unsure (1)..(315): unsure at all n locations
aattgagtattgtaatatatcgagacgctcgtaatggaaaagagaagcttcgtataaaatgcaaatcgcaanaacttttaactcggatgaacgattgagtcccgtattatatcgagacactctatattgaaagcagaagctctgagcaaattcaaacgacaataacttttgactctgatcatccgattgagacatttattaattcgagacgctcaaaattgaatacggagagcgtctatggaaactccaatgacaacaacttttgactccgatgtccgaattgagtcctattataatttggaacgctcacaattg

SEQ ID NO: 11345 - DNA, 172 bp, Glycine max
cgcctacattcagtcctcaagcaacccacttgagattttccactctctctataaaactccttttacaaagtctgaaccacacagggacaacccttcccttgtgttcaagaatcctctacaacaagagactctcagtctcttaatcccttttcacgagtacgaagaagagaag

SEQ ID NO: 11346 - DNA, 402 bp, Glycine max
tctatagaacgttcattcctaatttctctgcaatagcatcacctctcaatgagatagtgaagaagaatgtggcatatacctgcggtggataacaagagcaagcctttgctgggctcaaagaaaagcttactaaggcacctattgtagctcttcctgactatgctaaaacttttgagctagaatgtgatgcctctggagtgtgacgtagagctgaaatgttacaatgtgggcaccctattgcttatagaagtgaaaaactacatggtgccacccttaactaccccacctatgataaagagctatatgccttaataagagcacttcgaacttgtgaacattaccttgtttacaggaatttgcattcataatgatcataatacttaagtcattagaggaaaagca

SEQ ID NO: 11347 - DNA, 477 bp, Glycine max
  unsure (1)..(477): unsure at all n locations
atttgatgtatcatgttcgtggtatttttgcatagcacctaacatccctccattggtaggtatctggcaccaaagagcaagcggttagcttctatgatcaatcgcaaagtcaataattggaaaaacaggctatcacggatacgactgttacttcctgcacttcccataatttcattttggaacgagctttttgataaagtaatgggaattgtaggaagtcttaccacggaaattaattaataatacttactaaatttccataagcccaataacctccaatggcaaggggaaacaaacacaaggcgatgactatgtaagcaaacataacacctttccacatggccaagcgtgagggttgcttancatccgaaggcatggttccctacaattttgagggggacaatttagcaacaataaatgctcttaactgtgtaaatgcagaacaaatgtttgaccatgcaatacttntacgtacct

SEQ ID NO: 11348 - DNA, 413 bp, Glycine max
gacctataaaactaagctaacattggccaagaaatcactatttataataaaattggttactaaaatttaaaagcactcttggagcttaattatatacacgttaataagtaaaggtacttcaccttgtataatgatctccttgtgtcaattggcgcagactgaatgcacttgtctattacaactggcaaaggggtggtaaagtcactgccatatatctcaggattaaagaaaatctgcagaaatcatatggaaagcatacagatatgttaatatgactgatcctgttaacattatgacccatactgaacccatggattagctccacaattagaccaaggcactactatatgttcattaattcttcagtagtttaaggaacaagatcaagtggaactaatagctatacatagata

SEQ ID NO: 11349 - DNA, 470 bp, Glycine max
  unsure (1)..(470): unsure at all n locations
ctaagctttctacaagggccaacatcttctcctttgctcttgngtgaacctagtcctgaaacgcttcttgctggacccgccatgatgagtggcaccactcgttgggtctgacactgcctccatgtcctcccttgaggactgggccccaccactgccccttgatctggaggggagtgccagtgtggcgcattgttgcccttgcacacggtggtagcccacttgctccccattgtacgctgcctacggcaacggcgagtggtggtagtcaggcaccatgtacgtgtcattgggggtctccttacaatggaagtttctgtggcagttgcacacgaggcattatagcgcgtccagggttccctcctcgcccagaggcaagaacttgatgcatccatcaagtgtgtggccgtcaattttgacgatgtggttcttgacgcactcatgatacttctcattgtcattgttttttaaac

SEQ ID NO: 11350 - DNA, 461 bp, Glycine max
tcttccttggtcgggtacatgagcatatgcaatgctcttctttgctctcaagtggtcaactctaggcttcactccacttcatgcttcttgtggtgttcgatctttgacattctttgttggggagcgattggacaaataaactgcacatgcaacagcttctggccaaaataactttggcatatttttagccttcaacatacatctagtcatattatgaatagatctatgttttctcttcggtaccccattttgttgtggagatctaggaaccgctagagggcgacgaatcccatatttttcacaaaattcagtacattctcttgatgtgaattcgtcacctctatcggatcttatagctttgatcacatagccactctcatcttgcactagagctttataattttacaagctacaatgcctcagattttagtgtagaaataaacccaagtcttttactataa

SEQ ID NO: 11351 - DNA, 442 bp, Glycine max
  unsure (1)..(442): unsure at all n locations
ctaagctatagttattggagggagaataanacaatccanaatcaattgtacccttatgtaacgaagaattctttttgcggcctatagatgaggagaggtaggagcctctgtaaagcgacacacaactcccaccgcatatagaatatcgggccttgtattggttagataccttaaactccccacaagactcttgaagactgtggagtctaccttctctccttcatcaaactttgataacttcaagccaccttccataggtgtgttcacgggattgcaatcaagcatattaaatttcttcaacacttcttttgtgtagctttcttgtgagacaaagataccattctccgtttgcttcacttccattcccaagtaatatgacatgagtcccatatctgtcatatcaaattcacgagacatggactccttgaagtctttaaacaaa

SEQ ID NO: 11352 - DNA, 251 bp, Glycine max
tcctttaggctgttttgtgtaaaactcttcctctagatgaccattaaggaatgtcattttcacatcatttgatgtaactcaaagtcaaaatgagctactaatgtcataattattcgaaaggaatctttcttagatacaggagaacaattctctgtgtaatcaatttcttctctttgagtgaacccatttggcaacaagttttgccttatgtctctcaatgctgctcacttcccattggcctcccttagttt

SEQ ID NO: 11353 - DNA, 420 bp, Glycine max
  unsure (1)..(420): unsure at all n locations
actaagcttctacattcatttcgagcttttcgatatattactgtactctattggacatccgagtaaaaagttattgtagtttgaatttgctcanggcttccgtattccatttcgagcgtctcgatatattacgggactcaatcggacatccgaggaaaaagttattgttgttcgaatttgctcagagcttcagtattccatttcgagcatctcgatatattacaggactcaatcagacatccgagtaaataggtattgtcgtttgaatttgctcagagctacaacattccatttccagcgtttcgatgtattacgggactcaatcagacatccgagtaaaaagttattgtcgtttgaatttgctcagagcttctacaatcacttcgagcttttcgatatattacgggactcaatcagaca

SEQ ID NO: 11354 - DNA, 378 bp, Glycine max
  unsure (1)..(378): unsure at all n locations
tgagttaacatgttatctnttcaatcacagacacagatttctctcccttgttatcctcaaaattaaaatggtttatgggcatttagaagatcaaaatagaaaaattgaacaagtatatcataaactccccaacagctagcactagtgtcccatagtattgggaaatcccacatagccggcctcaattattgggatgtgatttatatatctgttgggcaacttcacttaagccatttgattntaagaaggaatctaaaatggtatcaaagcctaaagcccatttctgtcattcccatagtattgggagggtgcaatataaacaaccaattcacatgccaggtgggggcaagaaacagaattgggtagtggggataggat

SEQ ID NO: 11355 - DNA, 384 bp, Glycine max
  unsure (1)..(384): unsure at all n locations
ttcgctggcgaaagcggcttccgcggggccgtgcatcttgtgcttgacgatgtagacgcttcccgtgcgcgagttgcggatgccgttggcgcccaaacccttgatgtcatggacggcaatggccgtggtgaccatggcgtccaggatgccctcggggatttccttgccgttgccccagaggatggccgggttggtcatcaggtggccgacattgcgcacgaacatcancgaacggccatgcagcttgacgggcttgccatcggcgcccgtgtactcgcggtcggcgttcaggccgcgcgtcatgctcttgccgcccttgtcgaaggtttcggtgagcgtgcccttgaggatgcccagccagttggcatagccgaccaccttgtc

SEQ ID NO: 11356 - DNA, 460 bp, Glycine max
tatcgcgtggaagctggccagctggtcgtcgcactcaagagcggcggcaccacgggcctgaagaacaccgcccagttcgtcggctaccagggtgatgccgcagcgccctcttccgtgctgctgctcaacaacggcctgcacatcgacatccgcatcgacaagaccacggccatcggccagaccgatgccgccggcgtggccgacgtggtggtcgaagccgccctgtccaccatcctggacctggaagactccgtggccgccgtggatgccgaagacaaggtggtcggctatgccaactggctgggcatcctcaagggcacgctcaccgaaaccttcgacagggcggcaagagcatgacgcgcggcctgaacgccgaccgcgagtacacgggcgccgatgggcagcccgtcaagctgcatggcccgtcgctgatgttcgtgcgcaatgtcggccacctgat

SEQ ID NO: 11357 - DNA, 362 bp, Glycine max
  unsure (1)..(362): unsure at all n locations
gtccaggtccacatgttacatttatgatagtgacttctttgctcccatcacctagagatatgcaatcatcaccggtgccaatctttgagttagtaattttcactcgagttgattttccaatgtgaattccatctgtattaggactatatgcaggtgaactaactctgaagtttgtaaatgaaatgttcttgcatccaaaaacattcacatganaatatntgctatcctttgaagtatgtcctgaattactgaattatcgacaaagccaaagccaaaattctgtggaaaatattgccaaaagtacataatagttaattntacgaaaggtaatgaaaatgcattagtacatactaatttcaata

SEQ ID NO: 11358 - DNA, 361 bp, Glycine max
aaaagccaaatgaaatagctgaattcatgcacaattgggatgaaatttaaaattggcatcatccttgaggctgctcatatctctggaaaagtactccaaacaaaacacaaacaaataaggggagagaggattcccttgtctaagaccctgctgccctttgaagtggccataaatggatccattgactgtcacactaaaggaagtggaagaaacacattccatgatccaagtacagaactgggctgggaagccaatggacttaagcatccaatccaagaattcccaggaaatggaatcataagctttatgtaagtcaattttcaagaggcatctcggagaggatcttttccgtgcatatttg

SEQ ID NO: 11359 - DNA, 410 bp, Glycine max
  unsure (1)..(410): unsure at all n locations
tcaatacagtgacaccagtgtngcaacatatgagctgactaagtctttnggatgggatacatatgattctttcatgcagcatgatgttcaagaactaaatcgggttctttgtgaaaaacttgaagacaaaatgaaggtatggcaagagttttggaatatttgttcatgattattcttgatgggtgaccatatcaaatggttgctttgtgttatttgtcttcacggaactgttgttgagggaaccatacaaaaattatttgaagggcaccatatgaattacatagaatgcatcaatgtagactacaaatcaactagaaaggagtcattttatggtacttccttatgcattgtgaattcaattatatgttntggtcttccttgntatgtatttctaatttaagtttgcatat

SEQ ID NO: 11360 - DNA, 497 bp, Glycine max
  unsure (1)..(497): unsure at all n locations
nnggctagcccaaatctgatatcttggggcagaacttctcatcctaaagaatgttatgtggttntatgtcaaaatgcaaaattcgagtgttgcatcctatatgcaagtattccaagcctctagctataccaattgcaatttcatatataatgtcccaactcaagggtgcaatggttacaggtccttttctataaatgagcttgtcaagggacccattgtgcataaattcatagatgagaactctcttgcggccttccaaactgaacccaagaagagtgacaacattaatatgagaagttctactaatgctagcaacctcgttcataaattcttcaccatcttttgttgatgcattcaatatttntacagccacaggagcgccattgggtagctttcctttgtagacagagccaaaaccaccttgccccagttntactcttgaagtatttgcattntcttgacattgacaattatatcttttagaagtatacaccatg

SEQ ID NO: 11361 - DNA, 275 bp, Glycine max
atagggctcgcgttctaatatttttaaatctagcttccacactccgctttcaatacaaaatcgatgttaaccaagctatgtaaacgttaacatcggttttattccgatgttaacatttgataagttaacatcagtttgtcataaaatcgatgttaacgaactttcattaagatcggttttataaaaatcgatgttaatgaagtcatgttaacatcggtttttaaaaaccgatgttaacgtaagtttgtttacatttgatttttccccaatcgatg

SEQ ID NO: 11362 - DNA, 213 bp, Glycine max
cccttcagataccttaatatttgctctgccactgtccagtgagaatccaaaggagcggccataaataggcaaactttgttgacaacaaaacttatctcgggtctagtaaggagagcatactgtaatgcaccaactacatacctgtataaggctggatcatgaaaagcatcatcaccatgtcgagacaacttgcagttggataccattggagaa

SEQ ID NO: 11363 - DNA, 332 bp, Glycine max
  unsure (1)..(332): unsure at all n locations
tataaaactaagcttgaggcaaactggatgcgttggncatctttgtnaccctgctggcctcgaatcagaaatctgtacctgtcgcaagggtttgtggtctgtgctcctctactgaccaccatacagacctttgcccttccatgcagcaacctggagcaattgagcagcctgaagcttatgctgcaaatatttacaatagacctcctcaacctcagcagcaaaatcaaccacaacagaacaattatgacctttccagcaatagatacaaccctggatagaggaatcaccctaacctcagatggtccagccctcagcaacaacaacagcagcct

SEQ ID NO: 11364 - DNA, 283 bp, Glycine max
  unsure (1)..(283): unsure at all n locations
actcagcttgaggattttcaaacgacaataactttntactcggaattctgattgtgtcccgtnatanancgagacgctctaaattgaatgttgaagctctgaccaaattcaaacgacgataactttttactcggatgtctgattgagtcccgtaatacatcgagacgctcgaaattgaatgttgaagctctcagccaattcaaacgacaataacattntactcggatgtctgattgagtcccgtaatacatcgagacgctcaaaattgaatgttgaagctctc

SEQ ID NO: 11365 - DNA, 445 bp, Glycine max
  unsure (1)..(445): unsure at all n locations
ntgatgcaacattcggagaggttaatgaaacaacgagatgatgcgctctatgagaggttggatcaaatggagaatagagatcataatgaagaagaaaggaggagaagagggaatgatggtgttcctagacaaaaccgaattgatggtattaaactcaacattcctccatttaaaggaaagaatgatctggaggcctacttggagtgggagatgaaaatagaccatgttttctcatgcaacaactatgaggaagaccagaaggtgaagcttgccgccacggagttttccgactatgctcttgtgtggtggaacaagctacaaaacgagagagcaagaaatgaagagccaatggttgatacatggacggagatgaaaaagatcatgaagaagccgtatgtgccggctagttactcaacggacttgaaattcaagctccaaaaactaa

SEQ ID NO: 11366 - DNA, 365 bp, Glycine max
  unsure (1)..(365): unsure at all n locations
acctcggatatcttaagaagggggagggggctgaattaaaatatcaaagactattccccaattaaaattttaactctctttctaaattattaatgcactcttaatatgaattactaaaaacacaattcaaaatataacttctttaaagcaaaagatatatgacaataaataaaagaattttaagggaagggagaatacaaactcaantttatactaggttggccacacccctgtgcctacgtacattccccaagcaacccgcttgagagttccactatcttggaatatccctttacaatgtctgaccacacaaggacacccttctttgtgtcagataccttacacaagagacctcgtctttatca

SEQ ID NO: 11367 - DNA, 377 bp, Glycine max
ccaaaaagtcttaatgaggcgatgaacatattgtgtaccatgggtctggagtatcaaaaaattgatgcatgtcttaatgatagcatactgcgtttatatgaatttgaagaaatgcctaaatgccgcatgtgtggggtatcacggtacaaagtgaacgatgatgaccacggtaacaatgatgaaagcacaaagaatcgcacttaacaaaggtgctatagaaacttcctatcattccaacgttaaagcgtctgtttgctaatggagatgacacaaagaaccttacatggcatacatatgggataaactgcgaatggaatgcatcaccatccgactgattattctcaatggaagattaatctgctgtattccaattcaag

SEQ ID NO: 11368 - DNA, 439 bp, Glycine max
  unsure (1)..(439): unsure at all n locations
tactntgaatattgtgatttaatatgatttatgcttgtttttatatatagaggtagttatttatattaataatttgtgtaaataatattgtagagtgttatagtatgattccaaaaattattaagtgttggagtttgagaatattatggttaaatttcatgaacatgtgtatgttgtaccttatgaatatcattgggaatgttatgagatggttgatgtgatgttatgagatgttaaagtgtggacatgatattcgattgtgaataagtggatgtgttaacatttgatgttacattaattatatcgtgagctatgaattatacaataacccgaccagtgtttatgcgcagtgttaaagagaaaatgtaggttccaagttaggaaccagtgttaaattgtagcgcaattgtgttaaacatgtttgaaacaagagtgtgag

SEQ ID NO: 11369 - DNA, 410 bp, Glycine max
  unsure (1)..(410): unsure at all n locations
tactgggccctcaaactgctaaactntgatgaagctgttgttggagagaagaggaagttacaattgtttgagttagaagaaatgaggatgaacgcctatgaatcattcaagatttataagcagaagataaaggcatatcatgataagaagctacagagacagaacttccaactaggccaacaagtcttgctcttcaatttcggactcaggctatttcctggaaagctaaagtcaaagtggtcaaggtcgttcatgatcaaagaagtaagaccctatgaagctgtggaattggtggaccctacgataagaaccccggagaaaagatggatcgtcaatggacaatgcttaaaaatttaaaatggaggccagttagaaagataacaagtgttgctacctgaacgatcataaat

SEQ ID NO: 11370 - DNA, 346 bp, Glycine max
  unsure (1)..(346): unsure at all n locations
gttagaaagatgactcaaagctgtagggattgatccagataaactgttattggccaaattcagaatttacaagatgttattgaagcatgttgtttgatgctgcaaatttttggagctcttcacagccttcaatctgttcaggtatgtggccattaatgctgttcatttgtacatcaagagatattagatgcttcaatttgccaattccanagggtatgcttccatctaagtggcagtagcctagaggcagatagaattcaagctaacccaactctgaagggatggagccagaaagagaatttgagacaaatcaagtgtttgaagagaagtgaacacaacacacagt

SEQ ID NO: 11371 - DNA, 454 bp, Glycine max
agcaatcaatactaaaatttcttcatttatcattatcttcaataggagatagaggcgaatctattttagttggaaactatacctttaatcaagatgttgctaggatggaattgacaaagatgattgcattgcatgaataccctcttgctatggttgatgacattgggtttcgaaggttttgtaatgttgtccaacctttgttcaaagtaatatcccgtaatacattgaagttggatatactaaagttctatgagagtgaaagggccaaaactatgaagctaattcaaaaaaattcaaggcacctagctataacaacagacatgtggactgcaacgaatcaaaacaaaggctatatgactattacaacccatttcattgataacaattgacatttgaaaagtcgacttatgaggtaaataatcattcacttgaaagttctatgattctaatttat

SEQ ID NO: 11372 - DNA, 346 bp, Glycine max
  unsure (1)..(346): unsure at all n locations
agcttttctttgtacacctacatttcattcanctacaactntttctggatacacatgcattaaaaactctttctccttatatcaacacggtctatataacaactctagtcctgttcaaagatttttttttcgtttttcaacatacacttngtggttatacaaaaatttctttatatacattcattgctcacacacaagaatttcttttcacacattatttacacacacacacaaaatctttccatacactttttacatataaaaaactcttttcttttctttataaatacgacatttgttcacaatgcctctttctttntcaattcttggtgttatcatgattttt

SEQ ID NO: 11373 - DNA, 380 bp, Glycine max
  unsure (1)..(380): unsure at all n locations
tgtngaanatataatcaatgcaagacctcttgagagatttagtgaacatgtcctccagttggtcactagagttgacaaactcaatggtgagttttcctgagagcactttctctctcacaaaatgacagtcttctactgtgtttagtccattcatggaagaccggattagatacaatgtggagaacggcttgattatcgcaaataagattggtggcttgagtgtctccaaattggaactgctggagaagtttccttagccatgtaatttcacttgtagttgcaggcatggcacggtattcagcttcagcactggatctagtgactataatttgtttcttgcttccccatgggatcaaatttccttcaataagaacacaata

SEQ ID NO: 11374 - DNA, 382 bp, Glycine max
  unsure (1)..(382): unsure at all n locations
tcaacattcaatttgagcgtctcngaatattacgggtctcaatcagacatccgagtaaaaatttattgtcgtttggattggctcagagatttatatattaatttcgagcgtctcaatatattacgggactcattcagacatccgagtaaaaagttattgtcgtttgaattagcttagagcttcaacaatcaatttcgagcgtctcgatatatcacgagactcaatcagacatccgagtaaaaagttattgtcgtttgaattggctcacagcttcaacattcaatttcgagcgtctcgatatatgacaggactcaatcacacatccgagtaaaaagttaatgtcgtttgaattggctcagaggttcaacattcaatttcgagc

SEQ ID NO: 11375 - DNA, 155 bp, Glycine max
  unsure (1)..(155): unsure at all n locations
ccgccagtgcgcgttggtacatctcttgtgtatctatgtggcggtgtctattnattcagcggaatagtgagtgcactttatggccgcgaaaagagccagagaggggcgcatgtcgatatatcgatgtttgatgccacgctgagttttctggagct

SEQ ID NO: 11376 - DNA, 115 bp, Glycine max
cgacatgcgcccctctctggctcttttcgcggccataaagagcactcactattccgctgaataaatagacaccgccgcatagatccgcaagagatgtaccaacgcgcactggcgg

SEQ ID NO: 11377 - DNA, 359 bp, Glycine max
  unsure (1)..(359): unsure at all n locations
agcaccgcagctgcagctttctaatcgncggaaggatgattgagttattaaagcggcgacgcctactggagactatttttctcccatgtttcacttgagtgtaacttgtattttcttcacagatagggcatgcatgatgacccttaacactggaaccgctgagattcccatatgctgggaagtcattaatggtacaaaaaagcattgcacgcatttcaaacgtctccttgcgaaacgcatcaaacactacaaccccctcgtcccacaactttctcaaatcttcaccaacggacttagataaacatcaatgtcatttcctggctgtcttgggcccgatatcatcatagacaacatcatgt

SEQ ID NO: 11378 - DNA, 379 bp, Glycine max
  unsure (1)..(379): unsure at all n locations
nttgcaagctagaatcatttattctatctcttacagcctttgggtgagtctcgtccaggtagacccgaagaaaactggcctcaccgtgataaaaaatgagaaggaggagctaattcctactcgggtgccgaacagttggagagtctgcattgactataggaggctgaaccaggttaccaaaaaggaccattttccactgcccttcattgaccagatgcttgaacgcctggcatgtaaatctcactactgtttccttgatggtttttctagttatatgcaaatcactattgctcctgaggatcatganaagaccacattcacctaccccttcggcactttttcctatangaggatgcctttctgcctgtgcaatgcccct

SEQ ID NO: 11379 - DNA, 460 bp, Glycine max
  unsure (1)..(460): unsure at all n locations
ctaagctatgctgcnacattataatagacctccacagcagcttatccaactttctgcaaaaatnatgacctttcaagcaacagatacaatccaggttggaggaatcatccaaatttgagatggacaagcccttcactacaacaatagtctatccctccttttcagaataccgctagtccaagcaagccatatgttcctcctccaatgcagcaacaacaacagcagcaacaacaaagacaacaagcaactgaggcccctcctcaaccttccttagaagagttagtgaggcaaatgaccatccagaatatgcaattttagcaagagacaagagcctccattcagagtctgacaaatcagatggggcagatggctactcagtcgaaccaagcttagtcccaaaattctgacaacttgcgttcacaaactgtgcagaatccgaaaaatgtgagtgtcatcacct

SEQ ID NO: 11380 - DNA, 343 bp, Glycine max
  unsure (1)..(343): unsure at all n locations
gcttatgattccatttcctagggaatctgnattttattcttaagnctattggctttccagcccagttctgtacttggatcatggaatgtgtttcttccacttcctttagtgtgtcagtcaatggatccatttatggtcacttcaaagggcagcggggtcttagacaaggggatcctctctctccttatctatntgtgctctgtttggagtacttttccagagatatgagcagcctcaaagaagatgccaattttaaatatcatcccaactgtgcaagaattcaactatctcacttgtgctttgcagaagatattatgcttctatctagaggagatatcccttc

SEQ ID NO: 11381 - DNA, 448 bp, Glycine max
  unsure (1)..(448): unsure at all n locations
tattctctatctagagtagttgatcacaacaactnactactgacatatattcgactttagtagtggacaatgtagttgagccttgcatcttgcatattcatgttactaagttagcaccgataaagtaatagcttccactagtgctttttctttcaactttatcaccaacatagtcaacatcataatagcttgtaagtctgaaactttctcttcttttgaacataagaccaagattagaagttccaattaaatatctacaaatatgtttaattttagttaggtgaacttccctttgttctttttgaaatcttgcacatagataaacattgaacataatatcagaaatggatgcagtgagatagaccagtgagttgcatccactttttttgatccttgtccaatccaaggtatgtcatggtgtgcattggagtcttcatttcttttcatc

SEQ ID NO: 11382 - DNA, 465 bp, Glycine max
  unsure (1)..(465): unsure at all n locations
actagcttacttctaatatatnnnnagaaaatgaatntttatttgttgaatngncacccatcatttatcaactacaataacattctaacatagaacccatcatggatatttaaagcgtaaaatttgaaagaaatttcctttctcaatttaatcaaaatatcatttgaagtatcacaacaaatttctgatgaagcctagacggtcaaaccatcaatttgaaatatgattcatcttaataaatatgttcggtaatttccaaacaaatgagaactatgaaaaatctaagctcataagaaaatataaacaagtgtgatcaaaatttatgattttcaataaatttcaatcaatattaaagtgtgttccaaaaaatatattaaagaatgtgttattaacatttttctataacagaaatataatcaccaacaatctncaatagtttgtccccactggctctaagtcctccat

SEQ ID NO: 11383 - DNA, 373 bp, Glycine max
tattctttatctagagtagttgttcacaacaacttactactgacatatattcgactttagtagtggacaatgtagttgagccttgcatcttgcatattcatgttactaagttagcaccgataaagtaatagcttccactagtgctttttctttcaactttatcaccaacatagtcaacatcataatagcttgtaagtctgaaactttctcttcttttgaacataagaccaagattagaagttccaattaaatatctacaaatatgtttaattttagttaggtgaacttccctttgttctttttgaaatcttgcacatagataaacattgaacataatatcagaaatggatgcagtgagatagaccagtgagtt

SEQ ID NO: 11384 - DNA, 398 bp, Glycine max
  unsure (1)..(398): unsure at all n locations
agcttaacataaggcatgcgaagttgggtatnntttatagcaatncccttatgnnatcaaacataaaaagggaaaaggtaatattgtagccgatgctctttctcggcgtcatgcattactttctatgctagaaacaaaattgattggtcttgaatgtttgaaaagcatgtatgaaaatgatgaaacttttggagatatttttaaaaattgtgaaaaattttcagaanatggtttctttagacatgaaagctttcttttcaaagaaaacaaattgtgtgtgcctaaatgttctactagaaatntgcttgtttgtgaagcacatgaaggaagtttaatggtgcattttgttgtccaaaagactctaaaaacattacaagaacatttttatttgcctcata

SEQ ID NO: 11385 - DNA, 343 bp, Glycine max
  unsure (1)..(343): unsure at all n locations
gacaagnggcctcagatatcttaagaagggggggttgaattaatatattccaaactcttctcctaattaaaaatctatcttactttttacttaagttatgaattcccttaatgacaatcttcttaaatattaattcaaatgaagcaacttgaattatgaatataaagcaataataaataaaggagattaagggaagagaaaatgcaaactcagttttatactggttcggccacacccttgtgcctacgtccagtccccaagcaacccgcttgagagttccactaacttgtaaattccttttacaagttctaaacacacaaggacaacccttcctttgtgttta

SEQ ID NO: 11386 - DNA, 385 bp, Glycine max
  unsure (1)..(385): unsure at all n locations
ntggagaaccaagccaatcagaatgctagttgtaatattgatgggaatagaggtaacaatggcggtaatgacggaccgaggcagaaccgggttgagggagtaaagctcaatgttcctcccttcaaaggtagaagtgatccagatgcctacctggactgggaaatgaagactgagcacgtatttgcctgcaatgactacactgatgcgcagaaagtcaagctagcagcagctgaattctccgactatgcccttgtttggtggcataaataccaaagagaaatgttgagagaggaacggcgagaggtagatacatggactgagatgaaaagggtgatgagaaaaaggtatgtgcccactagctataacaaaaccatgcgacagaaac

SEQ ID NO: 11387 - DNA, 415 bp, Glycine max
  unsure (1)..(415): unsure at all n locations
agcttctatanaagccaatcctattcacttggatgnnnganncggggacacaatatatcaaggcgctcganattgaacagcggaagctcccgagaaattcgaatggtcataacatttcactcggatgtctgattcgtggacataatatatcgagacgctcaaaattgaacagcggaagctctcgagagatttgaatggtcatacctttacacacggatgtccgattcggggatataatatatcgagactctcgaaatagaacaatggaagcgctcgagaaattcgaatggtcataacatctcacacggatgtctgattcgtggacataatatatcgagacgctcgaacatgaacagcggaagctttcagaaatatgatgggcataccttctacacggaggtgcgactagggatat

SEQ ID NO: 11388 - DNA, 326 bp, Glycine max
  unsure (1)..(326): unsure at all n locations
cctatggttggacctcccaaagagtatggagtaacaccacttttaacatttctgatttaattccttttgcaagtggagctgatattgaggaggaggaactaaaaaatttgaggtcaaatcctcttcaagggggaggggatgatgcaatcctcactangaagggaccagtcactagagccatgagcaagaggctccaagaggttgagctagagctgctgaaaaagaccctagggttctcatgaacctcangataaatttctgagcccatgggccaaggttgggtccaattatctttgtacatattagactacgatgtcattatattt

SEQ ID NO: 11389 - DNA, 350 bp, Glycine max
  unsure (1)..(350): unsure at all n locations
accatgtcatgcattctagaaccaaacatatagagataagacatcattttcttagagatcatatatcaaagggtgattgttgcattgagtctattggtagtgaacatcaactagctgacatctttactaaacctctagccaaagataggttcttcttcattaggaatgaactgggtatcttagatggatctagtattgaatgatgttatgcttagaacatgtagcttgttatatatactctccatgtctgttaattttcctttaatgtctcagtatctngatatattgatatgtagctgattctttctccaaaaatacatgttttattttgtaatttgaagttttcacta

SEQ ID NO: 11390 - DNA, 375 bp, Glycine max
  unsure (1)..(375): unsure at all n locations
agcttcaccgatcctatngaagcaannggtaactttacattctccagatatccagaagaagnataaagatgaggaatttctcaaatccagatctatacttgctacaacaaatgaggttgtagaccaaatcaatgactatgtattaaacattatccgaggagaagaaaaggggtatttcagctatgactcaattgacatgaaaaatgctgcaacaactaaagcttttgaagcaattacactagagtttctacattcattaaagacatcatgaataccgaatcatataattaggctgataagtggcacacctgttatgttgattcaaaaattagatcaagttgatgcctatgcaacgagacaagactaattatctct

SEQ ID NO: 11391 - DNA, 315 bp, Glycine max
agcttgttgcaaatcttctacacttggagggataacatgcagtcctcttgaacccttacctcccactctttcgtcatgccgagactcgggaagcccaacaggtttagctttttcaaaatactctgaacaaaattcaatggcttcttttgcaatgtaccttttcaacaataaatgcttctggatggtgtagattcttggtatacccttttaagatcttcatgtatcgctcaaccgggtacatccatcacaaataaactagaccacaacatttgatttctctgaccaaatgaacaattaagtgaatcatgatgtcaa

SEQ ID NO: 11392 - DNA, 453 bp, Glycine max
  unsure (1)..(453): unsure at all n locations
ttccctgttnntatatttgaaaagcttactttgggccatatgataattgttatgttatgtacaaattctaattaatgcatttgcaaattgttgtataccatgtgttactaagccgaattgttcccttgacttttaggttgaaaagctaggaaaagactcactaattaactgtgccaagaccagtatgtccttaaagttgatagctggtgataatgacttctttgccattttgttatgtntgtaattgcattggctatatattgaatgttgagagtttatatcacatgattgattcacaccatgctctgctgcttctgcaaattctagtgcatatccaatcgaatgaagcttatatgcatcatgtatcaatatttcattagtttctactgtgtgttgaatgtgtaaaattgtatattgttgaaccatattgagttggtagtatgagtgaaactg

SEQ ID NO: 11393 - DNA, 474 bp, Glycine max
  unsure (1)..(474): unsure at all n locations
atgagatataactaacagaggagataaggataatggaaagcatcaagaattgcatatcaaagataaagtttattcccgcaccactaatctacgtggggtgccaaaagcttgcacttcaccatggtttaacctttgccgttcaagcagttgcagcaataaatctttcagctataataaccagcacagtagaatcaatattgaacaatgaatgagaataatgatagtaattcactaaaaatcataatagaaaataacaataaatatctagcaaatagctgaaaacaatntatatcagttatacttgcttgcttgcatcaacaacatcttgaggtggcatctcttcagtcccaatntcaagaacaaatgctcttgaatgatcatgcacctataaccagagaaaagctggantttacataatatataaatacatntgtgggacataatcaataaagaaactcgtactcaagctaaata

SEQ ID NO: 11394 - DNA, 311 bp, Glycine max
agcttcaacacatttaagggttggctacattctgagtttgcccttaagtttactgaccacccactgtctatttgcttgtttgttgttcacttctctgcagcaattatggttatgcttaaatgtctttatctgaaaagagtttctaacttcattctttgcacagtagatttcccaatcacaaaatgtcttcttgcattttgctctagccctctgtttatcattcttcttccacttgaactccttgcccatcaatatgctatactccctcaaggcagatttaaattcatatagagtaccaaacttcatcccta

SEQ ID NO: 11395 - DNA, 414 bp, Glycine max
  unsure (1)..(414): unsure at all n locations
tactcagcttaacattcaatntcgagggtctcgatatattacgggactctttcggacatccgaganaaaagttattgtcgtttgaatttgctccgaccatcaacattcaattccgagcgtctcgatatattacgggactcaatcagacatcctagttaaaagttatgtcggttgaatttgctcagagcttcaacattcaatttccagggtctcgacatatttccggactcaatcagacatccgagtaaaacgttatttgcgtttgaatttgctcagagcttcagcattcaattntgagcgtctcgatatattaccggactcaatcagacatccgagttaaaagttattgtcatttgaatttgctcaaagcttcaacattcaattttgagggtctcgatagattacgggactcaa

SEQ ID NO: 11396 - DNA, 316 bp, Glycine max
tatatatcataggctgctcattttaacttattttaatatgttcccttatactcctgtgtttaatattgatgttgcgaaagacaaataaaaaaagcataatcttactcttagattgatcttgggtgagcaaattgcaaaatcattttttaatgaaattgattttgatcataattgattatgaagtacaatgatatattttttagtgtttttaatctaagaaaaaatagtattaaaacttagtataaaagaaattgatccaatgcaaaagctattaatgttgctttaattcaaatcaatttcttcttaaaattaattt

SEQ ID NO: 11397 - DNA, 472 bp, Glycine max
  unsure (1)..(472): unsure at all n locations
cattatctcctttgggttcgcaggttcttccatgcactgaatccagtgatcatctcgattacaatgcacccaagagaccatatatctaacgctggttcaatctgaccaacgaccgattctggtgacatgtaaaaaggtgtccctctaaacttgaccttcccatactcagcatttgcatcttctctagtcttggacaacccaaaatcagcaatcttcagttgataccttgcatgatcatcagatgaaggaaagagaaggatgttgtccggtttgagatcacaatggacgactccttttcgatgaatgcaagaaagccctttgagaagcatacgagtgtagactcttacttcactatccgatattggccccttcttgttactaaaccaagaagagaaccataaggagcacactccatgaaaagattgtatgtcacataatttctctcaacagtgaatnggtcaaaatagcattg

SEQ ID NO: 11398 - DNA, 304 bp, Glycine max
cctgcatgcatgctagcttctgttttcaattacttgcgtctcgatatattacgggactcaatcggacacctgagaaaaaagttattgtcgttagatttttctcagagcttcagttttcaattacgagcgtctagatatattacaggacccaatcggacatcgaagtcaaaagttattgtcgtttaaatttgctcagagcttctgttttcaattacgagcgtctcgatatataacggggctctatgcgacatccgagttaaaagttattgtcgtttgaatttgctcacagcttttgttttaattt

SEQ ID NO: 11399 - DNA, 493 bp, Glycine max
  unsure (1)..(493): unsure at all n locations
ctcagctggaatgaaaacggagagtcgaaaattcaatggtcattacttatcacaccgaagtccgattcaggcacataatatatcgagacgctcgaaattgaacaacggaagctctcgagaaattcaaatggtcataacttttcaaatggaagtccgattcaggtgcataatatatcgagaagcttgaaattgaacaaaggaagctctcgagaaattcaaatggtcataacttatcacacggaagtccgattcaagagcatactatgtgaagatgctcgaaattgaacaacgaaagctctcgagaaattcaaatggtcataacttgccacacggaagtccgattcagacgcataatataccgagacgctcgaaatngaacaatgaaagctctcaacanattcaaatggtcaaaacttgtgacacagaagtccgattcaggcgcataatatatcgagaagctttgaaatgaacaacggaggctctcgagaaattc

SEQ ID NO: 11400 - DNA, 305 bp, Glycine max
agcttgccttgcccctttatatatttgagggactcatggtcactatgaatgacaaattccttgggataaaggtagtgttgccatgttttcaaagcccgtactaaggcatacaactccttatcataagttgaatagttaagggtaggaccacttaacttttcactaaaataagcaattggatggccttcttgcatcaacacagccccaatcccaacatttgaagcatcacactcaatttcaaaagatttttgaaagtttggcaacgcaagtatgggggcattagttagcttttgcttaagaacatt

SEQ ID NO: 11401 - DNA, 412 bp, Glycine max
  unsure (1)..(412): unsure at all n locations
tgagcacgaacggtgaatggagtgtcacatttatcgtcagcaaaactatgatgtgtatgatcaatgccagtgacaacaaacccaatggtgattccttctccagcagattcaaacccacctgcttgcgaccaagctccctgtggcagacccaataattgtggagtgtgtgtggttgcagtcctcacagaaaaatccaaaaccacattggacacttctcttctccttgacagattttttgccttcaatatatcgaaaatcaagaacttgttggttgaagaagtttatcaaaacagacacaaacaccaaactacgcacaaatggaaacaactcaaacaatgaagcancgtgttcttcacagaataaggacatactcaagatcttgataatngaaaagtaaaaccatactatacct

SEQ ID NO: 11402 - DNA, 462 bp, Glycine max
  unsure (1)..(462): unsure at all n locations
attctataaatagacctgcaatcttcaatggagagggttaccactactggaaaacccgaatgcaaattnttattgaggcaataaatctaaatatctgnnaanccatanaaatanggccttatatacccaccacagtaaaaagagtttcaataaatggtagttcatcaagtgaaagcataaccatagaaaaacctagagatagatggtctgaagaagatagaaaacgagtacaacacaacttaaaagccaaaaacataataacatctgccctgggaatggatgaatatttcanggtatcaaattgtaagagtgctaangaaatgtgggacactcttcgattaacacatgaaggaactacagatgttaaaagatctangataaatgcactaactcatgagtatgaattatgtagaatgaatgcanatgaaaatattcanagcatgcanaagagaattacacata

SEQ ID NO: 11403 - DNA, 363 bp, Glycine max
tttccgactatgctcttgtgtggtggaacttgctacaaaaggagagagcaagacatgaagagcccatggttgatacatggatggagatgaaaaagatcatgaggaagcggtatgtgccggctatttactcaagggacttgaaattcaagctccaaaaactaacccaaagcaacaagggggttgaggagtatttcaaggaaatggatgtgctcatgattcaagcaaatattgaagaagatgaggaggtaactatggctcgattcttaatggtctgctaatgatattcgcgatattgttgagctgcaggagtctgttgaaatggatgatttgcttcacaaagcaatccacgtggagcaactatta

SEQ ID NO: 11404 - DNA, 271 bp, Glycine max
agaaattcaaatggtcataacttatcacacggagggccgatttaggtgcataataaatcgagacgctcgaaattggacaatgaaagctcttgagaaacccaaatggtcataaggtatcagtcggggggtccaattcaggcgcacattatatcgagaagctttaaattgaataacggaagctatcgagaaactcaaaatgtaataactagccacacggaagtacgattcaggcgagtaatatatcgagaagcttgaaattgaacaacaaaaa

SEQ ID NO: 11405 - DNA, 312 bp, Glycine max
agcttgtaatcgattacgcattgcttataatcgattaccagaagttttttaaactttttataacatcctttaaaaatttgaatttaaattttaaagcttgcaatcaattacaacttgtgtgtaatcgattaccagacatgaaaattcaaatttcaaatctgaagagtcacaactcttcagaaactaactgtgtaatcgattacaacaattatgtaatcaattaccagtaaggaattttcgaaaataactcccaagagtcacaactgttcaagaagtttttgaatggctatcaaaggtctataaataggtgac

SEQ ID NO: 11406 - DNA, 313 bp, Glycine max
agcttatgctgcaaatatttacatttgacctcctcaacctcagcagcaaaatcaaccacagcagagcaattatgacctttccagcaacagatacaaccctggatggaggaatcaccctaacctcagatggtccagccctcagcaacaacaacagcagcctgctccttccttccaaaatgctgttggcccaagtagaccatacattcctccaccaatccaacaacagcaacaaccccagaaacagccaacagttgaggcccctccacaaccttccctcgaagaacttgtgaggcaaatgactatgcagaacatg

SEQ ID NO: 11407 - DNA, 433 bp, Glycine max
  unsure (1)..(433): unsure at all n locations
atgtatntatacatnnatttgattatttcaataaaaaatctaacaaggctgcttcaaatgataaacatttgcttcaagaataattcaagattgcttcaacaaacaaagccttgttgcaagattcactaaagaccaagccttgccttaaaacaaagtgctttcaagacatgcaaggctctggtaatcgattaccaggaagtgtaatcgataaccagaagacatgattgagaaatatcttgtgaaaaaggtgaanttaaattttcaacatgtaatcgattgccatatgtttgtaatcgattaccagcaacaaaactttggatattcanattcnaaagtcataaccccttcaattataactgtgtaatcgattacacacacattgtaatcgattacccagtggaagttttcacaaaatctggcaacagtcacatct

SEQ ID NO: 11408 - DNA, 310 bp, Glycine max
agcttatattcacaatgttgactgattgtcttgtattctcatttcttctatttcttatttttttttttatagatatgtagagcagtagcttatattcacaattgtattggagtgtctcacagggacataaaagatgatgtcatgcttgctttcttcttgaaaataaattgaaattctgatactgaggacagatgtcgtacaggatgtcacgacatcccgcttcagaacatgcagattatatatgacagtatgaacagattaaacaagtaaataacacaagagaattgttaacccagttcggtgcaacgtc

SEQ ID NO: 11409 - DNA, 516 bp, Glycine max
  unsure (1)..(516): unsure at all n locations
acactatgatactaagcttctagtttagatgatgcagatgggcttgtagctacctcatgcactcctctaatgactatggcataatttctggcgataaactgttgggagttggaagccatcttctcaattaaatttctggcttcagcaggagtcatgtctccaagggctccaccactggcagcatctatcatacttctctccatattgctgagtccttcataaaaatattggagaagaagctgctctgaaatttgatggtgagggcaactggcacatagtttcttaaatcgctcctagtactcatacaggctctctccactgagttgtctaataccttagatatctttcctgatggttgtggtcctggaagcagggaaaattntttctaggaatactctcttaaggtcatcccagctcgtgatggaccttggagcaaggtaatacagccagtcctttgccactccctctaatgaatgaggaaaagctttcagaaatatgtgatcctctcggacatct

SEQ ID NO: 11410 - DNA, 309 bp, Glycine max
agcttaagctccttcaactgcacttggctcttaatatttgaagagtatccttgtggaaccttcacctgacgaagacactgacaaaaacttatcttctccttcttggacaaagtatggcaggctgggggcaagtaaattttcttcccatcagaccttggatgcaactatgctcttatacccatatcagctagatcttgacgggtattcaagccatccttcgtcttgccttgaatgttaaggagcatcccaatcacactgtcacaaacatttttctccacatgcataacatcaatataatgtctaacgtca

SEQ ID NO: 11411 - DNA, 392 bp, Glycine max
gcttgcttcccagatctgcttgtgattggcagcagtgtataggaaattcaaaggttcaaacagttcatgataactgagtttgaaatgacagatctagggaagttatcacacttccttggattagagattaatcaagttcagaagggggtgtttatgcaccaaagcaggtatgcacaagagatcctcaaaaggtttggcatgatgaattgtaattttgtttcaacaccagctgaagctggactcaagctggaaaatgacccataggaagagctggttgatgcaatagaattcatgaagctaattggatccttgagatacttgtgcaatagcagacctgatatttgtttgcagtagcctaatcacaggttatgagggaaccaaatgtcacacat

SEQ ID NO: 11412 - DNA, 425 bp, Glycine max
  unsure (1)..(425): unsure at all n locations
ttctttagtccagtcttcttctggcttcaattcatcagtgggctttccttctgtgtccagcatcttgggatgttcccagcctttgatgacagctttccaggttctgctatccagtgatttgaggaaggccaccattcttgctttccagtattcatagttgcttccatcaagaattggtggtctgttcactggtccgccttctttctccatgttcatcagaatntatctccctagatctcactctgtgatttcgagtgttggctctgataccaattganattctgataccaggggacagatgtcgtaccggatgtcacgacatcacgcttcagaacatgcagattatatgtgtccgtatgaacagattaaacaagtaaataacacaagagaatngtaacccagttcgggcaacctccctacatctg

SEQ ID NO: 11413 - DNA, 430 bp, Glycine max
  unsure (1)..(430): unsure at all n locations
gctgagaggacttcacattgattcctatggcatcgaggtgccaaccgtacctgccatggaacccaataatcttgccacctgtcattggcaacgaaaaatatgtcccttgttcaactccaaatggtccatagagtttcttgttgctctcaaaactaagtgaccgaatgaagattggtccccattgatttaagctaccatagtatccatcaactgatgttaggaactcctctgggtaatcaagcttgatctgcagcacaatcataaatatttaatcgatataacacacgagtgtgatgagtaacaaccaaagaagcacanacacttcatgattgtatacacaaatgtttnttttgttattaacaaatgttaattgttagttnttcttggtacatgttagatatgtatctatgtnggacactctacggactac

SEQ ID NO: 11414 - DNA, 503 bp, Glycine max
  unsure (1)..(503): unsure at all n locations
tacctcatactccanataacaatgagctaattgtggtgaatttgattcatttaccttatctttcccagggagttagaagaaagaaaaaaattaatgtaaaaattacaagcccttcccttttagcaaattaactctcctaattaagatattgtactatatatcctaaaaatgtaatatgtatgtntttttcagcatcaaaatataatggtaaataaaagtcttgtgagagagtatatatatgctcccaacttgttcctgaaaatgacaaacatgatnttatggaaaacagtcatatntagctgtagttntttataatcaaatttgtcttaaaagtatgtntatataaaaaaatctaaaaacattatctttgaggtgattaacgtgagaatcttaagttntatgtntctcaatataaaaaaaatccaaactttaaatacttncaaattaaatttaataaaataaaatntatatcaacacataagttataataaatgttcatgaaa

SEQ ID NO: 11415 - DNA, 284 bp, Glycine max
gcctgaaatgtcttttttgatggtagtggtcctagatgcagggaagaatttctccaagaacaccctcttaaggtcatcccagctgaaaatagacctgagagcaaggtagtataaccaatcttttgccactccctccagagaatgaggaaaagccttttgaaagatatgatcttcttggacatcagggggcttgatggtgaaacaaacaatatggaactccttaagatgcttataaggatcttcacctgcaagaccatgaaacttgggcagcaaatgtattagtc

SEQ ID NO: 11416 - DNA, 292 bp, Glycine max
agcttataatatatcgaggcgctcgaatttgaacaacggaagctcttgagaaattcaaatggtcataacttttaactcggatgtccaattcatgcgcatcacatatagagacgctaaaaaatgaacaacggaagctctccagaagttaaaatggtattaagtttttacactgaggtccgattcaggcttataatatatcggggcgctcgaaattgaacaacggaagctcttgagaaattcaaatggtcataacgttaaactcggatgtcccattcatgcgcatcacatatta

SEQ ID NO: 11417 - DNA, 410 bp, Glycine max
  unsure (1)..(410): unsure at all n locations
tctagtaactcagcttgccatgaattagaaatctgcacctggtgcaagagtctgtggtctatgttcttctgcagatcaccatacagatctttgtccttctttgcagcaatctggagtcaatgagcaacctgaagcttatgctgcaaacatttataatagacctcctcaacagcaaaaccaacaacaacagaataattatgacctttcaagcaataaatacaatccgggttggaggaatcatccaaatctaagatggacaagtcctccacaacaacaacagcctgttgatcgaggccatacccgaatcaaataaacattaaaaatgcagtatctaggaagtgatcctaggtcgtctcccaatgagcaatggtcaaccaaatgttcataacanatagtaataaaatagtaac

SEQ ID NO: 11418 - DNA, 497 bp, Glycine max
  unsure (1)..(497): unsure at all n locations
gtctcacgactgtcacgtgctcatgctacatttgttagtcgtggctacacgagacatcttgccaaacaaagtcaggttaacgataacttgcctatgctttttctttcatgctatatgtagcaaagtcattgatccagtcatgtttgatgagttggaaaatgaggccgcaattatactatgccagttagagatgtattttccccttactttctttgacatcatgattcacttgattgtgcatctggtcagagaaatcaaatgttgtggtcctgtttatctacggtggatgaacccggttgagcgatacatgaagatcttaaaagggtatacaaagaatctatatcatccagaagcatctattgttgagaggtacattgcanaagaagccattgatatttgttcagaatactttgagaanggctaaacctgtgggcttnctgagtctcggcatgatgacagagtgggtggtaaggattcaagaggactgcangtgatca

SEQ ID NO: 11419 - DNA, 381 bp, Glycine max
  unsure (1)..(381): unsure at all n locations
gacgcttagaattgataatgcaatcccaaggcaaatttcatacgaccgtaactnttgatttgattgttcgattgaggctcataatatatcaaaacactctaaatttaaaacagaagcccaagacaattcaaatggttataacttttgactcggttatctggttgaggcccatagtatatcgagatgctcaaaattaaataagaaagcccctggcaaattcaaatggccataactntatactcagatgtccaattgaggtccataatatatcgagacgctcgatattgaataaggaagctctataaaaatataaacggtcataattgtaggatcagatgtccaattgaggcccacaatatatcgagatgctcaatactgaat

SEQ ID NO: 11420 - DNA, 507 bp, Glycine max
  unsure (1)..(507): unsure at all n locations
gcttcttagtctcactctcaacaattgtaaaagcaagtggaaaattattcttattaccatctttctcaatggcagtcaacaaagtaccatgatattttccagttaaaaatgtctcatctacttgtacaagtggcttacaatatttgaagcctttaatgcatgggttaaacgcccaaaatacacgattaagaatcaccctaggagacgcatccccacctttctccattgaagatggagttttgtagtttactatggtatctagtacaaaatgttgagcagctgtcaatcatacaagcaggtagctgtatgattgttcccaacttccaaatgtcatttcaagggctttntgtttgattgtccatgcttttttgtatgaacagtgtaaccaaaccgttgttgcatgtctgcaatcaaggttntgatttcgataccaggaatttgtttcactaaatgaacaacattatgagcaattacagaagagtctaacctagcatgatcttgtgatat

SEQ ID NO: 11421 - DNA, 484 bp, Glycine max
  unsure (1)..(484): unsure at all n locations
gtgtngaagggtgaaacttcctgctnttattgttgaccacagagtggtacctggagatatgtcgcggnggtcaggagaccttgnggacgtcaggtggggtgctattgcccaaaaccaagcttgaccaatcccgacccaacccgggcatagtcggtcagtgagaacctgtgatgtacctaagcaggcgagctcctggcaatcaacagataataggaacaaagaccacaaagncaggaggctngtggtggctggccagctgtngaatttgtgtgatatgtggagtatggcctctggtaatcgaataccaagggtgggtaatcgattacaaggcttanaaatgaagacagggggctaagatggtctctgaaattctgataccagnggacagatgtcgtacaggatgtcacgacatcacgcttcagaacatgcagattgtatgtgtccgtatgaacagattannaccagtaataacacaagagaattg

SEQ ID NO: 11422 - DNA, 501 bp, Glycine max
  unsure (1)..(501): unsure at all n locations
gcagactagcctactcgataattgcggtctgatgagaacagggactactcagaccaaagtagcatgtgctaccttccttctattcactcaagtgtttaaagatgtaaaaatgtatttgcattattaaaaaagttggttaaatttagatattagtatntaaattgtcaatagttataatatttttttaaaaattatccttaatattattagaatttattcattttttttaatctctataagaaagaaagagacaattcagaaacgttcaattataaattaaaataaataaggatatnttaattcaaaatcaattaatgcacaacataattgaaataaaatcttatgaaaacaatntattttttccaaattatttcttataaatagggacacatgaagtagtttactcccttgaaaatactaaaatngacctgagtggctttttcttacaacaatcttnngttttgaatataatttattttgtaagatgatcgaatattaaat

SEQ ID NO: 11423 - DNA, 455 bp, Glycine max
  unsure (1)..(455): unsure at all n locations
agctntgcagcaacanatgcagtagccataacatattcttcatttttaaacttatgttccccattgaggaattgaacaaggatgtcaatatgatatggtccaacataagaggcacatgtgtataggaatgaaaacaaacctgataaaaggatcccttgccatgttgacaagaataacaccttcgccagcttaagagtggtcacaatcctaacactaccacactctgactcaagtttgtttctaaaagttggaaaaaccccataagcactgtcatcagtagcaagaagtgggacgtcctgatgctctaatatcttctccttgcctagacttattaatggaccaatccatgagaaagtaagaatgctgataaaaatccagcattngaataacgggttaaantttcatttagtctactcttactggaatcagaattgtngcatacactagagtcacca

SEQ ID NO: 11424 - DNA, 337 bp, Glycine max
  unsure (1)..(337): unsure at all n locations
aggttatgaagtatttcggactatgtgcatccatgtctggacaacatatgtctgtatgtatgatttctaataaattagaactcctctatgcaccctctttagacttggtagtttgcttacccttaatgcaatctacacaagtctcataatcagcgatagtcanagtactaagtactccttcatttactaatcgcttgattctttcaatagagatatgtcctaatctccggtgccacaacatagaggattcttcattcacaatacatcgttttaacccaacagaaacgtgcatagtaagtagcgtcatttgctaatcaatcgaataaagaccatcaac

SEQ ID NO: 11425 - DNA, 372 bp, Glycine max
  unsure (1)..(372): unsure at all n locations
agcttccattgttcaatatcgagtgtctcgatatattatgcgcctgaatcggacctccgaatganaagttatgaccatctgaatttctcgagagctaccttcgttcaatttcgagcgtctcgatatattatgcgcctgaatcggacctccgagtgataagttatgaccatttgaatttctcgagagcttccgatgttcatattcgagcgtcttgatatattatgcgactgaatctaacctccgagtgaaaagatatgaccatatgaatttctcgagagcttccgttgttcaattatgagcgtctctatctgtgatgcgcctaaatcagacatccgagtgaacagttatgaccatgtgatattctcgagagct

SEQ ID NO: 11426 - DNA, 228 bp, Glycine max
  unsure (1)..(228): unsure at all n locations
gatagcccaaggactacagtacttgcataagggatgcaacacttgagttgtacattttgacatagagccaatacattcttttggatgagaagctctaccccaagatatctgattatgggctagcacagccttgtgctacaaatgatagtattatttccaggtctggtgccagaggaacattanggtatgtagctccagaacaattggcagaatttcacacaaatctga

SEQ ID NO: 11427 - DNA, 380 bp, Glycine max
  unsure (1)..(380): unsure at all n locations
tcttcgcgccgcaataaatgcgctagtctctcctttctattcatcccatgtganattattatcaaaaacaccagatcctctaattcaagtctgcaccaagtnttcctgagataatgtctggtcgtggaaagggtggaatgggtttgggaaagggatgtgcctagaggcacatgaagggtcttctcgacaacattcanggcattacgaaacctgcgattcgtacgttagcgagaagaggtggcgtgaagaggatcagtggttcgatctaccaggaaaccagaggggttctgaagatattcttggagaacgtgattcgcgatgctgtgacttataccgagcacgctacgaggacgacggctactgccatggatgttgtttat

SEQ ID NO: 11428 - DNA, 481 bp, Glycine max
  unsure (1)..(481): unsure at all n locations
gtaactntatgggatgcagtccatataggtcaaacatattcctagtagacaattatctgtgtctcaccttcatatagacatctatatctgggtcaggtttaatatttgcttctttctctcttctggacacctctgctagcaaatctgcagaatgtaaaataattttggttaaaacttgatattgcatatgaaatttttgcacggtatancaaatgcaatgctgtgggctaaccataacgagctccaactccttggacccgtgcggagaaggccaaggtntctctaactgtcatttctccaatatgaagatcatattgactgacataagcagcagttctgtggggacaaactcattcatcccatgaccattataagtcacctntccagtgaactgatcaataagtcaaaccttaatagctgcatatccanaactgganactacgagccaagcatgataacatcatttaacaattaaatatat

SEQ ID NO: 11429 - DNA, 491 bp, Glycine max
  unsure (1)..(491): unsure at all n locations
gctataagagatcatccnctagacaacattcttggttacatctcataaggggtaacttctagacgttctcttaaagatntatgcaataatatgacttctgtgtctatgattgaacctaagaatataaatgaagccataatagatgatcattggatagttgctatgcaagaataactaaatcagtttgaaagaaacaatgtgtgggaactagtagagaaacctgaaaactaccccatcataggaacaaaatgtgtatttatgaataagtcagatgaacatggcataatcattaggaataacgctagattagttgcaaaaggatataatcaagaagagagtaaagattatgaagaaacatatgcgtccagtgcaagattagtagccattagaatgctttagcttgtgcaccataatgacatttaactttatcaatggatgttacagtgctttctaatggctaatcaagagaagatatgtgaacaccccaggtt

SEQ ID NO: 11430 - DNA, 450 bp, Glycine max
  unsure (1)..(450): unsure at all n locations
ctgatctcaatcctgagcgtgtcgatatattacgagactcaatcttacatccgagtaataagttattgtcgtttgaatatgatacgaacttccattctcaatttcgagtgcctcgatatattacaggactcagtcgaacatccgagtaaaaagttatatgcgtatgaatttgctacgagcttcctgtttcaattaggagcacctcgatttattatgggactctatagganatctcaggtaaagttatcgtcgtctgaatttggtaagagcttccattctaaattcgcagcatgtcgatatattacgggactctgtcagacatccgagttaaacgttattgtaatttgaatattctacgagcttccgtttcaatttggtcctctcgatatgttactggactcatctgacatctgataagtattgtcgtgatttctacctctcatatcaatt

SEQ ID NO: 11431 - DNA, 481 bp, Glycine max
  unsure (1)..(481): unsure at all n locations
tcgatcctcttatcttcaaagcccatttctagtttctttcttcccatgtcaactacacagcttgcagttaacataaatggtcttcccaagattaaaggaatgtcattatcttcacagatatccattacaacaaagtctgctgggaagataaaatgttttactctgaccaaaacatcttcaattactccatatggtatggtaatggagcggtcagccaactgtaaagtcattctagtgggcatgatttccaactctcccagtcttctgcacatggagagtggcatcagattgatactggctcccaagtcaatgagagcttttcccactgtgacttcacctattgaccaaggaatggtcacactcccanggtctttgtgcttcggtggaaggaatttctggatcaccgcactgcaatttacctttcataactatatttcctggtgaatgtacttgtgcttcttttgtcacatgtctttaaaac

SEQ ID NO: 11432 - DNA, 286 bp, Glycine max
gtccaggttcctcagcagatagaaccagaacctcagcggttagtggcttaaggaagaaactgtatgacttgatggatgattttcaagggttgagggccagaatgcagaatgagtacaatgaaaccgtggaacgaaggtacttcaccataacaggagaaaaggctgatgaagacaccatacataacttgatatcaagtggagaaagtgagatttctcttcagagggcgattcatgaacaagggaggggtcatataatggacaccatatcggagattcatgagagaca

SEQ ID NO: 11433 - DNA, 353 bp, Glycine max
  unsure (1)..(353): unsure at all n locations
ctctgataaatctgccatatactcagccggtattaagcctcatgagctatctcatatccagcttactggatgtagtttgggtgacttcccttttagatacttaggagttccccttttatcatcgagattaaatgtatgtcattatgctcccttgctttccaagattactggcctgatttatggatggagcaagatgtctttatcttatgcaggtaagttacagttgattagagcagttattcaaggaatcgtgaatatctggatggagattnntcctttgccgcaatctgttctggaccgaatcaacgcttctcgccgtaattttctgtggggaaagcgaatattgcaaaaac

SEQ ID NO: 11434 - DNA, 349 bp, Glycine max
  unsure (1)..(349): unsure at all n locations
gctcgctgggagcttcatggaggctggatctgtgagcttcaatgatgtcctttatgttagactagtggcctcagatatcttaagaaggaggtggggttgaattaatatattacaacttatttccccaattaaaaattctacttaactttctattcaagttataaattcccttaataatgaatctcttaaataatgattcataagaagaatctgaataagactataaaacacatataaatcatggagtttatgggaagagaangtgcaaactcagatttatactggttcggccacacccttgtgcctacgtccagtccccaagcatcccgcttgagagttccactatctt

SEQ ID NO: 11435 - DNA, 381 bp, Glycine max
agtcacctgccgcatgcaagctttcacccaacaggcgaatgaagattgcatttattggcacatctgagtttgacagtgcaccgattcctttgtcaggtcatgaagtttttgatcgggtgaagaacatcgttactatatatgggaaaacacaaaaataggatgggtcccacaaccagctttggaagaaaaagtctatatatttttatctgccttactggtcgtcattagatgtgagacattgtttagatgttatacatgttgagataaatgtatgtgatagtctagttgggacactgctaaacattaaaggcaagacaaaagatggtttgaaatgccgctcagatttagtagagatgggcatacgacaacagttgcacccag

SEQ ID NO: 11436 - DNA, 541 bp, Glycine max
  unsure (1)..(541): unsure at all n locations
ttgacaggtgataactcataactgaatgtgtangctggcatccctgtgtgataaggtgaaagaccttcacgctaatgtgagtgatgttgaggtgggtgataaggtgaaacaccttggataagattaanatactctctaattattttgttttctgattntaattttagtgagagagaatgggtatagagactaacattattggtcccatcttgcttcgtagtcataccttntcataatcgatcacttatatattntttgatgttaaataactacaaatgtagctaagacttaaaattttaattatttatctatntgatttaatgtctagntctatttttattntctaaattaanaaatactttgatcgattcatatgtgtgtattatatcagtntatcactataccattcatttgtatatacaaactaatttatgntgttgtcttctttttgtactcgaatacactannattagacttcatctatgtactcctctatttacatggtatcatgttttaatatacacatttgttgtaaatacct

SEQ ID NO: 11437 - DNA, 501 bp, Glycine max
  unsure (1)..(501): unsure at all n locations
agctntggagtntccaagtgccaattcgtcttcttctttattccagacttcttctggcttcaattcttcagtgggctttccttctgtgtccagcatcttgggatgttcccagcctttgatgacagctttccaggttctgctatccagtgatatgaggaaggccaccattcttgctttccagtattcatagttggttccatctaagattggtggtctgttcactggtcctccttctntctccatgttcatcagaatttatctccctagatctcactctgtgatttcgagtgttggctctgataccaattgaaattctgataccaggggacagatgtcgtaccggatgtcacgacatcacgcttcagaacatgcagattatatgtgtccgtatgaacagattaaacaagtaaataacacacgagaatggtaacccagttcggtgcacctcacctacatctgggggctccaagccgagaggaaaccactctaatagtgtagttc

SEQ ID NO: 11438 - DNA, 403 bp, Glycine max
  unsure (1)..(403): unsure at all n locations
tgcctccatactcgcgttgccaaactttcaaatatctgttgaaagtgagtgtgatgcttcaaatgttgtgattgtggctgtgttgatgcaagaaggccatccaattgcttattttagtgaaaatttaagtggtcctacccttaactagttaacttatgantaggagttgtatgtcttattacgagacttgaaaacatggcaacactacctttatcccaaggaatgtgtcattcatagtgaccatgagtccctcaaatatatcaaggggcaaggcatgcttaacaaaaggcatgcgaagtgggtggaattcctatagcaattcccttatgttatcacacatataaagggaagaggtaatattgtagccgatgctctttctcagcgtcatgcattactttctatg

SEQ ID NO: 11439 - DNA, 423 bp, Glycine max
  unsure (1)..(423): unsure at all n locations
agctntgggctcagtggccncggtcacgtctattctttacatggagaagggccacgacgcttccaggatgttcgaaggcaagggcggagcgttgacgttgtctgcaaatgtatgacacttatggcactttctcacgtggatgcaatagtcactctccatgatgagccaataatagcccgccctcaggatctttctagccatggcgtgcccgttagcgtgtgttccaaaggaaccctcgtggacttccactagaatccgcttagcctccttagcatccacgcatcggagtaacaccatgtcatggtttctcttgtatactatgtttccacttaagaagaaaccggttgccaatctccttaacattctcttgtcgttggtggaagcctccgatgttcttgagcccgaaagacatctncttataat

SEQ ID NO: 11440 - DNA, 510 bp, Glycine max
  unsure (1)..(510): unsure at all n locations
agcttagcttgtcccaaggcttcatgtagacttgtccaatatcgcgaagtgaacctcggatccctgtctgatacaatactagaaggaattccatgcaaccttattacttccttgatgtacaactctactagcttctccattctatacttcatattcaccggaataaaatgagcagatntggtgagtcgatctactatgacccacaccgcatcatgtccacgactagtcttgggcaaactagatacaaaatccatagatatgctctcccatttccattccggaatttccaatggcttcaattctcccgatggtcgttggtgctcagccttagccttttggcatgtcaaacatcttgctacgtattcagctacatctttcttcatgccatgccaccaaaaacttctcttcaaatcttggtacattntagtcattccaggatggaaactaagacgaactttatgagcttcttccaagatcttaactctcanatcatctaaagatggcacacat

SEQ ID NO: 11441 - DNA, 463 bp, Glycine max
  unsure (1)..(463): unsure at all n locations
agcttcttagtntcagatgatgcagatagggttgatctacctcatgcactcctctaatgactatggcatcatttctggcactaaactgctgggagttggaggccatcttctcaattaaatttctggcttcagcaggagtcatgtctccaagggctccaccactggcagcatctatcatacttctctccatattactgagtccttcataaaagtattggagaagaagctgttctgaaatctgatggtggnggcaactggcacatagtttcttaaatctctcctagtactcatacaggctctctccactgagttgtctaatacctgagatatccttcctgatggctgtggtcctggaagcagggaaaattntttctaagaatactctcttaaggtcatcccagctcgtgatggaccttggagcaaggtaatacagccagtcctttaccactccctctaatgagtg

SEQ ID NO: 11442 - DNA, 422 bp, Glycine max
  unsure (1)..(422): unsure at all n locations
agcttggagaagggtgatttgggactatatacaaggtatgtgtgcaatgtactattgataattaaaaaataataaagcttggaaattattattcactgcatttaacttcctctcccacaaatgttgagtggttagggaacattaccagattgacaagaggtcgcggttaagaggctctgacaaacatctaagcaaggatcaaaagaatttaagaatgtggttatgttatgtgccgaaccccaacatcaaaatcttgtaaaagttcttggatgttgcattcaagaagatgaaaaattgctcatatacgaatatatggcaaataaaagcttagaggtctttctttttggttagtttctctaaatttaactgggtaattaatgtaagatngcattttgttcttacaattggttgcaaattaatta

SEQ ID NO: 11443 - DNA, 442 bp, Glycine max
  unsure (1)..(442): unsure at all n locations
agctangagcaccttttcctcacttcttccttcattgatgggttgagccttctctagggttgtatgattggtctatagtctccttccatcattntcttgtgcatgtagttggcagggctgattcctttaagatctaatatgtgccacccaattgcttccatgtgtcccttgaggacctttaccaacctattctcttcctctgctgttagctcactgtgatcaccacaggctnggtctcgctctcctccaagaacacatacttcaggtggttgggtaggatcttcaactccaccttggtcttctcggatggactcccacttnttaattcttcaaagctggtcccccttgcaggaatgttttcttcatgatctaagtcttccaagaaagtcctcagatccttttcctcttcaatagttagataatccacaacattgatcaaagc

SEQ ID NO: 11444 - DNA, 460 bp, Glycine max
  unsure (1)..(460): unsure at all n locations
aagattccttaagaagctagagcttagctacacatacctctataatagctaagctcacctccttgagatgagaagctagagcttanctacacaccctctataatagctaagctcaccctcatgacaaaaaacatgataataacaaaaaaaagtccttattacaaagacaactcaacatgccccgaaatacaaggctaaaaccctatactactagaatggccaaaatacaaggcctagacgaaggaataacctattctaatatttacaaagataagcgggctcatacttagcccatgggctcgaaatctaccctaaggctcatgagaaccctagggcctntccttggatctctagcccaatctacttggagtcttctagccaatgcccttgcggggtaggattgcatcanttactttcactcagatgtgcgattcaggcacatcagatatcgagacgctcg

SEQ ID NO: 11445 - DNA, 490 bp, Glycine max
  unsure (1)..(490): unsure at all n locations
agcttctaccattcaattaaattatatttctcctcacacatcaaatattcacttagtgtatgtgaattacanaactacccctaatacaaaaactagtctaagtgccctaaaatacaaaggctgaaaaatcctatatttcttgggtcccctacctacattatggagccctaaatacatgacccaaaattaatgaaaccttaatctaatatgtacaaagataagtgggctcatacttagcccatgggcccgaaatctaccctaaggctcatgagaaccctagggccttctcttgcatctttggcccaatcttcttggagtcttctatccaatgcccttgaggggtaggatngaatcacacagtttctatgaattctatcatctaagcaacaccaaanatcttgaaataaacttaaattcactaaattgcttaatgtggaacataactaatataactcgaaccaattcattacaataaataagggtaacttac

SEQ ID NO: 11446 - DNA, 476 bp, Glycine max
agtcacctgcggcatgcaagcttctttggagaaacttccttgagaagctagagcttatctacacacacccctctcataactaagctcacctccttgagaagcttccttaagaagattccttatgaagctagagcttagctacacatacctctctaatagctaagctcacctccttgagatgagaagctagagcttagctacacaccccctataatagctaagctcacccccatgacaaataaacatgagaataacacaaaaaagtccttattacaaagacaactcataatgccccgaaatacaaggctaataccctatactactagaatggccaaaatacaaggcctggacgaaggaataacctattctaatatttacaaagataagcgggctcatacttagcccatgggctcaaaatctaccctaaggctcatgagaaccttaggggccttccttggatctctagcccaatctac

SEQ ID NO: 11447 - DNA, 299 bp, Glycine max
  unsure (1)..(299): unsure at all n locations
aagctcctaatatctcccacactntnntgggtgggccattcttggatggccttgattttctcagggtccacttggaccccatntctaccaactataaaccctaagaanactatattatctacacaaaaagtacacttctcttatattgcatagagggtgtntntcctaaggactganagaacttgcctgagatgtcctaagtgatcatctaggctcctactgtacactanaatatcatcaacataaacaactacaaatctacctatgaaatcccttaagacatgatgcataagcctcat

SEQ ID NO: 11448 - DNA, 406 bp, Glycine max
  unsure (1)..(406): unsure at all n locations
cctgttcctccctaccttacatgtttcatcanacttgtttctgaacacccactntgctccaacaacagaatattccttggggagttctacaagctcccatacatcattattctgaaactggtctagctcttcttgcattgctgtgacccaatattaatcagacatggtatcatctatgtngttttgctcaatctcatatagtaatgttgtgttcttaagagagatccttctctgtactttgtccataggatcacatatgatctangctctagatgttgtttcctcaacaggcatccagttggttctctggcctcttcaggttggttgtccactggtgagttagacgcaagttggttctgactctacacaacagtagacttaacaatatcctctatcttcatttatg

SEQ ID NO: 11449 - DNA, 521 bp, Glycine max
  unsure (1)..(521): unsure at all n locations
agcttgtanggttaaagtctcacgatggtcacgtgctcatgtcttaattgttagccgtggctatacgagacatcttgccaaacaaagtcaggttagcgataactcgcttgtgctgtttcttccatgctatatgtagcaaagtcattgatccagtcatgtttgatgagttggaaaatgaggcagcaattatactgtgccagttggagatgtattctcccnctactttctntgacatcatgattcacttgattgtgcatctggtcagagaaatcaaatgttgtggtcctatttatctacggtggatgtacccggttgagcgatacatgaagatcttanaagggtatacaaagaatctatatcgtccaaaagcatctattggtgagaggtacattgctgaagaagtcattgannatttgtcagaatacttagagaaggctaaacctgtggggcttcctgagtctcggcatgatgacagagtgggtggtaaaggttcaagaagactgcatgtgatcactccaagt

SEQ ID NO: 11450 - DNA, 396 bp, Glycine max
  unsure (1)..(396): unsure at all n locations
tctatcctccctaagatggagtcaaacccagtcaccgtcattaagaactagcttttttcttcctctattgcctntagttgaatacacctttgtttggttcttaaccctctcatgcaacttctttacaactctgacctggattccccttctttatgcataaaagaagtgtccagttggaggggaataaggtctaacggtgttaggggattgaacccatagacaacctcaaaaggggattgcttggtggttctataaacccnctattgtacgaaaattctacatgaggaagatattcatcccaagacttatggttgcctctcaaaagagcaccttaaagggtggataaagacctatttactacctctgttcgcccatcagtttgtggatgacaaagtg

SEQ ID NO: 11451 - DNA, 390 bp, Glycine max
  unsure (1)..(390): unsure at all n locations
atgcaaacatgcaataaatgaaactccaattcagattggagaatagcataaaaaatactcaattaattaatttggtccaggttttgttcttttaacttaaggtaacaattattgcatanggtttatgttgaaatggaaattgtttgttgacgacatgttgcttgttggtttggtggatcaatcangacgctaangaacaggaagagaagagggccactactcagttgatgtttgatttgggttagaaggcctatgggaagggctcctatggacatgccattgaatttcttgaagttgcactcactatcatnacccaggcctacattattggtggtgaggttggttctttcttgcccaaacaagaatttntgtctgattgtggaacgagga

SEQ ID NO: 11452 - DNA, 128 bp, Glycine max
cgagtgtctcgatatattatgcgcctgaatcggacctccgaatgaaaagttatgaccatttgaatttctcgagagctacctcttgtcaatttcgagcgtctcgatatattatgcgcctgaatcggacc

SEQ ID NO: 11453 - DNA, 405 bp, Glycine max
  unsure (1)..(405): unsure at all n locations
agctagccatgaatngtttcatgtgtactattaaagatgctggcataatcctgtcatataacacaaccataaactaaaataagcatatgtgatcagtgtcaaaataaaatgcaaccatttacaaaaccaatcaagaaaataagaatagattattacagctaaccaatcaacaagcctttcaggtagccatgcttgagattgcttgtccacataaaatatttcaattaactcccacgcagctttcaaagatgtaggctcttcacctctctatattatgtgtaatgtgttaaaaagcaagtgattaacttctcggtatcataattcccacaaagcagatctcagctcagctaaacacggtanaacaatntagaacctanaacagtaccttagcaattacatttgggt

SEQ ID NO: 11454 - DNA, 343 bp, Glycine max
  unsure (1)..(343): unsure at all n locations
tgtatttctctctaccagaagcanaaatggttttaacagctttcagaatagtgtgaatctgacaattaaaaagttgtaatcgattaccagtaacgaaaaactttgaaattaaaactgagaaggcataactcttcacaattaactgtgtaatcaattaccacacatctgtaatcgattaccagtgagaaatatttaaagataactctgaaaaatcacaactcttcacaagttgttngaaaggccaccaaaggcctataaatatgtgacttgtattcgaaattctntagaacattcattgtcctatcttctcacaagagaatctttggcaatcacttgcaaatca

SEQ ID NO: 11455 - DNA, 244 bp, Glycine max
agctttagtgtgttcttcgagcttctctgcgaaaccaaaagtatgtgatgcaatcctaccccgcaagggcattggatagaaaactccaagtagattgggccagagatgcaagagaaagccctagggttcttatgagccttaaggtaaatttcgggcccatgggctaagtacgagcccacttatctttgtaaatattaaattaaggtttcattatttttgggccttgtatttagggctccataat

SEQ ID NO: 11456 - DNA, 265 bp, Glycine max
  unsure (1)..(265): unsure at all n locations
tgagcaactatgcatcaacctaacgaatgataagttgccacaacattntaatcacgcaaggttataacttcataatacaacttgaacatcattattaatgaaaatacataagatagaagagatgcatctgtttcaacagcatgtattccagatggagcaagaagagtacacacaggaggaaatcaataggagctatgtagaatctgtggataatcacgatgttctcgatcttattgagaacgtagntagatacttctgaatcatc

SEQ ID NO: 11457 - DNA, 299 bp, Glycine max
agctttaggcgatagttaaactagaacactttttggccaatatggaactccttcctaagaatcctagagtcatgaatcctcttcactttctctttgtagatcttggatttctcataggcttctaagcgaatctcttcaagttcttgcaattgaagcttcctttccatacccgcttcatcaaatgccatgttacaacccttcaccgcccaataagtgcagtactcaatctccaccggaagatggcatgccttaccaaaaaccaccatatagggagacatccccaaaggtgttaggtaagc

SEQ ID NO: 11458 - DNA, 308 bp, Glycine max
  unsure (1)..(308): unsure at all n locations
tgagagatgtcttaatattgtttctattagaagtgatcatggaggtgaattataaaatgattattttgacanagtttgtggagaagatggaattcaccacagacctcaataaaatggtgttgtggaaaggaaagatagatcccttgaagaaggagctagaactcttctaaatgaaacaaagctaccaaagtacttatgagctgatgttatgagtactatctgctatactttaaataaggttcttataagacctattctaaggaaaactccttatgaactntacacaggaagaagaccaaatatatctc

SEQ ID NO: 11459 - DNA, 292 bp, Glycine max
agcttcttttaccacctttattaatctattcacatttttaaaaatctacattatttatgcagattatgttgtcataatctcgtgtgtcattttgatggtccttttcttcattcaacatcatgggacacatagagttgccttcatggttgccccactacttgcaaaatggcttttgtgcattagtggtattggtgtatacaacagattctactggaaccgacacatataccgtgcactttctccactctacatgttgaaattcctcagagccactggcattgaaggatggatg

SEQ ID NO: 11460 - DNA, 314 bp, Glycine max
  unsure (1)..(314): unsure at all n locations
ctaagctatgctgcatatattacaatagacctcctcgacctcagcagctaaatcaactacagtatagcaattatgacctttccagcgacagatacaaccctggatggatgaatcaccctaacctcagatggtccagccctcagcaacaacaacagcagcctgctccttacttccaaaatgctgctggcccaagcagaccatacattcctncaccaatccaacaacagcagctacgccagagacagcccacacttgatgcccctccacaaccttccctcgaagaacatgtgaggcanatgactatgcataacatg

SEQ ID NO: 11461 - DNA, 202 bp, Glycine max
tcttttccattattcaatgcaaaaccattacaacccctgatcttaaaaggagagatgttcggttttatgccattgaacaattcatatgtagttttctttgggaggggtcttattaaagccctatttaaaatgtagcatgcagtgttaacggcttcagcccaaaagtattttggaagaggagtatcatttaataaagttctag

SEQ ID NO: 11462 - DNA, 276 bp, Glycine max
  unsure (1)..(276): unsure at all n locations
catatattcagatccttgagaatgaccacggaagctctcggcanattcaaacggccatatacgttgactcgaatgtatgatcgatgcccatgatatatcgagacgctcaaaattgaacaacagaagctctcgagagattcatatggctataactnttctctcggatgtgtgattcacgtgcatcatatatcgagacacttgaaattgaccattgaagctctcgacagattcaaacggccataactttagactcgaatgtatgatcgacgcgcatga

SEQ ID NO: 11463 - DNA, 297 bp, Glycine max
  unsure (1)..(297): unsure at all n locations
catgtcacactgaagtccgattcaggtgcataatatatcgagacgctcgagatagaacatcggaagctctcgagaaattccaatggtcataacttttcacacgaaactctgaatcaagcgcataatatatcgagaagcttgaaatngaacaacggaagctctcgagaaactcaaatggtcataacttatcacaccgatgttcgattcacgcgcataatatatcgagacgctcgaaattgaacaacgtatggtcgcgagaaattcaaatggtcataacttgtcacacggatgtccgat

SEQ ID NO: 11464 - DNA, 291 bp, Glycine max
agcttgattaatcttgttaatcatgtagctctgcagatgatggagaatgatgtggttgctgttgttggtccactgtcatctggaatagctcatgtcatatctcatgttgttaatgaactccatgttcctcttttatcatttggggcaactgatcccactctatcttctctacaatatccgtatttcgtccgcaccactcagaacgactattttcagatgtatgcaattgcagactttgttgattattacagatggaagaaggtaattgccatttacatagatgatgacaat

SEQ ID NO: 11465 - DNA, 295 bp, Glycine max
agcttgtcagaattctgggactgttgttgattcaattgggtagccaattgtcccatctgattggttaagctctgaatggaggctctggtctcttgctgaaactgcatgttctgcatagtcatttgcctcacaagttcttcgagggaaggttgtggaggggcctcaactgttggctgtttctggggttgttgttgttcttggattggtggaggaatgtatggtctgcttaagccaacagcattttggaaggaaggagcaggctgctgttgttgttgctgagggctggaccatctga

SEQ ID NO: 11466 - DNA, 246 bp, Glycine max
ctggtcttctatggccattagtagtgtgttcttcctcatgtctaccacacagcttgcggaggacataaaatgtctgacaagaatgacgcgaatgtcaccatcttcttcgatctctatcactaccaaatcatcaagaaagatcatatgctcgaccctaaccaaaacgtcttctatcactccatatggtctcgcgatggatctatcaaccaactagacggtcatgtgtgtgggcatgatctctatctc

SEQ ID NO: 11467 - DNA, 192 bp, Glycine max
actcggatgtccgattctagcacatcacatatggagacgcgcgatattgaacaacggaagctcttgagaaattgaaatgtcataacttttcactcggatgtccgattcatgcacatcacatatcgagacgctcaaaattgaacaacggaagctctcgagaaattcaaatggtcataacttatcactcggatg

SEQ ID NO: 11468 - DNA, 293 bp, Glycine max
agctttctaacccatggaagctcctaatatcttccacactttttggggtgggccattcttggatggccttgattttctcagggtccacttggatcccattgttaccaactataaaccctaataagacaatattatctatataaaaagtacacttctctatattttcatagagggtgtttttcttaaggactgaaagaacttgcctaagatgtcctaagcgatcatctaggctcctactgtacactaaaatatcatcaaaataaacaactacaaatctacctatgaaatccctt

SEQ ID NO: 11469 - DNA, 303 bp, Glycine max
tgtgtttaacattcatatattctcattgtaagcatatatggtctgtaaccttcaaccttttctatttgtgaaagcctggagagacttagtactccctctgttcctatctataagacccaagtttggaatggtgtttattcatttttataagaaccaatctataatgcttcttgcattatatattggtataataaaaataatcctcaataaaagaagaaagagaatgtattacaaatcatataagagagaagatattacgacaagatattttgaaaagtacaattaaggcaattatactataac

SEQ ID NO: 11470 - DNA, 224 bp, Glycine max
taaaatattctcaacaggcccatctttttacttgaatcttgaatggctgtcaaaagcctatatatgtgagacttgggacaccaatttgctaagagtttttcacaacaaaaacgtattatactcttaatacgcgaatcgttttatcctctcacacattccttggccaaattacttgtgagtcaataaggcattatttgggcgctcaaagagttcaatctatctct

SEQ ID NO: 11471 - DNA, 302 bp, Glycine max
agcttgccacactcacacgatactaatatacgaatatttataatttttgtgaggtggagcatatatcttagcattattggccataaatgtttattaaacaaatgtacaatatttagagaaaaccttatgtttatgttattattctaatcataagtcacacaatgatcaatttattagctttcataataaatatctcaaaaatgtattggcttttataataaatatcttaaaaattaatttaaactggtatgactatttaactctaatatttatgtatattttttaaataaaaaaacatgctt

SEQ ID NO: 11472 - DNA, 287 bp, Glycine max
agcttctatagaaggttcgtttctaatttctctacaattgcatcacctctcaatgagctggtgaagaaaaatgtggcatttacctggggtgaaaaacaagagcaagcctttgctttgctcaaagaaaagcttactaaggcacctgttctagctctttttgacttttctaaaacttttgagctagaatgtgatgcctctggagtgggagttggagctgtattgttacaaggagggcaccctattgcttattttagtgaaaaacttcatagtgccaccctcaactaccc

SEQ ID NO: 11473 - DNA, 300 bp, Glycine max
agcttgtaatctattacacaaatactgtaatcgattaccagaggagattttcaaaaaatattctcaacagtcacatctttttatttggttcttgaatgggtatcaaaggcctatatatatgtgacttgagacacgaatttgctaagagttttcagaaagaaaaggtcttatcctcttaaaaagcaaaatcgttttatcctcttacaaattccttgcccaaaacacttgtgattcaataaggaattatttgagtgctcacattgttaaatctatctctttcaagagagatttcttcttctc

SEQ ID NO: 11474 - DNA, 393 bp, Glycine max
  unsure (1)..(393): unsure at all n locations
atttaataaaataataataattagttgtaggaattattaaatttagtatatacaaattgtttgttgaatgaattaaattgactntacccaaagttacttttaaaataacacaattaaatataaagtatatatataaaagacagtaaaatagaaattttatattatacctacaatgaatatatgaaacanaaaatgaaaatacgactctatgtatataaaanacagaaaataacgcaagaaaagagagcaaaaagaattcgtcaattgtngcaaaataaaaaagggatatttntgttatntaaataacaatagcttcaacatgtatgaaaatgctgtctcgaggcangacatgacaatngaacatgcanacaatccgatcatagaaacattgaa

SEQ ID NO: 11475 - DNA, 295 bp, Glycine max
agctttacaaagttttcaaacattaatgaataaaaaataacatattgaagttgctattaacagacaacgagacttggtgaaaagagaatataggattcgtttgataacaacaattggctgtatttgatttctattgaggcaaggattggcatttcgtggtaatgatgaataagttcattcaaaaaatcaaggtaatttccttgagcttatacattttttggccaatcataatgaaaagattgataaggttctaaaaaatgctcgtggaaatctcaaactagtggcacctaatatt

SEQ ID NO: 11476 - DNA, 284 bp, Glycine max
agctttgagcaaattcaaactacaataacttttgaatcgaatgtctgattgggtctcataagatattgagacgctcgtaattgaaaacagaaggtcttagaaaaatcaaatgacagtgggttctaactcggatgtcctattgagccctgtgatatatcaagacgcgcgaaattgaaaaccgaagctctgagaaaagtcaaacgacaattacttttaactcggatgtccgattgagtcccgcaatatatcgagacgctcgtaattgaaaacagaagctctgagca

SEQ ID NO: 11477 - DNA, 431 bp, Glycine max
  unsure (1)..(431): unsure at all n locations
nttatcactccacccaaatcttgccttcaagtttaccaattataacactgctgacaaccgcgtgaaagatgtacacccctcatacaatggtgtgttggaatcacgttctattgtatcatacagaggtgcatgcgcttgctcaaaagtctcttgtccaagatcacagatcatttcctctatacgctctccgctgtcttcgtgtaccgcctgagactgagaaacagttggaatgtcggccgattccccatgccatatccattttgtgtaattcggaatgatgccgtaacatatcagatgtgatcggatttcatcaactgactgtcgtctaccattaagacatttaacacatgggcaaaaataattgcccctcaaactttcggcattaagttgcgtaaattgtagaaattgttccaccccgttctcatactcgt

SEQ ID NO: 11478 - DNA, 433 bp, Glycine max
tcaagaaaaagatggcctcagcaaattccttatttccatattggaattctatcaatagacctccaatctttaatggagagggttaccacaactggaaaacccgaatgcaaatttttattgaggcaatagatctaaatatctgggaagccatagaaatagggccttatatacccaccacagtagaaagagtttcaatagatggtagttcatcaagtgaaagcataaccatagaaaaatctagagatagatggtctgaagaggatagaaaatgagtacaacacaacctaaaagccaaaaacataataacatctgccctaggaatggatgagtatttcagagtttcaaattgtaagagtgctaaggaaatgtgggacactcttcgattaacacatgaaggaactacagatgttaaaagatctaggataaatgcact

SEQ ID NO: 11479 - DNA, 428 bp, Glycine max
tgtatgcaactgggcccatcctcgcgattattctaattggtccatagaaacgccttgaaagcttggattgactcgttcccgacaccgtggtttaccgatacggtctcaacttgactaggacccattcattcacttggaactcatgatctctacgatgcccatccgcgatttccttcatgcgagcctgagccttctgaagtttttgtcgaagtagggcaaacatgtcctccctctgactgagcaattcatccactgccgccaccgtagaagtgcccgtcaagtactgtggaaaacttggtggtttgcggccaaaagtgatctcgaacggcgtcagccctgtggctgaatgtgtggacgtattatacaaccactctgcccacatcagaaaatggccccatgcgcttggccggcgatgcacgaacgctcgt

SEQ ID NO: 11480 - DNA, 405 bp, Glycine max
  unsure (1)..(405): unsure at all n locations
cgctggcttctgcagaccaagaaaaannatcttttttcaatatttcatttagnggntnggctatggtgttatatctacacacaaaccttctataatagcctaccaaacccaaaaatcctctcaactgtttgggggtttgagaaagaggccaattcctaactgctgccaccttagcagggtcagtagagactccctctcccatgataaaatgtgctaaatactccactctagtaatatcctaaagtacgcacttatatttcttggccaaccatgcatttgctctcatggtagacaagactgtttgtaaatgatgcaagtgatcctccatgctcttncttgtaataagaatgtcataaaaaagaccaacagaaacctcctcaagtattctcggaacaccgaattcat

SEQ ID NO: 11481 - DNA, 275 bp, Glycine max
  unsure (1)..(275): unsure at all n locations
ggggctgcgcgaacgcagccctttttaccaattgataaagangcacngccaaagaggagaccttaggggacacccatcccaatgcaatgaaagtcagcaacatatgccataagccttcttgatcacccatccaccccatccaggaaagtatatattaatcgaagctggttggaccgtatatatactgtcaaccactgaatgcatccatgtttcagtacgacgtgggactaacaattacaacgttgcagaactatcaatactgtggattgacacac

SEQ ID NO: 11482 - DNA, 401 bp, Glycine max
  unsure (1)..(401): unsure at all n locations
gcttccttcatcgtagttatccacgaagccgtaatatttattctggtccaaangccaaaagattttaattcttcggttcagtacccaatatgcatttacatcacctaaaaggattttataaaaatggcgcctcttcctggaatcacccttgtttttatattgtttcctaggcctcaaaattctgccagcagtatcagctgacgctgattctgaacctgactgagactttaaaccacggttaacaatactttgactagaggatccaaaaaagggcaaaccatttaaacctttcatagaaaatccagtacagcttggatcaaaccttgaagatagcatcctagctgcattctcctcaagattttcctcttcatcttgcaaatcgccaggtattntacaacttg

SEQ ID NO: 11483 - DNA, 426 bp, Glycine max
tggcttctgcagaccaagaaaaattatcttttttcattatgtcatttagtggttgggctatggtgttatatctacacacaaaccttctataatagcctaccaaacccaaaaatcctctcaactgtttgggggtttgagaaagaggccaattcctaactgctgccaccttagcagggtcagtagagactccctctccaatgataaaatgtcctaagtactccactcgagtaatcctaaagtagcacttagatttcttggccaaccatgcatttgctctcatggtagacaagactgtttgtaaatgatgcaagtgatcctccatgctcttcctgtaaataagaatgtcataaaaaagaccaacagaaacctcctcaagtattctcggaacaccgaattcattaagccttgaaatgtggcaggagcatt

SEQ ID NO: 11484 - DNA, 433 bp, Glycine max
  unsure (1)..(433): unsure at all n locations
cttgagtctataggttatgaggtgaagtttgaggctactattgttggatgttgcctctgtttaatgacaagcaattacaataccattggagagtttgatgttaaagaggaagaggtaaaggaaggaagggaaagtggtattgcagtttacagagttgtggagtcatacctgctagagaacccacaagtgtatgcttaatcatctatttatttattgtgtcatgtatcataagatatacaaacatattcaaatttttaatagcagtgtgcaaccaaatatagggttgtttagaatggttgcaaagacttgaattccttaataagtccttattgtatgaacagcaaaaaaatggcgagtggtttggcaaaaatatttgtattttggtagtaacaaagagtccaagagtnagttgttttacctttacttcatgaat

SEQ ID NO: 11485 - DNA, 416 bp, Glycine max
  unsure (1)..(416): unsure at all n locations
tctaaactttatacaagtatgaagctctgataccactttttggacaagtggcctcagatatcttaagaagggggggttgaattaagatattaaaacttaattccccaattaaaattctatttcactttctattcaagttataaattcccttaataatgaatttcttaaatattgattcaaataaaacaatttgaatatgaatataaaacaataataaataaatgagtttaagagaagagaaaatgcaaactcagatttatactggttcggccacacccttgtgcctatgtccagtcctcaagctacccgcttgagagttccactatcttgtaaattccttttacaagttctaaacacacaaggacaacccttcctttgtgtttagaattctttcacaacaagagaccctcngtctc

SEQ ID NO: 11486 - DNA, 426 bp, Glycine max
  unsure (1)..(426): unsure at all n locations
tgtcttcaacaaacaaatcaaaatcaattttctgatcttcataacctagctccggcttcctcttccccatatcaactatgcagcttgcggtcaacatgaatggccttcccaatattacagggatgtcagtatcttcagagatatccattaccacaaagtctgtcgggaagataaaatgttttactctgaccaacacatcttcaattactccatatggcctggtaatggagtgatcaactaattgtaaagtcatttgagtgagcattatttccaactctcccaatcttttgcacatggagagtgacatcaaattgatactggatcccaggtcaataagagcttttcccacattgacttctccaattgaacaaggaatagttacactcccaggatctttatgcttgggtggaaggatctttnggatca

SEQ ID NO: 11487 - DNA, 420 bp, Glycine max
tgtaggtaaactagatgccttggttaatctggtaacctatctggccatgaataaaaaattttcacctgtcgccagactctatggtttatgctcctctattgaccaccacacagacctttgcccttctgtgcaacaatctgaagcaattgaacaacctgaagcttatgctgcaaacatctacaatagacctcctcaacctcagcagcaaaatcagccacaacaaaacaattatgacctctccagcaacaggtacaatcccgggtggaggaatcatcccaaccttagatggtcgaatccttcacaacaacagcaacaacaacaatagccttattttcaaaatgctgctggcccaagcagacatacgttcctccaccaatccagcagcaacaacaacaacaacaaccccagaaacaacaaaca

SEQ ID NO: 11488 - DNA, 424 bp, Glycine max
  unsure (1)..(424): unsure at all n locations
ntactgtgataataaatcatccatagttattgctaacttcctcatccaacatgatcgtacaaaacatgtgaaaattaacaagcatctcatcaaagagaagattgaagatggtattattgtctttccttttgtaaaatcagaacaacaacttgctaatatgttgactaaggcaatatcatctaaggcccttagtagttctcttgataagttgggaatgtgtgacattcatgcaccaacttgagagagagtgttagaatccattaactgaagggattagctatgatttgaatttaaattataattgatctaaatccctgtatattttctcctnttttatttgtgattntattttgatattttgtactaataatcatggaaaaatgatagaaaggattatgtatttattcattgtctcatattaatg

SEQ ID NO: 11489 - DNA, 426 bp, Glycine max
  unsure (1)..(426): unsure at all n locations
ctaataacatatatttattttcaagtttttaaaatcattaacattnngataatcaaagaacacgagtaaagaagtctcacattatgtggaactaagaaaactaaagaacataaaaataagaaaattataaatttaatgattaaaattttttccttaattgttgagaaaactcaagtctcatgtcagttaaaaataaaatcaaattaaaatatataagtgaagaacaattctcacactaatttttaggattgaattagacctaaattcatattctaagattctaagattctaagattgtgttaatgataatgtccatactttttagagtcaagttatacttaaactcacattctaagattaatataatctcaaatttaattacgcgtttttttcgtatntattgatagaaatcttaaaaattgaaaa

SEQ ID NO: 11490 - DNA, 396 bp, Glycine max
  unsure (1)..(396): unsure at all n locations
tagttcctagcttagctcttagggtgtcnctaagtggttaaggaacttagcatctccatctgacacaatggtcctaggtaaaccatggagtctcacaacttccctgaaaaagagttttgagatgtgagaagcatcatctaccttgtggcatggtataaagtgtgccatcttgctaaacctatccaccactacaaagatagagtctacacctctttgggttctaggaagcccaaggacaaagtccatactaatgtctaccaaaggtgcagatgggatggataagggtgttgatgtagctccatatggagcttgtaggccttggatatactttatcaatggagtcctttgcttcttgaagatcaatggcagccgaatggagatggaagatagatgatt

SEQ ID NO: 11491 - DNA, 432 bp, Glycine max
  unsure (1)..(432): unsure at all n locations
ttaatggaagttaagaaaatgaaattgcgttgatactcttaattgattattaggnttttgggctggttgaggacatcaatactatatttggaaagacccaaaagaacttgacaagtaaaaatttcatatggaagaagagatcgatatttttttatattccatactagtatgatctagatgttagacatagtattgatcttatgaatatggagaaaaatgtgtgacagtgtaatcgacatgcttcttaacactaaagggaggacaaaggatggtttaaatactcctcaatatctagctgagatgtgtatacgtgaccagttacgtccaaggtctgatggtaagaaaatatattagcctccagcatgtcatactttgtttataaatgagaagaacaagttttatcagtgtctgtgatgtgttaaagtaccacag

SEQ ID NO: 11492 - DNA, 430 bp, Glycine max
accagctatgactgaactagaatgaggggataaggatagtctttgacctttgtgagttgaattgatccgacgttcaatattttatccactaaatattaatataatttatggcgtaaatacttgagttgagaatcaattatttgagagatgaagtagtcagacaatccaaataattaagagacattatttttctgtcatgagcatctttaatgttaaacattagtatatcttcgctattaaacatcattagaccaatagagttgcctaactttatttttatgagctctattatataacatctttaataaatttaacaacttttttcactttttaataatgtaactcttcatatctaacttaaaatagatctaataaattattgtagatgtttatatttttttaataaggaattattttaatattaaaaaca

SEQ ID NO: 11493 - DNA, 340 bp, Glycine max
  unsure (1)..(340): unsure at all n locations
tcaatgttggatgaggtgatagaatatttgaagcagtttcatagcacagttgcagatgataaatagaatcaacatgtcatcgatgatgctgccattgaccatgcagcaacagcttcaaatgtcgatgatgtctccaatgggcatgggattagggatgggtatggggatgggtatgggaatggggatggatatgaactncatgaaccgngctcacatncctggcatccctccagtcctccacccttctgccttcatgcccatggcagcctcgtgggatgccgcggccgcatctggtggcggtgaccgacttctatggactcccgtcaacgtgatgcctgac

SEQ ID NO: 11494 - DNA, 427 bp, Glycine max
tgtatttttctcacatataggacatgtgttatggcctttgacactataaccacttaaatttccatatgctggatagtcattgatggtacaaaaaaccattgcacgcaacctaaaggtctctcgcagattcccatcccacatatctaccctgtgttcccaattttttgtcaagtcttctatcaacagagtcaagtagacgtcaatatcattccctggatgtcttagatccgctatcatcatgcaaagcattatgtacttttgcttcatgcacaacgaaggaggaaggttgtaaatcattagcaaaacaggccatgaactgtgattgctgcttaagttaccaaatggattcattccatcgaaagcaagaccaagccttagatttcttggctcattcctaaaggtctctcgcagattcccatcccacata

SEQ ID NO: 11495 - DNA, 318 bp, Glycine max
  unsure (1)..(318): unsure at all n locations
ntagtgagaagaaagaatagtttagttttataggaccatgatcaccacctaggacttgtcatggggaaaaaacctgaaggagacaaaggaaacagccctggcgaaagtggaggctgcggcccggagcctaaaatccccgactgtgcaaagggtgacaaagggaaatggggagtaaaacgagatggaaactgaatgccaggggacaacagtggtggataaccagactgaggggagagaaaattcatgtagccatttggtgaatgcaagagaaactgagaggttggagaaggtaaggtaaatatgacgccatttggttgt

SEQ ID NO: 11496 - DNA, 392 bp, Glycine max
  unsure (1)..(392): unsure at all n locations
atgagtatgtctgcgaatcggacatcctgtgaaaagntatgatcntttgaatttctcgagtgcttccgttgtttaatttcaagcgtctcgatattttatgtcctcaaatcagacatcggagcgaaatgttatgaccattcgaatntgtcgagagcttccgtttttcaatttcgagcgtctagatgagttatgtcaccgaatcagacatctgagtgaaatggtatgaccattctaatttgtcgagagcttccgttgttcaatntcgagcgtctagatgagttatgtcaccgaatcggacatccgttgaaaaagttatgaccattcggctttgtcgagagcttccgtggttcaatttcgagcgtctcgatatattatgctcccgaatcggacat

SEQ ID NO: 11497 - DNA, 455 bp, Glycine max
  unsure (1)..(455): unsure at all n locations
cactntgattctctggtttgtagtacagtaactacacttctccttcccttngaacttctcttagaagaaaaagctntatcttgaaatgcttagttttgccatgaaacactggatcattagcaattgagattgcagcctggttgtccacaaaaatatgtgtgctctcttcttggttcatatgcanaattgtcataattctcttgatccanagagcttgattcattgcagcaacagcagctacatactctgcttctgcagttgattgagctacaacttcttgctttntagaacaccaagaaaagactccagaaccaaaggaaaaacaataaccagatgtgcttctcatgtcatcaatacaacctgcccagtcactatcagaatatccatggagcttanattatgagaatgagagtacatataccatagtctaaagtgcgtcaacatatctaataact

SEQ ID NO: 11498 - DNA, 366 bp, Glycine max
  unsure (1)..(366): unsure at all n locations
atacacggatgtccggttgagtcccgtaacatatcgagacgctcaanatntagatccgaagctctggcaaaatttaattgacaataactttatacacggatgtccggttgagtcctataatatatggagacgctgcaaatngaaaacggaagctcataggaaattcaaacgacaataactctntactcggatgttcgattgaatcgggtaatatatcgagacgctcaaaattgagactagcagctctgagcaacatttaatgacaataactctatacacggatgtccggttgagtcccgtattatatcgagacgctctcaatngagaatggaactcttagaaaattaaaccacaataacttttact

SEQ ID NO: 11499 - DNA, 399 bp, Glycine max
  unsure (1)..(399): unsure at all n locations
gctcacctccttgagaagcttgcttaagagaattcctaaagaagctagagcttagcaacacacacatctctaatagctaagctcacctccttgagatgagaagctagagcttagctacacnacccctataatagctaagctcacccccgtgacacaaaaaagatgaaaatacaaaaagaaaagtccttactacagagactactcaaaatgccccgaaatacaaggctaanaccctatactactagaatggccaaaatacaaggcccacacgaaggcaaacctattctaatattacaaagataagcggctcatacttagcccatgggctanaatataccctaaggctcatggagaacctanggccttcctttgatctctagcccaatctacttggagtct

SEQ ID NO: 11500 - DNA, 305 bp, Glycine max
  unsure (1)..(305): unsure at all n locations
atctcgacatattatatgcccgaatctgacatccgagtgaaaagctatgaccatttgaatttctcgagagctctcgtngttcaatttcaagcgtcccgacatattatgcgcccgaatcggacatccgtgtgaaaacttatgaccctttgaatatctggagaacttccgctgttcatttcttagcgtctctatatgtgatgcgcctgaatcggacatccgtgtgaaaagttatgaccatatgaatctctcgagagctctcgatgtgtaatttcgagcgtctctatatattataagcctgaatccga

SEQ ID NO: 11501 - DNA, 362 bp, Glycine max
cctcaaggtggagcatataaattgtgctccaagcttggaacatataaagtggatccgaggacctctcaaggacttggtcaggatgtctacaagctggtcgttggagataataaattcggtactgatttctttggaccgtagcttttcccacacaaaatggaatcaatctctatggtgttagctctctcatgaaatacacgattagaagcgatgtgaagagctgtctgattatcacaatacaacttcatctattgaacaccacaattttaattcttgaagaagttgtttaatccacaccaattcactagtaacaagagccatagctctatattctacttctgcactcgatcaggcaacaacac

SEQ ID NO: 11502 - DNA, 445 bp, Glycine max
  unsure (1)..(445): unsure at all n locations
acttaattacaagatattcttatgcatagcagttatcagtgttcaaaactaaacctaattattagtaaattgctaaatcaatccaaaaaagattgaataccgcaatacccaaaaatctcataaagtgggcattcttttgctatctcatttgttctttggatcttgctataaaaaattgaaccaaactgaataaaccacataatttaattatattacattttattgtggtaattaataataatttattactcttcctttggttataaccaagatgcatatttcactcttatatgttaaaaaagaatgtactaatattgttaaaaatagtattaaatatcaagtgaagcacatattactataatgttaaacacagagagttggtaatatcattntatattagtgctacactgaagtganataacaatctttactaatatatatttac

SEQ ID NO: 11503 - DNA, 372 bp, Glycine max
  unsure (1)..(372): unsure at all n locations
ctaagctaagctccttcaactgcacaaggctcttaatattngaagagtattcttgtggaaccttcacccgacgaagacactggcaaaaacttatcttctctttattggacaaagtatggcaggctggnggcaaagtaaatttcttcccatcagaccttggatgcaactgtgctcttatacccatatcagctagatcttgacgggtattcaagccatccttcgtcttgccttgaatgttaaggagcgtcccaatcacactgtcacanaacattttctccacatgcataacatcaatacaatgtctaacgtcaagatcacaccagtacggaagatcaaagaanatggacctcttcttccatatgcaagtctgac

SEQ ID NO: 11504 - DNA, 382 bp, Glycine max
  unsure (1)..(382): unsure at all n locations
taatgtatctatatgtacatttattaatataaattntatatataaaagaaaagttaccataataaataattgtttttattaaatcaaataagagaccaataaaaaatttatccgaaaacacattanagaattaaattattgggtgaataattntttttatttcattgctataataatataaatatatttttatgaataattttatataaataaaattaatgtttaaaataaatntgtttagacaagttattatntaattttntaattatcatcttcctacttatgtaaactggtgatgaatatctcttacctacatanaatttgaatttatntatacattgatatctatatatgtaaagtggttaatatataaagtatatat

SEQ ID NO: 11505 - DNA, 393 bp, Glycine max
  unsure (1)..(393): unsure at all n locations
ttaaagatggctagatttgttaaacatatgcacttagtctatgaaggaaagctggagatgctgcacaagatgtccaacgttatgtcaaagaataatatcgggctgcacaatgcacaaagcaagataaaatgtcaaatgaagaattgaagcttgctgattcacgatgtcggatacaatgtccaggacatcctgcctgaaaatactggaattgctaaaagcattgaagctgcaggatccacgatgtcngattcaatgttcatgacatcctgcccgaaaatactggagttgctaaaagcacttgagttgcaggatccacaatgtcggattctatgtccaggacatctngcccgagaatactggacatattaatctgttatatctttacagattatt

SEQ ID NO: 11506 - DNA, 362 bp, Glycine max
  unsure (1)..(362): unsure at all n locations
atactctcatgtgatcaactcttggcttcactccactccatgcttcttgtggtggttgatctttgacattctnntgtggggagcgattggacaaataaacggcacatgcaacagcttcngcccanaattcctttggcatanttttagccttcaacatacatctagtcatattaagaatagttctattttttctctccgctaccccattttgntgtggagatctaggaaccgttagagggcgacgaatcccatatntttcacaaaattcattanattcttttgatgtgaattcgccacctctatcggatcttagagctnntgatacataaccactcttcttttcacaagagctcttaaaattt

SEQ ID NO: 11507 - DNA, 406 bp, Glycine max
  unsure (1)..(406): unsure at all n locations
tcttaggtgttatagatggaagtctcatggtggtacatctgttcaaaacatatgctgntgtggtggccgcttctccccggtagcaattnggtagtcctttccctttaagcatacacctagccatatctaatagggttctatatttactttctaccaagccattgtgtttaagtgtataaggagctattacctcatgttcaattcctttagtttcacaaaattctttgaactccttagagttatattcacccnctccatctgttctaaggatttntagcttcaattcagattgtctctcaactaatttgagagcgagagaatattgcacctttctctttcaatagatatatcaaaatactcttggttaattcatccacacaagtcaggaaatactgatgaggacatg

SEQ ID NO: 11508 - DNA, 404 bp, Glycine max
  unsure (1)..(404): unsure at all n locations
tccattntcattntcaagcatctcgatatattacgggactcaatcgaccatccgagtcaaaacttattgtcgtttgaaattgctcaaagcttctgtattcaatttatggcatctcgatatattaagggactctatcgaacatttgaggaaaaagttattgtcatttgaatttgcttggaacatctgttttcaatatcgagcgtctggatatatgatgggactcaatcggacatccgatgttaaaggaattgtcgtctgaattctctcagagtttcagttttcaatctcatgtatctcgatatacttaagacttaatcggacttccgagtaaacatttattgtcgtttgaattagctcagaacttcagtaattcatattaagccgctctgattaataaatgactg

SEQ ID NO: 11509 - DNA, 401 bp, Glycine max
tggacatcgcttcattttggtcgccatggattacttcaccaaatgggttgaagcggcttcatacgccagtgtgactaggagtgtggtggttaggttcatcaagaaaaagataatttgctggtatggtttgcctacgaagattatcactgataatgccacctatctgaacaataaaatgatgaaggaaatgtgtgaggatttcaagatccaacaccataattctatgccttgcaggcccaagatgaatggggcagatgaggctgctaataagaacatcaagaaaatagttcagaagatgatcgtgtcatacaaggattggcacaagatgctccctcttgcactacatggttattgaacctcgatacgcacatctactgtggcaaccccgttctctttggtgt

SEQ ID NO: 11510 - DNA, 352 bp, Glycine max
  unsure (1)..(352): unsure at all n locations
acatacctctctaatagctaagctcacctccttgagatgagaagctagaacttagctacacacccnctataatagctaagctcacccncatgacannaaaacatgaagatacaaaanagagtccttactacaaagactactcaaaatgccccgatatacaaggctaaaaccctatactactagaatggccaanatacaaggcccaaaagaaggaaaaacatattctaatatttacaaagataagcgggctcatacttagcccatgggctcgaaatctaccctaaggctcatgagaaccctatggcctaccctnggatctctagcccaatctacttggagtcttctacccaat

SEQ ID NO: 11511 - DNA, 364 bp, Glycine max
  unsure (1)..(364): unsure at all n locations
ttcattacaagatagcagaattcaccaataacaacatggatatgaagttgaatatttcaccaattgttttatacttattgttgactatatctggtacagctcaatcagttggcatcgatataaaaaaatttggcggaataccagatgcagatataacacaggtaacatctggttgaattcacttttaaaaaggttgaagattctattgattattattaattaccactattgtgttcgatttgaatatatatatatatattctcaaggctttcactgatgctctgaatgtagcatgtgcattaacaagngcatgcaaaattgtaattccaaatgggacatacaagatgaaagtcattgatgtaaa

SEQ ID NO: 11512 - DNA, 444 bp, Glycine max
  unsure (1)..(444): unsure at all n locations
gacaaagaaattaaagatattcaagatggatgatcatagacagtctctagagtcttaggaatggtatattaaataggaagggaattcctaattgaagtagcaaaaggtttggccaagaaatttaagttaaaaagtctttntcaagagatttactctctggtaatcgattaccagaggatgtaattgattaccagtggccaaaaatgatttacaacagctattaaaatttgaattcaaaattngcactgtgtaatcgattacacatatatggtaatcgattaccagcagttattgaacgttttatattcaaatttaaagcttgtaatcgattacacacatactataatcgattaccagaggagatnttcaganaatattgtcaacagtcacatcttttcatttggttcttgaatggccatcanaggcctatatatatgtgacttg

SEQ ID NO: 11513 - DNA, 346 bp, Glycine max
tctcggtatattatgcacctgaatcagacctccgggtgacatgttatgactcattgaatttctcgagagcttccgttgttcaatttctagcgtctcgatatcttatgcgcttgaatcggacctccgagtgaaaagttatgaccatatgaatcgctcaatagctttcactgttcaatttctagcgtctcgatatgatatacgcctgaatcggacctccaagtgaaaagttgtgaccatttgaagttctcgagagcttccgttgttcaacttagagcgtctttatattttatgcgcgtgaatcagacctccgagtgaaaagttatgaccattcgaatatctcgagagc

SEQ ID NO: 11514 - DNA, 373 bp, Glycine max
  unsure (1)..(373): unsure at all n locations
gtcacctgcngcatgcagctcttctggccagcctgaacaagacgttanagggttattatggaatgtgtcacatgccancagaataagaatagtcacaggcgcccagctggtgtactgcaacctttaccgacatcagagggcgtgtgggaagacctctctatggacttcatcacccacttgccaacctccaatgggttcactgtcatcctagttgtggntgatcgtgtntcgaaaggagtgcatctatgtgctctttccaccggattcacggcgttcaaagtcgcaagcctattcctcgatatcatatgccaactacatgggttccgcaagagcatcgtgtctgaccgggaccctatcttcatgagcaagttct

SEQ ID NO: 11515 - DNA, 364 bp, Glycine max
  unsure (1)..(364): unsure at all n locations
agatcactgtgtaactcttcaagatgcaattgaagganaaggaagaaagcaaggaaattagagaagtccacgagaccgaggtagaggtcattgtcacagtcgaggacaggttggatgtggcaatagtgaaagaggttcaaatttcatcaacaacagttgcgagataggaagaaattcaacaagagaacgtggaagaggctatgcaagcataaggtatgataaatctcaaactcaatgctataattgtcaaaagattggccactatgcttctaaatgtagattcgccaagaatagagttgaggaggagactaactatgtggagcaaanagacgagaagnttgaaacaatgctcctagcatgtgga

SEQ ID NO: 11516 - DNA, 416 bp, Glycine max
  unsure (1)..(416): unsure at all n locations
acatgtatctcgaacactataatctatgattaaaacatataacntctgaatataaattcatacatgcatatatgtcacaacacaaagtttccttgggtaatctgagttgaaatctttagggtgtacaactctaacttattttaattctacatcatataattagagactntaattagtcaccaactaattaaactaaaattctacttgtcaaaccagtatataagttattacaaaaatggtctccactttacactcttatgagttcattacnncctttctaattcaatggaatctagatcaccattaatcaaccttaattagtcctcagtaaattctaagtctacttacattaatttataatgttctttcacgcgtctaaattctatttctagaccaagatccaattattaacatct

SEQ ID NO: 11517 - DNA, 391 bp, Glycine max
  unsure (1)..(391): unsure at all n locations
cttctagaattgctngttagcatctcatttttaatgtattgcagagggggtatgatatgatatnttttcatgatatcatatttgaaggatatatatgggaattatctaaagctaattatgtcatgttggataactggattttttaaatgtagttatttttgtgtaaaataagaatgatattggtttgaacgaatgcagtatatgcagcatgatgtgctacatgtggacgattggcatgaacgatttttaaaaatattgtttaagcatattatatatagcagtgcatattatgctaatattcatcttgactcacaattaaattctatattcacaaaaataaaaattgtctgtatgtcaacaatgtagctggataacgtaatattacattata

SEQ ID NO: 11518 - DNA, 424 bp, Glycine max
  unsure (1)..(424): unsure at all n locations
aatatttttaaaggcttgaatattattgagtataaaggactatgaaattctatagtttttattgaatggaccttagatgtaacaaatactattgtttgggtgcctgtcaagtactagttacaatgtagtgtcatatcattacttaattgacgataaagattcaacacaaggtttgatatatcaagaaaataatgttacccaatcatttattgaagacccaaaataaanagattgtcatctatcaatgaattcaaacatatttatatctttcttttattaacaagaagttcacgtgtgaattattaataagctcttattaataacattatattgataggngcttattaacctgttacctaatatttttagaatttgaaactctttacccaatttaatttgatctagcacaaaatgtcacacaact

SEQ ID NO: 11519 - DNA, 337 bp, Glycine max
  unsure (1)..(337): unsure at all n locations
ctgcagcttacctatcacagctgcttanaagctctgctncctatggttcttaataactcgctattatactgtcctgaacagccatatagactcaaatatataagtgaattgaggcacaatatgctgttgggtaagcttactagactnttacagtcttccaaaatcaaatattcaagctctcttagaagaccgacggatggattgatatgcttgagatgtgtacatccttcaagagttagatgttgaagatttacgtcctctntgaaatgtggtaactcaacaagacttgtgcagtctttcaaattcaaataagccagctttcttagaagaccgatgg

SEQ ID NO: 11520 - DNA, 465 bp, Glycine max
  unsure (1)..(465): unsure at all n locations
agctatactgcanacatctacaatagacctcctcaacctcagcagttaaatcatccactacagaacaaatatgacctctccagcaacaggtacaatcctaggtggaggaatcatccaaaccttatatggtcgaatccttcacaacaacaacaacaacaacaacaaccttatttttagaatgttgctggcccaagcagaccatatgttcctccaccaatccaacaacaacaacaacaacaacaacaacaaccctagaaatagcaaatagttgaggctcctccgcaaccttcccttgaagaacttgtgaggcaaatgactatgcaaaacatgcagtttcaacaagagaccagaagcctcattcagagcttaactaatcagatgggacgaattgctacacagttaaatcaacaacaattccaaaattctgacagattaccttctcaatctgtctagaatcccaaaata

SEQ ID NO: 11521 - DNA, 301 bp, Glycine max
gtttcttgagagatcaataaaggaaagggatgtggaagatgaaatgtcatctggaattccaccagaaagactattgttagccaactctaacctttgaagcattccaagcttcccaagacccacaggaaccgtcccagaaagaaaattgttctgaattctaacacgaactagtgaaggacacattgataggcttgatggaattggaccagtgaatgcattgttgaatagtataagcatggtgagaatgccctggctgcaaagagtttctggaatctctccagagagtgaattggatgataca

SEQ ID NO: 11522 - DNA, 452 bp, Glycine max
  unsure (1)..(452): unsure at all n locations
tatctactacgcagctngtagttacatgaatggccgaccaagaatgagaggaatatatgcatcctcttctatgtctatcacaacaaaatcagttgggaatataaggtgtttcaccttcactaaaacatcttcaatcactccatacggtcttgtgatggatcgatttgccaactaaagggtcatgcgtgtaggcattatctcaagctctccaagtcgccggcacatgaagagaggcattagattgatactagctcccaaatctatgagagcttttcctatagcaacctcaccaatagaacatgatattgtgacaactccaggatctntgtgcttatgaggaaaaatgcattgaatcacagcactacaattgccttccaccataattcaatcattgtggatgtaccggttcttcttcgttaacatatcttttaaaaatatgcatagagtgacat

SEQ ID NO: 11523 - DNA, 378 bp, Glycine max
  unsure (1)..(378): unsure at all n locations
tacctcagctggtntcataagatcatgtntactccgtcgcacgttgagcaagttttgcacagcttgcccctctatggacatcctcacccgactagctcttactctggcctgaactcgaaccaatgcctgcatgcaccttaatgtccccgctgtctgcttcctcacctgtctccccccgaacaagtgcttgaatcctcaccactgccttcaatgccctcaaagcccttcttgcctgcaatcaccacacaagtgatgtcgaaatataaggttggtctagtggtaaaggccgaacgcataatgaaaaggtggagaggccatatgttagaaactaacaatcctagcaattaatatttgtctataaaaaaaaatagtgaatgt

SEQ ID NO: 11524 - DNA, 416 bp, Glycine max
  unsure (1)..(416): unsure at all n locations
cttagctcctaaaaatttatattgtttagttttttatttgattccagtttggcctcaattttaaatcagatattttgtctctctattttaaaacataaataattntaattcttgtgtgagttaaccatctcaagacaaatggttgactttgacgtgatatgaaatctatgtacgcaatttacataatacttattgtaaaaaagatttaataataataaatatagaaaaatatcttaatggaaatncaactaataatcctttataaataatgagagcagtcaataagatatgtgtcttagttagttaattacattaatattatctnttatgtattattatgtaagattatttcttttcaaatatcaaaattatattctaacaatattaatatataatatttttatatatgtcatata

SEQ ID NO: 11525 - DNA, 323 bp, Glycine max
  unsure (1)..(323): unsure at all n locations
tgacattccattgtgaattgatcactntgcatttctcaaagaaatcagcgattntgttgcttgattcctctccattgagggggtcaatgtggaagccggagaccccatcaacaataatntctgctggacctccttggttggtggcaaaagtgggcaagccacagttcattgcttcaatgacagttaatccaaatgcttcatacanagcangctgcacaaaggctcctcttgtgtcagcgatgcaacggtagagctctccattgcgatacctattcgtctgtgcagcaatccatctaaattgacccttgagttggtacttatca

SEQ ID NO: 11526 - DNA, 288 bp, Glycine max
  unsure (1)..(288): unsure at all n locations
actatattatctacacaaaaggtacacttctctatattngcatagagggtgtttttcctaaggactgaaagaacttgtctgagatgtcctaagtgatcatctatgctcctactatacactataatatcatcaaaataaacaactacaaatctacctatganatcccttaaacatgatgcataagctcataaggtgcttggtgcatagtgagccaaaagcatactaccattatacaaccaacttgtctgaacagtttcactctaccttttatctgattgtatacccttt

SEQ ID NO: 11527 - DNA, 371 bp, Glycine max
  unsure (1)..(371): unsure at all n locations
ctaatatgcttctcagntcaagaaaaccatggttacattcatcattgactttnggacaaggaatgctaccattactttctgcatgccacccagatcttgaccactcacgaactacagtctcagcaacagcatttggttcattntgttcaacagcatatggttcattgtgttatacacttatattatcctcaccatgcaggtaatcacgaccctgacagacaaactccaacataattggatctgcaccacctacaagctggccagttcgaagctcgcgacaacagatgagacanaggtcgaaagagcattntgtacagcttctgtggtaatcaaatattgacgttttgcagttgtcactacaagagagagcg

SEQ ID NO: 11528 - DNA, 260 bp, Glycine max
  unsure (1)..(260): unsure at all n locations
tagtgttgccatgttttcaaagcccgtactaaggcatacaactccttatcataagttgaatagttaagggtaggaccacttaacttttcactaaaataagcaattggatggccttcttgcatcaacacagccccaatcccaacattngaagcatcacactcaatttcaaaagatntttgaaagtttggcaacgcaagtatggnggcattagttagcttttgcttaagaacattgaaagcttcttcttgtttctctcccca

SEQ ID NO: 11529 - DNA, 369 bp, Glycine max
  unsure (1)..(369): unsure at all n locations
ctataaatagacctcccatctttaatggagtgggttaccattactagaaaacccgcatgcaaatttttatagagggcaatagatttaaatattttggaagccatagaacaaggaccttatgttccctctataatagctggaagtgcaacaatagaaaaacctagagcagattggactgaggaagaaagaagattagtacaatataatttaaaggccaaaaatattattacatctgccttaagaatagatgaatactntagggtttcanaatgtaaaagtgctaaggatatgagggatacactacaagtaacacatgaaggcacaacagaatgtaaaagatctangataaatactntaactcgtgagtat

SEQ ID NO: 11530 - DNA, 348 bp, Glycine max
  unsure (1)..(348): unsure at all n locations
acatatatgaataattaaaaaacaataaaacacaataccaaaagtaagtacataccactagtcatatatcattaaagtaattaagtttaaaacacataatcataaacaaccaagagcaagtcaatataatcatcatgttcagtcatactaagcaagtattaaaagaaatactaagtattcaaatttcataaaaacatagccaaatacaaggcttaanaacaaaatataattataatctaaatctattatcagagaatcaaaacttaattctaagtaacaaanattagttatgaacacatacatggtaactcattacttatctcaattattttagcatatcaatataat

SEQ ID NO: 11531 - DNA, 235 bp, Glycine max
  unsure (1)..(235): unsure at all n locations
atctccttgataggggccaaatgggtggactcagaatcgccatgcatagagttgtcaggctctgagtctgaggtgtaatctattcatgcagaactaataggtcatataaatctctacataatgaagtaaaatggaaattctaccacaacaaaattacaaataataaaatgatgctagagaaatntaaggaggttgatacttnttgaatcanaattgatatagattgaccatacta

SEQ ID NO: 11532 - DNA, 337 bp, Glycine max
  unsure (1)..(337): unsure at all n locations
gattccaacagtaaccttaatgccgcttcattataaagtgttaataaaacattaaaacacacacacaaaccacaatacaaaaactatattacctgccatgcaaatcgttttccattcatatcaatctcaaaatctgtcaaaaagtgatacaagtaattctagaaactctataagatatagcaaaatatgtcaataacagacaagtgatctcaccagcagggtagaattgaagaataggtgatgaaggatcaatcatcaaatccctatattnttcaggaagtgcacttgaactgtaacaagaacttaaccagcatcagcacaggatgcatgatataat

SEQ ID NO: 11533 - DNA, 428 bp, Glycine max
  unsure (1)..(428): unsure at all n locations
actgagatgcagctgtagatgcttaaaaacctggatttgtanatttttcagctcagacgaaagancccaatcagagntggattcagacctaataatgactagcctgacatactttatttttacttctaatatcaaggaaattatattacataatgtataaaacataaccaaattacaaaacatagttttcaaaatatattaaaaataactaccatacgaaaactactttacatgtgttagtttgtacattattttttttgtataggatgttctacttgaggtaattatatttgtgtgggtaaatatattggaccatcttgttaanaaaaattataatatagaataagtgttgtttagaagaatacagtttaataaacagataagatcggtttattaaaatacacaatatattattttttaatagaaac

SEQ ID NO: 11534 - DNA, 515 bp, Glycine max
  unsure (1)..(515): unsure at all n locations
atatacctatcaatcattatcccactttttttttcttcttcanaatatctaaatcaatttcccgagttggatatggaatgaatgaataacgtcaacctgcaaatgaagaacttatacaaatgtagcatacatttgaaataattaatatcaaagtattttacattgcatgtaactataattaattaattaattaaattatcatcatgataaaaaaaacatataactggtttttaaaaatatattaaatgaaagctgaaacataataaaaatatagaactcttaattaaaaatctattatttatgatttttcgcttgaaaatactgataccaataanaaagtatagcacacatagctaagaaagatagttgactacaatctccaatgaaaagctagttagttacacgtacacaccatgaagatgcatatatatatacttcattccacgactactactttaccggctaaaatattatctaataataacctaatactctactatagatcttctactgta

SEQ ID NO: 11535 - DNA, 229 bp, Glycine max
  unsure (1)..(229): unsure at all n locations
tcaacctaacattgtggaacttaagggtgcatatgangacanacaatcggtgcatttggtcatggaactatgtgcgggtggtgagctttttgatcgtataattgctgagggacattacactgaacgtgccgcggtttcgttgtaacaaccataatgcagantattcacgctttccactccatgggtgtcattcatagagatcttaagcccgaatattcctcatgttgaa

SEQ ID NO: 11536 - DNA, 338 bp, Glycine max
  unsure (1)..(338): unsure at all n locations
tttcccacaactctcataaatgggagagaaatgttcatctaaagcatacaagtccctaatattatcaaatccttaaaattgagctcctagggagcaaaacaatgtgtgtctcctagagagggcatcagctaccacatttgtttttccctttttgtatttgataacatatggaaatngctctaggtactctacaccatttgcatgcctcatgtttaacttgctntgccctctaatgtacttaagtgattgatgatcactatgaatgacaaattccttggaaacaaggtaatgttcccaagtttggagggctcttattaaggcataaagctctatatcat

SEQ ID NO: 11537 - DNA, 369 bp, Glycine max
  unsure (1)..(369): unsure at all n locations
tgaaagtgagtgagacatccaaaanacaaagaaaacccatcaatttgaagccaaaaattacacatagaatgacattttctcaaagaaaaccaaatgcgatatgcagacagtacctcataacagcgacgaatatgaagtttctttagattcctacagccactagctatgccacacatggcttcatctccaatgcttgaacaatctaccaattgaagtgcttgcaagaaattgcatccctgtccaacctggacaagaccagcatcaccaattctttggcagtaaagcaatgctaactcatagagatgtctgtgcaatatacagctaagattagcatcactaatgaaagtgagctaaatattcaaatacatg

SEQ ID NO: 11538 - DNA, 308 bp, Glycine max
ccttcttttctcatgtgcacccttatcctatctttatgttcgaagacaaccttctttctccctttggtggcttggttagcataacttttatttctactctcaatttgatttttcactctctcatgaaacttcttcacatagtccgcctttgcttgagcttctttatacttaaaaacagaaacattatgcataggcaaaagatcaagaggagttagtgggttaaaaccataaacaacttcaaaaggagaacaattagtggtgctatgaacaactctattgtaagcaaaatcaacatggaggtaaacaac

SEQ ID NO: 11539 - DNA, 316 bp, Glycine max
  unsure (1)..(316): unsure at all n locations
tcagaaatattctcaattgtctcatctnttcattnggttcttgaatggctatcanaggcctatatatatgtgacttgagacacgaatntgctaagagttnttcagaacaaaaaggtcttatcctcttaaaaagcaaaatcgttttatcctcttacaaattccttggccaaatcacttgtgattcaataaggaattgtttgagtgctcaaattgttcaatctatctctntcaagagagatntcttcttcttttcttctntattctgaanagggattaagagaccgagggtctcttgttgtgaaagaattctaaacac

SEQ ID NO: 11540 - DNA, 301 bp, Glycine max
  unsure (1)..(301): unsure at all n locations
gctctctacaatctantggcataactnttcacacggatgtctaattntgggacctaatatatcgagatgctcgaaattgaacaacggaacctatcgagaaattcaaatgttcaaaacgtttcacacggatttccgattttgggacataatataccgagatgctcgaaattgaacaacggaacctcttgagaaattcaaatgatcataactnttctttcagatgtccgagacggggacataatttatcgagacactcgaaattgaacaacanaagctctcgagaaattcaaatggtcatgac

SEQ ID NO: 11541 - DNA, 337 bp, Glycine max
  unsure (1)..(337): unsure at all n locations
atgtatcttaagntgtcgagaagcatatgccactacctgtccccgatgcataagcactccacccaaacccatacttgacgcatcacaatacaccacanaagattcactcggattaggtaacactaagactggtgcagtggtcaacctttccttaatggtacggaaactactctcacattgggcatcccacacaanaacttgacctttacgagtaagcttagtcaaaggtaaggctagcttagaacaaccctctatgaatctacggtagtatcctgctaagccaagaaagctcctaatctcaaacactgacttangactctctcaactcatcactggc

SEQ ID NO: 11542 - DNA, 347 bp, Glycine max
  unsure (1)..(347): unsure at all n locations
tcttacagacagcanaagaaagtttatacggataaccactcgggtatttccacccgtcaacgtgactcaaatgtcagtatgacagatcttgtgaaggtggccgacaaaagcgaggctcttgctcctacgtatcctncaatgaggaactcagacctacgtagttcttgataactngtgagacttgaaaaagtctccaccggaagatgctgacatctccggaaagggcgcagatgaccacattggcctctgctcgtcaatcacacttgnngtcactgaatgacgaggtgcggataaccgtaaggtgtcttcgcgaactaccagctctngggtcatggtaacaaaaagcg

SEQ ID NO: 11543 - DNA, 328 bp, Glycine max
  unsure (1)..(328): unsure at all n locations
cttctcgtctgtggttctttaagtttcatgggataatttcttcatttggttntgatgaanaccccatggatcaatgcatataccacaaggttagtgggagtaaaatatgctttcttgttttatatgtagatgatattttacttgcagccaatgatcggngtttgctacatgaggtgaaacaatttctctctaagaattttgacatgaaggatatgggtgatgcatcttatgtcatcggcattaagattcatagagatagatctcgaggtattttgggtctatcacagganacctatattaacaaaattctagagagatttcggatgaa

SEQ ID NO: 11544 - DNA, 371 bp, Glycine max
  unsure (1)..(371): unsure at all n locations
aatcatagntctactaagacatgtttgagtgttcgggaacaagagagggttttgaaagggcggaaggaacaaccaatttgagagcatgatagagcgtatagacatatggtaaatgtaaaactgacctagtatatctctatttagaactattatactctcaacctattaattactctacttttctttattatattattttataacaataaactatattttactcccaatcaaatgaataaattaaatattcattctattctataagaacatataattagtgtatctaccttangatcattactctaattaataaaattattcttcttatctattaattacgagaatctcattatctcctactcctctattat

SEQ ID NO: 11545 - DNA, 351 bp, Glycine max
  unsure (1)..(351): unsure at all n locations
aaccacatcacccttacagatgactgatataagcttttaatggaagtcaagagcacgaaattgtgctgatactattgactggtgagcaggtcttccagcgggttgaacacttgaatattgtatttggaaagacccacaagaaggataaaaataagacttgcatatggaagaagaggtccattttctttgatcttccgtattggtcagatctggatgttagacattgtatcgatgttatgcatatggagaaaaatgtatgtgacagtgtgaatggggtgctctntaacattcaaggcaagacgaaagatggtctgaatacccgtcaagatctagctgacatgggtatatgat

SEQ ID NO: 11546 - DNA, 367 bp, Glycine max
  unsure (1)..(367): unsure at all n locations
cagcacaatcaaccacagcagaacaattatgacctctccagcaacagatacaaccctggatggtggaatcaccctaatctcatatggtccagccctcaacaacaacaacagcaacctgctcctttcttccaaaatgctgctggcccaagcagaccatacagttctccaccaatccaacaacagcaacaaccccagaaacagccaacagttgaggcccctacacaaccttccctcgaagaacttgtgaggcaaatgactatgcaaaacatgcagtttcaacaagagaccagagcatccattcagagctngactaatcagatgggacaattagctacacaatggaatcaacaacagtcccagaattctg

SEQ ID NO: 11547 - DNA, 383 bp, Glycine max
  unsure (1)..(383): unsure at all n locations
gaatgaagctctgatactcacttgttagtctagtggcctcatatatcttaagaagggggggttgaataagatattccanactacttccccaattaaaaatctatttgactttntattcaagttataaattcccttaacaatgaacttcttaaatattgattcanataaaacaatttgaatatgaatataaagcaataataaataaaggagtttaagggaagagaaagtacaaactcagatntatactggttcggccacacccttgtgcctacgtccagtccccaagcaacccgcttgagagttccactatcttgtaaattccctttacaagttctaaacacacaatgacaatccttcctttgtgttagaattctttacaacaa

SEQ ID NO: 11548 - DNA, 451 bp, Glycine max
  unsure (1)..(451): unsure at all n locations
gcttcttagtctcacctgatgaattcgnggctactttatgcactcttctaatgacaataacatcacttctggcacttaaatgctgngagtttgaagccatcttctcaattaaatntctggcttcagcaggggtcatgtctcctaaggctccaccactggcagcatctatcatacttctctccatgttgctgagtccttcataaaaatattggagaanaagctgctctgaaatctggtggtgagggcaactggcacataattntttaaatctctcccagtattcatataggctctctccactgagttgtctaatacctagaaatatccttttgatggtcgtggtcctggaagcagggaaaatgttntctaagaatactctcttgtggtcatcccaactcgtgatggaccttagagcaaggtaatatagccagtcctttgccactccttctaa

SEQ ID NO: 11549 - DNA, 249 bp, Glycine max
  unsure (1)..(249): unsure at all n locations
gagaatcatggtcttgaagctcctgcgctgcangagtggtttgaagctgctatataagtaagaaatcctgatgctctgctcctcgctntagaagttagagagaagatttctattgatagctctgtatttggtaaacttctgccaaatccattcagctctagccagactatctctgctgatcacctgtcctccctgagtaatagcttgaagggagactatattcattcatctatgtgtggtcaatactgg

SEQ ID NO: 11550 - DNA, 256 bp, Glycine max
  unsure (1)..(256): unsure at all n locations
atctacaccagcctggatagtaggatataatatcttcacagaggcatcaaccgcttccaactcattcaatacagtaaatttaccaccagaanatcttactctactttcctcatttacaagagtctgcaaccttctaaaatctggagcccatgaatgtatgtcggccacattcaagtttgataacttctttgacgagccagagaatggtgcagtaaacaccctgcaaataaatacagtcttcaccttaactncatac

SEQ ID NO: 11551 - DNA, 353 bp, Glycine max
  unsure (1)..(353): unsure at all n locations
attctaaagcccgagtgatagntgttggttttcttcacatccaagcccaatgcctgcaaaccatgattgtctaatattttcacggattgggccttctttgagcctttttaacattattatgacctggtcttgtgaggaaaaggcagtgatggttcgaaggttagaaatagcttcaatagctattttgctagtttcatcttgggctctgatagcctttttagacatacccttgaggagtacaagtcttgtgtagaaactcgcaatgccaataggttgaacaacaatcaatataatggcaaatctccatgcaatgattatgcccattgtgcatgctatcaccactgctgaaatag

SEQ ID NO: 11552 - DNA, 275 bp, Glycine max
  unsure (1)..(275): unsure at all n locations
tatgcaagctgaaagccttggaggaaagaggtatgcctatgttgttgtggatgatttctccagatttacctgggtcaactntatcagagagaaatcagacacctttgaagtattcaaagagttgagtctaagacttcaaagagaaaaagactgtgtcatcaagagaattaggagtgaccatggcagagagnttgaaaacagccagtttactgaattctgcacatctgaaggcatcactcatgagttctctgcagccatcacaccacaacaaaatg

SEQ ID NO: 11553 - DNA, 187 bp, Glycine max
  unsure (1)..(187): unsure at all n locations
agcgactaagatgtaccaggaccttatgcagatngtttggtggccgagtatgaagaaagaaagttatgagtttgtccttgcatgcctagtgtgtcagaaagctaaaatagaacatcagaagccttcagggaagttgcaacctttagagatacctgagtggaagtgggatagcatctccatggatttc

SEQ ID NO: 11554 - DNA, 464 bp, Glycine max
  unsure (1)..(464): unsure at all n locations
agtcacctgaggcatgcaagcttcanattcacctctactggagnntctgttggtttacattttccatgnnaaaccttctcaaaacatttgaaatatacttcttttggtgcatganaattccctgtttagtgtatgcaaactccaatcctanaaagtatgataatgttcccaggttcgtcattccttcttcaaattatgttttagtgggtcaatcccagttgagctactctcagtaagtaatagatcatccacatacagacaaatgataagaatgtcagtgtgttttacaattctatgtaaactccctgaaagtcaatattgtgaagaaaagtgtcaattctcttgttccaagccctacgtgcctgttgtaacccatataatgccttcctcaacttcaacactttgtgttcattcccttgcatatgaaaacagaagggtgataataaacacatcttcatcaagtg

SEQ ID NO: 11555 - DNA, 361 bp, Glycine max
  unsure (1)..(361): unsure at all n locations
gtctcacgaatgtcacctgctcatgtctcattttttatctcgtggctatatgagacatcttgccaaacaaagtcaggttaacaataactcgcctgtgctntntcttccatgctatatgtagcaaagtcattgatccagtcatgtttgatgagttggaaaatgaggccgcaattatactgtgccagttggagatgtatgttcccctgctgtctttgacatcatgattcacttgattgtgcatctggtcagagaaatcaaatgttgtggtcctgtttatctacggtggatgtacccggttaagcgatacatgaagatcttaacagggtatacaaagaatctatatcattcaaaagcatctatt

SEQ ID NO: 11556 - DNA, 348 bp, Glycine max
  unsure (1)..(348): unsure at all n locations
gcttctattatcaatttcgagcatctctatatatctcttggactcaatcgggcatccgagtaaaacgctattgtcaatntaattttctaggatcttgcattttcaatttcgagcgtctcgatatattacaggactcaattggatagccgagtaaaaagttattgtcgtttgaatttgctcagtgcttctgttctcaatttcgagcgtctcgatatattacaggacttaatcagacatctgagttaaaaagttattgtcgtttgaatttgcttggagcttctgtacttaattctgagcatctcgatatatgacgggactcaatcgaacaaactagtaaaaagttattgt

SEQ ID NO: 11557 - DNA, 376 bp, Glycine max
  unsure (1)..(376): unsure at all n locations
tatgctnntatattattcanttactttgtctcatactctctatatgttatttcttctaattcaaatatgaattcaattcanattgacatttaagttgtttgtttgctttgatgtaaaaaaaaatagttaatggcatgcatggttatatttntaatcaacaacttatataaaaagaagagtattaaacaaacatctattntatcagtttttcatatgcttcctttcaattagtcttaatttttctctaattataattgatcattaaatatttgtaatagttttcatatgaaatcttcgacatactaatactacatgcaacanaataaagtcatatctcacggtggtgacatggtcgattacacatatgatcgatatc

SEQ ID NO: 11558 - DNA, 394 bp, Glycine max
  unsure (1)..(394): unsure at all n locations
agactatgtcaagnnatggaagtacggggactcgctctaccggtgcaagtgtcttaaggatgctgctcttggccgcatgtgcactgagatcaagagggttggcccgagtttggcttatttagaacaggtcagacagcacatggctaggcttccctctattgatccaaatacgaagacctgtttgatctgtggatatcctaatgttggtaagagctcgttcattaacaagattaccagagctgatgtggatgtgcagccctatgctttcactaccaagtctgtctgtgtgggtcatactgattataaatacctgaggtaccaagtaattgatacgccagggattttggacaggccttttgaagatcgtaatattattgagatgtgcagtatcact

SEQ ID NO: 11559 - DNA, 285 bp, Glycine max
tctattggataaactcggctatacatcgtatgatatggttgtcaaagtctctatcatcccttctaatgtccttgtatccatatctgacagtgcacctatacattcgatatggtctcggacaaactcgcccgattaggaaacgttctttggttaatacatgtggaacaggaactgttttcacacaaacaaagaccaacaccatgtgaaatgcatggaggttggatacaaagtgggagaatattgcaggtattcctgttgcaagttctgtgtagatgagaccaatcc

SEQ ID NO: 11560 - DNA, 376 bp, Glycine max
  unsure (1)..(376): unsure at all n locations
gacaccgagagggacagtgtataaagcttgtttagggtacaagatggagtaagggacctgatttccaagaacaaatgaaggcatgtagtagatcaggtaataggatgtaataagtgcatcaccccaaaaatgatgtgggacattatagtgaaggataagagtataagttgtttcaactaaatgatgattttcctttcgcaacaccattntgttgtggtatgttggcacataacgtctcatgaagaattccttgcgaggttagaaaagagcgaaattggaagaacaaatattcatgggcattatcagtgcttataatcttaacgaaaacaccaaattgattttgatttcatatgaaaaccttgaaaaaggaaacata

SEQ ID NO: 11561 - DNA, 277 bp, Glycine max
  unsure (1)..(277): unsure at all n locations
ttgaggaagaggcttaccacctctcccatcatgcaaccaccagatggggaacttccctttgagctcatatgtgatgcctctaactatgcactnngggtttgtttgtcgtagagagttgatagactataacatgtcattgcttatgcttcatgcactntagatgcaacccaagttagctacaccaccactgagaatgagctnttagctattggttttgctttagataaattcatatcttatttcctttgctcccatatcatagtctntactgaccatg

SEQ ID NO: 11562 - DNA, 285 bp, Glycine max
  unsure (1)..(285): unsure at all n locations
cttaaatataatttcaaatggggatntcattttgttagatcaaatgtggtgatgccacaatttattgagggaggactatggacatgngtgaattttggaggggacatagaagattgcaacttatacacctgatcttcagtctttccttgcagaagaaccgctcccgttgtcaggctctttacctcanaatgcaagggaaaaattcaacagacacagagttagtttgacgtaattgagaaacagaaatgagattntgagagacagagggaacatagtatattggaa

SEQ ID NO: 11563 - DNA, 368 bp, Glycine max
  unsure (1)..(368): unsure at all n locations
ctgagtntgtagctacctcatgctctctctctaatgactatggcatcatntatggcgctaaactgctgagaattggaagccatcttctcaattaaatttctggcttcagcaggagtcatgtctccaagggctccaccactggcagcatctatcatacttctctccatattactgagtccttcataaaaatattggagaagaagctgctctgaaatctgatggtgggggcaactgacacatnagttttttaaatctctcccagtactcatatatgctctctccactgagttgtctaatacctgagatatccttcttgatggctgtggtcctggaagccagggaaatttttttctaaaaatactctctta

SEQ ID NO: 11564 - DNA, 293 bp, Glycine max
  unsure (1)..(293): unsure at all n locations
caatacattnngaannaaattaaacaaacctgtgctacacatagatgacatgtgttggatacctacaaattatattatgtattgaaacaaaggtcatttttatactctgaatccttaatataacctcttatacccttttctttaaaatttacttagcgagtattttttttccagtgatcaagatgattatgaggttgtacaaaaagtgggcagggggaaatatagtgaagtttttgaaagcataaatatcaatagaaatgagcgctgtataatcaagattctgaaacctgtca

SEQ ID NO: 11565 - DNA, 201 bp, Glycine max
  unsure (1)..(201): unsure at all n locations
tttcctctgtacttcanaaccttcatgtggagcacgtgatcgagcatctctccacacaataatgtgattatcgggataaagtctctgatccaaagaaatgtgtactcttttaaagaaagctgaaaactttggatacaaaggagacgacttctgaactactcctggctgatcagggtcaacaccatcctccaatatcctccc

SEQ ID NO: 11566 - DNA, 350 bp, Glycine max
ctgcacctgtcgccagactctgtggtttatgctcctctgccgaccaccacacagacctttgcccttctgtgcaacaatctgaaacaattgaacagcttgaagcttatgctgcaaacatctacaacagacctcctcaacctcagcagcaaaatcagccacaacaaaataactatgacctttcctgcaacaggtacaatcctggatggaggaatcatcccaaccttagatggtcgaatctcttcacaacatcaacaacaaccttatttcaaaatgttgctggcccaagcagaccatacgttcctccaccaatccaacaacaacaacaacaacagcctcagaaagaacaaaca

SEQ ID NO: 11567 - DNA, 286 bp, Glycine max
  unsure (1)..(286): unsure at all n locations
ataaatagtaaagttggtgatgagaaaataaaatggttgttgtgtaggtcataccatcacataatattccccttgtcttcctttgtagtgtactttaagtattccatggctgccaccaagggtgcttttcacaaaacaaaacanaaaactcaggcaaattcacttatcgaaagcaattgacaacatatatctctngcaacataaacaaagcacctacttgtatacttgccactcgtaaggagggccataattacagcctttgctgttcctatgctcaaatttcaat

SEQ ID NO: 11568 - DNA, 283 bp, Glycine max
  unsure (1)..(283): unsure at all n locations
atctgcacctgtcgccagactctgtggtttatgctcctctctcgaccaccacacagaccttngcccttctgtgcaacaatctgaaccaatngaacagcctgaagcttatgctgcanacatctacaacagacctcttcaacctcaatagcaaaatcagccacaacagaataattatgacctctccagcaacaggtacaatcccggatggaggaatcatcctaaccttagatggttgaatccttcacaacagcagcagcaacaacaacatacttatnttcaaaat

SEQ ID NO: 11569 - DNA, 227 bp, Glycine max
  unsure (1)..(227): unsure at all n locations
aactgggttcccaccaatcatacttccactgntgccacaggtttgggtaaatttctgtatgctgctggaaccaaatccaaatttaattttggaaactatatctntgatcaaactgttaagcattcagaatcttttgctatcaaattacccattgccttccctactgtattgtgtggcattatgttgagtcancatcccaatatgttaaactacactgactctgtgat

SEQ ID NO: 11570 - DNA, 346 bp, Glycine max
  unsure (1)..(346): unsure at all n locations
ctcggatgtccgattcaggcgcacaatatatctttacactttanattgttaacagaagctctcgagagattcgaatggtcataacttatcacacggatgtccgattcgggcgcataatatgtcgagacgctcgatattgaacaacggaagctctcgagagaatccaatggtcataacttttcactcggaggaccgattcaggcgcataatatatcgagacgctcgaaattgaacaacggaagctcccgagagatcaaatggtcataacttttaactcagaggtccgattcaggcgcataatatatcgagactctccaaattagacatcgagagctctctagaaatt

SEQ ID NO: 11571 - DNA, 373 bp, Glycine max
  unsure (1)..(373): unsure at all n locations
agcttctcgatacattatgcgcctaaattgtgacanctgagttatttgttatgacaatttgaatggctctagagattccattgttcaatttcgagcgtctcgatatattatgaatatgaatcggacctccgagttaaaagttatgaccatttgaatgtctcgagagcttccgctgttcaatttcgagcgtctcgatatattatacgccagaatcggaactccgtgtgagaagttatgaccatatgaatatctccagagattcgcgtgttcaattacgagcgtctcgatatattatgcgcccgaatcggacctccgtgagaatagttatgactatttaaatatcttgagagcttctgttgttcaattgcgagcg

SEQ ID NO: 11572 - DNA, 420 bp, Glycine max
  unsure (1)..(420): unsure at all n locations
acatgtgcctagatgcattaaacctcanctcnatatgatatatatatgaagctgggatgataaaccaattcagtgctggtagatgaaagtttactagagaaagcatggtcattgctcaaggtaagaaggaaggctccttgtacatcatgtatgaaaagatatgcaaaagggagacaaatgttgctcaagatgcaaccaaagaattgtggcacaagagaatgngtcacatgagtgagaaaggtttggagtctctattaaaggatcactttccaaacataaagaggtaaccacttgaatcctgcgaagattgtcttgcaggtaaacaatgtagagtgtctntccaaagatcggatgaagccagaaggagaaagcatatcctgaatcttgtccactcagatgtttgctcaacgtctaaaaagt

SEQ ID NO: 11573 - DNA, 331 bp, Glycine max
  unsure (1)..(331): unsure at all n locations
ggtcaaagngacttcttataccaatgtcacgaggagtgtggtggtcagattcataaagaaggaactgatttgtcgatacggactccctaggaagatcattactgacaatggcaccaatctgaacaacaaaatgatgcaggaaatgtgcggngatatcaagatccagcatcataactccatccactatcgaccaaagatgaatggngctgtggaggatgcaaataanaatattaataagattattcagaagatgacggtgtcatacaaagaatggcatgagatgttgccttttgccctgcatggatatcgaacctcggtccgaacttctact

SEQ ID NO: 11574 - DNA, 252 bp, Glycine max
ctacaacacctcaatcttcacgctcacctcatcacctttgtccccatcactgttcctcgagttgatggtcttcctcaagatgctgaaaccacttgagacatacccttctctatggtcccacttctcgccacggctttggaccgcaccgagaaagacatcgaacttctcctaagggaactgaaaccacaatttgttttcttcgagatccaacattggctgcgcaacctgactcgaagcctaggcatcaagagt

SEQ ID NO: 11575 - DNA, 457 bp, Glycine max
  unsure (1)..(457): unsure at all n locations
gcttctgaaatatgagcaagaatcaaacctatggttctatctattcttctgctaaagggggatttcttttttaaactatccgcanactagatgaacttaagtaggtttcttgatcagccgtagtaactgcaaaaggtttgattgatgacacgagagattctggaccctttgttgcaatcctcttgcacaaagcatcacagttgctgataacttcagtcaaccttcctttcagttctccaatttccacctacaatgaatgaactacatgcacgttccaacatatagttaacaatttccacatacaatcatagaataccacatgagagtattgtgatttatgacatagatgcaaatgaatcaagatttacaagttagtgatcctttgtaacaatgaaagaggaaattaccattcatttcgtttaatgatacaaaacacatgtatcatgttagtacttgc

SEQ ID NO: 11576 - DNA, 358 bp, Glycine max
  unsure (1)..(358): unsure at all n locations
tgagtgctctatcaatggagttgacaagaaatcttcagacttttctcatttgccagtggccaangatgcatgggagatcctgaanaccactcatgaaggaacctccaaagtgaagatgtccagattgcaactattggccacaaaattcgaaaatctgaagatgaaggaggaagagtgtattcatgacttccacatgaacattcttgaaattgccaatgcttgcactgccttgngagaaagaatgacagatganaagctggtgagaaagatcctcagatctttgcctaagagatttgacatganagtcactgcaatagaggaggcccaagacattngcaacatgagagtagatgaactc

SEQ ID NO: 11577 - DNA, 250 bp, Glycine max
cagatgcccctcaagtttcgctctgccatctcaattgaaatcggccgatgttcatccaaagtggtcatgctgtttggaatgttgactactctgttataacgagaaatcttggtgatgaaattgcgcggatcgctcaagtcacatgaaattggcatgcgaaccctgagggtgcacacattgtcatattctatcaagagctcttcgactctgaaaaaaataataacatccaaattataagatattattataa

SEQ ID NO: 11578 - DNA, 253 bp, Glycine max
  unsure (1)..(253): unsure at all n locations
atatacataaccaaagatngactacaaattataaaggaggtctctctttgtgtcaggacaacttacaatgcaagcaaatagagggttttcaaggttcaacgagaatggtttccttaagatacaaaattagttgggttgattggaacatataccanataccagttaaggtttacatacttgattccaccgacaaagtgaggtcaaatggttccaaaatacttcatgattgtctggtagtgatgcaatcctaccc

SEQ ID NO: 11579 - DNA, 343 bp, Glycine max
  unsure (1)..(343): unsure at all n locations
gctttactcggagatctgattcangcgcataatatatcgagacgcttgtaatgttcttcggaagctctcgagaaattccaatgctcattacctttaactcggaggtctgatttaggcgcctaatatatcaagacgctcgaaattgaacaacggaagctctctagaaattcaaatggtcataacttttcactccgaggttcgattcaagtgcatgatatatccagacgctcgaaattgaacaatagaagctctcgagaaattcanatggtcataaccttaaactcggaggtccgaattaggcgcataatatatcgagacgctcgaaatttaacaatggaagctc

SEQ ID NO: 11580 - DNA, 386 bp, Glycine max
  unsure (1)..(386): unsure at all n locations
catgtgaagtggggtggaatcttatatcaattcccttatgttatcaaacataaaaagggaaaaggtaatattgtagccgatgctctttctcggcatcatgcattactttctatgcttgaaacaaaattgattggtcttgaatgtttgaaaagcatgtatgaaagtgatgaaacttttggtgaaatttttaaaaattgtgaaaaactttcaaaaaatggtttctttagacatggaggctttcttttcaaagaaaacaaattgtgtgtgcctaaatgttctacaagaaacttgcttgtttgtgaagcacatgaaggaggtttaatggggccatttgnggtccaaaagactctagaaacattacaagaaccattttattggcctcatat

SEQ ID NO: 11581 - DNA, 387 bp, Glycine max
tgcatcctgaagacaaacttctatgatatatagacttgttgcttatgagtacatggctaatggttcattggataaatggatattcaacaagaacaaagaggaatttcagttggattgggatacaaggtataacatatcacttggaatagcaaaaggacttgcttatctacatgaagattgtgactcaaacattattcattgtgacattaaaccagaaaacgtgctcctagatgataatttcagggttaaggtttctaatttggtttggctaagctcatgaaacgtgaacaaagacatgttttcacaacacttagaggcactatagggtatcttgcacctgagtggatcacaaactgtgccatatcatagaaaaatgatgtttatagc

SEQ ID NO: 11582 - DNA, 270 bp, Glycine max
  unsure (1)..(270): unsure at all n locations
gaatgctatcgtgggaaagtgaacaacttttcaacggtttgtcaccaataacatttatgaattttagccgtattgggatacacggcctaacaaatcacttgtaatatcataatgatcccgcttatctacatgaagattgtgactcttacattattcacttgcacattcacccacaaaacgtgctcctagatgataatttcacggttaaggttttgaaattcagtangatccaactcatgaaacgtgaacaaagacatgttttcacatcac

SEQ ID NO: 11583 - DNA, 373 bp, Glycine max
tgcataagtccggtcccaaattccaatatttatacactcatcatcagggctcagagaaaccccagaaatttccccaaagaaatcaatctcttgacgttttctgtagtctgctttcgtgctataaacatgcacaaaatctgcaggctcagcaaccaccatatattgaccatccgaagaaaaccgaatagaccgggttgcccctaggttattcttgagaatggcagtaggagatgataagtgtctaactcccatactctgcaagtcttatcctgattccccgttgcaaaggtacatccatcgggatgccacgcagaagcgaaagagtaatctcgatgaccaaccaaattggcaacagtctaaaaaatcaaacaag

SEQ ID NO: 11584 - DNA, 300 bp, Glycine max
tatcttagctaacgcaacattgttcattaagagtgaaggagttgacattcttatcatctcactctatgtcaaagatctcttgagaacaagaagcaacacatgtcttggggaaaaacttaataaagaaatgatggaggagttcgagatgacagaccttgggttaatgaccttctttcttggcatggagatcaaacaaagagaacatgaaatcttcattttgtaaaaaaagtatgcccaggagaatttaaaaaaatttaaaacttgaagaatgcaaaggaaatgatcacttcaatgaaataa

SEQ ID NO: 11585 - DNA, 390 bp, Glycine max
tactcaagctttgatgactaaaataaaaaaatagtcagatttcttgagagattttcggtgacaagggtgaaattttgagagatttgattagtgctcttgtgttgatgactataataacatgcttttgacattaacagggtgagataggtgatgggcaggacgtacttgtgagagtacattctgaatgtctcattggggacatttttggggcaacatgtcaatgtaaaaaccaattaaaacttgcattgaagcaaattgaagcagcaggtaggggtgtcttggtgtatctccgaggaaatgaaggtagaggtattggcttaagccacatggtccgtgctagcccattggaagatgacaagtatgaagaattgcagttacctgttgagtcta

SEQ ID NO: 11586 - DNA, 381 bp, Glycine max
tttctattggattcgtcatatcttcatctattgttaaatcatctgtgccaacttcagaattatcgtcccgtccaattcttggtgttcctaggtcagatggctcatatgcagtatcactaccataatctgaggcaacagaggaactgccagcaactaatgataagctcgactggagaggtgattgcacagaataaactgtgttgctggaatctgggtctgtttcagaattctgctggtttgcatcttggaatgctaggaaggattaaatgaggtataaaatatcaaaatttgggaaagctaacaatcaattatcataaaacagaccacactgacattgaggaaactaaatacaagttgcaaaagataatcacatacaagatc

SEQ ID NO: 11587 - DNA, 350 bp, Glycine max
agctttatgtctgtgattccttccccagtgatcacatggtattctgaggcgtttgctaccttgtacatctttatgcttaattctgccgcagtgataaaaagctacaccaattagccgcgatatacagatatagatatatgaattcatttatgctcatttcttacaaataaaatataaaatgctactaagtttaagaggcatagacggccagttttgttttcaatttctataaacttgtaaataattttatttatttaattattaaataaatatttttaattttacttgttattggttttatttaagatgttgtatattctttattattttatttaacgtgttatatattt

SEQ ID NO: 11588 - DNA, 265 bp, Glycine max
agcttgttaatgcacccacattgtatgcagaataacgatctttactgaagactttgttgatcaaaggattgacgtaacaattatgaacaaagtcactgctgccagcactcacatatgtagagtgcattattaaaaatcaatgctgcttgttttactgccaactaccttggccagcttgcattgggattccttgtaatatattaactgacgagacaatggaatcgcatgctgcaaaagaaaaacacagtttaaaaaaccattaatt

SEQ ID NO: 11589 - DNA, 342 bp, Glycine max
agctttcatttttctgggcgttgaggcttcagcgtgggccgtgggacccagatgtgttgcggttaccagaagggttcgaggagcggaccaaagcgcttggagttgtgtgcaccacttgggcgccgcagttgaagattttggggcacatggcggttggtggcttcttgactcactcgggttggacctctgtggtggaggctattctgaatgagaagccgttggttctgttaacgtttttgtcagaccaaggaataaatgcgagagtattggaagagaaaaaaatgggctattctgtgcccagaaatgaaagagatggattgttcacgagtgactcggtagctg

SEQ ID NO: 11590 - DNA, 386 bp, Glycine max
tgaagacaagactatacgaggtatcttccttgggtatatcaatatctctaagggctaccatgtttacaacttgcaaactaagaaactcgtcatcagtcaagatgttgaagttgatgagtacgcttcttggaattgggatgaagaaaaattggagaagaacgttcttatacccgcttaactacctcaagaagaagctgaggaagaagaccgaggtgaaccaccttcacctccaccacaacaacaagatcaagaactatcatcaccagagtctactccaagacgagtaagatctttggtggacatatatgaaacctgtaacttggccatacttgaacctggaagctttgaagaagcgtcaaagcaggaagtatgggtcaaggcaatgg

SEQ ID NO: 11591 - DNA, 305 bp, Glycine max
agctttgatgcaacatttggataggttaatgaaacatcgagatgatgcgctccatgagaggttggatcaaatggagaatacagatcataatgaagaagaaaggaggagaagagggaatgatggtgttcctaaacaaaaccgaattgatggcattaaactcaacattcctccatttaaaggaaagaatgatccggatgcctacttggagtgggagatgaaaatagagcatgtcttctcatgcaacaactatgaggaggaccaaaaggtgaagcttgccgcctcggagatctccgactatgctcttg

SEQ ID NO: 11592 - DNA, 385 bp, Glycine max
  unsure (1)..(385): unsure at all n locations
tgatgtttgtattgaatgcattaaaggtttacagaccataagcaagaaattaggtacatatagagctacatacgtcttggaattgatacatacgaacatttgtgggccatttcatacaccttcatggaatggtcaacaatattttatatcattcatagacgattactccagatatgcatacttgtttnttatacatgaaaagtcccaatctttggatgtgttcaaaagatttaaagtttaagttgaaaatcaactcaacaaagaataaagtgtgttagatctgattgtgatggtgaatactatggtagatatgacggttcaggtgaataacgtccggggccttttgccaggtacctaaaggaatatggaatttgcccactgtaca

SEQ ID NO: 11593 - DNA, 277 bp, Glycine max
gtgcataccgcaaggatcctttatgaaatttcttgtgaaagagagccacgagggtgggctcatgggccactttgggatagacaagatgcttgtcttactcaaagaaaatttttattggccccatatgaataaagatgtccatatgcattgcactaagtgtgatgcttgttttcaagcgatgtttgaggtgatgcctcatgggctatacacacacttacccattcgctctgcaccttgggtggacattagtatggtaacttccatgggctttctatac

SEQ ID NO: 11594 - DNA, 232 bp, Glycine max
tgtgctaaaggaagtaagacatgtgcctgatatgcatttaaaccttatctcaacaggaaagctagatgaagctaggatgacaaaccagttcagtgccgaaagatggaatcatagtagagaaagcatggtcattgctcgaggtaaaaaggaaggctccttgtacatcatgcagggaaagatatgcaaatgggagatgaatgttgttcaagatacaaccaaggaattgtggcac

SEQ ID NO: 11595 - DNA, 377 bp, Glycine max
cttgatgcaacatttggagaggttaatgaatcaacgagatgatgcgctccatgagaggttggatcaaatggagaatagagatcataatgaagaagaaaggaggagaagatggaatgatggtgttcctagacaaaaccgaattgatggtattaaactcaacattcctccatttaaaggaaagaatgatccggaggcctacttggagtgggagatgaaaatagagcttgttttctcatgcaacaactatgaggagaccagaaggtgaagcttgctgccacggagttttccgactatgctcttgtgtggtggaacaagctacaaaaagagagagcaagaaatgaagagccaatggttgatacatggacggagatgaaaaa

SEQ ID NO: 11596 - DNA, 340 bp, Glycine max
agcttctggtgggacatcttgacttgctttccaatctgacattcaccacagattctgccttcttctattttcagattggggatgcctctaacagcacctttgtcaatgattttcttcatgcctcttaagtgcagatgtccaaatctttgatgccatattctgacttcatcttctttggaggatagacatgtggaggagtagctggtttcttggggtgtccataagtaacaattgtcctttgatctgctgcccttcattagaacttcactcttctcatttgtcaccaagcattctgactttgtgaagtttacattgaatccttcatcacacagctgactga

SEQ ID NO: 11597 - DNA, 358 bp, Glycine max
  unsure (1)..(358): unsure at all n locations
tgtgcatccaataccctgatgaggatgttttatatgttcttaaaactggactgattcatttgcttccaaagtttcatggccttgcaggtgaagacccgcacaaacatttgaaggaatttcatattgtctgctccaccatgaaacccccaaatgtccaagaggatcatatatttctgaaggcttttcctcattctttagagggagtggcaaaggactggttgtattaccttgctccacggtccatcacgagctgggatgaccttaagagagtattcttagaaaaanttttccctgcttccaataccacagccatcaggaaggatatctcaagtattaaacaactcggtggagagagcct

SEQ ID NO: 11598 - DNA, 330 bp, Glycine max
agctttttgaaggatcaagatgtgccttatgaatcctcccgtacttatgccaccagtacctggaaggcctctcattttgtacatgacaatcttagacgagtcaatggggtgtatgctggggcaacatgatgaatccggaaagaaagagcgcgctgtttactacctaagtaagaagttcacgacctgtgaaatgaattactccctgctcgaaagaacgtgttatgctctagtatgggcatcccatcgcctaaggcagtacatgctgagccatactacctggttgatatccaagatggacccggttaatacatctttgaaaagccagctctc

SEQ ID NO: 11599 - DNA, 343 bp, Glycine max
agcttatatttattggagggttaataaaacaatccaaaatcatttgttcctttcaagtaacgaagaattctttttgcggcttttagatgaggagaggtaggagccttcataaagcgacacacaactcccaccgtatatagaatatcgggccttgtattggttagataccttagactccccacaagactcttgaagatcgtggagactaccttctctcctttatcaaactttgataacttcaagccaccttccataggtgtgttcacgggattgcaatcaaacatattaaaattctttcacacttcttttgtggaccctttcttgagagacaaaaataccattc

SEQ ID NO: 11600 - DNA, 313 bp, Glycine max
tagcttgtttaccccatgttgtattttcttacaatagagctggtcataacaccactaattgttctccttttgaagttgtttatggttttaacccactaactcctcttgatcttttgcctatgcctaatgtttctgtttttaagcattaagaagggcaagcaaaggcggactatgtgaaaaagcttcatgaaagagtcaaagatcaaattgagaggaaaaataaaagctatgcttaacaagccaacaaagggagaaagaaggttgtcttcgaacccggagattgtgtttgggtgcacatgagataagaaaggtt

SEQ ID NO: 11601 - DNA, 355 bp, Glycine max
agctcggatttccttttagtttggaatctatccttcctaagatagagccaaacctagtcaccctcattaagaactagctcttttcttcctctattgcctttagttgaatacacctttgtttgattctctatttggttcttaaccctctcatgcatcttctttacaaattctgacctagattccccttctttatgtataaaagaagtgtccagtgggaggggaatgaggtctaacggtgttaggggattgaacccatagacaacctcaaaaggggactgcttggtggttctatgaacccccctgttgtaggcaaattctacatgaggaagatactcatcccaagacttatggttgc

SEQ ID NO: 11602 - DNA, 342 bp, Glycine max
agcttctccaaaaaacagtgttatcagcatattgaataacattcacagaaactttgttcttccccaccagaaaacttctgaagctattttgggaaactgcttctctcatcagccctgtcaatccctcagccactaaatcaaagagaaaaggtgccaaagggtcaccttgtctcaatcctctttgggggttaaattctgaagttgggctgccattaacaagaatagaaatggaagccgaattaatgcaggcccttatccacctaatccatctctctcatggaaccccattctcttcatcatataaatgagaaattgccaagatacagaatcataagccttctc

SEQ ID NO: 11603 - DNA, 336 bp, Glycine max
agcttgtcattttttcctatatgtgtttaaaatgggttaaattatttatatggtcctctaatttattttttagatttaattggatcttctaattttttttattcaatttgatcctctaatttttaaatcgatttaattcagtttttaagtctaaacgataagaaatcacactttatgatagttcaaaatcgtcactaaatgattttaaactgtcacaaaatacatagtttttacaaaaaaatgaatcaattctaaaaattggaagatcaaattgaactaaaaaaacactagaggaccaaatcgaattgtttttaaaaattagatgaccaaattaaa

SEQ ID NO: 11604 - DNA, 288 bp, Glycine max
ttgcttgaggaagaactttgtttgtaacggcctaaccaatactttgacttgacctcttgtcacccattaatgtgctacagaattccagggcaagagctgtcatatgcaagtcagaatcactgatacacaagcatcaaaagaaaatagaattaaccattccatatcacctatgccaatgtacagagagtatcttagtaagacaaacctaattagtcccgaccgttctacgataataaccttataagcacacaaacattcttttcaccataagcaactataagtgaattt

SEQ ID NO: 11605 - DNA, 353 bp, Glycine max
agcttgggaagaaaggagaatagctataaagacaaaaatagacagcttgttgaaggctgatttcatttgcgaagtgaattacaccaattggttagccaatgtggtcatggtaaagaaagcaactggaaaatggaagatgtgcatggattacaccaacctcaacaaagtgtgtcccaatgatgcctaccctttgcttagcattgacagactagttgatggggcatgtgggttcagggtgctcagtttcttagatgcctactcaggctataatcaaatcaagatgtatctacccaaccaagaaaagacaacatttgtcattgatagggctaattttttctataaggtaatgactt

SEQ ID NO: 11606 - DNA, 366 bp, Glycine max
  unsure (1)..(366): unsure at all n locations
tgccttggttaaccttattacccaactggccctgagtcacaaatctgcacctatcaccagactctgtggtttatgcatcctttgccgaccaccacacaaacctttgacctttagggcaacaaactgaagcaatagaacagcctgaagctgatgttgcaaacatntacaacaaatctcctcaacctgaacagcataaacagcctcaacacaatgactatgacctttcccacaacaggtacactcccggatggaggaatcatcccaaccttagagggacgaatccttcacaacggctgcagcaacaacaatggacttattatcaaaatgctgctggcccatgcagaccatccattcctcagccgatcc

SEQ ID NO: 11607 - DNA, 314 bp, Glycine max
tttcttgaaaatgaacaacggttgctgtcgatatattcaaatggtcataacttatcacaccaaagatcgattcaggcgcatgatatatcgagacgctcgaaattgaacaacgaaagctctcgagaaaatcaaatgggcataacttttcaaaaggaagttccgattcaggcgcataatatattgagaaggtcgaaattgaacaacagaagctctcgaggaattaaatggtcataacttgtaaacggaagtccgacttaggcgcataatatatccagacgctcgaaattgaacaacggaagctctcgtaaaattca

SEQ ID NO: 11608 - DNA, 288 bp, Glycine max
cgctaactgaagatcaatgacagcggaatgcacacggaggaacggtgattggacatgccacttcacggagaagaaagacaagaacaagttcaccaccatatgaagccatggataaaagcacgaaggttggagaatatgagcggagggagagggagagaacgggcacgaaacttatgcctccaatgaggcctacaaatcgaagctgagatcctcacatgatcaacgtagaaataacgcacactaaacgccgctatatatagcctaacggtcacatgaaactggagggaa

SEQ ID NO: 11609 - DNA, 348 bp, Glycine max
agcttctggtgggacatcttgacttgctttccaatctgacattcaccacagattctgccttcttctattttcagattggggatgcctttaacagcacctttgtcaatgattttcttcatgcctctcaagtgcagatgtccaaatctttgatgccatattctgacttcatcttctttggaggatagacatgtggaggagtagctggtttcttgaggtgtccataggtaacagttgtcctttgatctgctgcccttcattagaacttcactcttctcatttgtcaccaagcattctgacttttgtgaagttacattgaatccttcatcacacagctgactgatgctgatc

SEQ ID NO: 11610 - DNA, 439 bp, Glycine max
  unsure (1)..(439): unsure at all n locations
gctttcttctccaagctatcttctatctcagttattgagtttctgtgagttattgagagngnttacgtgggtgggtgctacacttccattgttttgcttttgttgtgtggctttcataattcagctttcataattcattcttggtaagtgtttttttaaaataaaatttatatattctgatttataatttctgttcttaaattcttataataggttagttagtattaataggtattataaatatacgttaattaggattaatatatattgtaaggttagattagttactatgatgnttttaatttttatgtattaatagatatttgaagattaggttattcttaatagatatttaaaggttaggttagttagtttggtttgttgtatatacttttagatattatatatgtgatataatattattagtnttagaaatatt

SEQ ID NO: 11611 - DNA, 423 bp, Glycine max
  unsure (1)..(423): unsure at all n locations
gagccttgagggtaatgttctcaacaatatttgatttctccaaactgcttattaatatatctccattctgatttataatttattgattcagntctcttgactttcatgtgaacaggtgattgcagagtatttgtccttataagaagctgctggaataaaagagggattccaactgatggatacaagccataaaggcaagattaacgtcgatgaactgcgtgtaaggttgcataaactaagtcaccaaattcctgatggggatatccaaatacttatggatgctgtgagtatttttcactttatctggaaactcttcttttctgtttgttctacacttgatgtgtgaagaaataagtagtttggtctctttgttttcacaactttatgttcattgtaatatatcaaactaattaattgcaaact

SEQ ID NO: 11612 - DNA, 462 bp, Glycine max
  unsure (1)..(462): unsure at all n locations
agctntcaagtactgtaagccaatcatacaagttgtctgcacacatttgtacggcaaataccgtgggaccctcttaatggccacatcacaagatggaaatggtggcgtccttcctctagcattcacgatggttgaacgtgagacgttgacagcgtggtcatgatttttggcacacttgcgtgaacacgtcactgataaaaatggtatttgtctcatttctgatcgacacgcgagtataaagtccgctgtcgctaatgaagcacttggttggcaacctcctcacggttatcatgtctattgcgtgcgacacatagcaagcaacttcaatcgaaaattcaataacgccaaacaaaaagaaatgtttgcagaagtgggtaagaattcatatttaatggtcacgtttatttaacttccttatatacttaanatgggtattggataactaatttatgcagcctacac

SEQ ID NO: 11613 - DNA, 208 bp, Glycine max
  unsure (1)..(208): unsure at all n locations
tatgttgntgtggatgatttctccagatttacctgggtcaactttatcagagagaaatcagacacctttgaagtattcaaagaagtgagtctaagacttcaaagagaaaaagactgtgtcatcaagagaattaggagtgatcatggcagagagnttgaaaacagcaagtttactgaattctgcacatctgagggcatcactcatgagt

SEQ ID NO: 11614 - DNA, 380 bp, Glycine max
  unsure (1)..(380): unsure at all n locations
ctggaatgttaggaagatatcaaagtaatccgggaatggaacattggaaagttgcaaagaaagttctgagatacttacagggaacgaaagatcacatgcttacatataagaggtcaaatcatattaaggtgattgagtattcagactcatactttgttggatgtgtggatataaaaaaatccactctgttctatgtctntcttttagccgaaggagcaatatcatggaagattgcaaagcaatcagttgttgttgcatctaccatggaagatgaatntgtagcctgttttaaggctacaatttaggctaattggctgcggaactttatttcagagcttggaattttcaatagtattgctattgtcataccctaatttcgt

SEQ ID NO: 11615 - DNA, 416 bp, Glycine max
  unsure (1)..(416): unsure at all n locations
tcatgtggagaggttaatgaaacaacgagatgatgcgctccatgataggttggatcaaatggagaatagagatcataatgaagaagaaaggaggagaagagggaatgatggtgttcctagacaaaaccgaattgatggtattaaactcaacattcctccatttaaaggaaagaatgatccggaggcctacttggagtgggagatgaaaatagagcatgttttctcatgcaacaactatgaggaggaccagaaggtgaagcttgccgccacagagttttccgactatgctcttgtgtggtggaacaagctacaaaaggagagagcaaganatgaagagccaatggttgatacatggacggagatgaaaaagatcatgaggaagcggtatgtgccggctagttactcaacggacttga

SEQ ID NO: 11616 - DNA, 479 bp, Glycine max
  unsure (1)..(479): unsure at all n locations
agcttctaagttctaacagggtgatagagagcagaattgctgaatgtgaaccacaagtataaagttattataatacactgaagctccattaaaaattgaaccatgagtacataattattatactacattgcaactgcattaaacatgttattgttattaaccaatttcaagacctagaggaccccttcccttatttttgagaaaactaccttaatataatctacttctgtaattaactaaggagttgagagaatctatcctagagtcaccatttctccttttaagcagctcttgatgtcaaatgcccaggcttgctagattatattatgtcattntgtattggtttttcttcgaaaatttatgtggaacactctggtataaagtttagttggtttcagtctgagagacctggatttcaattcattacctncatggatngagtcnnnataaacaatttatacattntttctttcatttat

SEQ ID NO: 11617 - DNA, 456 bp, Glycine max
  unsure (1)..(456): unsure at all n locations
tactaagctctgcttaggttttacgttttctgtataaggctattgtttttgttcttaatgcaattttctgttttctgcttctaattacaatttcgttcttgcttcttcttctactttcatttacgtttctgtctcatttacgtttctgtttcatttacatttatgtgcatttacgtttctgcttcatgtttcatttgcgttttctgtttgaatctatggaaggctagtttttctggtgttgtttccttttgaggacgaagcccaactctctttgaggtttcgtttgtaatgtggtttcctggcagttntcccttcaccagttatcccaaattcgtgaacattaatcagtgcacccttcgtgttcgattaattgcctctgagcctaacttgcgttcatgcttaatggacgaacggctaactggtgtatgtggtgcctaatcacgtattgacaaccct

SEQ ID NO: 11618 - DNA, 150 bp, Glycine max
  unsure (1)..(150): unsure at all n locations
caacagaagctctcgaganattcttatggtctatatcttgtcacacgaagtccgattcaggtgcgtaatataccgagacgctcgaaattgaacaaccgaagctctcgagaaattcaaatgggcataacttatcacacggaagtccgattc

SEQ ID NO: 11619 - DNA, 340 bp, Glycine max
tcacacggaccgtcgattcaggcgcatataatatcgagacgctcgaaattgaacatcggaagctctcgacaaattccaatggtcataacttttcacaaggaaccccgattctagcgcatcacgtatcgagatactctgaattgaaaaccggaagctctcaagaaattcagatggtcataacttgtcacaccggagtcccattcagacgcataatatatcaagatgctcgaaattgaacaacgaatgctctcgagaaattcaaatggtcataacttgtcacacggaaatccgattcaggcgcataacatatccagacgctctaaattgaacaacccaagct

SEQ ID NO: 11620 - DNA, 418 bp, Glycine max
  unsure (1)..(418): unsure at all n locations
gctgaggtgtgttgcccaccatctnttcatagtagaatactggttatgtgtctactatcatcgncatcattnttttctccgtcattgaggtgccacttgagctgccaggtctctccacctttgggcgtattcttttgaaagattcgtgccccctttntgcacatgttctgtagttgcatcctatctgaagacattatactgacactgcctaacgaaggcaaccactaggtccttccaagaatggactcgggaaggttccaagttagtgtaccaggtaacaactaccccaataagactttcttggaaggaatgtatcagcaattcctcatcttttgtgtatgcccncatcttccgataatacatctttagatggttcttggggcaagtagtccccttgtacttgtcaaagtccagcacc

SEQ ID NO: 11621 - DNA, 369 bp, Glycine max
  unsure (1)..(369): unsure at all n locations
agcttagctacacacacctctctaatagctaagtttacctncttgagatgagaagctagagcttagctacacaccccctataatagctaagctcacccccatgacaaaaaacatgaaaataccaaaaaaaagtccttactacaaagaatactcaaaatgccccgaaatacaaggctaaaaccctatactactagaatggccaaaatacaaggcccaaacgaaggaaaaagctattctaatatttacaaagaagagtagatccaacctttacccatgggctcaaaaatctaccctaaggttcatgagaatcctagggccttctttagtagctctagcccaagcctcttggagtcttctatccaataccct

SEQ ID NO: 11622 - DNA, 312 bp, Glycine max
  unsure (1)..(312): unsure at all n locations
attgacaataactntntactgggatgtctgtattgggtcccgtcatatatcgagacgctcgaaattgaatgttgaagccctgtgctaattcaaccgacaataactntttactcggatgtctgattgagtcccgtcatatatcgagacgcttgaaattgaatgttgaagctctgagccaattcaaacgacaataactctttactcggatgtctgattgagtcccgtcatataacgacacgctcgaaattgaatgttgaagctctcagccaattcatacaacaataacttnttactcagatgtctgattgagtc

SEQ ID NO: 11623 - DNA, 251 bp, Glycine max
  unsure (1)..(251): unsure at all n locations
cttcaacatttcaatttcgagcgtctcgatatatgacaggactcaatcagacatccgagtaaaaagttatggtcgttnggaatggctcagagcttcaacattcaatttcgagcgtctcgatatatgacgggactcaatgagacatccgagtaaaaagttattgtcgtttgaaatggctcagaggttcaacattcaatttcgagcgtctcgatatgtgacgagagtcaatcagacatccgagtaaaaagcta

SEQ ID NO: 11624 - DNA, 332 bp, Glycine max
  unsure (1)..(332): unsure at all n locations
agagaggctcacaggtagcggtgaactgcgatatgaacttctctatataatttaggtgccctaagaaaccttggacttgcttttcggtgcgcagtttgggcatttcaaggatggccttcaccttgtcgagatcaacctctatccctttctggctcacgatgaagccgagcaattttcccgacttgaacaacttccacagtttctcgaacaacttccgaaagttgacgagttgttcctcctcggttctagacttggcaatcatgtcatccatgtagactntaatctctttgtgcatcatatcatggaataatgctaccatagctttgtgatag

SEQ ID NO: 11625 - DNA, 478 bp, Glycine max
  unsure (1)..(478): unsure at all n locations
taacagaggcatgcaagcatgcctagttgccaatatatatcatcaaaattgtanatatatattatgacataactntttctcttgtggcaatgctcatatcaatttagattcttcttgctataacaacatactatgatcatgaaatatgaaaaatggatgtggaaaacggctntccttaatggtgagctaaaatatgtttccttaataaagtctacaagtttcaacaatacatttatggatngaaagaagtgtctagaatttggagcattcattntaacaagataattgaatngtttaatcttgttagctatgaagaagaactttgtgagtaaaaaaaggttactgggagcattacatttatatgtagatgacatataaaataatacacaatataatgaagaaagatntgactactaatatattatcaatgaaatatntaggagaaacaatattttaaaaataaagaattattgagata

SEQ ID NO: 11626 - DNA, 470 bp, Glycine max
  unsure (1)..(470): unsure at all n locations
agcttgtctagttgccaataaatatcatcaaatgtgtaatatttattatgacataactttttctcttgtggcaatgctcatatcaatttagattcttcttgctataacaacatactatgatcatgaaatatgaaaaatggatgtggaaaacggctntccttaatggtgagctaaaatatgtttccttaataaagtctacaagtttcaacaatacatttatggattgaaagaagtgtctagaatttggagcattcattttaacaagataattgaattgtttaatcttgttagctatgaagaagaactntgtgagtaaaaaaaggttactgggagcattacatttatatgtagatgacatataaaataatacacaatataatgaagaaagatttgactactaatatattatcaatgaaatatntaggagaaaacaatatttaanaataaagaattattgagatagaattaga

SEQ ID NO: 11627 - DNA, 481 bp, Glycine max
  unsure (1)..(481): unsure at all n locations
agcttccaagaatcaagatcaagattcaagactctatattcaagaatcaagagaagacttaatcaagataagtatgaaaaagaattttcaaaaaatgagtagcacatggattcttctcaaaatatgtttaccaaagagtttttactctctggtaatcgattaccagattgttgtaattgattaccagtaagcaaaatggttttcaaaaagctttcaactgaatttacaacattccaattgatttcaaaaagctgtaatcgattacaatgttttggtaatcgattaccagtgtgcttgaacgttgaaattcaaatttaaatgtgaagagtcacattctttcacaaaaaagctttgtgtaatcgattacactgatttggtaatcgattaccaatgattgtttctgaataaatcaaaaaatgtaactcttcanatggtttttgacttttttcaaatggttttaagtntttctaaaagtcataac

SEQ ID NO: 11628 - DNA, 487 bp, Glycine max
  unsure (1)..(487): unsure at all n locations
agcttaataaatctatatatggtttaaaacaagctttcttgttcttggtaccttaagttttatgggataatttcttcatttggttttgatgaaaaccccatggatcaatgcatataccacaaggtcagttggagtaaaatatttttttttttatatatgtagatgatattttacttgcagccaataacatgaggtgaaacaatttctctctaagaattttgacatgaaggatatgggtgatgcatcttatgtcatcggcattaagattcataaagatagaccttgatgtattttaggtctattacaggaaacctatattaacaaaattttagagattntggatgaaagattgttcaccaagtgttgctcccattgtgaaggggtgataagtttaattgaaccaattctcanagaatgactntgagagggaacaaatgaaaaatattccttatngctttgttgntggaagtctcatgtatactcaagt

SEQ ID NO: 11629 - DNA, 443 bp, Glycine max
  unsure (1)..(443): unsure at all n locations
ctcagcttaactcatgaagaagtctcaaatctcctatcatataattagatgctcctatatcaataattcacaccgtgtttttacctatcattctttctatggtgcttcccttatgattgttcagaagattcaccagagtttgccactactcactgctcaaacctgtcagtccgcccttgtgtgtatccatcgcttatagaatcgntcctccattggaatgaccattttggatacccaaccacctgaaaacagtttgtggcatcatgtcttgttcggttgcagtgcccacaaaccgtggacttgtcttttgcatctncacgccctcttgtccttccaccaatttgcacagccagaacaacaacttcccctcgttcctccttggttctggagattgccttcacacgtctntcttgtatgagagtagcatatactctgttaaatga

SEQ ID NO: 11630 - DNA, 416 bp, Glycine max
  unsure (1)..(416): unsure at all n locations
gtggtaatcagagcacaagagcttcaagttgccatatagggaattggaaggaggattggtgccatcccttgaagaatttgagtcaagaagcaaggggccaaccaccttatgagctatnggactaagaagcactccaaattgggtgaatcaccaaagagagaaaaaccaccaaaattgaggacctttttgcaattctgtaattgacaatttactttactttcattgcttatcaaatttgtaacaaaaaggcctttcattggaagtaagtagggagcctccaatagggcaccctacttacctctgagtgaataaatttaggcaattttcccttatgattgtgagtgttttgttgggaaccttaaaagtggtcatccaaacactcataggatatccctagattacatatctcgcttact

SEQ ID NO: 11631 - DNA, 468 bp, Glycine max
  unsure (1)..(468): unsure at all n locations
ctcataactgaagaacttacagcagattttgtgtattttcgcgcacagttagtaccatttcctttgaacagcccacgaaaaccttcagttctccatatatattttagaccttgaattgttccattgtatttaatgctgtgtggattctgaacctgtaaatggcagaggcacatcacatcgcacatatgatatcgatacacccaaccacaaaagaaccaacaaaaaaggtagcttgtcagatgcactttttttctttataacaagaataaatgatagctaaatccacatttaaaggtaaacaactatatggggattaacctgtagcaaaatcttcaagcgttccagtggagcaactgctgttcgtgatctgcatatatacaaaaaagggtcaaatcaattaaaactcgacataatgcaaaanaggatgttgaaattatcagtaagaaatagtttccaggaaaattggat

SEQ ID NO: 11632 - DNA, 451 bp, Glycine max
  unsure (1)..(451): unsure at all n locations
tactaagcttcttagaaaacgtggcattgtgcgcaatacacaatgccctgtttaccacaacaaaatggtatatcagaaaggtgtaatagaactttaatggatatggttgagtatgttaatcaatttgaatttactcgtatctttgtggatgtatgccttgaaaactgtcatgtaattgttgaatagggttcctagtaaggcagttccaaagacacctttgaaactctggacaaataggacacctagtataaggcacttgcatgtttcgggttgtcaggcagaaataaggatttataatccgcaagaaagaaaattggatgcaagaacaatcaatggatattttattggttatccagaanaatcaaaggagtatatgttntattgtcctaatcatagtatgagaattgtcgaaactagaaatccaaggttcattgaaaatggtgaaatcagt

SEQ ID NO: 11633 - DNA, 439 bp, Glycine max
  unsure (1)..(439): unsure at all n locations
gcttacaatagagctgttcatatcaccactaattgttctcctnttgaagtatgttatggttttaacccactaactcctcttgatcttttgcctatgcctaatgtttctgtttttaagcataaagaaggtcaagcaaaggcggactatgtgaagaagcttcatgagagagtcaaagatcaaattgagaggaaaaataaaagctatgctaaacaagccaacaaagggcgaaagaaggttgtcttcgaacccggagattgngtttgggtgcacatgagaaaagaaaggtttccggaacaaaggaaatcaaagcttcaaccaaggtgagatggaccatttcaaatgctnganagaatcaatgacaatgcttacaaagttgagctgcccggtgagtataatgttagttccaccttcaatgtctctgattnatctctttttgatg

SEQ ID NO: 11634 - DNA, 475 bp, Glycine max
  unsure (1)..(475): unsure at all n locations
tatcagatcctgaaatacccnctcaccactgagtctgcctgattaagattgaggacaacaacactttggttttcattgtcgacctgcgtgccgacaagaagaagatcaaggatgcggtgaagaaaatgtatgacatccaggccaaaaaagtgaacaccttgatcaggtgagcatctatgcaatgattgcagttttgatagtaatgatttcatattgcattattgctgatgaaatttgttgattggtagtgatttccgtattcacttagtggtataaggtattgatgttgttgtgaaattgatgcatgatgtcatgatgtcacatgacgtcacatgtaatttctagttttgatatctttntgaagaccctgttatgttgatgcatgatgtcatgatgtcacatgtaaattctagtcctgtctgtacactctagctnttttntcctacctttaaacataatggaatagtcctgttct

SEQ ID NO: 11635 - DNA, 375 bp, Glycine max
  unsure (1)..(375): unsure at all n locations
tgggcttactattctcatccnatctcatcaatacattaaagttatatgattngacttntgcactgatggaagggaataccactatctactcgaatacccctaacaagcttgtaggagctgtcggtaaataaaggtcctcaccatccatttcaattttctccaactccctaccacatatggtaaaaataaacattaacttctatcaaagacacattgaaaatttaacataaaaatccacaataaaaataagccttcagacattnggccagtacctccggataccagctcggcgttcttctttagggagtggaaatagtacaccagagatggatgtaactttgtcaaagaaatcaaactctctnttaaatatgtcaa

SEQ ID NO: 11636 - DNA, 499 bp, Glycine max
  unsure (1)..(499): unsure at all n locations
agtcacctgaggcatgcaagcttatcaacatcaaacttggagaaagagttcttgtggtctttacatgagaagcaatcaagtataatgttacttccttcactaaagcggtgatccatctccacacatattntatcaatggcaacataaaaaatctttgcacggaatgatgaaaataatgatagtcctccttctgctcttgacgaccccgaactgtatttcgtcatccatatttggtaccagaatacttttagcaacacaaaatccttggacatcggcaaaaaaattattccagccactctctctcattgtgcccaaccgagctttgacaacatcaactaattccatggcattcacaatattaagatcttttctttgcaatatatttgaaagctcatttgtttctatgacctggacacgcacaatctcatttgggtaaactcattaaccacatttatgtggcggtctaattcggcttcttggtgacaacattcacattctc

SEQ ID NO: 11637 - DNA, 494 bp, Glycine max
  unsure (1)..(494): unsure at all n locations
tcagatttactttcagtcatctcattcaagactttgtttgcattctttatcttgccatcttgngacaacctgcacaaaattgaattaaatttaacaactccagggcacaattaatcccttagcctccatcattcctttcattnttagagctttatctagatgatttgtacatgacaaatacatatttgagcaacattagttcactagatgtcattatgtccttccttcatcctgataacatagtccttcaggctggtcatgtcatcaccactcttagtggagtgatacctcagcaattcagctagctntgtcttgttntgagaatccacatcaagaccaagtttaaggttgttagagaaggcttcataaaacttgttatagtcttacaaggctagtaaccttgatggtaacaagtacgtcattggcatgactatagtttttcaacatggtagtatactagtatgtctaatgcctcatggaanttcagtgatatt

SEQ ID NO: 11638 - DNA, 322 bp, Glycine max
  unsure (1)..(322): unsure at all n locations
ctgcagcttgaaagcacatgattttgacaaacttttaccaagagtnttactctctggtaatcgattaccatattgttgtaatcgattactagtagcaaaatgagtttgaaaaagttttcaaactgaatttacaacgttccaaatattttcaaaaggctgtaatcgattacaatggtntggtaatcgattaccagtgtccttgaacgttgaaattcaaatttaaaaatgaagagtcacattgtttcactcaaaaactttgtgtaatcgattacacttanttggtaatcgattaccagtgactgtttctaaaagggttttaagt

SEQ ID NO: 11639 - DNA, 317 bp, Glycine max
actcggatgtccgattgtgtcccgtagtatatcgagacgctcgaaattcagaatagaagctctgagcaaaatcaatcgacaataacattttactcggatgtccgattgtgtcccgttgtatattgagacgctcgatattcaaaatagaagctctgagcaaaatctaacgacaataactttttactcggatgtccgattgtgtcccgctgcatatcgagacgctcgaaattcagaacagaagctctgagcaaaatcaatcgacaataactatttactcggatgttcgattgagtcccgatgtatatcgagacgcttga

SEQ ID NO: 11640 - DNA, 429 bp, Glycine max
ttctcataagcttgaaatctcaatttctgaaattcatgaagttggagcttcctgtgttccctagctacattgagatcaaaatttagaaacttcaatgcccagtaagctttgtgctccaactcaacaggtaagtgacaagattttccatagaaccaatggaagggagtgagtcctataggagctctgtatgctatttcatatgcccacagagctccatctaatgaccgagcaactgttttctctaggatcttcttgacttccttgttagaaacttcaacttgcccattggtctgggaatggtaaggtgaggctatcatgcgtctgacactatagtgttggagaactttcttgagttggacattacagaaatgagatccttcgtcatttatcagtacccttggtgtgccaaacattgaaaatatgttttct

SEQ ID NO: 11641 - DNA, 227 bp, Glycine max
agatcaccattcatgaacgccgttttcacatacatttgatgcagctcaagatcaaaatgagctactaatgccagaattactcgaagagagtctttcttagatacagggaataaggtctctctgtaattgattccatctctgtgagtcgaatctttagcaacaagtcttgctttatgtctctcaatggtgccttctgagtctttctttgttgagaagacccatctaca

SEQ ID NO: 11642 - DNA, 373 bp, Glycine max
  unsure (1)..(373): unsure at all n locations
tagagaagtactgagcaccgcccaattcgtccaacttttcattaattgtcggaatcggaaaccggtcacgaaccgtgacggcgttaagggctctgtaatcaacgcagaatctccaagagccgtctgtcttgcggacgagaagaacggnggatgaaaaaggacttgtacttggtctgatgagtcctttttgtaacatatcattgacttgctgctcgatctccttcttctggtaatggggatatctatacggatggacattcacgggattggtgtggggaaggaggtggatatggtggtcggtgtcacgggtaggaggtaagccggaggggttctgaaatanggtcgagaaacgtgtaagtaaggcttggatttc

SEQ ID NO: 11643 - DNA, 354 bp, Glycine max
  unsure (1)..(354): unsure at all n locations
gaatcagaaatctgtacctgtcgcaagggtttgtggtttgtgctcctctgctgaccaccatacagacctttgcccttccatgcagcaacctggagcaattgagcaacctgaagcttatgctgcaaatatttacaatagacctcctcaacctcagccgcaaaatcaaccacagcagagcaattatgacctctccagcaacagatacaatcctggatggaggaatcaccctaacctcagatggtccagccctcagcaacaacaacagcagcctgctcctttctttcaaaatgctgctggcccaagcagaccatacattcctncaccaatccaacaacagcaacaaccccagaaaca

SEQ ID NO: 11644 - DNA, 450 bp, Glycine max
  unsure (1)..(450): unsure at all n locations
agcttatntaacataaatattanaactaccattatctngattataaagttntttttaaaaaaaaactatttgatcaaaagttttgatttaataaattattaattaagtaatatatgacttataagttaggatttatattttttattcattttatcctattaattttntaaaaataacttgtaccttccgataattatgatatctattttaaataaattacatgtacacattttgtttttttttttatcaaatttactttacttaataatgaatttattaaaattttaatcattaaatatacatgcaaacatataaatgttttttacatcagtattttatgtactatatagctaattaatcaaataattttaatcaatgttntgaatttaatcactaattttcaatttatacctccagactttttaactcattntnntttataaaaaaaat

SEQ ID NO: 11645 - DNA, 217 bp, Glycine max
ggaccccatttctaccaactacaagacctaataaaactatattatctacacaagaggtacacttctctatatttgcatagagggagttcttcctaaagactgaaagaacttgcctgagatgtcctaagtgatcatctaggctcctactgtacactaaaatatcatcaaaataaacaactggcaatctacttatgaaatcccttaagacatgatgcat

SEQ ID NO: 11646 - DNA, 324 bp, Glycine max
  unsure (1)..(324): unsure at all n locations
acatcatgtatgagattcatttactaccaaatatcaatatgttatccagatacaaacataaaatgacacgttcattattattaaattgtttcacatacacacatttatcactatcattaatttgaaaatcatacaaaagaataacttaatcaaacttttgtgtcaatgctntggagcttgtttcaaaccatacaaagatttaacaatttaatttttaaggaaaaagaatttcacagaaagtcacatctctagactccataatagtaccattagaaattgcagatacttctgaattaataactaagaatctataagtagtattat

SEQ ID NO: 11647 - DNA, 323 bp, Glycine max
  unsure (1)..(323): unsure at all n locations
gcgtctcgatatattacgggcctcaatctacatttgattttaanagtatngncgnnnngaattgctcagagcttcaacattcaattccgagcgtctcgatatatgacgggactcaatcagacatccgagtaaaaagtcgttgtcgtttgaattggctcagagcttcaacattcaatttcgagcgtctcgatatgtgacgagagtcaatcagacatccgagtaaaaagttattgtcgtttgaattggctcagagcttccacattcaatttcgagcgtctcgatatattacgggcctcaatcagacatccgagtaataagttatt

SEQ ID NO: 11648 - DNA, 355 bp, Glycine max
  unsure (1)..(355): unsure at all n locations
cgaatatatcgagacgctcgaaattgaatgtggaagctctgagccaattcaaacgacaataactgtttactgggatgtctaattgacgcccgtaatatatcgacatgctcgaaattgaatgttgaagctctgagcacaatcaaacgacaatatacttttactcggatgcctgattgagtcctgtcatatatcgacacgctcgaaattgaatgttgaagctctgagccaattcaaacgacaataactctntacatggatgtctgattgagtcctcgcatatatcgagacgctcgaaattgaatggtgaagctctgagccaattcaaacgacaataactttttactcggatgtctga

SEQ ID NO: 11649 - DNA, 218 bp, Glycine max
  unsure (1)..(218): unsure at all n locations
ctctgagcaaattcaaacgacaataacattntactcggatgtccaattgaatcccataatatattgagacgctcgaaatttanaacagaagctctaagcaaattcaaacgacaataacattttactcggatgtgctattgagtcccgtaatatatcgagacactcaaaatttaaaacagaagctcatagaaaattctaacgacaataacattntactc

SEQ ID NO: 11650 - DNA, 295 bp, Glycine max
  unsure (1)..(295): unsure at all n locations
ataaaggtagtagtgccatgttttcaaagcccgtactaaggcatacaactccttatcataagttgaatagttaagggtaggaccacttaacttttcactaaaataagcaattggatggccttcttgcatcaacacagccccaatcccaacatttgaagcatcacactcaatttcaaaagatttttgaaagtttggcaacgcaagtatggnggcattagttagcttttgcttaagaacattgaaagcttcttcttgtttctcttcccattngaaaccaacatttttcttgagcact

SEQ ID NO: 11651 - DNA, 289 bp, Glycine max
  unsure (1)..(289): unsure at all n locations
gatatatcgagacgctcaaaattgagatccgaagctctgagacaatagaaccgacaataactntatacacggatgtccgagagagtcccgtgatatatcgagacgctccaaattgaaaacgggaactcttagaaaattcaaacgacaataactacttactcggatgcgcgacagagagaagcaatatatcgagagatgctccaaattgattacgaaagcgcggagcacatgcaaacgacaataactttttactcaggtgtctgagtgagtcccgaaatatatcgagacg

SEQ ID NO: 11652 - DNA, 419 bp, Glycine max
  unsure (1)..(419): unsure at all n locations
ctcccagatagtgaatatgtgatctatggtgttctcttcacaggccacttgatcaacatgcccaacaagtgatatcaaatgataccaacaggtcacttgtctttgattgattacttttgatggttgttttctacttgagtttagattgtccttgatgattgattgattntttttattgatgtgtgtgtttttgcttgattgatgttcaatgtttgttactttgattgattgattatattntatatttgattacttgtctttgataattgcttntgtattggtgtttgctattgattgagcttgattgatgtgttattgtactcgtttatgcttgattaatattgaatgagtgtttaatgccttttggatcacttgattctatacattacaacaagtggaacatttttctctcttatcat

SEQ ID NO: 11653 - DNA, 438 bp, Glycine max
  unsure (1)..(438): unsure at all n locations
atcctctgagtcacctgcggctgcaagctacaactntatcttccacaattttgctcttttacttgttatnnatatnnttctaattaatatctaacagaggcctcttctatatagatatctacatgtccatctattatcgaacctacgatagaaacaagaactaaaatgggaatatcccaacgaaatagtcttaaaattagtaggcacaacaatctaactagcatcatggattggagtttgacccccanaagactccaaatcgggccaccgaacaaatagcacagggtggttaaaaagatcccgaatgaaaatagagacttatatctattgtagtaagttccaccttttagtgattgtagtaactctggtttaatagtcgttagaatgtctctntcatattgagggaatttatctaatggcattcaatcacagaatcca

SEQ ID NO: 11654 - DNA, 343 bp, Glycine max
  unsure (1)..(343): unsure at all n locations
gatctctgatgttaggataaatatctcctttcattggatganagtatgaaatgttgggtcttattcctctccatagttcataataagtctttctaatcaatggtgccatctatattatgttttgaacatagcaagctatgtttaccgcttctccctagaagtttttaggaagtgagttttcacaaagcatggtcctagccatttcttgcagagttntattnttcctttcaactacccgattttgttgaggtgttctcggtgaagagaagttaaggaagataccattcttttcatagaatgatntanactcaacattctcaaactcaatttcatgatcactcct

SEQ ID NO: 11655 - DNA, 373 bp, Glycine max
  unsure (1)..(373): unsure at all n locations
aattacttaaaggatgtttctgaatgtgaaccatatactaagtcatgcaatctatacagacacagattgagatgagtctaagaatatatgaaatatccaagaatggattcaccatattaganacacacctggatttctggatcagcaacaacatactgcttcaggagtctatcaccaaatgcacgtgaaacagcaagaactccaccaactctccaagttcctgtaaacatagtgtttagaatttccatagtgacaaacaagatgaatcttataataaatcaaataacanacagctaactagaagataaccttaccagcccacataacanagccacctgcatcttcaatccttcgcctctcatcagttngatct

SEQ ID NO: 11656 - DNA, 281 bp, Glycine max
  unsure (1)..(281): unsure at all n locations
aaaaacaactaacgcatgtgggatggcatgntgcttacaatctgcgataactgtagtaaaaacaatcttctttaaaagaccctttgaccttaaaattcgaagtggaacgtgctgcatcagtggatgcacactgattattatatctggctgatattacattaggccttgggcaacctcgctgtaaaaagagaaaagatattttaactatgacatgtgatgttacattggtattgagaagagatacgcatgcacaataaagtattctctgaaccatggaatgc

SEQ ID NO: 11657 - DNA, 274 bp, Glycine max
  unsure (1)..(274): unsure at all n locations
ccttatngctaatgattatgccatgttcatctaacttattcctaagtacccattttattcctatgatgggagagatttcaggtctcgttactagcgcccacacattggttctttcagactaatttaattcttcttgcatagcaactatccaatgatcatctattatggctccatctatgtttgtaggttcacccatagacaccaaattcatactatagcataagtctgtaagagaatggctaatcgttaccccttatgagatatcacaaataat

SEQ ID NO: 11658 - DNA, 299 bp, Glycine max
  unsure (1)..(299): unsure at all n locations
gatggcttcttcccattccaagcttcaattggagtcttatcttntacagacttagttggacattctgtgagtatgtaaacagcagtgtagactgcttcagcccagaatgtgttaggtagtcccttttccttgagcatcgatctagccatttccataactatgcgattctttctctcggantaatccatttgttgagaagaatatgcgactgtaagttatcgctcaatgccttcatcctcacaaaatctttcaaacttgcgagaggtgtactctttgtcgcgaacacttcttaagtactt

SEQ ID NO: 11659 - DNA, 263 bp, Glycine max
  unsure (1)..(263): unsure at all n locations
tcttcaagaagagagccttccncaacagctaatttcaatcattatgcattgtattaattcagtccaatctaatctattgtggaatggtcataaggttgcccctttcttacctcaatgtggctcgagacaaggagatcccatgtctccgtatatttctgtgacgtgtatggataagccatctcatataatcctttaagctcttcatgcaagtcaatggaagcctatgagagctggtcgaaatggaccattcatttcacacttaa

SEQ ID NO: 11660 - DNA, 282 bp, Glycine max
tgaacctacaacagtcccagaattctgacaatctgccttctaaagctgcccaaaatcccaaaaatgtcagtgccatttcattgaggtccggaaaacagtgtcaaggaccttaatccgtagcaccttccttatctgcaaatgaacctgccaaacttcactctactccagaaaaaggtgatgactaaaatttacctaacaatttctgtgcaagtgaatcttctctcacaggtaatactgatttgcaaaagcagcacattccccctcttccattcccttcaagag

SEQ ID NO: 11661 - DNA, 378 bp, Glycine max
tgcacaccaagtattccatctatggttgttttaccgattcacatcctcagacaatggggaaaggtaactgttattgatgtcaaacacaacctcttggcataagcggttgaaaaggtctgcaacttcagcatcactaccaagccaatgctcaattatgccacgataatgaaggtaccccacatcctctggggagttaatcaagttgtccatgaagataacataggatgtaatgtcattgctgcaatcaagatgacactgctcaaaggcaatcaggttgaggaacaaagacttggtaccgtcgtggatcaagagccgtggtattcgcagtttgccatccttaaatttgatgtcccagaagcgatcggtcttttttttttt

SEQ ID NO: 11662 - DNA, 319 bp, Glycine max
  unsure (1)..(319): unsure at all n locations
gcatgggcagttatgtctccgcatngatnggtaaatctgttcctcanattcctgnaaaatgcaaagaaccaggtacattcagcataccttgtattatatggaatagtaagtntgacaatgccatgctagatttangagcctctgntagtgttatgcctctgtcgaattttaattctctatctctaggtcccttgcagtcaactgatgtggtaattcatttagctaatagaagtgttgtctatcctgttggtttcatagaagatgtcttacgtagagttggtgaactgattctccctgttgtttttatatcttgaatatg

SEQ ID NO: 11663 - DNA, 325 bp, Glycine max
  unsure (1)..(325): unsure at all n locations
atcttacacgatttccatttctcctgtgtgataagaaaatatattatatagtattccaattggcacttgttattttctacaaaagtaggtgagatctgctagtgctaatgatatattcactatgtatagaactatgttatttatgaattggccacaagctcttaccttacaactgtcaatgtaatgtggctcattggatatttatatgcactttcgtgccactgtcagtctgttatactagattaccttgccagcaagactatntgttcagatgatttggtagttgtctcaccagatgttggcggtgttgccagagcacgtgctt

SEQ ID NO: 11664 - DNA, 372 bp, Glycine max
  unsure (1)..(372): unsure at all n locations
aatgtccgattcggngacataactcatctagacgctctaaattgaacaacgcaagctctcgagaaattcgaatggtcataacttttcacacggatgtccgattcggggacataactcatctagacgctcgaaagtgaacaacggaagctctcgagaaattcgaatggtcataatatttcactcggatgtccgattcgaggacataatatatcgagatggtcaaaattgaacaacggaaactgtcgacatattcgaatggtcataacttttcacacagatgtctgattcggggacataactcatctagatgctcgaaattgaacaacggaagctctcgagaaattataatggtcataacttttcacaccgatg

SEQ ID NO: 11665 - DNA, 248 bp, Glycine max
ccttatgatatcaaacataaattgggataaggtcatatcgtaaccgatgctctctctccgcgtcatgcattactttctatgcttgaaacaaaatagactggtcttgattgtctgaaaaacatgtatgaaaatgatgaaacttttggagagatttttaataattgcgaagacaatttacaacatggtttctttagacatgagggcttccttttcacagaaaacaaattgtgtgcgcctaaatgttctac

SEQ ID NO: 11666 - DNA, 265 bp, Glycine max
  unsure (1)..(265): unsure at all n locations
gaatatatcgagacgctcgaaatngcataccgaagctctgagacgactcaaacgactataactatttactccgatgtctgatgtgagcccggaatatgtcgagacgctcgaaagtgaataccgaagctttgagcagtatcaaacgacactaacattttactcggatgtctgactgagtcccggaacatatcgagacgctcgaaatggattatcgaagctctgagcagcgttatacgaggataaccttttactctgatgtctgatt

SEQ ID NO: 11667 - DNA, 369 bp, Glycine max
taacaaaaggcatgcgaagtgggtggaattcctagagcaattcccttatgttatcaaacataaaaagggaaaaggtaatattgtagctgatgctctttctcggcgtcatgcattactttctatgcttgaaacaaaattgattggtcttgaatgtttgaaaaacatgtatgaaaatgatgaaacttttggagaaatttttaaaaattgtgaaaaaattttagaaaatggtttctttagacatgaaggcttccttttcaaagaaaacaaattgtgtgtgcctaaatgttctactagaaatttgcttgtttgtgaagcatatgaaggaggtttaatggggcattttggggtccaaaagactctagaaacatt

SEQ ID NO: 11668 - DNA, 284 bp, Glycine max
gttcctctccccatttgaaacctgcatttttcttgagcactcgattgggaggtgctgccaatgagctaacgttgttcacaaactttatatggaaactggctaagccatgaaaactcctcacctgggtcacagacttacgtgtaggccagtcttgaatagccctaaccttgatcttatgaacttgcactccttttgaactcacaccaaagccaagagacacaacatggttagtacataggatgcattggtcaagattggcatacaatggttcttttctaagcaca

SEQ ID NO: 11669 - DNA, 346 bp, Glycine max
  unsure (1)..(346): unsure at all n locations
gctctcgagaaatacttatggtcataactnttcactcggattgccgattcaggtgcataacatatcgagacgctcaanattgaacaacagaagctctcgagaaattcaaatggtcataagttttcacatggatatccgattctgtgttataatatatcgagacggtcgaaattgaacaacgactcgagaaattcaaatggtcataacttttcactcggatgttcgattcaggcgcataacatatcgagacactcggaattgaacaatggaagctctcgagaaatacaaatggtcatagactttcactcggatggccgattaaggcgcatcacatatcgagacgctc

SEQ ID NO: 11670 - DNA, 383 bp, Glycine max
ctgatgcaacatttggagaggttaatgaatcttcgagatgatgcgctccatgagaggttggatcaaatggagaatagagatcataatgaagaagaaaggaggagaagagggaatgatggtgttcctagacaaaaccgaattgatggtattaaactcaacattcctccatttaaaggaaagaatgatccagaggcctacttggagtgggagatgaaaatagagcatgttttctcatgcaacaactatgaggaggaccagaaggtgaagcttgccgccacggagttttccgactatgctcttgtgtggtggaacaagctacaaaaggagagagcaagaaatgaagagccaatggttgatacatggacggagatgaaaaagatcat

SEQ ID NO: 11671 - DNA, 445 bp, Glycine max
  unsure (1)..(445): unsure at all n locations
gtgtntagtctgaattggggttgagtacttaccctnttctgctctcctaacctcgtatggtatttctcacagactaatttgtccccacactcatcatcaaaatggtgtggttgaaagaaaacacagacatatagttgatctgggccttaccttgntacatcatgcatctttacccttatagttntgggactatgctgttactactgttttctatctaattaatagacttcctaccacttccctcaactntgctattccctttgtcactcttttcaacaaggatcctgatttccaattccttaaaacttttggctgtgccttttttttcttttgttagaccttatcatactcanaaacttaattnntcgtctcaagagtgtctgttnggngtactcctcatctcataaaggtttcaaatgtttgtcttcaactggcagaatttata

SEQ ID NO: 11672 - DNA, 438 bp, Glycine max
  unsure (1)..(438): unsure at all n locations
gacccatgtattctgcaacatttccactaccattgngtcctagggaagtagtggaaagtatttctacaagagattgttgcaatgcttccatgccttgatttanagcatcctcagcctgctgggaagactgttgtagattacaaattcccatcaactgctgatcttgtaatggctcaaggtggttcttgatgatctgaaacccanaatacaagaaacgagtcaaaaacaaacaaattatgtacacaagtgaagttaattactatcattntagaatgtggattngacctaactcgaccccaaaaattagattataaggtgagagttacacctcacttatatgctctgtcttgatcttatctcttctcaatataggacttggatttctttcaatatacctcttcacacttagcaccctttggatttgatgcgtgaataaca

SEQ ID NO: 11673 - DNA, 322 bp, Glycine max
  unsure (1)..(322): unsure at all n locations
ttgagccaattcaaacgacaataactntttttcggatgtttgattgagtcccgtaatataacgagacgctcgaaattgaatgttgaagctctgagctaattcaaacgacaataacttttttctcggatgtctgattgagtcccttaacatatcgagaccctcgaaattgaatgttgaatctctgagccaattcaaacgacaataactttttacttagatgtttgattgagtgccgtaacatatagagacgctcgaaattgaatgttgaagctctaagccaattcaaactacaataactttttactcggaagttaattgagtt

SEQ ID NO: 11674 - DNA, 369 bp, Glycine max
  unsure (1)..(369): unsure at all n locations
cgtgattcttaattatattaaagagttaaaanaatatatgagattaataaaattagagaatattatgatatatatttttagttaccatgtaggtacttaaataaattagaagcttaaggtagttgaacatgttgtgaattattctgaagttaaatntgtgtgttggtggtggttttgtttcgttatgtacgttcattaaaaaatgagaaaattaattagtagtcttagaataaattaaaaacactgtgaataaataattattatatctaagttatataatacacataaattaaaacagtacggtgatggagatgagagacatagagacatacataataaacataacataatttaacaagaaatacgaga

SEQ ID NO: 11675 - DNA, 370 bp, Glycine max
  unsure (1)..(370): unsure at all n locations
tcactatgaatgacaaattccttgngataaaggtagtgttgccatgttntcaaagcccgtactaaggcatacaactccttatcataagttgaatagttaagggtaggaccacttaactnttcactaaaataagcaattggatggccttcttgcatcaacacagccccaatcccaacatttgaagcatcacactcaatttcaaaagatttttgaaagtttggcaacgcaagtatggnggcattagttagcttttgcttaagaacattgaaagcttcttcttgtttctctccccatttgannaccaacattttcttgagcacttcattgagaggtgctgccaatgtgctaaaatccttcacaaatcgtctat

SEQ ID NO: 11676 - DNA, 333 bp, Glycine max
  unsure (1)..(333): unsure at all n locations
gcgcatattatatcgagacgctcaaattaaccaacggaagctctcgagatattcanatggtcataacttttaactcggaggtccgattcaggcgcataatatatcgagacgctgcgaaatgaacaacggaagctctcgagaaattcacatggtcataacttttcactcggatgtcagatcaggcgcataatatatcgagacgctcagaattaacaacggaagctctcgagaaatccaatggcataactttcactgggatgccgttcacgccataatacatgagacctcatattgacaacggagctctcataaatcaatggcatactttcactc

SEQ ID NO: 11677 - DNA, 359 bp, Glycine max
tcaagctgtgaggacctgtatatccttgtttccttacaagaatgtctgggcttggaagttgcaaagtccagcaagggcgatgaaatgactcaccgaaaatatgccctttgtctattagaggatactggttttcttggctgcaaaccatcctcccttccaatggatccaaatttaaagctcaacatgcccagaggtgatttactgcccaatccctcaatgtacatgcgtatacttggtcagctcatgtacctaactatttcaaggccggatattacatttgttgttaacaagctaagccagtacatgcaacatctcaagacacctcatgtagatgttgcgatcatctgctacaatatatc

SEQ ID NO: 11678 - DNA, 350 bp, Glycine max
  unsure (1)..(350): unsure at all n locations
agcttatctcctaatgcacctattccattcctcccatggtcatcatcaccataaacagcaataacctctctccagccaaagtagttaacagagtctgctattgcagtcatttcataaatgtcactaaaagcagctctaataaagaatgggaattgaagtgaagaaagagtatggtcagtggctgtaaatgatagtagaggaactnggagctcgttcgctatatgagatatgacatgagctgttgtagacgtctggggaccgattatagccacagtttgtgtgccatgagctgcaggctatacacacaatttatgtaaccaagagaataatctgcaaactttgagaacttg

SEQ ID NO: 11679 - DNA, 344 bp, Glycine max
  unsure (1)..(344): unsure at all n locations
agaatgaagctctgataccacttgttggacaagtggcctcagatatcttaagaagggggggttgaattaagatattacaaattatttccccanttaaaaattctatttaactttctattcaagttataaattcccttaataatgaatntcttaaatattaattcaaatagaacaagttgaatatgaatataaaacaataataaataaagggagttaagggaagagaaagtgcanacctcagattatactggttgggccacacccttgtgcctacgtccagtccccaagcaacccgcttgagagttccactatcttgtaaattccttttataagttctaaacaca

SEQ ID NO: 11680 - DNA, 395 bp, Glycine max
agcttaacaaggctctctatggctaagttctaattctccaaggcagcggattcacaggttaaaatctactatacttgagcatggcttaggaacagacaggtgacatgcttctctgttcatctacacacatcaagagcatactgtctatcttttagtctatgtggatgatatcatcatcacaaacagttttgtctatcttagtcggcagctaactttcaaactaaacattgccttgtctcataagaaactgtgtcatttggactattgtttgggactagagatcaaatatcatgcttataattctatactattgactcatagcgattatattcatgatttacttcacaaaactcatatggctgaagcacattctattttctctcccatggttccta

SEQ ID NO: 11681 - DNA, 413 bp, Glycine max
agcttgaaggtaaactagatgccttggttaacctggtaacctagctggccttgaataaaaaatctgcacttgttgccacactctgtggtttatgctcctctgccgaccaccacacagacctttgcccttctgtgcagcaatctgaagcaattgaacagcctgaagcttatgctgcaaacatctacaatagacctcctcaacctcagcagcaaaatcagccacaacagaacaattatgacctctccagcaacaggtacaatcccgggtggaagaatcatcccaaccttagatggtcgagtcctccacaacagcagcaacaacaacaaccttattttcaaaatgctgctggcccaagcagaccatacgttgctccaccaatccagcagtaacaacaacaacagcaaccgcaatag

SEQ ID NO: 11682 - DNA, 354 bp, Glycine max
gaacaagctacaaatggagagagcaagaaatgaagagccaatggttgatacatggacggagatgaataagatcatgaggaagcggtatgttccggctagttactcaagggacttgaaattcaagctccaaaaactaacccaaggcaacaagggggttgaggagtatttcaaggaaatggatgtgctcatgattcaagcaaatattgaagaagatgaggaggtaactatggctcgatttcttaatggtttgactaatgatatccgtgatattgttgagctgcaggagtttgttgaaatggatgatttgcttcacaaagcaatccaagtggagcaacaattaaaaaggaagggagt

SEQ ID NO: 11683 - DNA, 410 bp, Glycine max
agcttcttagtctcgactgatgaagatgaattcgtggttacttcatgcactcctctaatgacaatagcatcacttccggcactaaattgctgggagtttgaagccatcttctcaattaaatttctggcttcagaaggggtcatgtctccaagggctccaccactggcaacatctatcatacttctctccatgttactgagtccttcataaaaatattggagaagaaggtgctcagaaatctggtggtgaaggcaactggcacataatttcttaaatctctcccagtattcatataagctctctccactgagttgcctaatttttgaaatatcttttctgatggtcgtggtcttggaagtagggaaaaatttttctaagaaatctctcttgaggtcatcccagctcgtgat

SEQ ID NO: 11684 - DNA, 386 bp, Glycine max
  unsure (1)..(386): unsure at all n locations
ctgacagccaatgggtgagtccagtttaagtggttcctaagaagacatgcctcacagtgattaagaatgagaagaatgagcttatccccacaagagtgcagaacagctggcgagtctgcattggttataggaggctgaaccaggtgaccagaaaatatcattttcccctgccattcattgatcaaatgcttgagcgcttggcaagtaagtctcattactattttcttgatggtttttctggttatttacaaattcatattgctcctgaggatcaaganaagaccatattcacctgttcctttagcactttttcctataagaggatgccctttggcctatgcaacgcccctgataccttctagtgatgtatgcttagcattttcagt

SEQ ID NO: 11685 - DNA, 387 bp, Glycine max
  unsure (1)..(387): unsure at all n locations
tcttctaccccatttctgacagccaatgggtgagtccagtttaagtggttcctaagaagacatgcctcacagtgattaagaatgagaagaatgagcttatccccacaagagtgcagaacagctggcgagtctgcattggttataggaggctgaaccangtgaccagaaaatatcattttcccctgccattcattgatcaaatgcttgagcgctcggcaagtaagtctcattacctatttcttgatggtgtttctggttatttacaaattcatattgctcctgaggatcaagaaaagaccatattcacctgttcctttagcactatttcctataagaggatgccctttggcctatgcaacgcccctgataccttctagtgatgtatgc

SEQ ID NO: 11686 - DNA, 393 bp, Glycine max
agcttgtttgagaagagcgaggtttaacttaatgatatgtctgtgttttctttccacatcagcattttgatgatgtgtgtgagggcaaattatcctgtgaatgatcccatgggtttgaaaaaatgagataagaggtctaaattcacctccccaatctgtttgaacactcttaattttggtatcaaattggagttcagtcatggttttaaattggtaaaaaacagaaaatgtttctgatttatttttaagagaatagatccaagtgaacttagaataggcatcaacaaagctgatataataagagaaaccatttgtggcacaaatcactgtatatagttcaagagagcagatatacagttgaaatcatggtagtctatgtgactttcacataac

SEQ ID NO: 11687 - DNA, 368 bp, Glycine max
  unsure (1)..(368): unsure at all n locations
agagagagccttattagagaagnttagttctattgatctntaaanatttgctcagntagaagtgttagagagaagtntagttgaatgcaaaaggtgagggaaagaccttgccgccaacttcagaatcgaagtcgtacttgtcaagagcagcagtgaagtcttcgatggtgaatgaaacaccttccattggagcattgcggcatctctcgtaggcttcttcgaagagtttcttaagcctcgctctctctttgttctgcgcattggctattgctattgagttcgcaatggtaattgaaacgcgcttttgggattgttgggtccaaagagaaggtttggagaagagagaagaagatgagagtggggagcac

SEQ ID NO: 11688 - DNA, 401 bp, Glycine max
cattttaataagtgttagaacaaaaaatgttcttataagtcacatgtatagtaatgttaacaaacttaacatacatattagattgtaattacatgatgatataaaattattttatactattaatatataacctattttttcaaataaaattatcatactttaatgtaatcaaatgattattatgatgagaaaactaatataaaataaccctctttaatatgaaattaaccatttcacttacaagaattgatattataataatatattattatataacagtgaaataaaatacaatattgaaaaggtgataacaaaaaggtgtattcttaaatttgttaaaaaaatataaagtaaatcatattcataaattaattttaggtctagacgatcccatgatcact

SEQ ID NO: 11689 - DNA, 436 bp, Glycine max
  unsure (1)..(436): unsure at all n locations
ttgaactcctccaacccttgacctgacttcttggaaagccttttcacagcaaactcttggccatccttcagtcttccctgctaaccaaattgttagaaatatttcgagttatgaaaacaaacatctatagttggttttccatatcaccttgtacacaggtgcaaagccaccttcttccaatatgttactctcagtgaagttntcagtggctctttctatgatggggaaatcaaatgtggacaaatcaatgccttcttttctcagttttcgtttgaaatggttcctataaattattcttgctacctctgataggtttgaagataacaatagagaatcactatgacactcacaatgtgcacgtatgattcataaacctactatcatatattagatgttatcaatatccaagacaaaaattacctggctttctgagtat

SEQ ID NO: 11690 - DNA, 357 bp, Glycine max
  unsure (1)..(357): unsure at all n locations
gcttgataacctagccctatgcaaatggagctttaggtgatcatgatttccatgtattatggatttcaggttatatcaaatggatgtgaagagcacttttctcaatggatacattgaagaagagatatatgtagaccaacctctatgttttgtagacttcanacatctaatcatgtgtacaagctgaaaatggctcggtattgtttaaaacaagaacctacatcttggtttgaaagaatgagcagatttctaattaagaaatcatttgtaagaggtcaagttgacacaacatttgttatcaagagatcaaataatgagtggttgattgtgcatatttatgttgaagacataatcttt

SEQ ID NO: 11691 - DNA, 490 bp, Glycine max
  unsure (1)..(490): unsure at all n locations
tccatcaagatgagtggagggagagggagagaaatagcatgatattatatgcctcaaatgaggtctgaacattgaagcataattctcaaatgatcaaagttgaaaataatacacacatatgatctctatttatagcctaagtgtcacacaaaattagagggaaatttgaatttctattcaaatnttacttgaattggaaattgaatttgtggagccaaaatttcactaattatgattattaaattttagctatgattcagcccacaaattcaagatcaagtccaagattctccactaagtgtgcttaggtgtcatgaggcatgtatagcatgaaggacatgcacaaagtgtgactatatgatgtggcaatggtgtgtagcaagcaaatgctcacctnctcctctaaaatataattggattgngcttcttccaattaaaataaattaattcccaacacacatcanatttcacttaatgatgcgaattataa

SEQ ID NO: 11692 - DNA, 408 bp, Glycine max
agcttgctttgaaaatttccctcaccctatgccttacaaactacaatggttgagtgagaattgggagttagttgtaaatagacaagttttgatatgcttctccattggaaaatatgttgatgagatattgtttgatgttgtccctatggaagctagccatcttttacttggaagaccttggcaatatgatagggatgttgtccataatggggtcacaaacaatttttcatttgtacataaagggcaaaaggttagccttacacctttgtctccaagtgaggttgtaaggatcaaataaaaatgatagtgaaaagagaacaagagagaaaagaagagaaaaacaaaattgatgaaaagagatagaaacatgaaataagcgaaaagaaagaaaataatggagataaagaa

SEQ ID NO: 11693 - DNA, 363 bp, Glycine max
  unsure (1)..(363): unsure at all n locations
gatgatgcactccatgagagggtggatcaaatggagaacagagatcataatgaagaataaagaaggagaagagggaatgatggtgttcctagacaaaactgaattgatggtattaaactcaacattcctccctttaaaggaaagaatgatccagaggcctacttggagtgggagatgaaaatagagcatgtnttctcatgcaacaactatgaggaggaccaaaatgtgaagcttgccgccacagagttttctgactatgctcatgtgtggtggaacaagctacaaaaagagagagcaagaaacgaagagccaattgttgatacatgggcggagatgaaaaggatcatgatgaagcggtatgtg

SEQ ID NO: 11694 - DNA, 391 bp, Glycine max
agctgtgaggattttcaaacgacaatatctttttactcggatgtctgattaagtcccgtaatatatcgagacgctctaaattgaatgttgaagctctgaccaaattcaaacgacgataaatttttactcggatgtctgattgagtcctgttatatatcgagactctcgaaattaaatgttgaagctctaagcaaattcaaacgacaataactttttactcggatgtctgattgagccccgtaatacatcgagacgctcgaaatttattgttgaagctctcagcatattcaaacgacaataacattttactcggatgtctgattgagtcccgtattacatcgagacgctcaaaattgaatgttgatgctctcagcaaattcaaacgacaata

SEQ ID NO: 11695 - DNA, 301 bp, Glycine max
aaacagaagaacactaccaaaagacctggaagaaacagcaatgtgacaccccccaaaacaattgctatctttgctccctcgctcattttcctgtatgatagaacactaggtctctctgagactgttagtggagacaatgtggtattaggggaaactgaagaacattgtttcaaaggtgctccacataacatcaaattacctctaaatgaggaggcatggaacttatggagacctgaaggaatagagccattcaagtagttgaagctcaaatccaaatccttaaggctaggaaggttaacat

SEQ ID NO: 11696 - DNA, 293 bp, Glycine max
  unsure (1)..(293): unsure at all n locations
ctaagctntcattactcctcatgcttctcaccatgtctaataaggtttgatttcttcgttctgccacaccattctgatctggagaaccaagcatagtgtattgtgcaacaatcccatgttcttgaagaaatgtcgcaaatgaacctggtgcttgtgcattctctgtgtatctacaatagtacttcccacctctatctgatctcacgatcttaatttggtttccacactgtttctcaacttcagcccttaaaactttaaaggcatctaaagcttctgatgtaatcctatcccac

SEQ ID NO: 11697 - DNA, 409 bp, Glycine max
gagctttaccgagtgtctgaaagcctcatctatggttgagaaccactccctatctccacacatgtgattgctagcaccggagtcaagaaaccaagtctcttcttgttgcaagttgtcagcttcgacaagagacatgaacagcatctcttgttcttcatgaatctcagcataggtagccctctccttccatcttgcgcattcctattggaagcgtcctaatttgtggcacttaaagcactccactgtggctttgattgagactgccttcctctgcctctgcctcgaccccgaccaaagcctctacctctgcctgtacctccattctgttcttcatgcgagaccttcaatgcttgctcataccttgtgtaccaccatgagaatacattctttgttcatgaaccaaaaggct

SEQ ID NO: 11698 - DNA, 323 bp, Glycine max
tgaacaacggaagctctcgagaaaatcgatttggcttttattctcacacagatgtccgattctgggagataatatatcgagacgcacgatattgtacaacggaagctctcgagagatttgaatggtcataacatctcactcggatgtgcgatccggggacatatattatcgagacgctcgatattgaacaacccgagctctcgacaaattataatggtcgtaactttttacacgaatgttcgagttcgggacataacttatctagacgctcgaaattgaacacccgaagctctcgacaaattggaatggtcatacttctcaca

SEQ ID NO: 11699 - DNA, 341 bp, Glycine max
  unsure (1)..(341): unsure at all n locations
agcttaataaatctatatatggtttagatcacgcctcccatcagtggtaccttaagtttcatgggataatttcttcatttgggtttgatgaaaaccccatggatcaatgcatataccacacggtcaatgggagtaaaatatgttttcgtattttatatgtagatgatattttacttgcagccaatgatcggagtttgctacatgaagtgaaacaatttctctctaacaantttgacatgaaggatatgggtgatatcttatgtcatcgacattaagattcatagagatagaccttgaggtattttgggtctatcataggaagcctatattaacaaaattct

SEQ ID NO: 11700 - DNA, 409 bp, Glycine max
agcttcattcctttttcactcatgtgtccaagtctttgatgccacaaggttaaattattgacagcctgaataactgctatcatatcctcatctgcaattatgtaaagagatcctcgcttctttccacgagccataacgagattgccttttgttaccttccaagttccatctccaaaagtggtgtaatgcccctcatcatccaactgccctatagatattagatttctctttaagacaggaatatgtctgacattgtgcaatgtccataggaatccattggaggtcttaatgtcaatatcacctcttccaacaatgtcaagagattttccatctgcaaggtaaactttcccaaatcttccagaagtatagttagacaataaatctttagagggagtggtgtgaaacgacc

SEQ ID NO: 11701 - DNA, 387 bp, Glycine max
gcttggagtttcaagtgccaattcgtcttcttcttttgtccagtcttcttctggcttcaattcattagtgggctttccttctgtgtccagcatcttgtgatgttcccagcctttgatgatagctttccaggttctgctatccactgatttgaggaaggccaccatccttgctttccagtattcatagttggttccatccagaattggtggtctgttcactggtcctccttctttctccatgttcatcagaatttatctccctagatctcactcactgagttcgagtgcccgctctgataccaatagaaattctgataccaatgccagatgtcgtacaggatgtcacgacatcacgcttcagaacatgcatattatgtttgagagtat

SEQ ID NO: 11702 - DNA, 338 bp, Glycine max
agcttctaaactttgtacaagaatgaagctctgataccacttgttagacaagtggcctcagatatcttaagaagggggggggttgaattaagatattccatactctttcttctaattaaaaatctatcttactttttacttaagttatgaattcccttaatgacaatcttcttaaatattaattcatatgaaccaacttgaatatgaatataacgcaataataaataaaggagattaacggaagagaacatgcaaactcagttttatactgcttccgccacacccttgtgcctacgtccagtccccaagcaacccgcttgagagttccactaacttgt

SEQ ID NO: 11703 - DNA, 412 bp, Glycine max
agctttagggcatatggaaaacttatttattgtcttgtttggttgtaagaaaggaaagggaagaagtgaaattgaattagagagagaaaataaaagtaggataaatatacaagaatataatgaagtaacggaaaatacttaaataaaattttttggtaaaaaaaaaaggaagagaaattaatattaaagaaatgacttatttattaggattagtatttactatttgctattagtattgttttaaataatcttagtatatatagaattcattttatgtacaagacatttgtttgttccaatacctacacaatagttataccctatcatattaaatttattcattgtcagcctaccattagatgtagactaccatattaaagttataagttcttaaatataacttactaatact

SEQ ID NO: 11704 - DNA, 405 bp, Glycine max
agcttaaaaaaaacaaaactctgacttagtagtgcgtatggtatctttacacacaattaattcagagaaatgaagcagctccaagaccttaccactagaatagaaataatcaggcagctggaaagcctttgcaagccaatccagaacaatcgtctcaagttcagttgcagcaggagaagttatccagctgaaacccacgatgttaagacccgcactgagcatctctcctagaaacccagcaatgctactgttggaaggaaaatacgcaaaataatttgggctttgccagtgcgtcacccctggcagtattttttcctgcacatctacaatatggcaaacactatcaagctagcattgctcaaacaactctacaaactacaagataacgaaactgcaactactaca

SEQ ID NO: 11705 - DNA, 395 bp, Glycine max
agcttggatttccttttagtagggaatctatccttcctaagatggagccaaacccagtcaccctcattaagaactagctcttttcttcctctattgcctttagttgaatacacctttgtttggttctctatttggttcttaaccctctcatgcaacttctttacaaactctgacctagattccccttctttatgtatataagaagtgtccagtgggaggggaatgaggtctaatggtgttaggggattaaacccatagacaacctctaaaggggactgcttcgtggttctatgaaccccctgttgtaggaaaattctacatgagaaagatactcatcccaagacttatggttgcctttcagaagagcccttaaaagggtgcataaagacctattc

SEQ ID NO: 11706 - DNA, 380 bp, Glycine max
agcttgcaaacaagctgcttgttgtaatcttcaaagcccggtggttgagtcatgaagacttcctcctgaaggatgccattgaggaaggcattattcacatcaagctgctggagtttccacttatgagtaatagcaagagtcagaagaattctgacagtaacaagcttgattataggtgagaaggtctcattgtaatcatacccaagtctttgatgaaagcctttgacaacaaacctgactttatatttgttaactggacgatcagggttttcattgaccctgaagacccatttgcaaccaatgggagacctgtatggaggtaaaaagtggcatgaagcttttcccaaagatgccatgtcgttttgtcttctactatatga

SEQ ID NO: 11707 - DNA, 374 bp, Glycine max
gtctggcaacctagtaactcagcttgtcatttatcacaaatctgcatctgcacctgttgcaagagtctgtggtctatgttcttctgcagatcaccatacagatctttgtctttctttgcagctatctggagtcaatgaacaacctgaagtctatgttgcaaacatttataatagaccccatcagcaacaaaaccaacaacaacagactaattatgatctttcaagcgacagatacaatccaagttggaggaatcatccaaatctgagatgggcaagtcctccacaacaacaacagctggtcccttctttccagaatggtgctggtccaagaaagccatatgttgctcctccaatgcagcaacaacaaagacaac

SEQ ID NO: 11708 - DNA, 409 bp, Glycine max
  unsure (1)..(409): unsure at all n locations
agctttactatgcaaggtttattctatgaaaattccttcatctaacttagcatcaaactttcctaagttttcttttccattgtttaatacaaagcatttgcaaccaaaaacatgaaggtgtgaaatgttaggttttctaccatgaaacaattcatatggagttttctttaaaatgggtcttattaaagccctattcatgatatagcatgcaatattaacggcttcagcccaaaatttttttgaaagaggagtgtcatttaataaggttctagcaatttcttccaaagatctatttttcctttcaacaactccattttgttgaggggttctaggtgcacaaaagttatgttcaatgccatgtttatcacanaataattcaaattctttattttcaaattcacccccatga

SEQ ID NO: 11709 - DNA, 356 bp, Glycine max
  unsure (1)..(356): unsure at all n locations
aacatcagaccacttccatggtgttgtatctacttcacaaggacttgatggggcctatgcatgttgaaagccttggaggaaagaggtacgcctatgtcggtgtggatgagccctccatacttacctgtgtcaacttatatcaaagaaacatccgactcccttgaaggattcaaagagttgagtctaagacttcaaagacaaaaagactgtgttatcaagagaatctggagtgaccatggcagagagtttgaaaacaacaagtttactgaattctgcacatctgaaggcatcactcatgagttctctgtcaccattacaccacaacaaaatggcatagtngaaaggaaaaacaggac

SEQ ID NO: 11710 - DNA, 359 bp, Glycine max
  unsure (1)..(359): unsure at all n locations
acactctcatctcatgtatggaatattcatatncattactcactacatgcaatatctgcatgcagcacgcttagttatcacaccttctttccctaggtcttcttaaagtagtacaagttggtaattcttcacatcattactccaacagttcattgnggcttcaatgggcacttcaaatcttaagaatcccttaccaagctgtggtcaaaatctgttccttccaaagcatgttgtgttattgctgagtttcttcctgggggaacattgaaacaatacttgtctaataataggcagaacaaactttcatataaggttgtgattcagctggctttatacctctctagaaggtgagtcacatt

SEQ ID NO: 11711 - DNA, 307 bp, Glycine max
  unsure (1)..(307): unsure at all n locations
tgagtcaacggagcggctatctgagcattaattttgacgaaacggcggtagaacccggttaggcccaagaaaccgcgtagggccttagttgttgtcggaggcggccagtggagcatagcttgtatcttataagaatcgggctcgacacctcgacgtgaaacaaaatggcccaagtattcaatccttcgttgaccaaagatacacttggaagctntcaaacggaaatcagcttgttgcagagtacgcaggacgcaatccaaatggttgacgtgggattggaggtcactgctatatactaaaatgtcat

SEQ ID NO: 11712 - DNA, 310 bp, Glycine max
  unsure (1)..(310): unsure at all n locations
atattctcaacagtcacatgtttgtacttggttcttgaatggccatcaaaagcttatatatatgtgacttgagacacgaatttgctaagagattntcagaacaaaaaggtcttatcctcttaaaaagcaaaatcgttntatcctcttacaaattccttggctaaaacacttgtgattcagtaaggaattatntgagtgctcaaattgttcaatctatctctttcaagagagatttcttcttttcttcttcttcattctgaanagggattaagagaccgagggtctctttgtgtgaaagaattctaaacac

SEQ ID NO: 11713 - DNA, 328 bp, Glycine max
  unsure (1)..(328): unsure at all n locations
cagctcgagaataagcttcttcgcgtngaagaatgngatctgcatgcattatatacacataagtctcattcttcaacgccagaaacacgtaacccacgtgtcttttgcatgggcccacttgtttctaacggtggaggtgaacatgataatgatgatagtggttgcatgagttggctcgactcgcaaccgagtcgaaccgttgtgtttttaagccttggaagctacggaaggttctcgaagagtcagataagggagatagcgttagggttagagaggagtggacaaaggtttttgtgggttatgaggaacccatatgagaagaagtgaa

SEQ ID NO: 11714 - DNA, 334 bp, Glycine max
  unsure (1)..(334): unsure at all n locations
tctacttcaaaaacccttgaactacttcacattgatttattntgtccctctagaactataagtttaggtgaaaattactatggctntgtaatagtagatgattactcaatgttcacatgggctntatttttgaaaaccaaaatgaagctttngatgcttttcgcanacttgccaagatgattcanaatgaaaaaggtcttaacattgtttcacttagaagtgatcatagaggtgaatttcanaatgagttctttgaaatctttttgaagaaatgtaattaccataatatttctgaccaaaacacctaacagaatgggtttggaaggaaaataat

SEQ ID NO: 11715 - DNA, 516 bp, Glycine max
  unsure (1)..(516): unsure at all n locations
gctgcctgccctgattattgagggactcatggcactatgaattatatatttcttgtgataaaggtagngttgccatgttttcaaagcccgtactaaggcatacaactccttatcataagttgaatagttaagggtaggaccacttaacttttcactaaaataagcaattggatggccttcttgcatcaacacagccccaatcccaacatttgaagcatcacactcaatttcaaaagattnttgaaagtttggcaacgcaagtatgggtgcattagttagctnttccttaagaacattgaaagcttcttcttgtttctctccccatttgaaaccagcatttntcttgagcacttcattgagaggtgctgccaatgtgctaaaatccttcacanattgtctataanaactngctaagccatganaactcctcacctcggtcacggacttangtgtangccattcttgaatagcccctaaccttctctcatcaactngcactccttttgaactcacaac

SEQ ID NO: 11716 - DNA, 393 bp, Glycine max
  unsure (1)..(393): unsure at all n locations
gctctcatatgttatgcgtctgaatcggacatgcgagcgacanattttgatcatttttatttgccgagagccttcggtgatcaatatctagcatatcgatacgctatgtgcctgaatcggacatgcgagtgaaaagctatgaccattagaatttctcgagagcttacgttgtacaatntatagcgtgtcgatacgctatgcgcctgcatcgaacatgcgagtgagaagatatgagcattatactttctcgagagagtgccgctggtcaattcctagcgtctcgatatgctatgtgcccgaatcggacatgcgcatganaagtatgaccatgttaatntctcgagagcatctgatgatcatgtctagcgtctcatactctatgcgcctgaatcg

SEQ ID NO: 11717 - DNA, 297 bp, Glycine max
  unsure (1)..(297): unsure at all n locations
tagcctgtcgacatattatgcgccagaatagaacatccgtgtgaaaagataagaccatttgaatttctcaagaacttccgttgttcaatttcgagcttcttgacatattatgtgcccgaatcggatatccgtgtgaanaagtatgacactctgaattcgcgatagttccgatgttaattcgagcgttcgatatatataccctgatcggcatccggtgaaagtatgaccttgaattcacagagcttcgtgtgattacgagcgtgtcattgtgatccctgatcgactccggtgaaagta

SEQ ID NO: 11718 - DNA, 351 bp, Glycine max
  unsure (1)..(351): unsure at all n locations
aaccattatatttatggcttttgattgtgatgaatgataatataaataagttgagtctttgtttaccaatggttaacaagttggtgcaccccagcatcattggagcaaacatgggccttggcaagctgccacatccaattagtagtagcatcaacaggaggtgtaaccacgcgctntgaccgggaattaggtccagcatgagggaggctaagttctatagccacaggcttgagagtgccacgtggtgtcaagaaaaagatggtgcgtgtggcatatgatttcctaccatcaagggcattgatcccttctaagaaaggtagatatatatcatgataatcaatcataaacagc

SEQ ID NO: 11719 - DNA, 333 bp, Glycine max
  unsure (1)..(333): unsure at all n locations
agtgagctgcccagtgagtataatgttagttccaccttcaatgtctctgatttatctctttttgatgcagatggagaatccgatttgaggacaaatccttctcaagagggagagaatgatgaggacatgttcaagaacaanggcaaggatccacttgaaggacttggaggacctatgacaagggctagagcaaggaaagccaaggaagctcttcaacaagtgttgtccatactatttgaatacaagcccaagtttcaaggagaaaagtccaagggtgtgagttgtatcatggcccanatggaggagaactaaatgacaccactctgtctcaat

SEQ ID NO: 11720 - DNA, 288 bp, Glycine max
gacaagaagtttaatgagtgtatgagcaactcaggattcaacagatgtgacatggaccattgctgctatgttaagaaatatactaatagttatgttatccttgtcgtgtatgttgatgacatgttgattgcaggatctagtatggcagaaattaacaagttgaagcagcagttggcagaaaactttgaaatgaaggatcttggtccagctaaacaaatccttggtatgagaattcttagaaacagatcagaaggaattttgaagctgtctcaggagaaatatatacac

SEQ ID NO: 11721 - DNA, 440 bp, Glycine max
  unsure (1)..(440): unsure at all n locations
ctttcttgatgataatggttactagacttactctttgctctatctgtcccaagtgagattcgaatacgagaattccatgagagtcttgttttgaagtcatcatctgagtggagtgcatcatacaatgattactgtagtactcatagatntagaagcctttgatcatgctctgaacaatatccaacaagctcaacaacattngcatgccgtattctgtcaatattatntatcaattcaataaattcatcatccttctggtgtgcagaggctctcttgcccaacttgtctgcataacaaataccatcttcaataactaaagctacaaaataactatatattcttcanaatcaaatntctgatgtgatcaagatcagtaaataacaacaatagaagaaacttcanactaggaataaacacttcaattntctcaatagtcacag

SEQ ID NO: 11722 - DNA, 372 bp, Glycine max
  unsure (1)..(372): unsure at all n locations
tttttcagggtgtgtttactggtaaatgtgggacaagtttagaccatggtgtagtggttgttggatatggctctgaaaatggtgtggattactggctggtgaggaattcatggngcactggatggngtgaggatggctatttcaagatgcagcgcaacgtgagaacctccacgggcaagtgtggaattacaatggaggcctcctaccctgtgaagaatggtctaaactctgcagttcctaattcagtttatgaaagcactganggtgtatgtagcagtgcttgatataaccttcatcgntatttatgaccttcgaatttggaaagaggaacacgtgctgaagtngcaagaaagtgatgtttctgtatatctt

SEQ ID NO: 11723 - DNA, 437 bp, Glycine max
  unsure (1)..(437): unsure at all n locations
atttcgggttcctgtaactntccaaataatgtagcaaaagacatgttagttaaatctcgtgactcggtaatggatgttaccttangttgtcattctctgcttaaacatctcaatactctatttatgtgatcttcanttggaanaaatatccctaaagatgcaagatgaattattatatgtgtaaacctctcttgcatgtcttgtatactttcatttgaattcattctaaataattcatactcatgagttaaagtatntatcctagatcttcttacatttgttgtgccctcatgtgttacttgtagggtatcccacatttcttttgcactnttataatttgataccctanagtacttatccattcctaaggcagaatgtaatatatnntttagctttaagttgtatggactaatctctttcttcttcactcattcttc

SEQ ID NO: 11724 - DNA, 454 bp, Glycine max
  unsure (1)..(454): unsure at all n locations
tgaatatgatgtagaagaaagtgaatgtgaaccttttacccctttgaaagacttgtatttaaaaatgttttaaaatacttttaattaatatataaagtattattcctttattagtatatatgtgaggggctgagagtgtcacaataacaagggagctattactaagaattaataaaggaccacaaaatntgaatgataaacaatacagcatgtttaaaaaatttaatatactattattatattcttatctaatatttaagaatattactataatctacacccatgcattaagtataaagtaagtttatattattattcactcatatatcatcattnaatataattttaagataaatattagtagtattatagatgaataaataatattgaatgaagtttaaaattgattacactgtattatatacttatattttattaatacaaacatacttta

SEQ ID NO: 11725 - DNA, 271 bp, Glycine max
  unsure (1)..(271): unsure at all n locations
gatcaggagaagacggccttcacatgcccttttggcgtctntgcttacagacgaatgtcattagggttatgtaatgcacttgccacatttcagaggtgcatgttggccattnttgtagatatggtggagaaaattatcaacgtattcatggatgagttcttgatanttgggaaagtgtcatttcatggttcgagaaggcatagtcttgggccacaaactntcagcccgaggaattgaggtagacctggccaagaatgatgtcattgagaaa

SEQ ID NO: 11726 - DNA, 299 bp, Glycine max
  unsure (1)..(299): unsure at all n locations
atttttattaaagatctttgaatgttgtaaaanattatgactatgagtgtaagtttttggtacatgtcaattcattagtctttgagttagaaatttattgatttccaccctgtgcgaactcagcatttgttataaaatgtttaaaattcaaagagaaagcatctgtttttattttttattaaatttgcttcacaaccccttgcaaactcagcaggttgcaaaccaanatgcattcatgtgatatagtgcaatccaacaacaacaacatcccgtaaagttcaaaaagctaggcacagtca

SEQ ID NO: 11727 - DNA, 293 bp, Glycine max
  unsure (1)..(293): unsure at all n locations
gtcctcggcaagctcatcgtcgctgctcttcgtaagggaatgtacatgtggctncaactngattctcctccttttccttccttccaattcggtcctctctctctccttaaaccctagctagcttcctcgttntctctttctcttttaactccaaatatgcaacttatgagtttctacttctatctgtctcangtatggctggtgctatatacattaaaggagctgcagtaacaaactataaaaggtgaggcatattatgtgctatgaataactaatactatctattatactga

SEQ ID NO: 11728 - DNA, 268 bp, Glycine max
  unsure (1)..(268): unsure at all n locations
gcttctgtgggacatcttgacttgctntccaatctgacattcaccatatattctgccttcttctattttcagattgggaatgcctctaacagcacctatgtcaatgatnttcttcatgcctcttaagtgcagatgtcctaatctgtgatgccatattttgacttcatcttctttggagaatagacatgtggaggagtaactggtttcttgaggtgtccataggtagcagttgtcctttgatctgctgcccttcattagaacttcactc

SEQ ID NO: 11729 - DNA, 420 bp, Glycine max
  unsure (1)..(420): unsure at all n locations
gtgtggtggtcggcagaggagcataaaccacagagtctggcaacaagtgcaaatttttgattcatggccagttgagttaccaggttaaccaaggcatctagtttacctttaagcttcttagtctcacctgatgaagatgaattcgtggctactttatgcactgctctaatgacaatagcatcactcctggcactaaattgctggtagtttgaagccatcttctcaattaaatttctggcttcagcaggggtcatgtctccaagagctccaccactggcagcatctatcatactcctctccatgttattgagtccttcataaaaatattggaggagaagctgctcanaaatctagtggtgagggcaactggcacatagtttcttatatctcttccagtattcatacaagctctctccactg

SEQ ID NO: 11730 - DNA, 489 bp, Glycine max
  unsure (1)..(489): unsure at all n locations
atattcattatgtatcatatatatcaataaaggtgattattattactattgttattggtgtcttatttgtatattatttatattttaaatttaattaatgttgtacgtaacgtaaaaataattatgaaacacacttaagtgaacctgttntatcatctataataaggttttgttatctcaaaccatgatagcanaatgaggaagacatacacctacggccaattgactctaaacctcatgaaagactataccatatataaaagagaggataaagattcatctgcttcatgttgtttatnttttattcttcattnttaattatgataataataatgaggttagttcatattttcaataaacattacaatgttttgagacaagaaatacacaatttacatcaatattatatgttattgataatataaacataaatgtattctcaccttctaacttacaaatgttattaatgtgggtttatatgaactctgc

SEQ ID NO: 11731 - DNA, 432 bp, Glycine max
  unsure (1)..(432): unsure at all n locations
cgacaataactntntactcggatgtttgatattgtcccgtgatataacgagacgctcganattgaatgttgaagctctgagctaattcaaacgacaataactntntactcggatgtctgattgagtcctgtcatatatcgagacgctcgaaattgaatgttgaagctctgagccaattcaaacgacaataactttttacacggatgtctgattgagtcccgtcatatatcgagacgctcgaaattgaatgttgaatctctgagccaattcaaacgacaataactntntactcggatgtctgattgagtcccgtaatatatcgagacgctcagaaatgaatgttgaagctctgaggaaattcaaacgacaataactntntactcggatgtctggatgagtcctgtcatatatcgagacgctcganattgaatg

SEQ ID NO: 11732 - DNA, 351 bp, Glycine max
  unsure (1)..(351): unsure at all n locations
gcttaacattcaatgtcgagcatctctatatattactggactcaatcagacatccgtgtaaaaagttgttgttgtttgaattagctcagagcttcaacattcaattntgagcgtctcgatgtatgacgggactcaatcatacatccgagtaaaaagttattgtcgtttgaatttgctcagagcttccacatttaattatgagcgtctcgatatattacgagactctatcagacatctgagtaaaaccgttattgccgttcgaatttgctcagaggttcaacattcaatttcgagcgtcttgatatatgactggactcaatcagacattcgagtgataaagtattggcgttt

SEQ ID NO: 11733 - DNA, 513 bp, Glycine max
  unsure (1)..(513): unsure at all n locations
atgctgcanacatctacaacagaacaattatgacctctctagcatcaggtacaatcccgggtggaggaatcatcccaaccttagatggtcgaatccttcacaacaacagcaacaacaaccttattttcaaaatgctgttggcccaagcagaccatgcgttcctccactaatctagcagcaacaacagcaacagcaacagccccaaaaataacaaatagttgaggcccctccgcaaccttcccttgaagaacttgtgaggaaaatggctatgcaaaacatgcagtntcaacaagagactagagcctccattcagagcttaaccaatcagatggaacaattggctacacagttaaatcaacaacagtcccagaattctgacagattaccttctcaatctatccagaatcccanaaatgtgagtgacatttcattgaggtcgggaaaatagtgtcaaggacctcaaccagtagcatcttcctcatccacaaatgaacctgcccaacctcactctac

SEQ ID NO: 11734 - DNA, 295 bp, Glycine max
  unsure (1)..(295): unsure at all n locations
tacaagacctgatgaactgatattcaatggattntctctttcaataccaagtggcactaccgcagctntggtaggacaaagtgggagtgggaaatccacgggtgttagtttgatagagagaatttatgatccacagtctggtgcagtgcttattgatggtatcaacctcagagaatttcaactgatatggatcagacagaaaattggcctagtcagccaggaaccagttctctttacttgtagcattaaagagaatattgcctatggcaaggatggtgcaactgatgaagaaatc

SEQ ID NO: 11735 - DNA, 262 bp, Glycine max
  unsure (1)..(262): unsure at all n locations
tggtcataacgtntcactcggatgtcggattctagcgcataatatatcgagacgctcgaaattgaataatggaagctattgagcaattccaatggtcataactcttaactcggaagtccgattgaggcacataatatattgagacgctcgaaatggaacaacggaagctctcgagaaatncaaatggtcataacttttaactcggaggtcggatagagacgcataatatatcgagacgctcgaaaatgaacaatggaagctc

SEQ ID NO: 11736 - DNA, 494 bp, Glycine max
  unsure (1)..(494): unsure at all n locations
tacgagcgtctccatatattatctgtcctcaatccgacatcggagtaaaaagttatggtcgttagaatctgctcagagcttctgttctgaatnntgagagtctcgatatactacggaacacaatcggacatctcagtaaaaagttatggtcgtttggaattgctcagagcttctgttcttaattacgagagtctcgantatatacgggattcattcggacatccaagtaaaaagttattgccgtnntgaattgctcaaagcattcgttgtcaattacgagcgtctagatatattacgggattcattcggacatccgagtaaaaagttattggtcttttattttgctcagagcttctgttttcaatttcgagcatcttgatatattacaggactcaatcggacatccgagtcanaagttattgtcgtttgaatatgctatgagctntcgcgttccattacgagcatctcaatatgctacgggacacaattggaca

SEQ ID NO: 11737 - DNA, 257 bp, Glycine max
  unsure (1)..(257): unsure at all n locations
gacaatgcttacaaagtagagctgtccggtgagtataatgttagttccaccttcaatgtctttgatttacctctttctgatgcacatgtagaatccgatttgaggacaaattcttctcaagagggagagaatgatgaggacatgaccaagagcattggcaaggatccacttgaaggactcggaggacctatgacangggctagagcacggaaagccaaggaagctcttcaacaagtgctgtccatactatgtgaata

SEQ ID NO: 11738 - DNA, 374 bp, Glycine max
  unsure (1)..(374): unsure at all n locations
aaagcattcaagtgtacaccagaggcagagacaacatttgttcaattgcagaaagtcatgacttcagctccagtgttagctcttcctaatttccagctgcccttcattctggaaactaatgcttccgacactagtattggagcagtattacatcagaatggccatccaatagcataattttccaagaaacttgcacctagagtgcanaagaaaatctgactaattagagagatgttagcaattgttgaagctatagctaagttcagacactacttgctgggacacanaattattatcaaaactgataaaanaagctngagaatcattgatggaacaaccctacagacacctgaacaacagcagtggttacacag

SEQ ID NO: 11739 - DNA, 375 bp, Glycine max
cccaactggccttgaatcagaaaattgtacctgtcgcaaggggttgtggtttgtgctcctctgctgaccaccatacagacctttgcccttccatgcagcaacctggagcaattgagcaacctgaagcttatgctgcaaatatttacaatagacctcctcaacctcagcagcaaaatcaaccacagcagagcaattatgacctctccagcaacagatacaatcctggatggaggaatcaccctaacctcagatggtccagccctcagcaacaacaacagcagcctgctcattccttccaaaatgctgctggcccaagcagaccatacattcctccaccaatccaacaacagcaacaaccccagaaatagccaacag

SEQ ID NO: 11740 - DNA, 324 bp, Glycine max
  unsure (1)..(324): unsure at all n locations
ctgcacaagccaaatgagatagttgaatacctgcacagttgngatgaaattntaaattggcatcatccttgaggctgctcatatctctggaaaagtactccaaacaaagtacaaacagatcaggggagagaggatccccttgtctaagacctcgctgccctttgaagtggccataaatggatccattgactgtcacactaaagaaagtgaaagaaacacattccatgatccaagtacagaactgtgcggngaagccaatggacttaagcatccaatccaagaattcccaggaaatggaatcataagctttatgcaagtcaattt

SEQ ID NO: 11741 - DNA, 324 bp, Glycine max
  unsure (1)..(324): unsure at all n locations
agatcatgcatacctttctatggctaatataccattatnttcacaattatcatacttcaagtagccaactccctagaatttataagagatcagtccgtgaacaacagtgactccttcgttcacagaacaataaatcaaaatacataccactattctaatcaaaagacttataagagaagttgtttcaaccaaatcaaatcaataacaattcacaactcttctacaacagaatgaaaatgaataaataaaagaatcttatatatcatgctgtgctntcacgctcttcttatcccaacatattaatagagganaacccagaaacat

SEQ ID NO: 11742 - DNA, 470 bp, Glycine max
  unsure (1)..(470): unsure at all n locations
agcttaagctccttcaactgcacaaggctcttaatatttgaagagtattcttgtggaaccttcacccgacgaagacactggcaaaaacttatcttctccttcttggacaaagtgtggcaggctgtgggcaagtaaattatcttcccatcagaccttggatgcaactgtgctcttatacccatatcagctagatcttgacgggtattcaagccatcattcgtcttgccttgaatgttaaggagcgtcccaatcacactgtcacaaacanttttctccacatgcataacatcaatacaatgtctaacgtcaagatcacaccagtacggaagatcaaagaaaatggacctcttcttccatatgcaactctgactnttatccttcttttgggtctgtccaaatacagtgttcaggtgttgaacccgctgatatacctgctcaccagtgaacattatcggcgcaatatcatgctc

SEQ ID NO: 11743 - DNA, 473 bp, Glycine max
agcttccttaagaagattactaaagattctagagcttatctacacatacctctctaatagctaagctcacctccttgagatgagaagctagagcttagctacacaccccctatgataggtgagctcacccccatgacaaaaaacatgagaataataaaaaaaaagtgcttattacaaagacaactcataatgccccgaaatacaaggctaaaaccctatactactagaatggccaaaatacaaggtctagacgaaggaaaaacctattctaatatttacaaagataagcgggctcatacttagcccatgggctcgaaatctaccctaaggctcatgagaaccctagggcctttccttggatctctagcccaatctacttggagtcttctagccaatgctattgcggggtaggatagcatcattccctccaccttggaaaggaattgacctcacatcccgaggttcttcatact

SEQ ID NO: 11744 - DNA, 517 bp, Glycine max
  unsure (1)..(517): unsure at all n locations
ctaagctccttaaaagatcctaagaagctgagatagctaccatactttttaatagctaagctcatctccttgagatgaaaagctagagcttagctacacacccnctataatagctaagctcacccncatgacaaanaaaaaacatganaatacaaaaaaaatagtccttactacaaagactactcaaaatgccccgaaatacaaggctaaaaccctatactactagaatggccaaaatacaaggcacaaacgaaggaaaaacctattctaatatttacaaagataagcgggctcatacttagcccatggactcaaaatataccctaaggctcatgagaaccctanggccttcccttggatctctagcccaatctacttggagtcttctacccaatgcccttgcgggataggattgcatcattccctccaccttggaaaggatttgacctcaaatcccgaggttcttcatactctggggctcttcctcaacacctgaaaaagaacaaaacatatatat

SEQ ID NO: 11745 - DNA, 441 bp, Glycine max
  unsure (1)..(441): unsure at all n locations
agcntgagacttatcatgaccaaatctctggtatatcgcctctaccttaagcaagcattgtattcatttaagatgctagaaaatataacggtagaagaatagtcagatgtctntaataaattgattcttgatcttgaaaacattgatgttactattaaggatgaagatcaggcattactgttattgtgtgctctacctaagaccttngctcatttcanagaaacacttctctatgaaagagattctcttactcttgttgaagtccaatcagccttgaactctaaggaattaaacgaaagaaatgaacaaaggccttctgtacatggngatggactcatagttcgtggaagacagtataagaaggatgataagacaaaagggaaaagatccaagtcacaaactcgatctggatctaatgtaccagacattagatgttatcac

SEQ ID NO: 11746 - DNA, 454 bp, Glycine max
  unsure (1)..(454): unsure at all n locations
ctcagctatgctgatacatctacatagacctcctcaacctgagcagcattatcagccacaacagaacaattatgacctctccagcaacaggtacaatcccaagtggaggaatcatcccaaccttagatggttgaatccttcacaacaacagcaacaacaacaacaaccttattnttagaatgttgctggcccaagcagaccatacgttcctccaccaatccagcaacaacaacaacaacaacaacaaccccagatacaacaaacaattgaggctcctcagcaaccttcccttgaagaacttgtgaggcaaatgactatgcacaacatgcagtttcaacaagagaccagagcctccattcagagcttaactaatcatatgggacaattggctacacagctaaatcaacaacagtcccagaattatgacagaataccttctcaatctatctagaat

SEQ ID NO: 11747 - DNA, 492 bp, Glycine max
  unsure (1)..(492): unsure at all n locations
gcttataatgttaagctttgtcttatgttgttcatgctgctccccttatctctatcacatttctcttaaactgatttagctcttcatgcattgccatcaaccagtgttcattacacaaagcttcatcaatgtttcttggttcaacctgagaaacaaaatccatgtttttacacaaaatcctgagtctagaacgagtagagacaccctntgatatttctcctattatgttatccaaagagaggtctttctgagttctccattctctaggaaattctttaggcgttctacttgagatctctntgctttcttcaagttctttagaattgatatcatcttcaagagcataatcattntcctgaaaagcttcatcttcttattctannaaaatatcttgaacaatagagttaatttcatcacatactacatgaacatattcttccacacttagagttatcctattaaatactctatatgctntactattcaatgaat

SEQ ID NO: 11748 - DNA, 383 bp, Glycine max
  unsure (1)..(383): unsure at all n locations
agcttaatangtccatctatggattgttatatgccttctcgccagtggtattaaaattatcatgaggtcatttcttcattcagctatgaagagaatgtcatggatcactgtatataccacaaggtcagtgggagtaagatttgtttccttgtattatatatagatgatattcttcttgcgactaatgataagggtatgctatatgaggtgaaacaatntatctcaaagaactttgatatgaatgatatgggagaagcatcttatgtcataggcatataaatccatagagaaagatctcgaggcatttacgcttgtctcaagaaacctatatcaacaaaattttatagagaattaatatgaaagatngttcaccaagtgtatct

SEQ ID NO: 11749 - DNA, 421 bp, Glycine max
  unsure (1)..(421): unsure at all n locations
gccgtgagaaacatggtgtttcacttgtgaaattgaatgtgaaatgggcctctgatgtgtatgatcctatacctacattattatcacacactgttagaagcaacaagaagcagcagaaatccaggaagaagaagcctgactagaagaatggaaagaagggtcataagggaaattcatctcgagggggcagcaacaaagataagcaggttcgcaagctaggtgggacttctggtttgtgctacaagtcaatggattcttgtgataaagtgcttggagcttctactgaattagatgctcttgaagttcgaagccaggattcatactgtgtgaactagcttcctgaaanatagttactgaagtcactacttcggtgagaacactatgatgaatactctgaatgctttctatttcctgatgacat

SEQ ID NO: 11750 - DNA, 403 bp, Glycine max
  unsure (1)..(403): unsure at all n locations
gaccctcctattctaagcagagattcactctaccccttcactgaaaccccattacacatagcctccttgcttggacatttagagttttgtcagattcttcttcagaatagtcccaatttagccactgaattggactcaaaagggcgttgttctcttcatcttggctcagctaaagggcacactgaaatcgtgaaagcgctattgaggacataaccagaaatgagtatggtgcgcgacanagatgcgatgcttccattccatattgctgcaattagagggcgcgtgggagccatcaaagagttgatcgaagagaagccaaactccattcaagagatgataganagtgatgatgggtctgttctgcacttgtgcgntcgctataaccatctccaggctctgaatt

SEQ ID NO: 11751 - DNA, 349 bp, Glycine max
  unsure (1)..(349): unsure at all n locations
gtcgtcattgtaagacaaagagactatggtgtgcactngtgtgatcgaaagagatgttggagatgtcacagaagcggttataaaagggcttcctcttgagagaaagaaccttaggttggaggagggaatgtccaaagtgacactgaggtcactgtatgatgagatttcacgggttatgctgattgagtgtgttngagtggaagagattgtgatatctggcacaaaagattggacataagtgctgtggtgaagaggagaagagggtatgacgctgatagtgaagagttcgatgttttgacgaggtaagggtgaatgtactcatctngagacccgtttggaataacaaagt

SEQ ID NO: 11752 - DNA, 424 bp, Glycine max
  unsure (1)..(424): unsure at all n locations
taattaatattcgaattttcattcctttattaatatatatgtgaggggtagagggtgtcacatgtggatgcaaagagaaatttgtggaacttgataagaaggtgaaaggaaatgtttcttttggagattcttccaaggtgcaaatccaaggaaaaggtaccattttaatttctttaaaagatggtgctcacaaattaatcacggatgtttactatgttcctaaactaaaaagcaatattttgagtttgggacaacttgttgaaaaggggtatgaaattcatatgaaagattgttgtttatggcttcgagataaaaattctaattngattgccaaggtgtttatgtcaagaaatagaatgttcactttgaacattataaccaatgaagcacaatgtttgaaggctagcataaaagatgaatcatg

SEQ ID NO: 11753 - DNA, 383 bp, Glycine max
  unsure (1)..(383): unsure at all n locations
gtatgagaataagttcctgagtggatatttgatgcaatcctcccatggagggngcccatcaccagagtcatggttaagagactccaggaagattgtgccagggatgcaagagaatgccttanggttctcatgagccttagggtagctnttgggcccatgggttaagtatgtgcccacttatctttgttcatattagattatggtttcattatttttttgggccttgatttanggcaccacagtgtagggagggtaccccataagtttagggtaccctagtaatgtaggaattttcagcccttgtattttagggctcacagactaagttttgtatcagggatagtttcgtaattcacatgcattaagtgcactatttgatgtgt

SEQ ID NO: 11754 - DNA, 432 bp, Glycine max
  unsure (1)..(432): unsure at all n locations
tagagccaattcagacgacaataacttcttactcggatgtctgattgagtcccgtcatatatcgagacgctcgagatttaatgttgaagctcttagccaattcaaacgacaataactttttactcgaatgtctgattgagtcctgtaatataacgagacgctcgaaattgaatgttgaagctctgagccaattcaaacgacaataactttntactcggatgtctgattgagtcccgtcatatattgagacgctcgaaattgaatgttgaatctctgagccaattcaaacgacaataactttntactcggatgtctgattgagtcccgtaatatatcgagacgctcaaaattgaatgttgaagctctgagccaattcaaacgaacaataacttttactcggatgtctgattgagtcccgtcatatatcgagac

SEQ ID NO: 11755 - DNA, 389 bp, Glycine max
  unsure (1)..(389): unsure at all n locations
gcagcttaacattcaatttcgagcgtctctatatgttattagagtcaataagacatccgagtaaaaagttattgtcgtttgaatntgcatagaggttcaacattcaatttcgagcgtctcgatatgtgacgagactcaattatacatccgagtaaaacgttattgtcgttggaatctgctcggagcttcaacattcaatcttgagcgtctcgatatattacgagactatatcagacatctcagtaaaaagttattgtcgtttgaatacgctcagaggttcaacatatcaattcgagcgtctcgatatattacgggcctcaatcagacatccgagtaaaaagttattgtcgtttgaattggctcagagcttcaacattcaattcgagcgt

SEQ ID NO: 11756 - DNA, 452 bp, Glycine max
  unsure (1)..(452): unsure at all n locations
ctaagcttctataaggantgtattcaaagcctctctcatgatgccaggaatgttcttatccactatattaaagagcataggagccaaagggtctccatgtctcaatcctctagaggggactatatcctttgtaggactcccattaactaacattgagatagtatctgagtgaagacatgcagagatccactatctccatttaaagcagagacctatcctgtccatcatgttatccaagaatgcccaggatattgaatcatatactttgtctaaatccactttaagaatcatagcaggcttctttctctgagtagcttcatccaccacctcattgagaatgagaattccatggagaatgtgcctatgtcttatgagagttgctacctttcatcaataacccatccgcagagcctcaacaatttggcagagtgtgctatacttatacatgcccc

SEQ ID NO: 11757 - DNA, 362 bp, Glycine max
  unsure (1)..(362): unsure at all n locations
ctccaactcaagatcattagaatgcttcanacactaaaactcaaacctgcccaaaacttgcttccttggagagattccgcaaacgatatttcaagcacaataggtggtgcaagataaatgagtaactgagtgagcgcatggcatgaggctacagaaagaaattactttacactcaaaccaccacagcttgaccagtaatttcatcatgaagctgaagcgagccatctttcatcaaatttaggctcanactctngaatctctcccttgaatattgcctagatgctntcctccagtcagttccagttttcatcatcgccacaaactcctcataactgatgcgaccatcctgtgaagtgaaaaca

SEQ ID NO: 11758 - DNA, 429 bp, Glycine max
  unsure (1)..(429): unsure at all n locations
tgcagactaagtgctcaccaacactanataagaatccctcaggttgtttcatgtaaacctcttcttctatatcaccattcaggaacaccgttgtgacatccatttgatgcagctcaagatcaaaatgagctactaatgccaaaattactctaagaaagtctttcttatatacaggggaaaaagtctttgtgtaatcgattccttctctgtggtgaatcctttagcaacaagtcttgccttatgtctctcaatgttgccttctgagtctttctttgctttgaagatccatctacatccgatggctnttacaccaataggcaactcaacgagatcccaaactcggttagatgccatagaatccatctcatccctcatagcattataccacagatttgattccttacaactcatggcttgtgacaacgtctc

SEQ ID NO: 11759 - DNA, 403 bp, Glycine max
  unsure (1)..(403): unsure at all n locations
gctattgngtgtcgttgggtttataagattaagtatcatgctgatggctccgttgaacgatataatgctcgacttgtagccaaggggtatactcaaatggaaggataggatttccttgatactttatctccagttgcgaagctcacagcagtccgattattgctagcatcggctgctattcatggttggcaccttcgtcagctcgatgtaacaatgcagtccttcatgtgagaataaatgaataagtctatatgcatctgcctccatgaatgcaactctcacaccttaatcaagtttgtcgattacaacgatcactatatggtttgaaacatgctacacgacagcggtatcatcgcttgtcctcatttcttttactcatgggtcactcaagcttaactgatca

SEQ ID NO: 11760 - DNA, 345 bp, Glycine max
  unsure (1)..(345): unsure at all n locations
ctcagcttctgtttcaatgtcgagcttcacgatatactacgggtcacattctgacnttcgagtnaaaagttattgtcattatagatttctcggagcttccgttntcaattacgagcggctcgatatattacgggactgaatcagacatccgaggaaaacgtntttgtcgttagaatattctcagagctgttgttttcaatatcaagcgtctcgttatattacgggacttaattgtacatctgagttaaaatttaatggggtttgaatttgctacgagcttctgttttcagatacgagcgcctcgatatactacgggacacagtcggacatccgagatatcagcta

SEQ ID NO: 11761 - DNA, 454 bp, Glycine max
  unsure (1)..(454): unsure at all n locations
tctcagctctcagcntgcattccttttcactcatgtgtccaagtctctgatgctacatgtgttgaatattgacagcctcagtaactactaccatatcctcatctgcaatcatgtaaagagatctttgcttctttccacgagccacaacgagatagccttttgttaccttccaagctccatctccatctacaaaagtggtgtgatgtccctcatcatccaactgccttatagatattaaatttctctttaaggtgggaatatttctgacattgtgcaatgtccatanggatccactgaaggtcttgatgttgatatcacctcttccgacaatgtcaaaagattatccatctgcaaggtaaactntcccanatcttctagacatatagttagacaataaatctctagagggagtagtgtggaacgacgcacctgatgtcatgatccatgaatcaac

SEQ ID NO: 11762 - DNA, 190 bp, Glycine max
  unsure (1)..(190): unsure at all n locations
tcggacatccgtgtganaagtatgagcatgagagtgtctatgtatctccatcgancaacgnccagcatctctatatattataagcctgaatcggacattcgtgtgaaaagctctgaccatttgaatttctcaagatgttccgttgtccaatttctagcctctcaacatcttatacgcccgaatcgaacat

SEQ ID NO: 11763 - DNA, 243 bp, Glycine max
  unsure (1)..(243): unsure at all n locations
ctcagcgagaaaggccataagaaacaatatctntgcaatgtcttcttcggagaggttgtgatgtatctccatgtggagcttgtaggccttggatcttcttcattaatggagtcctttgcttcttgaagatcaatggaagtggaatggagaatgaagaaagatgattgacgtcgccacttgaaggagatgatgagtcaagaagaacctcaccaccataggaagtcatggataatagcttgatgg

SEQ ID NO: 11764 - DNA, 414 bp, Glycine max
  unsure (1)..(414): unsure at all n locations
attgcataccaatgatgttgggaagttccatataaacttcttcaaacaaatctccattcanaaaagcattattaacatctaataggagaaggcaccagtttctagcagtagcaacacagagcanaactctcacagtggtaagcttgacaactagagaaaaagtataagagaaatcgattccagcttgttgagtataccctctggcaaccaatcgagctntgtatctatccacagagccatccattttatatttaactgtatacacccatctacaacctatacaatgcttatcaagtggtaagggaacaagtcttcaggtggaatttgttggacaagtggcctcaatatcttaaggggaggggggatgaattaagtcttacaaaattgcactcagaacctcattaaatctcaagt

SEQ ID NO: 11765 - DNA, 315 bp, Glycine max
  unsure (1)..(315): unsure at all n locations
tttcgttcatgtgtctccaccttctagtttggagctatgcgtagtgattgcttagtgcaattctccattctcnaaccttttcggagccccatgaattgcgttttcgttcatgtgtcctccaccctcgagttcggagctatgcgtagtgattgcttagtgcaattctccattctcaaacttttttggagccccatgaattatgttttcgttcatgtgtcctccaccttcgagtttggagctatgcgtagtgattgcttagggcaattctccattctcaaccttttacggagcccatgaattgcgttttcgttcatg

SEQ ID NO: 11766 - DNA, 374 bp, Glycine max
  unsure (1)..(374): unsure at all n locations
agacatacaaatgacggttaatgatgcatctaacacataattcaatttatcgtttacacatgaagtctttcaccactataacatttcatgtactccatctttaacatgtctagtagaaaatcattccacgtgtctatgggtccaggcaagcaccagtgcacacaatcattataaagtgtgactttctcatgtggccaatgcaccatatctactcgggtgaccatctggtcttaataacattgcttgtgtagtgtcacacaacctagattccaaacccttcgttctaccttacttctttgcaatgtctaactcttccaactggatcatatataanctccaaatactactctctaaacgtatgtcactggtcttaa

SEQ ID NO: 11767 - DNA, 295 bp, Glycine max
ttcaatgcagaaaccatttttgatatagagattaaattgaaattaaaagatggcaagtatagcacgtcttctaagtgtagaaactcagtaaagttgactgttctagagtgtgtggctatgacttgttgaccagtaggctggcgaactactatgggatttatttctctgtatgtagaataacaagtcaatgaggatgcaacatgatctgtagcaccagagtccaagatccatgttacagcttcagacttgtgaatattacaaacaaaggatagtatattacctatggccgatgtat

SEQ ID NO: 11768 - DNA, 339 bp, Glycine max
  unsure (1)..(339): unsure at all n locations
cctgatgcctganatgtctnttctgatgtgctttggcctagatgcanggaagtatttctccattaacaccctcttaaggtcatcccagctgaaaacggacctgtgagcaaggtagtatagccaatcttttgtcactccctccagagaatgaggaaaagcctctataaagatatgatcttcttggacatcacggggcttcatggtggaacaaaaaatatggaactccttaagatgcttatgaggatcttcacctgcaagaccatgaaactttggcagcaaatgtattagtccagtcttgagaacatatgaaacaccctcatcatgatattgaatgcacaa

SEQ ID NO: 11769 - DNA, 256 bp, Glycine max
  unsure (1)..(256): unsure at all n locations
ctcatatcttcacagngccttatatatggaactagttcacctgtgtcagttcctctcttggccttgcagtcatagaagggaggagcatggaaacacggctccattgacatggcacgtcgacagggaggatctggngctgctcgattctcaggtttgtacagaatccacggttttaaacctccaagcccctgagccacatacctcaaagtagaccatgagctagtaaccaacacatcagttaagcttaagagataca

SEQ ID NO: 11770 - DNA, 454 bp, Glycine max
  unsure (1)..(454): unsure at all n locations
tacaagtgagcttgtaacatatcttctactcttggagtgatcacctgtagtcctctngaacccttaccacccactctatcatcatgccgagactcangaagcccaataggtttagccttctctaagtattctaaacaaaattcaatggcttcttctgcaatgtacctctcaacaatagatgcttctggacgatatagattctttgtatacccttttaagatcttcatgtattgctcaaccgggtacatccaccgtagataaacaggaaccacaacattgatttctctgaccagatgcacaatcaagtgaatcatgatgtcaaagaaagcagggggaaaatacatctccaactggcacagtataattgcggcctcatttccaactcataaacattactggatcaatgacttgctacatatgcatggagaaaaacacaggcgagtatcgtaatctg

SEQ ID NO: 11771 - DNA, 305 bp, Glycine max
  unsure (1)..(305): unsure at all n locations
gtctacgatgtcacgtgtgatgcaattttgttagtcgtggctatacaagacatcttgccaaacaaagtcaggttagccataactcgcctgtgctttgtcttccatgccatatgtagcaaagtcgttgatcctattcatgttgatgagctggaaaatgaggctgcaattatactgtgccagttggagatgtattttcccctaccttctttgacatcatgaatcacttgattatgcatctcgtcagagaaatcannatgtatggccctgtttattgcagtggatgtacccagttgagcgatacatga

SEQ ID NO: 11772 - DNA, 383 bp, Glycine max
  unsure (1)..(383): unsure at all n locations
tatgccatctagtctttcctctcgttgaactnngaacatagggggacttattgcatgttatataatntacaatgtcatcataccaaggaaaagaaaaacaatngctaacaactattcctataaaagacaacatggcccagaaaactcctcaccaccttaacattgttggngggatgaaactattcaatcccttntcattttggcggngtcaaccactatgcctttagaggacattntatgtccaagcacaatgctctcacgcaccatgaatnggcatttctccacattaagaaccagtctagtctccttacaccttttcaagacaacattntaaattttcatataggcatcaaaggatnggaagttatctcatgaggagtact

SEQ ID NO: 11773 - DNA, 336 bp, Glycine max
  unsure (1)..(336): unsure at all n locations
cgagctctcaaactanatggtcattcttatacacagacgtccgagtttgctcataatatatcgagacgctcgaaattgaacaacgtgtggtgtctacaaactcaaatggtcataacttgtcacacggaagtccgattcaggcgcataacatatcgagacgctctaaattgaacatcggaagctctcgagaaataccaatggtcataacgtttcacacggaagtccgattcgagcgcattatatatcgagacgctcgaaattgaacaacggaagctctctagatactcatatggtcataacttatcacacggacgtccgagttaggcgcataatata

SEQ ID NO: 11774 - DNA, 374 bp, Glycine max
  unsure (1)..(374): unsure at all n locations
tacctcatgctctcctctaatgactatggcatcatttctggcgctaaactgctgggaagtggaggccatcttctcaattaaatttctggcttcagcangagtcatgtctccaagggctccaccactggcagcatctattatacttctctccatattactgagtccttcataaaaatattggagaagaagctgctctgaaatctgatggtgggggcaactggcacatagtttcttaaatctctcccagtactcatacaggctctctccactgagttgtctaatacctgagatatccttcctgatggctgtggtcctggaagcagggaaatattntctaagaatactctcttaaggtcatcccagctcatgatgga

SEQ ID NO: 11775 - DNA, 307 bp, Glycine max
  unsure (1)..(307): unsure at all n locations
tatatcgagtcgctcgaaatagaatacagaagctgtgagaaaattctaacgtcaatacacttttactcggatgtccgattgagtcacgtaatatatcgagacgcccgagattcaatacagaaactctgagcaatatctaacgacaataatattttacttggatgtccaattgagtcgcgtaatatttcgagacactcgaaattgagtacagaagctctgaggaaattcaaatatatatacctcttgactcggatattcgattgagtcccgtaatgtatcgagacattcganattgaatacagaagct

SEQ ID NO: 11776 - DNA, 462 bp, Glycine max
  unsure (1)..(462): unsure at all n locations
taagctccttcaactgcacaaggctcttaatatttgaagagtattcttgtggaaccttcacccgacgaagacactggcaaaaacttatcttctccttcttggacaaagtatggcaggctgtgggcaagtaaattntcttcccatcagaccttggatgcaactgtgatcgtatacccatatcagctagatcttgacgggtattcaagccatccttcctcttgccttgaatgttaaggagcgtcccaatcacactgtcacaaacanttttctccacatgcataacatcaatacaatgtctaacgtcaagatcacaccagtacggaagatcaaagaaaatggacctcttcttccatatgcaactctgaactttatccttctttggggtcttcccaaatacaatattcaggtgttgaacccgctgatatacctactcaccaatcaacggtatggacgtaatatcat

SEQ ID NO: 11777 - DNA, 375 bp, Glycine max
agctttccatacaaaaaatgttgttttcacatccatttgttctaacacaagatcaaattctgccaccatagccataagtattttgattgacctgtgtttcactacaggagagtaaacttcattgaagtcaattccctccttttgagtgaatcctcgagcaacaagtctagctttaaatctactggtccaactccttggatgccttctttcttcttgaagatccacttgcagctaaccactctagaaccaagttttttttaatcaattcccatgtatggttgtcatggaaagacttaatctcttcattcatggcacttgatcatttttctttctccttactagctaagataggcttaagagtttttggatcttcct

SEQ ID NO: 11778 - DNA, 300 bp, Glycine max
agcttttaactcggaggtcctattcaagcgcataatatatcgagacgctcgaaattaaccaacggaagctctcgagaaattcaaatggtcataacttttaactcggaggtccgattcaggcgcataatatatcgagacgctcgaaattgaacaacggaagctctcgagaaattcaaatgttcataacttttcacacggaggtctgagtcaggcgcataatatatggacgaccctcataatttaccaacggaagctctcgagaaataccaatggtcatagcttttcactgggatgtccgat

SEQ ID NO: 11779 - DNA, 392 bp, Glycine max
ttacacacatgccactctactccatatttttaaaggatctgttgactaggacacacaagtatattcaccaggaaaacattgttgtggaaggaaattgtagcgctgtgattcaaaagatccttccacccaagcataaagaccctgggagtgtaaccattccttgttcaattggagaagtcactgtgggaaaggcacttattgatttgggagccagtattaatttaatgccactctccatgtgcagaaggttgtgagagttggagatcatgcccactaagatgactttacaactttgttaccgctcaattaccagaccatatggagaaattgaagatgtgctggttaaaagaaaacattttatcttcccgatagactttgtggtaatggatatt

SEQ ID NO: 11780 - DNA, 381 bp, Glycine max
cgtcatctgagccagcggctcttggaatgtctttggaggaggccccaatctaagacaaggtctcaatatgcggaaaaaatggctgtaaatattgagaatatccaggccatcactttcaatcccattccttgatgaagagtataagctgtccttacgcaaacatctgcaatactgaggaaatacctcaacccgttatatccttgcattttatctttcttctcgaacagtcgccttatgcactaacaagagaaataagattattccgcagtctcagtcatttactaatcaaaagcatgcatatttactttcttaatcaggggcatgtttggataaacatgatcagaatttaccatataagtgctcttgattccacaaacttat

SEQ ID NO: 11781 - DNA, 380 bp, Glycine max
  unsure (1)..(380): unsure at all n locations
agctttgtaatgtgttattttattgtttgatggattggaacattgatacaaagttgtccactatcactttagttaattgtagcacgaatgacaaaatcattgacaaaattaaatataagttgcacttaggaagtttattaagggatgagactttacttcatatgtgttgttgtgcacacatattcaacttgattgtaaaagatgggttgaaatttgtgaaagatgggatagagaagattagggatagtgtagcattttggatagccacaccaaaaaggaaggaaaattttaaggagacagtgaaacaattaaggatcccgtgcactaagactntggttttagattgtccaactaggtggatctcaacttataaaatgctt

SEQ ID NO: 11782 - DNA, 317 bp, Glycine max
tggagaatttcaaacgacaataactttgttatcggatgtactcttgagtcccgtaatatatcgagatgctccaaattgaaaacggaagctcgtaacaaagtcaaacgacaagaactttatacgcggatgtccaattgagtcctgtgatatattgagacgctccaaattgaaaacgaaagtacgtagcaaattcaaacgacaataactgtatacaccgctgtccgaatgagtacagtaatatatcgagacgctacaagttgaaaacggaagctcctattagactcaatggacgataactttttactccaatgagcgat

SEQ ID NO: 11783 - DNA, 374 bp, Glycine max
agcttcaacatcagacttcttccatggtgctggaactacttcacatggacttgatggggcctatgcaagttgaaagccttggaggaaagaggtatgcctatgttgttgtggatgatttctccagatttacctgggtcaactttatcagagagaaatcagacacctttgaagtattcaaggagttgagtctaagacttcaaagagaaaaagactgtgtcatcaagagaatcaggagtgaccatggcagagagtttgaaaacagcaagtttactgaattctgcacatctgaaggcatcactcatgagttctctgcagccattacaccacaacaaaatggcatagttgaaaggaaaaacatgactttgcaagaagct

SEQ ID NO: 11784 - DNA, 295 bp, Glycine max
gtgagaaaattcaaacgacaataacttttttctcggatgtctgattgagtcccgtaatatatcgagacgctcgaaattgaatgccgaagcgctgagcaaattctaacgacaataactttttactcggatgtctgattgagtcccgtaatatatcgaaaagctcgaatgtgaatgttgaagctcagagcaaattcaaacgacaataactttttactcggatgtctgattgagtcccgtaatatatcgagatgctcgaaatggaataccgaaggtctgagcaaattcaagcgacaat

SEQ ID NO: 11785 - DNA, 355 bp, Glycine max
agcttctacattcaatttctatcttttcgatatattacgggactcaatcggacatccgagtaaaaagttattgtagtttgaatttgctcaaggcttccgtattccatttcgagcgtctcgatatattacgggactcaatcggacatcagagtaaaaagttattgttgtttgaattttctcaaagcttcggtattccatttcgagcatctcgatatattacgggactcaatcagacatccgagtaaaaagttattgtagtttcaatttgctcaaggcttcggtattccatttcgagcgtctcgatgtattacgggactcaatcacacattcgagtaaaaagttattgtcgcttgaa

SEQ ID NO: 11786 - DNA, 356 bp, Glycine max
  unsure (1)..(356): unsure at all n locations
ttctccactaagttgcctgatgcttgaaatgtctcttctgatggcggnggtcctcgatgcacggaagaatttctccaagaacaccctcttaaggtcatcccagctgaaaatggacctgggagcaacgcagtataaccaatcttttgccactccctccagagaatgaggaaaagcctttataaagatatgatcttcttggacataagggggcttcatggcggaacaaacaatatggaactccttaagatgctcatgaggatcttcacctacaagaccatgaaacttgggcagcaaatgtattagtccagtcttgagtacatatggaacaccctcatcatgatattgaatgtacaagc

SEQ ID NO: 11787 - DNA, 354 bp, Glycine max
  unsure (1)..(354): unsure at all n locations
tggtactttacccattttgcatgcctttgtttttactagctttaccttataatgcacttaagtgattcatgatcactatgaatgacaaattccttggaaacaaggtaatgttcccaagtttggagggctcttattaaggcgtcaagtgctttatcataggtggggtagataaggagggcaccatgaattttttcactaaaataagcaataaggtgcccaccttgtaacaatactgctccaactcacactttagaggcatcacattctagctcagatgttttagaatagtcatgaagagctacaacaggtgccttggtgagctnttctttaagaaaacaaagactcgctcttgtc

SEQ ID NO: 11788 - DNA, 384 bp, Glycine max
agcttcatgcgtatgttttgtactattaagtcaatggcaacatcattatctcctccactcgggatgataatatcagcatactttttagttggcaatacaaaatcttcaaaacttggctttacaaatctggaatactgaacaatcattttgtatttagtcaaggaggactttaaacatttttaaacaaaaacaactttgaataagttatatgctgaaaagaaaaagctacaagaatcaataaaaaaatgttcaactaggggatgtttagtacaataaaagttatttttcatgtgtaaaaatgatgattcctaattaataatatatttattttgttcggcatttatataagttccttttcaaggtgtaacgtggtatttttatcac

SEQ ID NO: 11789 - DNA, 374 bp, Glycine max
atccatgcaagacaggagatttttgccttatatctgtccatgacccaaccaaacaaaaaataacagactaaacttctctatggatctatgccacagaccaacaaataacctccttgaactaacatccatataggacacaaactgctcactccaaacactcatgatcttatccccagcagtcaacattgagcaagcttaagcagtgatcaaacttgctctttagaactggctttgtgaacatatcaacaggattgtgcacagtgctgatcttatgaacttcgagtcttctttctgaccgaatgaagtgatatctaacatctatatgcttggttctatcatgatgaacctgatccttggccaagcatatagcacta

SEQ ID NO: 11790 - DNA, 375 bp, Glycine max
agcttcttagtttcaattgttgaagatgaattcgtggctacttcatgcactcctctaatgacaatagcgtcatttctggcactaaattgctgggagttggaaatcatcttctcaattaaattcctggctttcgcaggggtcatgtctccaagggctccaccattggttgcattaatcatacttctctccatgttactcagtccttcataaaaatattggagaagaagttgctcataaatctggtgatgaaggcagctagcgcataattttttgaatctttcccagtattcatataggctttctccactgagttgcttgatgcctgaaatatcctttctgatggcagtggtcctacaagcaaggaaaaatttctct

SEQ ID NO: 11791 - DNA, 352 bp, Glycine max
agcttgtagggttaaagtctcacgattgtcacgtgttgattcaacaattgttagtcgtggctatacgagacatcttggcaaacaaagtcaggttagccataactcgcatgtgctttttcttccatgccatatgtagcaaagttgttgatccagtcaagtttgatgaacttgaaaatgaggccgcaattatactgagccagttggagatgtattttctccctgctttctttgacatcatgattcacttgattgtgcatctagtcaaagaaatcaaatgttgtggtcctggttatttgcggtggacgtacctggttgagcgacacatgaaaatcttaaacatgtgtacaaagaa

SEQ ID NO: 11792 - DNA, 287 bp, Glycine max
agcttcaatggctcaatgagcatggtgaaaatgatagtctatcaacacgtaaaaatactcttttctataggagaatactatgatgaaagtttatgtaatataaatccctatggaagcagggcacattttgttgggtagaccatgacaacttgacaagaaagcaatccacagtgggctcaccaatgaaatagccctcacccatggaagcaaaacattctaacttgctcccttgacaccttcacaagtgggtagggatcaactacaaataaaactcacatgggatgagg

SEQ ID NO: 11793 - DNA, 315 bp, Glycine max
cttgggctaattcaaatgacaataaccttttgctctgatgtctgattgagtcccgtaatatattgagacgctcgaaattgaattctgaaccttagagctaattcaaacgacaataactttttactcggatgtctgattgagtcccgtaatctattgagacgctcgaaattgaattctgaaccttagagctaattcaaacgacaataactttttactcggatgtctgattgagtcccgtaatacatcgagacgctcgaaattgaatgttgaagctctcagcaaattcaaatgacaataactttttactcggatgtc

SEQ ID NO: 11794 - DNA, 361 bp, Glycine max
  unsure (1)..(361): unsure at all n locations
agcttcaacaatcaatttcgagcgcctcgatattttacgggactcaatcagacatccgagtaaaatgttattgtcgtttgaatttgctcagtgcttcaacattcaatttcgagcgtctcgatatattacgggtctcaatcagacatccgagtaagaagttatcgtcgtttgaatttggtcagagcttcaacattcaatttatagcgtctcgatatattacaagactcaatcagacattctantaaaaaggtattgtgggttgaatttgcttaaagcttcaacattcaatttcgagcgtctcgatatattacgggactcaatcacacattcgagtaaaaagatattgtcctttgaatttact

SEQ ID NO: 11795 - DNA, 392 bp, Glycine max
  unsure (1)..(392): unsure at all n locations
agcttttaaaatatactacttcttagtaaaaaacatgtgtttttggtaattatatttttaatgtctgaaattatattatcttttacttaaagattaaatatttgactaaaaaaaaattaatagcgtggtattaaaagatatcttattacaataaataatttaataatgatggaggcaaggaagaatttgttaaattattgatggtaaaataaataaataaactaaacgctactttattttaccaaacactntgattttaattaattttattagttaagtaaattataaattaggtgaaataatccgtccggcacattataagatataaggaatttgaattttacgtttaatggtgattaaatattacgttgaatgcctgcaaaatgactagt

SEQ ID NO: 11796 - DNA, 314 bp, Glycine max
tctataaccttttcttctatgcagtcatttattgcgaattctgcagtcaaagggtgatttccagcatagccctttaccctctgatccaagaagtgggggcagatcaattagagaaggcttcttgagatttgacagcttggcattttacatctgtattctgtatttttataaccccttaacttccaggcatgattctggtgaatttgcaaagcctgtttctactaaaggaatatgtattgatgatatacatctaagttcagatgacttagaaatgtccattgatcttgctccatttttgaatccctcaccatata

SEQ ID NO: 11797 - DNA, 381 bp, Glycine max
  unsure (1)..(381): unsure at all n locations
agctttggaaccaaattagggaaagaaaatgacctcactgtatttgaatatacttattttatttttctttctttttgtatcagttattgtgagtgctttgctgctggtgtctactgcatagaaccctgctcctgtcaggattgcttcaacaaacctattcatgaagacactgttcttcaaactcgcaagcagattgaatctcgtaaccctcttgcatttgctcctaaagtcatcagaaattctgattctgtacctgaaattggggttagaaaataaactcgacttagtttttcccctaagcaattgaaacatcttttataggtattaattattatctttttgtaggatgacccanataaaactccagcttcagcacgacac

SEQ ID NO: 11798 - DNA, 328 bp, Glycine max
ttctgatccaaagagcttgatttacagcattgttgcagcaacatattctgcttctgctgtgggttgagctattacttcctgtttttgtgaataccatgagaaaattccagaaccaaagctaaaaagataacctgaagtacttctcatatcatcagcacattcagcccaatcactatcagaataaccatgaaggctggagtttttaacataatggtatcttattccaaaatcaattgtgcctttaacatatctaagaattctttctgctgcctgaaaatgaattctactagcacagttcatgtgccttgataacaagcttactgcatgc

SEQ ID NO: 11799 - DNA, 341 bp, Glycine max
tgagcaccttttttcacacctctttctttgttgatgggttgagccttctctagggctgtctaactgttctgtaatcttcctccatcattatcttgtgcatatagtaggcagggatgattcctttgaaatctgatatgtgccacccaattgcctccccgtgtctcttaaggacctctaccagcgtgttctcttcctctgctgttaggtcactgctgatcaccataggcttggtctcattctcctccaataacacatactttagatggttgggtaagatctttatctccaccttggtcttctcgaatggacctccgctttcaattcttcaaaactggtccccc

SEQ ID NO: 11800 - DNA, 356 bp, Glycine max
agctttgatcacatttctcattccagacaaacttctcattcttgtgagtcaatttacttaggggcagtgccaatttataaaatccctcaatgaattttctatagtagccagccaaccccaagaaacttcgaacttctgtcggaggtgtcggatattgccactccataaccgactccactttaatcggatccaccgcctccccatctttagaaatgacatgtcccaagaactgggctttctccaaccaagattcacattccgacgatgtggcgaacaatttgctatccgtgagaatatgcaagacaattctcaagtgcttctcatgctcctccttattccttgaatacactaggata

SEQ ID NO: 11801 - DNA, 340 bp, Glycine max
agcttagactatgttcagcctaccatcctcaggctaatggccaaactaaacggaccatacagtcgttggaggaccttttgagggcgtgtgtcttatagcaaaaggggggttgggagagttttcttccgttgatagagttcacttataacaatagttttcactctatgttggcatggctccctatgaagctttgtatggtagaaggtgcaggacacccctatgttggctagagcctggagaagaccttaccttatgacccgaagtggtacaacaaaccaccgagaagctcaagttgatccaagaaaggatgaggactggttagagtaagcagaaaaattat

SEQ ID NO: 11802 - DNA, 325 bp, Glycine max
taccaccataggaggccatggataagagcttatatgaaaaaggagatgaatgaaaggagagggagagaagagcacgaaattttgtgctctaaatgagctttgaaatctgaagtttaatattcagatgatcaaagttaaaaaaaatgcacacacataacctctatttatagcctaagtgtcacacaaaattggagggaaatttgaatttcaattcacatttcacttgaatttgaaagtgaatttgcggagccaaactttggagccaaaatttcactaattatgattagtgaattttagttatggttcagcccactaatcccagatc

SEQ ID NO: 11803 - DNA, 361 bp, Glycine max
cgacactatacaaacgcaagctttggaacaaccacccattagtgcttcttattcctgagcactatgaaggcctgcaagtaatcatacaaatcaacctacaaccacaaaaagctgtcaatccaaagcaacccccctggcctcaaaactctatcccaatcatacaaaataaactcaaggagcacaagatcaatccacccatcaagaaaccttgttgtgtgaatcaaatctagggtgttgtcaaaaaatggaagcctttggtttatagtcaagtagagaggaacaagtcctcttagagcaatcatttcattggagggtgctccaaaaatgatattggctgaaactatactcacattgaattccc

SEQ ID NO: 11804 - DNA, 279 bp, Glycine max
  unsure (1)..(279): unsure at all n locations
cgggatacttagaggcgggcggcgggcatgcaagctatgagcaaaantaaattattttaacgtttcacttcgttggctgactgagtcccgcaatatatcgcgacgctcgaaattgaatatcgaagctctgagcaaattcaaacgacaataattctttactcggatttctgatttagtcctgtaatatatcgagtttctcgaaatcgaataccgaagctctgagcaaattcaaacgacaataactttttactcggatgtccgattgagtaccnttatata

SEQ ID NO: 11805 - DNA, 393 bp, Glycine max
  unsure (1)..(393): unsure at all n locations
tatctagacctggagacaagttatgaacattacttgtgcatccaaaaatacgtggatcaacatgaaacaatggttctttaggaaataaaatggaatatggtattttatttttaatagaggaagaaggcatccgattaatcaaaaaatatactgtcaaaactgcatcaccccaatgtcggacaagtacattggcatggagtaataatgtccgatgagtctcagcaagatgcatatttttgctttcgcgatgtcattntgttgacgagtatgaggacaagaggattggtggataatgccctacgctgacaaaaaggaagaaatcacatgagaaaagtattttttcacattatcactcctaaggatcttaattgtcttacttaactgagttttaat

SEQ ID NO: 11806 - DNA, 356 bp, Glycine max
tgtagggttaaagtctcacgattgtttcgttctcatgcaacaattgttaggtgtggctatacgagacgtcttgccaaacaaagtcaggttaacgataactcgcctatgctttttcttccattctatatgtagcaaagtcattgatccagtcatgtttgatgagttggaaaatgaggccgcaattatactgtgccagttggagatgtattttccccctgctttctttgacatcatgattcacttgattgtgcatctgatcagagaaatcaaatgttgtggtcctgtttatctacggcggatgtacctggttgagcgatacatgaagatcttaaaagggtatacaaagaatctatatc

SEQ ID NO: 11807 - DNA, 379 bp, Glycine max
agctttagagaccatttcttatttccaccataaaccaaaagattaagagagatatatatactattatttggtaaatctagcttctctatttctccacattggatgcaatgtactacttctcacttgtaatcatctaatctaattagtttagatagttataaatgtagagtatgtaataaagcaaaataagacactacacaaaaaatgtaaatctacttactcttactagaaatttgtttttgaaatcatctaataaaaaaagctatatatatagcttgttatttaatgaatatatgatataaatatgtgaaaatacaattataattattttgagatatcttatctgccccaatgattaaacaattaactcttatgaaaa

SEQ ID NO: 11808 - DNA, 365 bp, Glycine max
tatgctgcagacatatacaatagaccttctttatttagtagcaaaatcagccacaacaaaacaattatgtcctctccagcaacaggtacgatcccgggttgaggaatcatcccaaccttagatggtcaaatacttcacaacagcagcgacaacaacaacaacagccttatttccagaatgttgctagcccaagcagaccatacgttcctccaccaatccagcgacaacaacaacagccacagccccagaaacagcaaatagttgacgctcctccgcaaccttcccttgaagaacttgtgaggcaaatgactatgccaaacatgcagtttcaacaagagaccaaaacctcgatttagagcttaact

SEQ ID NO: 11809 - DNA, 379 bp, Glycine max
  unsure (1)..(379): unsure at all n locations
agctagcaaaccaaatgctcatcactattagaggagaaaccttcaggttgttttatataaaccttctcctctaaatcaccattaagaaaagctggtttcacatccatttgttgcaactcaaggtcaaaatgagcaactaatgccaagattatatgaagagaatctttcttagatactggagaaaaagtctctttgtaatctattccttccttttgagtaaatcccttatcaacaagtcttgccttgtatctctcaatgttgcctaatgaatcctttttggtcttaaagacccatntacatccaatagccttcgccccattaggcaactctacaaggttccaactttgttactctgcatggaactcatctcatccttcat

SEQ ID NO: 11810 - DNA, 348 bp, Glycine max
tggcaagagctccagcagctagggaattgatgtttgtgcatggttcagccttaggcgagtgccaacgtttatcgttgaacttgtcgttgaagtcaagtccacccaaaatggcaccagtgagttcatgggggttaggtgcatctttttgaaaccatttggagaagctcgtggcgcataccacctcttcatcctttttcagttttggcaccgaaacacctctatggtgagcctgcgttggtgggttctttccaaatccaaccatgtaagatcttctatcagggtttttccctagtatgtaatccatctgtgcaaattgcaatttctccacccaattaatcaataagtcta

SEQ ID NO: 11811 - DNA, 418 bp, Glycine max
tatacagtagagctgcaggcgtgccagcctagaacagaaacttaattccttaattccttgttaaggctggttgcaggagctgtggcatcctttccaccaccatattttgacacaaattcatctttgacacgctctaaaaaagccatgggtaactgggtttcaattgattcatctgcaacaacacaatatgcttgataatggcagaaggtcgaaatttcataacactaccaaactcaaaaaaaatatacggttcacctctacaaaagcagtatcagcagataaaattataacttaaaagaaaaccaatgaatacttagttatcaagcttaaatagcagcactttgctgcaagcaccataaaagctatagcaagatgatgaatagtggaatgaccaccattctgaagattctagatacaa

SEQ ID NO: 11812 - DNA, 381 bp, Glycine max
agcttttgaattatcaatattcaaacttgcttctacacccataattcttgcacctaattggaaatatggttttgagctcatatgttacgcaagtgattatgtagttggtgttgtcttgggacaaaaaaaagaagacaaaatttttcatgctatacattatgctagtaaagtccttaatgagcatcaagtgaattatgcaacaaccaaaaatgaattactagctataatctatgcattggaaaaatttagatcttatctcatttgctctaaagtggttgtttatacagattatgcaactattaagtatctcctatctaagcccgattccaaaccaaggcttattaggtggatacttatgttgtaagaatttgatcttgaaat

SEQ ID NO: 11813 - DNA, 380 bp, Glycine max
agcttgcctaagcaattttggtcagaggcaattaatattgcatgttatttggtgaacatatctccttctacaactattaattgcaagacactagaggaaatgtggtcaggctctaaaataaattattcaattctgtgtgtatttgggtgtctagcttatactcatgttaataaaggaaaatcggagccaagagccaagaaatgcacatttttgggttatcaagatggtgtaaaagggtacaggctataggaccctaaggaatcaaagctcttgattggtagagatgtgatctttgatgagacaatcatacttaatccaagaccacatgaggaccataataataaatttgaaggtcatggtgttcgcaaaaaggtggagca

SEQ ID NO: 11814 - DNA, 364 bp, Glycine max
tagcttcaaccattgtgttatggaccatttcaagtgctagaaagaatcaatgacaatgcttacatatacgagctgcccggggagtatactgtaagatccaccttcaatgtctatgatttatctctttatgatgcagatggagaatccgatttgaggacccatccttctcaagagggagagaatgatgaggacatgttcaagagcacgggcaaggatccactatgaggacttggaggacctatgacaagggctagagcaaggaaagcccatgaatctcttaaacgagtgctgtccatactatttgaatacaagcccaagattcaaggagaacagtccaatgttgtgagtagtatcatggcccaaa

SEQ ID NO: 11815 - DNA, 384 bp, Glycine max
tagcttatacaacgtgctattatcttttggaaataaaggaatacaatattatttaactgtttcttgttttaaaaaattgttatcattaataattagaggatatcaataaatgatctttgtattaattaagtaaataccccttcagtctatgcattggttaaggctgttgcacaggttaataaatactatttaatttatacaaaagtgatttaactatccttaattatttattacttctttctgactttaatataagacactttgagaataattacacaaaccaataaatagttaattttatgatttttttaaatgttatcaatataccaattttaccttattactaatcattaacttgtcaagtattatgtatccctatcaata

SEQ ID NO: 11816 - DNA, 383 bp, Glycine max
agcttgtgtcactattcactgtgatagtcaaagtgtcattcacttagcaaatcaccaaatgtaccatgagaggacaaagcacatagatgtgaaactacacttcatcagagatgtgattgaatctgagaaggtgaaggtggagaaagtttcaacagaagaaaacccggctgatatgttcacaaagtccctctctagtgtcaagttcaagcactgcttggacttgatcaatttcgaagatgcctaaagcagattggtagaagtgcagccctgaatcacaaggtagacacttgctgatttggagtcaaggttgagatttttggtgtgtgactcaaaatcacaaatggcacaagtgagaaggctttaaagtggtgttgtcataactg

SEQ ID NO: 11817 - DNA, 392 bp, Glycine max
  unsure (1)..(392): unsure at all n locations
tcttagtttcagatgatgcagatgggtttgtagctacctcatgcactcctctaatgactatggcatcatttttggcactaaactgctgggagttggaggccatcttctcaattaaatttctggcttcagcaggagtcatgtctccaagggctccaccactggcagcatctatcatacttctctccatattactgagtccttcataaaaatattggagaagaagctgttctgaaatctgatggtgggggcaactggcacatagtttcttaaatctctcccagtactcatacaggctctctccactgagttgtctaatacctgagatatccttcctgatggctgtggtcctggaaacanggaaanatttttctaagaatactctcttaagtcat

SEQ ID NO: 11818 - DNA, 172 bp, Glycine max
tctcgattgcctaagcgtggaccctctatgttcattcctccattcaccacttttttgggagccccacgtatgtgggcgcctatcgcgggtcaagcatcttgcgacgttcacatccgatgccgacaaatgtgaacgcctagctatacactgcaatgatgcatgtccccacttt

SEQ ID NO: 11819 - DNA, 387 bp, Glycine max
catgcaagcttattgttgtttctctccccatttgaaaccaacatttttcttgagcacttcattgagaggtgctgccaatgcgctaaaatccttcacaaatcgtctataaaaacttgctaagccatgaaaactcctcacctcggtcacagacttaggtgtaggccatttttgaatagccctaaccttctcctgatcaacttgcactccttttgaactcacaacaaaaccaagaaacacaacatggttagtacaaaagatgcatttttcaagattggcatacaattgttcttttctaagcacagtcaagacagatattaaatgatcaatatgccaatcaagtgaagtgctatagataagaatatcatcaaagtacaccacaacaaactt

SEQ ID NO: 11820 - DNA, 379 bp, Glycine max
  unsure (1)..(379): unsure at all n locations
ntggagtttccaagtgccaattcgtcctcttctttagtccagtcttcttctggcttcaattcatcagtgggctttccttctgtgtccagcatcttgggatgttcccagcctttgatgacagctttccaggttctgctatccagtgatttgaggaaggccaccattattgctttccagtattcatagttgcttccatcaagaattggtggtctgttcactggtcctccttctttctccatgttcatcagaatttatctccccagatctcactctgtgatttcgagtgttggctctgataccaattgaaattctgataccacgggacaaatgtcgtacacgatgtcacgacatcacgcttagaacatgcagattgtatgtg

SEQ ID NO: 11821 - DNA, 289 bp, Glycine max
agcatgaccttctgatcctatgaggctgacccttgcggagcccgtctagagcgaaattgacctctgcaacgtgctccatcatctctccgaactcctgcgcctccatcagcgtggacgtcgccggaatcccctccgccggcgcccgcttcgtcctcttcgactaccttgctccgcctgcgccggtgccgtttccgaagtcgccgatctccgaatacaataaggaccaatgctgtgaggaccagtcctgtgaggaaaacacgaagccgcatagagggtcctttttctcctg

SEQ ID NO: 11822 - DNA, 330 bp, Glycine max
  unsure (1)..(330): unsure at all n locations
gatgatnggagacgacacttcaatgagaagatgagtcaagaagaagctcaccatcatangaagccatggataacagcctgaatgcangagaagatgagtggacagagagggagagaacgagcacgannatttatgcctcanatgatgtataaactttgaagtgtaattcttaaatgatcaaagctgataaaatgcacacacatggnctctattatagcctaagtgtcacacaaattgagggaattgaattctttaaattacttgattgtgggccaatttggatcacaatntactaatatgatagtgatttagtatgtcactctatcagac

SEQ ID NO: 11823 - DNA, 523 bp, Glycine max
  unsure (1)..(523): unsure at all n locations
ttctaccctctaaccctntagaacacttaatgttgtctcntaatttgtttacaacaggaccaactactttcaacccctcttgaacaataaggtgtaaaatctgagcacaacatcggatatgagaaaattcaccaccacttactaaaccattattatgcacaagaagtctntccttcaaatagtcttgcatcttatcattagaagaagcattatccaaaattaatgaaaaaaaattccactaaatcacccattcttaaaaaaaaaccatatataattttagccatctcatgtctggagtttggagaaggaaaatgagaaaaattaagcattttactattcagcttccaatttacatcaacataatgtgtagttaatgaaaaacaagatgtccatccatcagatgtcaagtctattctactagtgactctagacaacatgcatntcanntttttcttntcaaaatcatacaaatcgttcatatttaatggagcaacacgcccagagggtaccttaacatctggat

SEQ ID NO: 11824 - DNA, 342 bp, Glycine max
  unsure (1)..(342): unsure at all n locations
ctcggatgtcngattcaagcgcataatatatcgagacgctcganattgaacaatggaagctctngagcaattccaatggtcataacttttaactcggatgtccgattcaggcgcataatatctcgagacgttcgaaattgaacaatggaagctcttgagcaattcaaatggtcataacttttcactcggaggtccgattcaggcacataatatatcgagacgctcgaaattgaacaatggaagctcttgagcaattcaaatggtcataacttttcactcggaggtccgattcaggcgcataatatatcgagacgctcgaaattgacaatggaagcttttagc

SEQ ID NO: 11825 - DNA, 373 bp, Glycine max
  unsure (1)..(373): unsure at all n locations
tcacacatacactcaacactgtgttctactcagctgtctacaatataatactntaacacatgacacatacacaaggacatgaatcttcaattaaagagatatacaacacatggcataaccatgaaatatgagaaggtgaggaataaggggtgaaacagtaaccaccgaatcagaagcataaagtatatatacctttattgcaaaaagatcaccagttgttctcttgttagccaagaaaactcttccatatgccccacgactgatagggtttataatctcaaagtcatcaatagaggtgcgatcccttgaagaatggatggggctnngtctcangctgcgaaccacatcatcttccaagatatcatcatcaaca

SEQ ID NO: 11826 - DNA, 369 bp, Glycine max
  unsure (1)..(369): unsure at all n locations
atgtttcctaccacagtccaacctttactccaggacttctcatccatattntatcaatcccaaggcttaccccacccgccttcaatcccataaccaccaaattcctcttttacccaattccaaaccaatgaatgtaaaatcataccgttaccctcacattcaaaaggaggcaatgacaaaaatcatttcggagatgttgaatgaaagattgattgtgcaaagtcacaatcctttntcttccccagtgctgttgaattgctaaaaaagatggaactnnggtgctttgtacgaattatagagctctcaatgccattacaatccgagatcaatttcttattccaacacttgatgaattatnggataagttac

SEQ ID NO: 11827 - DNA, 458 bp, Glycine max
  unsure (1)..(458): unsure at all n locations
tcactctactctaatatgatcagcttaatttatatctccaaggtctttatgaactcattntctaatactgatcctacgattagacgtataattaactagaaatactcttaacaacatctctactaaaataacgtcatatttctagtagaaaaattcttcaaaacactgttgattgattcaaacatattttaaagtttaagctctaggcttatcaataaaaaatatgtatctatagtctctattaaacaaaaagatgatatatgttgagctaactctttanaagatacaccaaattgtcataaggaataaagtcaaatgaatatttgagtgtcgagttcacaagatcttttattatatntagattgtgtaacctaattctaagcattaatagagtgaagagatagaaatttatatgagaacaaaaatggactatacgacatgaaataacaatatcgatg

SEQ ID NO: 11828 - DNA, 396 bp, Glycine max
  unsure (1)..(396): unsure at all n locations
atcttcaatgtacatgcgaaggtgaaggatactctaatgttcaatacttttgttctctgccaagtcttcaacgagtncaactctagaagtatggagagactcaatgtgtctcaaggcattcacaaanaccacttatttcttcgaattgtgaggattactctggttctttaagtattgatggtggaactcctaaagaagtatgctgatacagagagattgacatgcgagcaatggagaatctgtattgtcattgcagctgcgtcctggcaattgcttgaatacaaagctcgtacctgtcagattaacgtcatcaccaccacgttaagtggtaaattatggtcttaagattaacattgtataatctacctctcacacgttaagaatataattcaacct

SEQ ID NO: 11829 - DNA, 330 bp, Glycine max
  unsure (1)..(330): unsure at all n locations
ctgcagcttangaggtattgcataatcgctaaacgcttattctaataaccgtctagaaagcgatttatatggacttgtattaatatntaattattaattcctacttttttcctttatgtnttatgcccttacatataaaataataatataaataagaaatattggattgaatattctattcatgttacanaatgaccttatagcatgtttacaaaatacaataaatgcatgtataaatngctaanaattatgaataagatcttctatccatttctgtggaactagtaatataaatgggtaaanattatgaaaaggaataacatataacct

SEQ ID NO: 11830 - DNA, 374 bp, Glycine max
atatggagagggtaatgaaataacaagatgatgcgctccatgagagggtggatcaaatggagaatagagatcataatgaagaagaaaggaggagaagagggaatgatcgtgttcctagacaaaaccgaattgatggtattaaactcaacattcctccatttaaaggaaagaatgatccggaggcctacttggagtgggagatgaaaatagagcatgttttctcatgcaacaactatgaggaggaccagaaggtgaagcttgccgccacggagttttccgactatgctcttgtgtggtggaacaagctacaaaaggagagagcaagaaatgaagagccaatggttgatacatggacggagatgaaaaagatcatg

SEQ ID NO: 11831 - DNA, 505 bp, Glycine max
  unsure (1)..(505): unsure at all n locations
tcatctgcatatngctgaatgttactgtcaccttctgctntcctactaaataactgttgtacagaccttnggatagagttgtcctcatcatgctagtcaagcttgaagccacaatattgaaaaggaaaggggctaaggggtccccttgcctcaaacctctagtgggggcaaattcatttgaggggctgccatttatgagaatggatatagaagatgattgattgcaagcattgatccatttcctccatataggacagaaccccatttgaccatcatataatccagaaagttccatgaaacagagtcataagcctttgcnaagtccaccttaaacaccaaaagctggttcttacttcttttatcttcctctattgcttcattgagaatcaaagttccatgaaggatgtttctatcctttatgaaaagtgntngtctctcatcaatgagtccagngcaataatttcttaacctatntngccagtaattagcaatgatcttatacata

SEQ ID NO: 11832 - DNA, 434 bp, Glycine max
  unsure (1)..(434): unsure at all n locations
gccatgaccagaaccacatttatgtgtgacatgaagatgttgtaggtggcatcaccaatggatatgcagtcatcaccagtttgcaaggtacacccattaatggtaaccccagttgagcgttcaacatgaatgccatcggtgttagggctctggtctggtgcaataagcctcacaattttaacaagaacattgtngcaagcgttgatcacaatgtgactttagctggctgtgatagaagttatgccactaaccaccaagttattcacccagttgaatgtcattgactgcaatnnatagcatgtattcagtcgtacataatattcactggataaacataatattctagttccagctaaaatataaagtacagaattctntcaacacattcttagtcagccaacattatagaacttacgattaccacatatacacat

SEQ ID NO: 11833 - DNA, 371 bp, Glycine max
  unsure (1)..(371): unsure at all n locations
catcttcagactgatcaacacttgcacagtggccaaagatgcatgggagatcctgataatcactcatgaaggaacctccaaagtgaagatttccagattgcaactcttggctacaaaattcgaaaatctgaagatgaaggaggaagagtgtattcatgacttccacatgaacattcttgaaattgccaatgcctgcactgccttgtgagagaggataacagatgaaaagctggtgagaaagatcctcagatccttgcctaagagatttgacatgaaagtcactgcaatagaggaggcccaagacattcgcaacatgagagtagatgaactcattggttctcttcanacctttgagctangactctcggata

SEQ ID NO: 11834 - DNA, 395 bp, Glycine max
  unsure (1)..(395): unsure at all n locations
actcgcatgtctggttgagtcccgtaatatatcaagacgcactcaattgaatgttgaagctgagagcaaattcaaacgacaataactttntactcggatgtctgattgagtcccgtaatatatcgagacgctcgaaattgaatgttgaaggtctgagcaaattcaaacgacaataactgtttacccggatgtctgattgagttccgtcatatatcgagacgctcaaaattgaatgttgaagctctgagccaattcaaacgacaataactttttactcggatgtctgattgagtcccgtaatatatcgagacgctcgaaattgaatgttgaacctctgagccaattcaaacgacaataactttntacttcgatgtctgattgagtcccgtaatata

SEQ ID NO: 11835 - DNA, 262 bp, Glycine max
  unsure (1)..(262): unsure at all n locations
catgctatatgtagcaaagtcatcgatcctatgaagtatgatgagctggaatatgacgccgcaattatattgtgccagctggagatgtatgtcctctctgcctactatgacatcatgatntactcgatggtgcatctagtcagagaaatcaaatatggtggtcttggttaattgccatggatgtacccgattgagcgatacatgaagatcttaaaggggatactaagaatctctatcgtgcacaatcatctattggtgagag

SEQ ID NO: 11836 - DNA, 432 bp, Glycine max
  unsure (1)..(432): unsure at all n locations
ataacgtntcactcggatgtcggattcaagcgcataatatatcgagacgctcgatattgaacaatggaagctcttgagcaattccaatggtcataactcttaactcggatgtccgattcaggcgcataatatctcgagacgttcgaaattgaacaatggaagctctcgagcaattcaaattgtcataacttttcactcggaggtctgattcaggcacataatatttcgagacgctcgaaattgaacaatggaagctcttgagcaattcatatggtcataacttttcactcggaagtccgattcatgcgcataatatatcgagacgctctgaagttaacaatggaagctctttagcaattcacatggtcataactcttcactcggatgtccgatcacgcacataatatatcgagacgctcgcatttgaacaac

SEQ ID NO: 11837 - DNA, 324 bp, Glycine max
  unsure (1)..(324): unsure at all n locations
ttgtgagccctggtgtgantgagtntccctcttcagataaatgtgaggcccttcaccattaggtctcttgtgatgctccgtcaacctttcagcaaaataaagaggactctcccgtccaacataatcttttagaatcccagctagttctgtctgcaattganaacatccatctcagagaatttccattgtttttccttccaggaaactacatttcattgtatggcttctgaatgtagttaacatacaatgaatgagtgacgtgcatgtatgttagagagacagaaagttattcttaatataattgagaaaagaatgacatggagt

SEQ ID NO: 11838 - DNA, 401 bp, Glycine max
  unsure (1)..(401): unsure at all n locations
tctgctggtcaattttagtgtctcgatatattattcacctgaatctgacatccgtgagataagttatgaccatttgaatntctcgagaactttcggtgatcaatttcgagcatctcgatatgttatccacctaaatcggacatccgattgaanagttatgaaccattgaatntctcgagagcttccgttgntcaatttcgagcatctcgatatattattcgcctgaatctgacatccgtgtgataagttatgaccgattaaatatgtcaacatcttccggcgttcaatttcgagcgtctggatttattatccacctgaactggacatccgttcgaaaatgtatgaccatttgaattctcgagagcttccgttgttcaatttgagcgtctcgatatattatg

SEQ ID NO: 11839 - DNA, 294 bp, Glycine max
  unsure (1)..(294): unsure at all n locations
gtgtctccatggngagcagctagtgtgtagtgaggaaaaaagatggaattatgaggttgtgtgtagactaccgccagttcaataaggtgacgaataagaataagtacctttttcctagaataaatgaccttatggaccagctgataagagcttgtgtgnttagcaagatagaccttangccaggttaccatcagatctaagtgaagtcntgaaatattccgaagactgcctntacgacccgttatagtaactatgagtatctagtatctagtatttttcttcaatgtgactaat

SEQ ID NO: 11840 - DNA, 265 bp, Glycine max
  unsure (1)..(265): unsure at all n locations
acaatggtgagttggttgtggataagcaagtgttacttacattctccatagcanagtatgtngatgatgtgaatngtgatatggttcccatggaagctggacatatgtngctnggaagaccttggcaatatgatagaggtgttgtccacaatggngtcacgaatcgatattagttcttgcataaaggtaanaaggtagttctcaccttcgtctccaagtgaggtgtgtgaggatcatataacaatgagattaanaagagaaagag

SEQ ID NO: 11841 - DNA, 464 bp, Glycine max
acatggggtacgaatgaggcccatgatatatcgagaggctcgaaattgaaaaatggaagttctcgagaaattcaaatggtcataacttttaacttggatgtccgattcacgcacataatatatcgagacacacaaaattgaaaaatggaattctcgagaaattcaaatgttcataacttttgcctcgaatgtcagatttaggcacataatatatcgagacgctcgaaattaaacaagaaagctctggtccaattcaaacggccataacttttgacatgagtgtatgattgaggcccatgatatatagagaacgctcgaaatgaataatggaagttctcgagaaattaaaattgtcataacttttcactcggatgtccgattcagacacataatatatcgagacgcttgaacctaacaaggaagctctggtccaattcagagggccataacttttgacatgggtg

SEQ ID NO: 11842 - DNA, 259 bp, Glycine max
  unsure (1)..(259): unsure at all n locations
gttgatgcaagaaggtcatccaatggctctatttagtgaannagtaagtggtcctacccttaactattcaacttatgatanagagtngtatgccttagtacgggcttngaaaacatggcaacactacctttatcccaaggaatntgtcattcatagtgaccatgagtncctcanatatatcaaggggcaaggcaagcttaacanaaggcatgcgaagtggggtggaatcctagagcaattcccttatgttatcaaacat

SEQ ID NO: 11843 - DNA, 184 bp, Glycine max
agcagagcaattatgacctctccagcaacagatacaaccctggatggaggaatcaccctaacctcagatggtccagccctcagcaacaacaacagcagcctggctccttcttccagaatgctgctggcccaaacagaccatacattcctccaccaatccaacaacagcaacaaccccagaaaca

SEQ ID NO: 11844 - DNA, 326 bp, Glycine max
gaggacacatgaacgataacacaattcatggcgctccgataaaggggttgagaatggataattacactaagcaatcactactcatagctccaaactcgaaggtggaggacacatgaacgataacgcaattcatggggctccgaaaagattgataatggagaattgctctacgcaatcactacgcatagctccatacgcgaaggtggaggacacatgaatgaaaacgcaattcatggggctccgaaaagattgagaatggagaattgcactaagcaatcactacgcatagctccaaacttgaacgtggaggacacatgaatgaaaat

SEQ ID NO: 11845 - DNA, 259 bp, Glycine max
  unsure (1)..(259): unsure at all n locations
tagagtctgaatagttcgtgcagtctgaccatctcgttgaggatgataagctgaactaatcttcagctttgtccccaaggcttcatgtaaacttgtccacaatcgcgaagtgaaccttggatccctgtcatatacaatactacgaaagaattccatgccaccttactacttacttgatatacaactccactagctnttccattctatacctcatattcactgggataacacgagccagattggtgagtcgatctactat

SEQ ID NO: 11846 - DNA, 450 bp, Glycine max
  unsure (1)..(450): unsure at all n locations
cgccttatcccactaggtggtgtcggctacatggatcaacttccaccataatgttctatcaagtaccatacttctatccaaatcattaagttcgagatcctttntgataacctctcttatagtctctgtgggtcttcctctgcctcgaattgtttgtcttctctccatctggtctactctcctcactacagagtctaccggtcttctctctacatgcccaaaccacctaagtctattgtccatcatcttctctacaataggcgctactccaaccctctctctaatagcttcgtttctaattctatcctgccgagtcttaccacacatccaccgcaacatgctcatctncgctacacctactttatttctcatgtggctcttgaccgcccaacattctggttcgtacanaatcgccggtctttaccgcagtccgataaacttttcctttaa

SEQ ID NO: 11847 - DNA, 438 bp, Glycine max
  unsure (1)..(438): unsure at all n locations
ctctctcatgtaatgatgtagaatctacagccaaagacttcaaaaaagggggtcattccgaaacatctcctgtagttcttcaagaaggtgagaaattagaagatttcagtgcaaatgagtctcatttgactgctaaacctgatcctccacagctcaattctggaatcaatcagagaccaaaaagggtcactaaacctcccgaaagatacggatttgaagacatggctgcctatgcattacatgcagctgaagaaatagattcaaatgaaccagccacttaccaagaagctatcaatcatcctgaagctgannaattggtgtagctttgaaagaggaaatggaatctttgtataagaatcagacctggaaactttgtgaactacctgaaggaagacatgtggtaggtngcaagtggatattcaagaggaaacctggtct

SEQ ID NO: 11848 - DNA, 377 bp, Glycine max
  unsure (1)..(377): unsure at all n locations
tgctcaccaacacaagataagaatccctcatgttgtttcatgtaaacctcttcttctagatcaccatttaggaacgccgtgttcacatccatttgatgcagctcaagatcaaaatgagctactaatgccagaattactcgaagagagtctttcttagatacaggggaaaaggtctctctgtaatcgattccttctctttgagtgaatcctttagcaacaagtcttgccttatgtctctcaatgttgccttctgagtctttctttggtttgaagacccatctacatccgatggcttntcaccaacaggcaactcaacgagatcccaaacttggttagatgccatagaatccatctcatccctcatagcattataccac

SEQ ID NO: 11849 - DNA, 376 bp, Glycine max
  unsure (1)..(376): unsure at all n locations
acgggactgaattagacatccgagtaaaaagttattgtagtttgaagatgctcagagcnttaccattcaatatcgagcgtntcgatatattacgggactaaatcagacatcagagtaaaaagttaatgtcatttgaattatctcagagcttcggtattccatttcgagcgtctcgatatattacgggagtcaatcagacatccgagtaaaaagttactgtcgtttgaattngctcagagcttcgataatcaatttcgagtgtctcaatatattacgcgactcagtcagacaaccgagtaaaaagtattgtcgttggaatttgctcaaagcttcngtattcaatttcgagtgtctcgacatattatgggactcaatc

SEQ ID NO: 11850 - DNA, 352 bp, Glycine max
tggatttccttttagtagggagtctatccttcctaagatggagccaaacccactcaccctcattaagaattagcttttttcttcctctattgtctttagttgaatacacctttgttggattctctatttggttcttaaccttctcatgcaacttctttacaaactctgacctagattccccttctttatgtataaaaaaagtgtccagtggaatgggaatgaggtctaatggtgttaggggattgaacccacctcaaaaggggattgcttggtggttctatgagtccccctgttgtatgaaaattctacatgaggaagatactcatcccaagacttatggttgtctttcaga

SEQ ID NO: 11851 - DNA, 447 bp, Glycine max
agcttctctgaagtcaaaccacacacatatatatatcatgacatgggacaaaatagttcttataaaaatgttttccccagaacaagtacacgtaaattataacaaatgaacaaacaaaaaagcatactttcattgtctcctatcaaatgtatcctgagaaaacaaacaaaagtgagtcacttacagggaacaaattcttccagaactgaagatcagtcttaggaggctcaactatcttggtggcccaacagaacaacattatgagagagccacatgcaagggagagagttgaggtaagccaagggtatgggaatgcattcatcaccttcttgttataaatgttgaacaccacattcagtgcccaccatgtagcaaagtatattccaatcttcaccttcttagcagcctctgatggagccccagcccctccaacctttgatctatcag

SEQ ID NO: 11852 - DNA, 387 bp, Glycine max
acttgccaggtgattcaaaatgaaaaaggtctctacattgtttcaattagaagatcatggaggtaaatttcacaatgactcttttgaaaacttttgtgaagaaaatgtatttcaccacaatttttcagccccgtcagcacctcaacagaaaggtgttgtggagaggaaaaatatatcccttgaagaaggtgaaagaacacttctaaatgaaacaaggttgcgtaagtatttttgggcagatgttgtacatactatatgttacacctttaacaaagtacttattagacctattctgaataaaaatccttatgaaccgtattaaggaagaaaactgaacatctctcacctaatagtttttttgcaagtattttgtttttacaatggtaa

SEQ ID NO: 11853 - DNA, 378 bp, Glycine max
tgccgccacggagtttttcgactatgctcttgtgtggtggaacaagctacaaaaggagagagcaagaaatgaagagccaatggttgatacatggacggagatgaaaaagatcatgaggaagcggtatgtgccggctagttactcaagggacttgaaattcaagctccaaaaactaacccaaggcaacaagggggttgaggagtatttcaaggaaatggatgtgctcatgattcaagcaaatattgaagaagatgaggaggtaactatggctcgatttcttaatggtttgactaatgatatccgtgatattgttgagttgcacgagtttgttgaaatggatgatttgcttcacaaagcaatccaagtggagcaacaatt

SEQ ID NO: 11854 - DNA, 354 bp, Glycine max
agcttgaaattgaacatcagaagctctcaagatattcaaatggtcataacttgtcacaaggatgtccgattctggcgcatcacatatcaagacgctctaaattgaaaatcggaagctctcgcgaaattcaagtggtcataacccgtcattcggatgtccgattcaggcacataatatatcaagatgctcgaaattgaacaacgaatgctctcgagaaattcaaatggtcataacttgtcacacggatgtccgattcaggcgcataatatatccaaacgctctaaattgaacatcggaagctctcgagaaattaaatggtcatacttgtacaccgaagaccgatctgcgcataca

SEQ ID NO: 11855 - DNA, 338 bp, Glycine max
  unsure (1)..(338): unsure at all n locations
tcctctaagncacctgctgcatgcaagcttgcgaattttggcgatatcaggggacatatgcttgatgactgcagtgagaacaccaaccttccacgccttctttaagtcatgtggttactcgtatagaggagggccttgatctttatgtagaccaatttgatgccaccattcttcattcccagttggccaccatggtggaagaacacccttctctattgggaacctcctctgatgaggatcacagtgctgcataagtgctgacaagatagaacccaaggttgtgtccttgtaactcttgcaaggtgtgtggtgtcgaccaatggaactgatccatcatt

SEQ ID NO: 11856 - DNA, 405 bp, Glycine max
tccaatgtataatttcgagcgtcttcatatattatgcgcctgaatcggacctccgagttgaaagttatgaccatttgaatttctcgagagctttcgttgttcaatatcgagcatctcgatatattatgcggctgaatcagacctccgagtgaaaagttatgaccatttgaattgctaaagagcttcaattgctcaatttctagcgtctcgatatattatgcgcttgaatcggacctccgagttaaaagttatgaccattagaattttttgaaagcttccgttgttcaatttctggcgtcttgatatattatgcgcctgaatcggacctctgagtgaaaagttatgaccattcgaattttttcagagcttccgttgttcaatttcaagcgtctcgatatattatgc

SEQ ID NO: 11857 - DNA, 387 bp, Glycine max
tcatggctctgctattgatctatcaaggaatccagtctctcatgaccgaattaagcacattgagactaaatttcattttctgagagatcaagtggctaaaggaaaggttaagctagtgcattgtataattgaggttcagctagctgacataaagactaaggctttgaaagctggcagattcaatgagctgagaaggaaaataggagttcaaagtttggaggattaagaatttttgttcaataaatgttgctgtaatgttcttgttgtggattcactgtttttgaatcaaaggggggtgttagggataattcaaaaaacagctactaatttgttaatagttgatggcggttagttagttgacttagcctatatatagacatatgggta

SEQ ID NO: 11858 - DNA, 470 bp, Glycine max
  unsure (1)..(470): unsure at all n locations
agctntacagcaaatgccactctactccaaattcttgatggatatgttaacaaggaaacataagtatattcaccaggaaaacatcgtagtggaaggaaattgtagtgttgtgattcaaaagatccttccacccaaacataaagaccctgggagtgtaactattccttgttcaattggagaagtcaccgtgggaaaggctcttattgacctgngagccagcattaatttaatgccactctccatgtgcaaaaggttgggagagttggagatcatgcccactaggatgactttacaacttgctgaccgctccattaccagaccatatggattaattgaagatgttttggtcagaatgaaacantttatcttcccggtagactttgtggtaatggatatctgtgaagatactaacattcctgtaatattgggaaggccattcatgttaactgcaagctgcatagttgatatgg

SEQ ID NO: 11859 - DNA, 422 bp, Glycine max
atgcaagctggaaggcaaactggatgcattggttgactgggtaacccagctggccttgaatcagaaatctgtacctgtcgcaagggtttgtggtttgtgctgctatgctgaccaccatacagacctttgcccttccatgcagcaacctggagcaattgagcagcctgaagcttatgctgcaaatatttacaatagacctcctcaacctcagcagcaaaatcaaccacggtagagcaattatgacctctccagcaacagatacaaccctggatggaggaatcaccctaacctcagatggtccagccctcagcaacaacagcagcagcctgctccttccttccaaaatgctactggcccaagcagaccatacattcctccaccaatccaacaacagcaacaacctcagaaacaaccaacagttg

SEQ ID NO: 11860 - DNA, 465 bp, Glycine max
  unsure (1)..(465): unsure at all n locations
agcttgacaataaaccgacttaggattntaagtattattttgctattggataaaattattttttaatcacaaattttactttacaacatgtagattatgaaaattaaaattacaaataatagaagtgaaaaataagttttagttcatatattacagaaggcaaatttaaaatatatcattcatttttataattataaactttataattataaaagatgtaaaaaattattcatagttaataattaaagtaaatccatgtcaaatgacacatataaagcgtaataattntatttatatttaaaattcaacaaaaaaatcattcatagaagaatatttaaatataaatgaatataatatttaaaattggttcaatcaaattggaaaacttgactgctgagctatagtgagaattttttttttcaattatatnttttctatctataaaatttacatctaagaccttat

SEQ ID NO: 11861 - DNA, 390 bp, Glycine max
tatggttttaatttcgagcatctcgatatattattggactcaattggacatccgagttaaaatttattgtcgtttgcatttgctcagagcgttcgttttccattacgagcgtctcgatatattacgagacttaatcggacatccgagctaaaagtaattgtcgtttgcatttgctcagagctttcgttttccattacgagcgtctcgatatattactggactgaattggatatccgagctaaaaggtattcttggttgcatttgctacgagcttctgtgttcaattttgagcgtctcgatatattacgggacttaatcagacattcttgtaaaatgatattgtcgttagaaatcgctcacagcttttgtattcaatttctagcgtctcga

SEQ ID NO: 11862 - DNA, 375 bp, Glycine max
  unsure (1)..(375): unsure at all n locations
agctngaatcagacctcagtgtaaaaagttatgaccatttgaatttctcgagggcttccgtttttcaatttcgagcgtctcgatatattattcgcctgaatctgacatccgtgtgataagttttgaccattttaatttgtcgagagcttccgttgttcaatttcatacctctcgatatattatgcgctcgaatcggacctccgtgtgaaaagttatgacaatttgaatttctcgcgatcttccattgttcaatttcgagcgtctcgatacatgatgcgcctaaatcggacatccgagagaagagttactaccatttgaattcctcgagagcttctcgtgttcaatgtcgagcgtctctatatattatgctcctga

SEQ ID NO: 11863 - DNA, 343 bp, Glycine max
agcttcttagtttcagatgatgcagatgagtttgtagtcacctcatgcactcctctaatgactatagcatcatttttggcgctaaactgctgggagtaggaagccatcttctcaattaaatttttggcttcagcaggagtcatgtctccaagggctccaccagtggcagcatctatcatacttctctccatattactgagtccttcataaaaatattggagaagaagctgctccgaaatctgatggtgagggcagctggcacatagttttttaaatctctcccagtattcatacaggctctctccattgagttgtctaatacctgagatatccttcttgatgg

SEQ ID NO: 11864 - DNA, 364 bp, Glycine max
caagcacagagacatatattccaactgatttatagcagcatatgcttttttgagtgaaaaacaatgcgtctaccggggaaggagagtctgctgatgaaatctcccataaccataaatgagattttggatgttagcattttgtttctaaatgaccatttagaggaaacactgggttcgacaaaaatagaagaaatccactcaaagtgtatcaatctcgcacaggtaagtgtttcatcctaattccgaaccatagatatgtcatgacttgactttgcaaattatttcctatcaaatcaaaaattacatgcgtgatcatggatcaaataggacttcccttgggaatggtttttatattatgggtttt

SEQ ID NO: 11865 - DNA, 420 bp, Glycine max
  unsure (1)..(420): unsure at all n locations
tgtgaacaagattcttgaccggtccgggttgggaccgtggacgtatgtcccggagggtctcctggagatccctcccagactaacgttggaggaggcaaggaaggagacggacacggtgctcttcggggccgtcgacgagctcttggagaaaaccggtgttgaagccaaagacattgggattcttgtggtgaattgttgcttgttcaatcccacaccatctctctctgactccattgtcaaccggtacaagcttagagggaacattttggcctataatcttagtggcatggggtgcagtgctggggttcttgctgttgactntgccaaacagctcctacaggttctctctcaccatcatgctaataaattagtattccatgcatttntgtattgttttactgccatcacatatatatcttc

SEQ ID NO: 11866 - DNA, 460 bp, Glycine max
  unsure (1)..(460): unsure at all n locations
agcttcattgacttttcatatagtatntttttatataaataagtatcgtttagaaaactgtgtaatttccccccaaaagcaacatttttcaatgctgtgtcatattttttaatatttctttacgtagttatatttaaaacagtattttatagaaacaataaggagatctttttaaaaaaaaagttatatatattggaataaatgcatgtgcatttttttaatatgtattcacacatatgaaaacaactaatggcgatataataaaaaaaaaaagttgtaagtaaagattaaaaaaacaagataattttatagcatgactccggataaatgaaatgagtctcgctaggggtatgaattggattatcaattattaaaagagaatcgcatttacaagtaaaaaataaaatagaattgtatatgggaaacacttacatatatctcttttttatacatatatatt

SEQ ID NO: 11867 - DNA, 405 bp, Glycine max
tgtaatttctgatcctcagataacatatgtggttaaggttgggactggaacgagtcaccaatggctttcttgaggaaagagacatgaaagaccggatgagttttactgtgagatggaagatctaacttataagcaacaacacccaccttatttaacacctggaaaggaccataaaatcgaggggagagtttttcattaatccttttagccaaggatcttctcttgtaaggttgcatcttcaagaacacccaatcaccgactgtgtattctatgtcctgacgacgtttgttggcatttgctcgcatgatatcttgagacttcaacaaatttctcttagagtagccataattatcctaaccattggtagtgtattgacttcttcatgcgggaggaatggggatccct

SEQ ID NO: 11868 - DNA, 385 bp, Glycine max
agcttacaaatctatcttaagtccaagcccatacacgaaataaaataaaatctagacaagataagataagattggatgaaataaaatcgggataaaataaaatctagatgaaataaaatctagataagataagatttgataaaataaaattgtctgctctcttcaagtccaagcccaattctggattcaagctcaattgcttataattctcctgaaattaaattaaaaacacaaaatttgttaagtaggcccaaatgataaaactgcataattaatttgacaattaaggctaatcagtaattaaaatggtgacaaaaaaggttaagaaataggagaaaataatgacacatcaagtgcaaactatggatctttcaccagtggcaat

SEQ ID NO: 11869 - DNA, 417 bp, Glycine max
tgtgactgttagagttatcatctctctcgctatctctcagaagtggcctcttcaacaactatgttaacaatgccttccttaatagcactcatgaagaggaagtatacatgtcacagcacctggttttgtgttttctaacaagcagcaagttttgcaagttacacaaggccatctatggtctaaaacaggccactagagcctggtttgacaaactcaaaactacccttctcagttttaagtgtttccagcaaatctgatccttcactattggtgttttctgataatgctgttgttgtatatattcttgtctatgtagatgatataatcatcactggaaacaacaccaagttgattaattcttctgtacgtctgctaaattttgtatttttctcttaaagaacttggtgacttggacta

SEQ ID NO: 11870 - DNA, 392 bp, Glycine max
  unsure (1)..(392): unsure at all n locations
tgaacttttaaagcgtaaagttacgttactgtgttatttattaagattaatcctttagaaagcgtaaacatgttgttgtgcttgaattatttattaaaattaattgtatgtttattttggtatttaagcatacaatattaagctaaactaaataatttatgcatattaaatttaatggttaagagtttatatgtttcaaatattagataatcatatgcatataatatttatttaattttgaagttttgtgtgtatgatttatgattttatacatgcganattatcttgaatattttatacaatattatttgggttatttacattatgtaaaatattatatgaatatttaactcctattaagaatgaatggtaagtgattaatataattttat

SEQ ID NO: 11871 - DNA, 291 bp, Glycine max
agcttagtgccaccggtgatgcttcttttaacgatccaaccaaataccgcagtcttgcaggggctcttcaatatcttactttcactcagactgatatatcttatgccgtgcagcaaaattgtcttcatatgcatgctccgacaaatgagcatatgagtgctctcaagcgtatcatatgctaccttcagggtactttatcccatggtttgcatttgtacaaatccaccattgatagactaatctcttatacagatgctgattggtgtgggtgtcctgacacccatcgttcca

SEQ ID NO: 11872 - DNA, 390 bp, Glycine max
tgctcgcgctaagcgcatagacccttgattggttggcaagatagttcagctgagtgcacatcactgtgctaagccccgcatctttacggtaattgaactttaaccagtgggcttagcatggatgatgcactaagcgccacttcttcttgagaaaaatttatcgtagcaacgctaagcgcactatcctgcgctaagccctagatccattctgtaacttgagtttttaagctgggcttagcgggccagattgaaggtgtagactttgatgaaacgtttgccccggttgctagacttgagtccatcagattgttacttggtgtagcttgcatcctcaaattcaagctgtaccaaatggatgtgaagagcgcgtttctgaatggatacctgaat

SEQ ID NO: 11873 - DNA, 404 bp, Glycine max
tggaggcattacctttatggatctaaattagatgtgtttagtgaccataagagccttagatatttgtttgatcaaaaagagcttaacatgaggcagaggagatggttagagttccttaaggattatgattttgagcttagctatcatccaggtaaagccaatgtagtagctgacgccttaagtagaaaatcccttcaaatgtctgctttgatggttaaagagttggacctcttagagcagtttagagacatgagtttggcatgtgagatcacctctagtagcattaagttgggtatgttgagagtcaccagcgaacttttgagcgagatccgtgagggtcaaaagtttgaccgattcttgtcagcccacgtagaatccatagtcgcagggagagagagtagttt

SEQ ID NO: 11874 - DNA, 416 bp, Glycine max
tgtacaatgtaaccttatacattgtaaaaatcatgttctaatgcaattctaattcctactaaacttatagtatacaataacatacatataattgaaattttaaattaactacttgaattaaattctcattgtaattaattttcaatgtcaattatatttttacaaattgcacaacacaaaactttctataatgagttgtaatttccaaggtattacattagtcattacaaattatgtttattttgccttttgtaacatttttttaactattaagaaaatatggttattatataaaaaaatatagatatttgtatcttttgaatattttatacgtcagacacaaaactgtcctataatttatcgagtaaaaagaaaataagctttattctattgattttttatctcatatatttttt

SEQ ID NO: 11875 - DNA, 411 bp, Glycine max
ttatcacataaaattacatgttattaaatatttaattaattacttaagttaaatgttattgtaattaatttcaatattaattatatttccacatatcacacaagtacaaaactttatataaaataagttataaattttatttatgatgttaccagcaagactatccgatgacctgtgatccattgaattgtcaactaggacaaaaataatacacagacaattatgtgagcaacatatatgacatcttagaatcatcaatatgagatataagttgacatattcaagtgtaaatattatgagtaatattatactagaccaactcactgtgagaagacttcaaaatagttaagtaaatgtcatgataagtgcttcttatgataattatattatgtgataactacatcatatatg

SEQ ID NO: 11876 - DNA, 394 bp, Glycine max
  unsure (1)..(394): unsure at all n locations
tctaatatctcccacactttntggggtgggccattcttggatggccttgattttcttagggtccacttggaccccatttctaccaactacaaaacctaagaagactatattatctacacaaaaggtacacttctctatatttgcatagagggtgtttttcctaaggactgaaagaacttgcctgagatgtccgaagtgatcatctaggctcctactctacactaaaatatcatcaaaataaacaactacaaatctacctatgaaatcccttaagacatgatgcataagcctcataaaggtgcttggtgcattagtgagcccaaaaggcatcactagccattcatacaaaccaaacttggtcttgaaagcgggtttccactcatcaccctttttc

SEQ ID NO: 11877 - DNA, 455 bp, Glycine max
  unsure (1)..(455): unsure at all n locations
agcttcaattgtgacgggtgtatatccaccactcaattatttcatgaaggttagaaaaaaattacatagttgaatcaacatcattaccaatgtgattagaatgataaaaaaacctaacaaatgaaatccaacacatcacatgataattagaaaaatgcaataacaataaagaataggaatattataaattagatatacataaattaatattatgtacagagcaaaaatgtccaaacaatttaacaacatttttgttgatccataaaatatcataatttgtgcctaaatcggaaccaatctagatccaagtgtgatttaaaaaccataattcttaaaaagaataaattattctacattgtgaaacatattcaatgatctagcacacaaatacattgcaaccataataaaataatgttagctatcaacaataaaaactcaaaacanaaaaatatgtc

SEQ ID NO: 11878 - DNA, 387 bp, Glycine max
tattggagcactaccaatatgctatattggttatgagaatggtggccagctaactgaagttgttctttatcgcccgccttctttatttctctttgacgaggttgaaaaggctcatgaagatgttttcaaagtgtttctttagattttggatcatggtagactgacaaattgcctatgaaaagttgtggacttcaagaaaactattattataataactttaaatattggatttggtaactagtccaatgatatacagagtaagataccacaagtggaaatgacaagcagacccaagaggaaaaatatcaacaccaaagtatttagcatattataattgatttatgtcttgtattaagagtatgaataattaaggtctatggagacata

SEQ ID NO: 11879 - DNA, 355 bp, Glycine max
gcttgaggccttggatcttcttcatcaatggagtcttttgcttcttgaagatcaatggcagcaaaatggagaaggaagaaagatgattggagacgccacttcaaggagaagatgagtcaagaacaagcttaccaccataggaagcaatggataagagcttgaaggtaggagaagataagtggagggagaagaagaaaaagagcacagaattttatgcctcaaatgaggtctaaactttgaagtgtaattctcaaatgatcaaagttgaaaaaatgcatacacaaggcctctatttatagcctaagtgtaatacaaaattagaggaaaatttgaatttctattcaaatttcacttg

SEQ ID NO: 11880 - DNA, 415 bp, Glycine max
  unsure (1)..(415): unsure at all n locations
tgtaattatggttgatccagtatttggatataagagtatcagtatatgaattgggtttagcccaggttcataacaaatttaaaaaatttatactcgatttataaaattaacaagagattttaatttcaagttctagttataaaattacattaaatatttaaagaaaaaattaatcacctataatgattatataaaactcgagtatggtctacaaaaacaaaatgaaacattgtctttaaagtctaagtttatatttttttgttaactntgtatttttaacatttgagacatagaactgtacgtactagcaagcagcggcacgttgagtaagtctaggaatacacgtgagatccaataaatagaaattaaaaaatatttggaaaacattaaatttaaaggttatttatatataata

SEQ ID NO: 11881 - DNA, 260 bp, Glycine max
agcttgtctccctgttcttgattattgtagagaaacatagggagccaaatgtcttcagatttgttagctttggtttgtagtcgtgccatgcttcaaatggagtctttttctgcaaagcttttgttggtaacctattcagcaaaaaactgttgtgtgtgcagcctctgcccaaaattcctttggtagccctttgtcatgaagtaagcaccttgtcatctccataattgttcggtttttcctctcgacaacaccattctgtt

SEQ ID NO: 11882 - DNA, 254 bp, Glycine max
  unsure (1)..(254): unsure at all n locations
agcttaccacaattcgtacccttctatctgnggctgctattaaggactggcacttagaacaacttgacgtcaacaatgctttccttcatggtgatctgcatgaggaagtatatatggatctgcctcctgggttcttgcggcctggttcttcttctaataaagtctgcaaattacataagtccttatatggactgaaacaagctagcagacagtggttctccaagttatccactgctcttatctcccttggatac

SEQ ID NO: 11883 - DNA, 247 bp, Glycine max
agcttataatatatttatacgctcgaaattaaacatcgaaaactctcgggaaattcaaatagtcataattattcacacggatgtccgattcgggcgcataatatgtcgagaggctcgaaattgaacaacggaagctcttgagaaattcaactggtataacttttcacacggatgtccgattgaggcaaatcacatatcgagacgctcaaaattgaacaacggaagctcctgagaaattcaaatgggc

SEQ ID NO: 11884 - DNA, 261 bp, Glycine max
agcttgaccatgatttttagaataatattctctgatgctgaccaggcactttttgatgaatgcttgaagagattccaagaagaagaaatcaatgatagggagaagcaagagaagcgagaatccatatggaaacaactggaagatgttgctgcagctaatgctgtaagcaatgaggccatccttgtctcaagatttgtgtcctctgttgcaattgctaccagtgctaatcaattggcaactgcaggtggttgagagccatca

SEQ ID NO: 11885 - DNA, 192 bp, Glycine max
agcaccaacctgacagcggtctggatctccctggatgtaatggtcggcttcttgttatacctcgcgagacgcgctgcttcctgcgcaagcttctcgaatatatcgttgatgaagctgttcatgatccccatggccttgctcgaaatgccgatgtcaggatgtacctgcttcagcaccttgaatatgtagatc

SEQ ID NO: 11886 - DNA, 224 bp, Glycine max
acctgacatcacctttgcagtaggtgtttgtgcaagatatcaagccaaccctaagataagtcacttgaatcaagaaaagagaattctgaaatatgtaaatggcaccagagactatgggattatgtactgtcattgatcatattcaatgctggttgggtattgtgatgctgattgggctggaagtgcagatgacagaaaaagcacttctggtggatgtttctatt

SEQ ID NO: 11887 - DNA, 228 bp, Glycine max
acactttttggggtagggcattcttggatggccttgaatttctcaaggtccacttggaccccatttctaccaactacaaaacctaagaagactatattatctacacaaatggtatacttctctatatttgcatagagggtgtttttcctaaggactgaaagaacttgcctgagatgtcctaagtgatcatctaggctcctactgtacactaaaatatcatcaaaataa

SEQ ID NO: 11888 - DNA, 190 bp, Glycine max
  unsure (1)..(190): unsure at all n locations
tagatacaatccagtgtggaggaatcatccanatctgagatggacaagtcctccataacaacaatagcttgtccctccttttcagaatgttgctggtccaaccaagccatatgttcctcctccaatacagcagcagcaacaacagcagtcacaacaaagataacaagcaactgaggcnntctctcaccct

SEQ ID NO: 11889 - DNA, 346 bp, Glycine max
  unsure (1)..(346): unsure at all n locations
caccctgagtcttaagggagttccaaaaccgagtgacataccctcaagtacaagtatttccccttatgagaaacttcaagtacttactcgcanagtttatactatntccatgcaacatgaagtatgaaacatgggtaccatcaatgcacanactgtggataattaaagattctaagtcatcccccttcatagatgcttanaactctctaaccactctnntcctcaccagggatatccatcatggtaactgaacccnccatgtacatacacaacatacatcatcacaatgacattntcaacatcaacaacatntcatctcaatgtcattatcaacatcaacatcatc

SEQ ID NO: 11890 - DNA, 252 bp, Glycine max
agcttttagctaattcatactacaataatggtttgctcggatgtctgattgagacccgtaatacatcgagacgctcgaaattgaatgttgaagctctcagcaaattcaaacgacaataactttttactcggatgtctgattgagtcccgtaatacatcgagacgctcgaaattgaatgttgaagctctcatcaaattcaaaccacaataacttttttactcagatgtctgattgagtcccgtaatatatgga

SEQ ID NO: 11891 - DNA, 195 bp, Glycine max
  unsure (1)..(195): unsure at all n locations
cctctcttagctntgcaatcatagaagggaggagcatggaagcacggctccatcgacatggcacgttgacaaggaggatcangagctgttccattctcgggcttgtacagtatccacggtttcaacccttcaagcccctgagctacgtagccganagtagaccatgagctcgtgaccaacatgtcggtcaagctc

SEQ ID NO: 11892 - DNA, 250 bp, Glycine max
  unsure (1)..(250): unsure at all n locations
agcttcttgtgggatattttgactagctntccaatctgacattcaccacagattctgccttcttctattttcagattgggaatgcctctaacagcacctttgtcaatgattttcttcatgcctcttaagtgcagatgtccaaatctttgatgccatatattgacttcatcttctttggagactagacatgtggaggagtaactggtttcttgaggtgtccataggtaacagttgtcctttgatctgctgc

SEQ ID NO: 11893 - DNA, 296 bp, Glycine max
  unsure (1)..(296): unsure at all n locations
gatgcatgggagaatcctgaaatcactcatgaaggaacctccacagtgaagatgtccagaatgcaactcttggctacaaaattcgaanatctgaagatgaaggaggaagagtgtattcatgacttccacatgaacattcttgannatgccaatgcttgcactgccttgngagagaggataacagatgaaaagctggtgagaaagatcctcagatccttgcctaagagatntgacatgagagtcactgcaatagaggaggcccaagacattngcaacatgagagtagatgaactcat

SEQ ID NO: 11894 - DNA, 294 bp, Glycine max
  unsure (1)..(294): unsure at all n locations
ttctacacttggagtgataacatgcagtcctcttgaactcttaatgcacactctgtcatcatggcgagactcacgaaggccaacacgtttagccttttcaatgtactctggacaaaattcaatggcttcttctgcaatgtacctttcaacaatagatgtttccggatgatgtaaattcttggtataccctgttaagatcttcatgtatcgctcaaccgggtacatccactgcanataaacaggaccacaacatangtattctctgaccacatgaacaattaagtgaatcatgat

SEQ ID NO: 11895 - DNA, 250 bp, Glycine max
agccattctcctttaactgcacaaggctcttaatatttaaagagtatccttgtggaaccttcacccagcgaagacactgaaaaaaaaacttatcttctcctttttggaaaaagtatgacaagctgggggcaagtaaattttcttcccattagaccttggatgcagctgtgatcgtgtccccatctcagctagatcttgacgggtattcaagccatccttcgtcttgccttgaatgttaaggagtgtccca

SEQ ID NO: 11896 - DNA, 212 bp, Glycine max
  unsure (1)..(212): unsure at all n locations
atgctcctctgcagaccaccacacagaccttngcccttctgtgcaacaatctgaagcaattgaacagctngaagcttatgctgcanacatctacaatagacctcctcaacctcagcagcataatcagccacaacagaacaattatgacctctccaacaacaggtacaatctctggtggaggaatcatncnaaacagcagcaacaacaatctt

SEQ ID NO: 11897 - DNA, 327 bp, Glycine max
agcttctaaactttatacattattgaagctctgataccacttgttggacaagtggcctcagatatcttaaaaagggggggttgaattaagatatcacaacttatttccccaattaaaaattctagttatctttctattccagttataaattcccttaataatgaatttcttaaatattgattcaaatataacaatttgaatataaatataaaacaataataaataaaggagtttaagggaagagaaaatgcaaactcagatttatactggttcggccacacccttgtgcctacgtccagtccccaagcaacccccttgagagttcca

SEQ ID NO: 11898 - DNA, 351 bp, Glycine max
  unsure (1)..(351): unsure at all n locations
tctaatcgattacacacatactgtaatcgattaccagaggagtttttcagaaaacattctcaacagtcacattntnttatctgtttcttaaatggtcatcaaaggcttatatatatgtgacttgagacacgaatttaacaagagttttcaagagcaaaaaggtcttatcctcttaaaaagcagaatagttttatcctcttacaaattccttggccaatacacttgtgattcaataaagaattatttgagtgctcaaattgttcaatctatctctttcaagagagatttcttcctctcttganaagggattaagagaccgagggtctcttgttgtgaaagaattctaaacac

SEQ ID NO: 11899 - DNA, 328 bp, Glycine max
tagcttctacagaaggtttgttcctaatttctctacacttgcctcacctctcaatgagctggagaagaagaatatggcattcacttggggtgaaagacaagagcaagtcttttctttgctcaaagaaaagctcacccttgcccctgatctaactcttcctaacttttctaaaacttttgagctataatgtgatgcctctaaagtgggtgtgtgagttgaattgttgcaaggtggacaccttatttcttattttagtgaaaaaattcatggtgccaccctcaactaccccacttatgataaagagctttatgcctataataagagccct

SEQ ID NO: 11900 - DNA, 322 bp, Glycine max
agctttcactcgcatgttcgattcaagcgcatagcgtatcgagacgctataaatctaacaaaggaagctctcgagaaattcaaatggtcatagcttttcactcgcatgtccgattcaggcgcataacatatcgagacgctctaaattgaacaacatattttttcgagaaattcaaatggtcataacttttcactcggatgtccgattcacgcgcatagcgtattgagacgctcgaaattgaacaacggattttgttgagaaatccaaatggtcgtaacttttcactcgcatgtccgattcacgcgcataacatatgtagacg

SEQ ID NO: 11901 - DNA, 245 bp, Glycine max
  unsure (1)..(245): unsure at all n locations
tgccttgcccctngatatatntgagggactcatggtcactatgaatgacaaattcctcgggataaaggtagtgttgccatgttttcaaagcccgtactaatgcatacaactccttatcataagttgaatagttaagggtaggaccacttaacttttcactaaaataagcaattggatggccttcttgcatcaacacagccccaatcccaacatntgaagcatcacactcatattcaaaagatttt

SEQ ID NO: 11902 - DNA, 326 bp, Glycine max
agcttggacttgctgtgtttttggaacctctccttcctcaggtggacccaaacccaatcacctggttcaagcacgactttctttctgcttttgttggcttgccttgcatagctcgcatttttcttttcaatttgaaccttcacttgctcatgcaacttcttcacatactcagctttagcctgtgcatccttatgcttaaacataccaatgttaggcataggcaacaaatcaagaggagtcaaaggattaaatccatacactatctcaaatggtgaacaattagttgtgctatggacagcccgattataagcaaactcaacatgagg

SEQ ID NO: 11903 - DNA, 330 bp, Glycine max
agcttaaacattcaacttcgttcgtttcgatatattatgggactcagtcagacatccgagtaaaaagttattgtggttagaattcgcactgaggttcaacattcaatttcgagcgtctcgatatatgacgggactcaatcatacatccgagtaaaaagttattgtcattcgaattggctcagagctttcaacattcaatttcaaacgtctcgatatatgacgggactcaatcagacatccgagtaaaaagttattgtcgcttgaatttgctcagaggttctacattcaatttcgagcttatcaatatattaccggacttcatcatacatc

SEQ ID NO: 11904 - DNA, 335 bp, Glycine max
agcttgttcttctacaaaacttttatgaaacaatgacaaaacaaatgtggatgtagaagagtgagtgtcttggttagtagcaaaaaaatatgtatcttcttgaaagatgacgtttctagaaactcgaatcctatgtaaatgaggatcatagcatataaaacctttttgatgggttgagtaaccaagaaaaacacatttaacagattgagctgtgggtttggtgtgttctagtggctaaagatgaacatagtagacacaaccaaaggtgcgaagagtggaataattaggtggcttaccaaataaccttaagaaaggggaatcattatttaaggctt

SEQ ID NO: 11905 - DNA, 329 bp, Glycine max
agcttttactcggatgtccttttgagtcccgtcatatatcgagatgctccaaattgaaaatagtagctcctagcaaattcaaaccataataactttttactcggatgtccgattgtgtcccgtagtatatcgtgacgctcgaaattgaaaacataaggtctgagcaaattcaaacgacaataactttttactcagatgtccgattgagtcccgtagatatatcgagatgctccaaattgaaaatagtaggttcttccaaattcaaaccataataacgttttactcggatgtctgattgagtcccgtactatatcgagacgctcgaaatt

SEQ ID NO: 11906 - DNA, 326 bp, Glycine max
agcttgtgggtggaggactcttgaacgaaaacacaattcatggggctccgaaaaagggttgaggatggagaattgcactaagcaatcactacgcacggctccaagctccagggtggaggacgcatgaacgaaaaagcaattcatggggctcccaaaaagggttgaggatggagaattgcactaagcaatcactacaaacggctccaaactcgtgggtgaaggacgcatgaacgaaaacgccattcatggggctccgaaaaagggttgaggatggagaattgcactaagcaatcactacgcatggctccaagctcctgggtggagga

SEQ ID NO: 11907 - DNA, 326 bp, Glycine max
agcttgtgcatccaattctctgttgaggatgtcccatatgttcttaaaactggactgattcatttgcttccaaagtttcatggccttgcaggtgaagacccgaacaaacatttgaaagaatttcacattgtctgctccaccatgaaacccccagatgtccaagaggatcacatatttctgaaggcttttcctcattcattaaagggagtggcaaaggactggctgtattaccttgctccaaagtccatcacgagctgggatgaccttaagagagtattcttagaaaaaaatttccctgcttccaggaccacgagcatcatgaagga

SEQ ID NO: 11908 - DNA, 329 bp, Glycine max
agcttgaggatgatgttagttttattcgtcagtgctttgaccttccgccaccatcctcatagatttagattattattatattttgttttttaagccttgtatttggctatgtttttatgacatttgaacacttagtatttcttttaatatttgcttagtatgattgaacatgatgataatatttacttgctcttggttgtttatggttatggttgttaaacttaattattttgatgatatatatgtctagtggtatgtacttacatttggtattgtgctttatgtatgtattagaattatttatgtatgatttattttacacactttgg

SEQ ID NO: 11909 - DNA, 330 bp, Glycine max
agcttgtaggccttggatcttctttatcaatggattcctttgcttctttgaagatgaatgacagtggaatggataaggaagagagagaggagatgccacttcaaggagaagattagtctagaagaagctcaccaccataggaggccatggataagagcttggaggaagaaggagatgaatgaagggagaggaagagaacagcacaaaattttgtactctaaaagcgctatgaaatctgatgtttaattatcaaatgatcaaagttgaaaaaatgcgcacacaagacttctatttatagcctaagtgtcacacaaaattggaaggaaattt

SEQ ID NO: 11910 - DNA, 335 bp, Glycine max
agcttatgctgcaaacatcttttacagacctcctcaacctcagcagcaaaatcagccacaacagaacaattatgacctctctagcaataggtacaatctcgggtggaggaatcatcccaaccttattttcaaaatgatgctggcccaagcagaccatacgttcctccaccaatccagcagcaacaacaacaacaaccccagaaataccaaacagttgaggcccctccgcaaccttcccttaaagaacttgtgaggcaaatgactatgcaaaacatgcagtttcaacaagagaccagagcctccattcagagcttaactaatcagatgggacaatt

SEQ ID NO: 11911 - DNA, 332 bp, Glycine max
agctttggagttaccaagtgtcatttcgtcttcttcttttgaccagtcttcttctggcttcaattcatcagtgggctttccttctgtgtccagcatcttgggatgttcccagcctttgatgacagctttccaagttctgctatccagtgatttgaggaaggccaccatccttgctttccagtattcatagttggttccatccagaattggtggtctgttcactggtcctccttctttctccatgttcatcagaatttatctccctagatctcactcagtgatttcgagtgcccgctctgataccaattgaaattctgatactggggacagat

SEQ ID NO: 11912 - DNA, 354 bp, Glycine max
atacagtagacccgacctgctggcatgctagcttgataggaaaatttctttgggaaattcactagtatcttggaattacaagaaacaagcttgtgtagcactatccactacaacagcaaaatacattgaaattggaagttgatgtgctaaatgtctctatatgaaacaacaacttggagacattgcggtaacccttgatcccattcctctaaaatgtgacaacataagtgctattaatctgtctaaaaatccggtcatgcattcttgaactaaacatatatagattagacatcattttctaataaatcatgtataaaaaggagattgatgcattgagtgtgctgatagtgaaca

SEQ ID NO: 11913 - DNA, 332 bp, Glycine max
agcttatgcagcaaaagtgcttacatgagtgtgtgtttgtgccatactttttatcagacaacccgtagtagtttgcaccgtactttcatgtcgtactttctgttcgaccccaataacgtgtcaaagttgttgagcaagcttagcgtggcgcagtgctacaacaccatcaagtcgttggcgtatgagacggaggtgcgtttgcgcgaccccatgtatggctgcgtgggcttcatcttgctcttgcaacaatgactatgcgaaatcacaacaaaggtacacaacgcgaaggagttatcaacctacctcaaccctaggccatgcaggttctttta

SEQ ID NO: 11914 - DNA, 227 bp, Glycine max
tcgtctcgatatattacaggtctcaatcttacatctgtttgaaaaaagttattgtccgttggaattgctgagagcttcaacattcaattttgagcgtctcgatgtattacaggacttaatcagacattcgagttaaaagttattgttgtttgaatttgctgagagcttcaacattcaattccaagcgtctcgatattttacgggactcaatcagacatccgagataa

SEQ ID NO: 11915 - DNA, 294 bp, Glycine max
tgattgagtcccgaaatctattgagacgctcgatattgaatattgaagctgagagctaattcaaacgacaataacgttttactcggatgtctgattgagtcccgtaatacatcgagacgctcgaaattgaatgttgaagctctcagcaaattcgaacgacaataactttttacctcagatgtctgattgagacccgtcatatatcgagatgatcgatattgaatgctcgaactctgagcaaattcaaacgacaataatgatttgctcggatgtttgatagagtcccgtaataca

SEQ ID NO: 11916 - DNA, 324 bp, Glycine max
agctttatcaaatgtggcatttgaggtaattaatgatataaacttttattatttgagcagagatttcgatggacaaattacacacagaaaatatgattttgctaattatgttaaatctttaatttgaagggactgctaaccgaaggtttcctttggatcccctctttgggtggtcctactaccattgctgctagacaaagtggagctggaatttcttggctttttccatttgtggtaagaaagatatcttttgcttcatagttgaaataataagttgtagttgggctttttccccctaatcctgtgagtcattatgatctttcg

SEQ ID NO: 11917 - DNA, 325 bp, Glycine max
agcttgaaggcaaactggttttattggttaacttggtaacccagctggccttgaatcacaaatctgtacctgtcgcaagggtttgtggtttgtgctcctctgctgaccaccatacagacctttgcccttccatgcatcaacctggagcaattaagcagcctgaagcttatgctgcaaatatttacaatagacctcctcaacctcagcagcaaaatcaaccacagcagaacaattatgacctttccagcaacatatacaaccctggatggaggaatcaccctaacctcagatggtccagccctcagcaacaacaacagcatcctgc

SEQ ID NO: 11918 - DNA, 322 bp, Glycine max
tagcttgtgcctatacacgtatgttatgtgaatgtagcatataaatcgcgaatacccttatgtgctttgatgatggctatttcccgctcctagcttcaattggagttatgtcttttacagacttagtagtacatctgttgagtatgtaaacagaagtgtatactgcttcaacccagaatgtgttaggtagtcccttatccttgagcatcgatctaaccattcctataactgtgcgattctttttattggacactccattttgttgaggagaataagcgactgtaagtaggcgctcaaaacctttattctcacaaaatctttc

SEQ ID NO: 11919 - DNA, 331 bp, Glycine max
agcttacatgaaacttcctattgttatgtcctcaccgttacctaatattgtttgcaagctaaaacgttctttgtatggattaaaacatgcaccaagagtgtggtttgaaaagtttagcacaacactacttggcttttccttcatccaaagtagctatgatccatctttattcctataaaggacctcaaaaggaattatgaccctccttgtttatgtagatgacattatcgtcactagctcagatcaagaggctatcactacaatcaagcaattgttgcatacaactttcaacatgaaagatcttggacaactcacttatttcttgggatta

SEQ ID NO: 11920 - DNA, 324 bp, Glycine max
agcttggcgacacttttttaagattgaatcctataatgaaggaggaagtaagaaaagaagtgctcaagttattagaggcaggccttatctatccaatttcagacagctcatgggttagtcctgttcaagttgttccaaaaaaaggagggatgacagtaataagaaattattgaaatgaactaattcctaccagaacagtcataggatggagaatgtgcattgattatagaaagcttaatgaagccacaagaaaagatcactacccacttcccttaatggatcaaatgcttgagagacttgcagggcaatctttctactgttttt

SEQ ID NO: 11921 - DNA, 321 bp, Glycine max
agctttgctacgataaccacttggactggactcacccactggctgtcagaaatggggtaaatgattccagcttgtaagagcttggtcacctcctttttcaccacatccagaatgacggggtggagttgccactgaggttgcctcactggcttatctccatcctttaaaagtatcctatgcatgcaggtagatggtctaataccaggaatgtgtgctaaagtccatccaatggctttcttgagaactagccacaacttctcctcttgctcagcatcaagggaggcatagatgatcactggaaatttttccttgtcctccaag

SEQ ID NO: 11922 - DNA, 326 bp, Glycine max
agcttgtacgctataatgattatgattgggctcaaaatgatgatgatcaaagaagtattaatggatttgagtttttaagggggaatccaaccttcctggaatgaaaaaagcctcaatttcctttttactcgtgaggggcaaaacccttaaaagtaacattaggccttcgtcctgtaatccggcttagagaattgtaaaaagagttggacatgtcacaagacgatcagaccatcacctttggggataataagtcaaccattgctctagtaaacaacctcgcgttccgtgatcgaagcaaacatattggcactcgttaccactacata

SEQ ID NO: 11923 - DNA, 330 bp, Glycine max
agctttgatcccaaagaagcttgccatgaccattatcttcaagcccatcacttttcccaacacacaaacaaaagggtatagaagaaccaaaactatggctcttataagcccccctgcctcaaaggccacgagcatgaaatatgggaacaaagaagaggatttcaacaacgcgttttcgacataaaagatcaacgtgtgatcgttgaggtctgatcggtggattaaagaggggaatttcaggtatttgttaaactgtgttggtgcacccgaaaaagaattgctaatggttctgtggaaacggacgaggttcctgagttgcctaaagagaaa

SEQ ID NO: 11924 - DNA, 369 bp, Glycine max
  unsure (1)..(369): unsure at all n locations
aagcttcttgaagccgttctcataactggcaaccgaatgaatgatggaactntccgcggtggtgcacaagcatttaaacttgatacacttctgaaattatctgatgtaaaaggaacagatggcaagactacactcttacattntgttgttctagagaatatccgctccgagggcataaaagccatcagaaaggcaaaagagagccagaaatcgtctagtattaaattggatgaccttcacgatagtacccgagaaacagaagatcgctaccatgaaatcggtcttcatgtggtttcacgattgagcagtgaacttgagaatgtaaaaaaagcagcaattatatatgctgacagcttaacaggaactact

SEQ ID NO: 11925 - DNA, 326 bp, Glycine max
agcttctcagatgtcattggtatcattgaccttgtggcagcaagattgcgtcctgtcctcccttgcctccgaacaccatctccatgttcttccccagaaacaagcttattctttcttgttggcaataccatattagacaccttttgaacattttgtccagatttctggtctatctcttctgctttcctacccttttcttttggtttaacatcagccacccctgactcttcactttcagataaggcagctgaagatgaaggatcaccttttagtttaatttgctgaggagaactgccagccaagcgtctggcaaattctaacccaag

SEQ ID NO: 11926 - DNA, 328 bp, Glycine max
agcttatgaccattttaatttttttttagtttccattgttcaataaccaatgtctcgatatattatgcacctgaatcggaaatccaagtgaaaagttatgaccatttgaatttctcgagggattttgttgatcaattttcagacgtctccatatatggtgtgcctgaatcggaccttcgtgtgataacttatgaccatttgaatttcttgagagatttcgttgttcaatttctagcgtctcgataaaggatgcgcctgaatcggacatccaagtgaaaagttatgaccatttgaattgctcgtcagcttccgttgttcaatctccagc

SEQ ID NO: 11927 - DNA, 328 bp, Glycine max
  unsure (1)..(328): unsure at all n locations
tagcttcacaaaagtttatattgcttgaaacaagcaccgttgcagtggtgcaagaagtttaatgagttaatgagcaactcgggattcaaaagatgtgacatggaccattgctgctatgttaagaaatatactaatagttatgttatctttgtcgtgtatgttgatgacatgttgactgtgggatctagtatggcnnaaattaacaagtcgaagcatcagttggcagaaaactttgaaatgaaggatcttggtccagctaaacaaatccttggtatgagaattcttagaaacagatcataacgaatcttgtagctgtctcacgagaaat

SEQ ID NO: 11928 - DNA, 255 bp, Glycine max
  unsure (1)..(255): unsure at all n locations
tagttcaagtggcactcttgtgcacacaatatctttcgggccacaggcccaaaatgtctgatgttgtacgcatgcttgaaggtgatgggcttgcagagaaatgggaagcctcacaaagtgctgacactaccaagtgcaaaccacaagaactctcttcatcagataggtattctgacctcattgatgactcttctttgttagtccaagccatggaactctcaggccctatgatgtgaaccttacggngcggatcgc

SEQ ID NO: 11929 - DNA, 330 bp, Glycine max
agcttcaacatcaggattcttttaatggctatggcggatatcaccatgaccgttaattaagaaaaaaattatatttaagcatctaattaaagtaattatttttagggatataataagaacatttatctataatgcacctaattaaagtaattatctttagagatcatattataatatatatctataatgtgtctaattaaaataattatctttagagatcatattaaaatatatatctatagtgtgcctaattaaaataattgcatttagaagatctataaatagttggagtttgaactctcgggattcgaaattcattatacattttac

SEQ ID NO: 11930 - DNA, 196 bp, Glycine max
atctcaagactaactatgacaggatttttcttgaagaaatagctcaagcggcactctggtgcacacaatatcttccgggccacaggcccaatatgactgatgttgtacgcatgcttgaaggtgatgggcttgcagagaaatgggaagcctcacaaagtgctgacactaccaagtgcaaaccacaagaactctcttc

SEQ ID NO: 11931 - DNA, 329 bp, Glycine max
agctttccattctcttgggagttcatcattggatttgacttcttctggaggatcttcattgattcctttgtcatttcctttggaatcttgttcatgaatgttcatatgttctaaagaatctgcagtgtcatctagcatattctttcttgacaatatatcattagattcatcaaaggtaacatgaatggattcctcgatatacatagttcttttattatatatcatatatgctttgctttgtaatgaatatccaagaaaaataccttcatcagattttgcatcaaattttcctagattatctttaccattattaagcacaaagcacttgc

SEQ ID NO: 11932 - DNA, 295 bp, Glycine max
  unsure (1)..(295): unsure at all n locations
gcgcctgaatcggactgtgctttgagaagatatgaccatttgaatntctccagagctttcgttgttcaatttctagcgtcccaatatattatgcgcctgaatcggactttcgtctgacaagttattaccatttgaatttctcgagagcatatgttgttcaatttcgagcgactcgatatattatacacctgaatcgggcatccgtgtgacaagatatgaccatttgaatttcttcagagctttctatgttaatttcgagcgtgctcaatatattatgcgcctgaatcggactttc

SEQ ID NO: 11933 - DNA, 446 bp, Glycine max
  unsure (1)..(446): unsure at all n locations
agcttctcgatatattatgcacctgaatcagacttccgtntgataagttgtgaccatttgaatttctggagagattccgttgtgcaattntgagcgtctcgatatattatgcgcctgaattggacttccgtgtgattagttatgaccatttgaatttctcgagagcttccggtgttcaatttccagcgtctcggtatataatgcgtcagaatcggacttccgtgtgacaagttatgaccatttgaatttctcgagagctttcgttgctaaatttcaagcgtcttgaatataatgctcctgaatcagacttccgtatgagaagtgatgaccatttgaatctctcgagagcttccgtggatcaatttcaagctgctcgaatatgatgccctgtatccgactccctgtgaaagttataacctttaattcccaaagcgcgtttgttaata

SEQ ID NO: 11934 - DNA, 409 bp, Glycine max
agctcggaatgtagtcataccacacaaaatatatatatgtatgttgaggtagaaagataacttagatatgcatgtatgtaaacaaaaacacacttcacaaaatatatatatatgtatgtttaggtagcaagataccttagatatgcatgtatgtagcaaaaagatacctcacaaaatatatatatatatgtatggtagcaagataccttggatatgcatgtatgtagcaaaaagatacctcacaaaatatatatatgtatgtttaggtagcaagataccttggatatgcatgtatatagcagaaatacctcacaaaaatatacacatgtttaggtagcaaaatacctcatgaaaaaaaaaaaaagcaaactagagaaagaaatacacaaatgataatgatcaaaaaaaa

SEQ ID NO: 11935 - DNA, 497 bp, Glycine max
  unsure (1)..(497): unsure at all n locations
cttgtacaagaatgaagctctaataccacttgttagacaagtggcctcagatatcttaagaaggtgggggggttgaattaagatattgcaaactatttccccaattaaaattctattttaatttcaatgcaagttccaagttcccttaaaaatgaacttttaaatgatgattcaaactaaacaatctaaatacaaatgtaaagcaataataaataacagagtttaagggaagagaaagtgcaaactaaagcaatctaaatacaaatgtaaagcaataaatccctaagcaacccgcttgagagtttcactatcttgtaaaatccttttacaagttctgaaccacacaaggacaaatcctcctttgtgttcagatttctttacaacaagagaccctcagtctctcaatcccttngagaataagatagaagagaagaataaatctatctcgaaagagatagattgtacaactcgagcactcaattaattccttattgaat

SEQ ID NO: 11936 - DNA, 499 bp, Glycine max
  unsure (1)..(499): unsure at all n locations
aagtcacctgcggcatgcaagcttagactgagttcagcctaccatcctcatactgatggccaaactgaacggaccattcagtcattggaggaccttataagagcatgtgtcttatagcagaagggaagctgggagggttttcttccattgatagagttcacttataacaacagttttcattctgccattggcatggctccctatgaagctttgtatggtagaaggtgtagaacacccctatgttggttagagcccggagaaggcctcacattaggaccagaagttgtacaacaaaccactgagaaagttaagttaattcacgagaggatgacaactgctcagagtaggcagaatagttatcatgataagaggaggaaagatctacaattcgaggttggcgatcatgtattcttgagagtcactccatggactggggcttggtgagcattgaaatcccgacnactcacacctcgctttattggtcctttccagattctta

SEQ ID NO: 11937 - DNA, 420 bp, Glycine max
  unsure (1)..(420): unsure at all n locations
agcttatgctgcanacatctacagtagacctcctcaatctcaacagcaaaatcagccacaatagaataactatgacctctccagcaacaagtataatcccagatggaggaatcatcctaaccttatatggtcgaatccttcacaacagcaacaacaacaacagccttattttcaaaatgctgttggcccaagcagaccatacgttcctccaccaatccagcaacaacaacaacaacaacagccccagaaacaacaaatagttgaggcccctccacaaccttcccttgaagaacttgtgaggcaaatgactatgcaaaacattcagtttcagcaagagaccagagccttcattcaaagcttaactaatcagatgggacagttggctacacagttaaatcaacaacagtcccacaattctga

SEQ ID NO: 11938 - DNA, 412 bp, Glycine max
  unsure (1)..(412): unsure at all n locations
agcttangctgagttctacttaccacccacatactaacgattagaccaagcgcactatcaaatccttagaggacctcttgagagcctgtgtcttatagcagcggtgtagttgggatggtttcttacccttgatagagtttacatataacaatagtttttactccagtataggtatggcaccttacgaggcgttgtatggtagaagatgtacgacacctctatgttgggtagatctaagtgagagcattgccttatgacctgaggtggttcaccagaacactgaaaaggtcaagttgatccaatagaggatgagagtagcccanagtaggtagaagagctaccatgtangaatagataggaccttgaatttgttgcaggtgatcatgtattcctgacagtcactccatggact

SEQ ID NO: 11939 - DNA, 395 bp, Glycine max
atgcttagttaacctggtaacccagctatcgttgaatcagaaatctatacctgtcgcaaaagtctatggtttatgctcctctgccgaccaccacacagatcttttcccttccatgcagcaacctggagcaattgagcagcttgaagcttatgctgcaaacatttacaacagacctcctcaacctcagcagctaaatcaaccacagcagaacaattatgacctctccagcaacagatacaatcccggatggaggaatcaccctaatctcatatggtctagccctcaacaacaacaacagcagcctgctcctttctttcaaaatgatgctggcctaagcaagccatacattcctccaccaatccaacaacagcaacagccccagaaacaacaaacag

SEQ ID NO: 11940 - DNA, 460 bp, Glycine max
  unsure (1)..(460): unsure at all n locations
tcttcaactttgtattcaagtttttacatcaattcttttgaatcttactagtcaaaaattaaaataatattaaaatcctcattatttcattaaaaacaacattatagtagaggaattgtaatcattcttaagtcaaaattgactatcaattaaactcaaacttcgcagttatcactcattattttcaaacaacttgagcttgtgagaagttttactgaacttgatatatttctatctacataggctatgccttggtgcatggtcagaccatggtgaaaggactggtggattntatgcttgcaatcgttatgaagcagctaaacaagagggagtggtaagggaattagaaatactctacttcattggttcaggttcatgataccataacctactgcccctgcatatatttgataacgatatttcttctgactaaatgttgtgcatgtagtatgataaactg

SEQ ID NO: 11941 - DNA, 451 bp, Glycine max
  unsure (1)..(451): unsure at all n locations
actcggcatgggacctganatgttgttcccactcagatccaacaatgtcaaagatctcaaactagtccaattactaggtatcccaccactgatatcattacctcccaaccttatctcaacaagagaatccaactttgcaacagaaggactcaaagtcccactaatattaaacttttccaaaagaatcatgtccaccttcccatccccattgcaccttatccccaaccatggcccatcacaagggtcattcccactccactcatcaaccaaaatccgaggataccccaaccctccaagaaactccaacaacaccatcacctcaaaaccacacataaccccgggtttggccacacaaaattcattgttctcaaagctcactttactcngctgcgaaatccggatcggacccacganagtggtgtattcanatcaatctatccaacttcattca

SEQ ID NO: 11942 - DNA, 342 bp, Glycine max
  unsure (1)..(342): unsure at all n locations
gaactacagagattatattctaattctaaacccacaaatcaaactaatgttatgcaggattacaacgcaaaaatttcatattttggcttggcgaaattagggccttcgggtggagattcacacgtgagtacgaggatcatgggaacatatggctatgctgctccagaatacgttgcaacaggtgaacatgtcatcttatctaaacacatatatatagagatggtttgtgaatatgctatttgaagttgaaactaatcgtnttatgattcaacatgacacgctttcgtgaagagtgatgtttatggatttggtgtggtgctgctagatatgctgacatggatg

SEQ ID NO: 11943 - DNA, 324 bp, Glycine max
ctgcagctggacttctgtgtttgagaacctcttcttcctcaggtgtacccaaacccaatcacctggttcaagcacgactttctttctgcttttgttggcttgccttgcatagcttgcattattcttttcaatctgaaccttcactagctcatgcaacttcttcacatactcagctttagcctgtgcattcttatgcttaaacatatcactgttagacatacgcaacaaatcaagacgagtcaaaggattaaatccatacactatctcagatggtgaacaattatatgtgctgtggacagcccgattataaacaaactcaacatg

SEQ ID NO: 11944 - DNA, 488 bp, Glycine max
  unsure (1)..(488): unsure at all n locations
ggatccttaagcacctgaggcatgcaagcttgtttaccacatgttgagttngcttacaatagagttgttcatagcactactaattgttctccttttgaagttggttatggttttaacctactaactcatcttgatcttttgtctatgcctaatgtttctatttctaagcataaaggtcaagcaaaagcggactatgtgaagaagcttcatgagcgagtcatagatcatattgagaggaaaaataaaagctatcttaaacaagccaacaaatggagaaagaaatttgtcttctaacccggagattgtgtttgggagcacatgagataagaaaggtcttcggaacatacgaaatcaaagcttcaaccaaggggagatggaccattttcagtgcttgaaagaatcaatgacgatgcttacaaagttcagctacccagggagtataatgttagtcccaccttcaatgtatctgactcatctctctttgatgc

SEQ ID NO: 11945 - DNA, 342 bp, Glycine max
ttaaatattctcagtcataacagcctcaccccatatatatttgggaactttagtagaaaagagtaatgccctacccacctctataaggtgtgtattaattctctctgcactcccattttggtggcggtgtattaacacaacaactatgatagacaatctcattttcaagaaacaaacttcctagggttgcgtcaaaatattgcatcccattatcactactaactacttgtatattaacacgaaattgactttgcaccatcataaggaaatctctgacatctagtttacctacagatctttcttataatatgtacacccaacaaagcctagtgtggtcatcta

SEQ ID NO: 11946 - DNA, 258 bp, Glycine max
ctcttacaggtgactttgagcgtttgtgtccggaggagtacccaacatttcctgattatctctctcgagtattggccgccctccatccacttatcagagatggtgaagatggcgatgacgtgcatgtgacgtaaaaaatacttcgaactttaaatgcaaggtctgacttcattggtaccaacattgacgaaaacgccgatttaaggaccatgactattgagcaactcatgcgttccttacttgcctacgatgatgctc

SEQ ID NO: 11947 - DNA, 370 bp, Glycine max
  unsure (1)..(370): unsure at all n locations
ggatccttaatcacctgcggctgcagctggattcctttagtagganatctattcttcctaagatagagccaaacccagtcaccgtcattaagaactaactcttttcttcctctattgcctttagttgaatacacctttgtttggttctctatttggttcttaaccctttcatgcaacttctttacaaactctgatctagattccccttttttatgtataaaagaagtgtctagtgggaggggaatgaggtctaatggtgctaggggattgaacccatagacaacctcaaaaggggattgcttggtggttctatgaacccccctgttgtaggaaaattctacatgaggaagatacttatcccaagacttat

SEQ ID NO: 11948 - DNA, 465 bp, Glycine max
  unsure (1)..(465): unsure at all n locations
agcttgttgtaggtttcataatatgaaatctgaatatatatgtgcacggacgcattgtaatcgattacacacatatggtaatcgattaccatacagcaatgttgtcagacataactgcttgtaatcgattacactattatggtaatcgattaccagaggttatttgagccaaaaaataaaaacaaaaggctttctaggagagaagaagttttgagttactatcacaatactttttcatgagaaatatatataagaatactttatgaataattcttaatcatgtaattcacatatcatattatgcacgaacattaaaacatgtaaataatcaattntatcaaaacaatcaacacaagtatgaagagtattgattntattgaaatatatgaatgaatatttcatgcaaataagatgaaatcaatcaagaacatctactcatgatttcaaacaatcagaacacaaata

SEQ ID NO: 11949 - DNA, 305 bp, Glycine max
  unsure (1)..(305): unsure at all n locations
tatagtctgaattctgggtcctcttagggactnatacaatatatccgctggctggtcattagaaccaatgaactcgatgacaatctccttggacagaagcttctctcgaatgatatgacaatcaatctctatatgcttagtcctttcatgagagactgggtttgaggcagtatgaagagcatcctgattatcacaatgcaacttcatttgcaactcttcacaaaacctcaattcttgcacaaattgtcaaatccacatgaggtcacacgttaccatagccatcgatcgatatcaggctttgcact

SEQ ID NO: 11950 - DNA, 455 bp, Glycine max
  unsure (1)..(455): unsure at all n locations
agcttatccncataagagtgcagaacagctggttagtcatcattgattataggaggctaatccaggtaaccaaaaaagatcattttcccctgccattcattgatcaaatgcttgagcgcttggcaagtatgtctcattacaatttttttatggtttttctggttatttacaaattcatattgctcctgaggatcaagaaaacaccacattcacctatccctttggcatttttgcctataggaggatgccctttggcctatgcaacgcctctggtaccttccaacggtgtatgcttagcattttcaatgattttttagagagttgcatagatgtgtttatggatgattttactggttatggatcctcttttgatgcatgtttggatagtctagatagagttcttaatagatgcattgaaactaaccctgtgctgaattttgaaaatgtcacttcat

SEQ ID NO: 11951 - DNA, 404 bp, Glycine max
  unsure (1)..(404): unsure at all n locations
atgcctggttaacctggtaacccaactggccatgaatcaaanatctgcacctatcgccagactctgtggtttatgctcctctgccgaccaccacactgacctttgcccttntatgcaacaatctgaagcaattgaacaacctgaagcttatgctgcaaacatctacaacagacctcctcaacctcagcagcaaaatcagccacaacagaataattatgacctctccagcaataggtacaatcccagatggaggaatcatcccaaccttagatggtcaaatccttcacaatagcagcagcaacaacaacaaccttattttcaaaatgttgctggcccaagcagaccatacgttcctccaccaatccagcaacaacaataacaatagccccagaaacaacaaacag

SEQ ID NO: 11952 - DNA, 423 bp, Glycine max
  unsure (1)..(423): unsure at all n locations
agcttcngcttattagtgcacatctccttcaataatttagcatatcttggaatttgctttattgcatccagtagaggtatgtctacctctacttttctaaatgtttccaagatctccttctttggctcttccatttttttgatggaaattgctcttggagggaatggaagagggatatgttgcttctctttagattcacctgcatagaaattggtaggtatcttactctttaaatttttgtcatcatctttttctggagtagagagaagttgggcaggttcatttgcacatgaggaagatgttgctggttgaggttcttgacactgctttcccgacctcaatgcagtggcactcacatatttgggattctggacagattgagaacgtaatctgtcacaattctgggactgttgttgattaact

SEQ ID NO: 11953 - DNA, 394 bp, Glycine max
  unsure (1)..(394): unsure at all n locations
ntggcaacacaaggtgagaggctttattgggaagtgtgttggggaggagcaatctgctttcaccgaagggagatcgattctggacaatgtgctcattgcagtagaaatcattcactatcttaaatccaagaccagagggggaaatggataagtggcctgaagattgatatatgtaaggcctatgacctcgttgactggggtttctagatgcaatccttgtcaagttgtgattttgcaatcaatggaccgagtggatgatgatgtgtgtcaaaactgtttagtatgtagtggtagtgaatcatgacaaggttgatcctatctcccctgagagatctctggcaaggagatcccttctccctcttttatatatataattttagctcaaggtcttaca

SEQ ID NO: 11954 - DNA, 357 bp, Glycine max
agctttttatccaactggtttaaggttcaagaactctagtgatggtaaagctttctccttttcttcttcttttgctttgattatattccctgagtatgaaaagttaggagggcatggtcttgcttttacaattgcatcttctaagaatctcaaggctcttccaagtcagtatcttggtcttctaaactcaactagcacagggaactcctccaaccacctctttgctgttgagtttgacactgcccaagatttttagtttggggacattgatgacaaccatgttggaattgacatcaatagcttggtctccattgcttctgcacctgtatgttactacaccgggggtgatgataattt

SEQ ID NO: 11955 - DNA, 361 bp, Glycine max
tccccgtggcttctttgtgaagctttctcaagaggcttctttgagaagctagatccttatctacccacacccatctatttactaaattaacctccttaaaaataattacggataaaataacacaacaaatacagtcaagcatcaaacataattattaatatatagatatatatatcagggtgttacaactctcccacccttttagaaatttcgtccccgaaatttaccttactcaaacatggatgggtgagcttctcgcatttgactttctaattcccatgtggcatcttctcctgttgcacctccccagatcaccttgaccaacggaatctctttccctctaaggtgttttgttcgccta

SEQ ID NO: 11956 - DNA, 397 bp, Glycine max
tcactctcattcccttctccacgctgaccacatagtagagtctatttcatcaacgaatatgatagaaggtgcactttcgcgtgccatttggaaaagatttgagaccagcttttcactttctcccatccactttgaaaccaggtctgacgaagaaacactggtgaagaattaaaaagttaaaacatgtagcaaaaaaatgcccacctaacctaagcacttacatttgcgaccttatttttcaaacaaaatcactgacaagcagaactattagactcagaaattgaaaatgttaaaaataacaatgttgatgattatgtgaaatcatccatatgcacacacattcatccaccaaactcagtgcgtgtttggattaacattgaatgattcaaaaccacat

SEQ ID NO: 11957 - DNA, 278 bp, Glycine max
agcttattcacatagtcacgactgtttcttatcttctttatgcataaaaacagaaacattacgcatacgcaaaagatcacgaagacgcagtgggttaaaaccataaacaacttctgaaggagaacaattagtggcgctatgaacagctttattgtaagcaaattcaacatggggtaaacaagctacccaagtttttaagttctgtctgacaactgttctaagcaaagttcccaaagggctattaacaacttccgtttgcccattacgctgggggcgac

SEQ ID NO: 11958 - DNA, 311 bp, Glycine max
taagctccttcaactgcacaaggctcttaatatttgaagagtatccttgtggaaccttcacccgacgaagacactggcaaaaactaatcttctctttattggacaaagtttggcaggctgggggcaagtaaattttcttcccatcaaaccttggatgcaactgcgctcttatacccatatcagctaaatcttgacgggtattcaagccatccttcgtcttgccttgaatgttaaggagcgtcccaatcacactgtcacaaacatttttctccacatgcataacatcaatacaatgtctaacgtcaagatca

SEQ ID NO: 11959 - DNA, 339 bp, Glycine max
agcttcatgggagagtcaaagatcaaattgagaggaaaaataaaagctatgctaaacaagccaacaaaggaagaaagaaggttgtcttcgaacccggagattgggtttgggtgcacatgagaaaagaaaggtttccggaacagaggaaatcaaagcttcaaccaaggggagatggaccatttcaagtgcttgaaagaatcaataacaatgcttacaaagttgagctgcccggtgagtataatgttagttccaccttcaatgtctctgatttatctctttttgaagcagatggagaattctatttgaggacaaattcttcttaagagggagagaatgatg

SEQ ID NO: 11960 - DNA, 361 bp, Glycine max
ttgaatgctctattcactggagttgacaagaatatcttcagactaatcaacacttgcacagtggccaaagatgcatgggagatcctgaaaaccactcatgaaggaacctccaaagttaagatgtccagattgcaactcttggctacaaaattcgaaaatctgaagatgaaggaggaagagtgtattcatgacttccacatgaacattcttgaaattgccaatgcttgcactgccttgggagagaggataacagatgaaaagctggtgagaaagatcctcaaatccttgcctaagagatttgacatgaaagtcactgcaatataagaggcgcaagacatttgcaacatgagagtggatgaac

SEQ ID NO: 11961 - DNA, 386 bp, Glycine max
agctttctcacgcacatcagtccacttacaccacattctttttgacaagttcatttaaaggtgcaacaagtaaactgaggttcttcacaaatcttctataaaaagttgctaaaccataaaaaattcttaccttattagcatttttaggtacaagccattccctaattgcctttaccttttcttcatccacacttattccttttgagctaatgataaaactcaagaacaaaacatattcaaggcaaaaagaacatttttataagattggcatacaatttattttctctcaaaacattaaaaacaatgtgttcctctaatgttttgctatagatcaaaatatcatcaaaatacaccacaacaaatttcccaatgaagcacacaaaaca

SEQ ID NO: 11962 - DNA, 297 bp, Glycine max
catgcaagcttactactagaatagattctgttatagtaagttcgtctaattaaaattttattgtatttatattctgataatcattagcaatgagtgctattactttggtatcttagattagtattaactagaaatagttttgtgcaataaatttattcttagtgataaacaatattaggtttaggaaaatatatctattatatttgtattttgataataattaataatgtctgttattacttccctattttaagttagctttacttagaaaaagatatgttccatcaatttattttc

SEQ ID NO: 11963 - DNA, 189 bp, Glycine max
aatccccaagtaggattctgtctcaagacacaccgtaaaattcctgattcagagcgtgcccaaaatggtctaattccacataacaatatgtatgatataaccccaaatctccataagtctacttcaacactgtaagaactaaggagcacttcatgagcaacgctatatgcaactgtcaacaatgtcaat

SEQ ID NO: 11964 - DNA, 375 bp, Glycine max
agcttggcaacaagcaatgaacgctttggtttcctgagtggctcctttgcagagaattatctgacagaggagctcaacattcacagatccaggcttgttcctctcaactcaccatcataatatgaaacggccttgaaagatggtcctgctgatgggggtgtcactgcaataatagatgaacgtgcatacatggagctgctccttgcaaccagatgtgaatacggtcttgttgggcaagagttcaccataatgggttggggctctgcaagagcattatccatctcctctttttgaaattcacaatcagatatatcacatgcattctcccaaatattaaagatccggttttcaataaatctaagaccatcctttcta

SEQ ID NO: 11965 - DNA, 342 bp, Glycine max
  unsure (1)..(342): unsure at all n locations
ngcattattttatttatttattttggtgacaaatatatttttgcttgaggtctggttattacgatgaagcaagaaatgttgcccaatcttcacatcaatttgctcctttggtacatactgtggtcactacttatttactaatttatgatttaatctttcttaataatttacttatttatgacagctggcagagtggattaataaaggagggatggtacctgaagagattgcagctgccgcatcagaggaatgtgaaagaatgttgattggcattacccattgacttgtgaaatccaagtacacaaaaaattcccacaaaagatatatgaaataatgtttaag

SEQ ID NO: 11966 - DNA, 331 bp, Glycine max
  unsure (1)..(331): unsure at all n locations
ngaagacaagcctgaggaagaaggtgttgatccaactggttacaaacagttggtaggctcactgagatacctctgcaatagcagaccagatatctgttatgccgtatgcgtgctgagtaaattcatgaataggccaaagaaatctcatttcttggctgtcaaaagggttctaatgtatgtgaagggaactatgcagtatggtgtgatgtttccaagtaatgttgatggtgctgagatgaaattgattggttactcacatgctgattggtgtggggacaggacatatatgagaaacacatctggctacttgctcaaatttgtggagctgctg

SEQ ID NO: 11967 - DNA, 384 bp, Glycine max
ttcgagaaattcaaatagtcataacatttaactcggatgtcaaatttcggggcataatatatcgcgacactcgaaattgaacaacgaaagctctcgagaaatttaattggtcataacttttaactcggaggtccgattcaggcgcataatttattaagacgcttgaaattgaactatgaaagctcttgagcaattcaaatggtcataacttttcacacgaaggtcagattcaggtgcataatatatcgagacgctcgaaattgaacaacggaagctctcgagaaattcaaatggtcataacttttaactcggatgtccgatttaggcgcatcacatatagagacgcttgaaatcgaacaacggaagctctcgagaaattcaaat

SEQ ID NO: 11968 - DNA, 397 bp, Glycine max
agctgacgcgtgcgcgcttccttgagaagatgtgtatagaagctagagcttagctacacacacctctctaatagctaagctcacctccttgagatgagaagctagaacttaactacacaccccgtataatagctaagctcacccccatgacaaaatacatgaaaatacaaaaaaagtccctactacaaagactactcaaaatgactcgaaatacaaggctaaagccctatactactagaatggccaaaatacaaggcctaaacgaaggaaaaaaaacctattctaatatttacagagataagcgggctcatacttagcccatgggctcaaaatctaccctaaggctcatgagaaccctagggccttcccttggatctctggcccaatctacttggag

SEQ ID NO: 11969 - DNA, 270 bp, Glycine max
  unsure (1)..(270): unsure at all n locations
tgtanaaaattattaaatattataatgttgttggattgtatnaatgtgtttagnttaaatgattaaanatgttgttttaaagtatgaaggtnattaagnttgtgaattaatttaaaaaatttttgtaatanagtatgaaaagtataatttattaaattatnnnttaaaattataattgaaggacaaaanttatagtatnnagtaggtggttttagtgttatnnaattaaatgttagagttatatatnagtaatttttttaataaatgttt

SEQ ID NO: 11970 - DNA, 317 bp, Glycine max
  unsure (1)..(317): unsure at all n locations
agcnttgatttcctttgttccggatacctttcttttgtcatgtgcacccaaacccaatctccgggttcgaagacaaccttctttctccctttgttggcttgtttagcatagcttttatttttcctctcaatttgatctttgactctctcatgaagctgctacacatagcgggcctttgcttgaccttctttacgctcaaaaaaagaaacattaggcatatgcaaaagatcaagaggagttagtgggttaaaaccatacacaacttcaaaaggagaacaattagtggtgctatgaacagctctattgtaagcaaattc

SEQ ID NO: 11971 - DNA, 400 bp, Glycine max
cgaggtgttggatgtgtcgaggaatacgctcggtgggcatgtgcctatggagcttgggaattgtactgagttgtctgtgctgcttttgtctaatctttttagttcagttccggatgttaatggtactttgggggactccggggtggagcacatggttgctatgaatattgatgagtttaattacttagaaggcccggttcctgttgagattatgaaccttcctaagctgagactgctgtgggcgcctatggcgaatctggaaggcagttttatgagcagttggggcaagtgtgatagctaggagatgctaaatttggctcaaaatgatgtcactggggattttcctaatcagcttggtggctgcaagaatcttcattttcttgatttgagtgccaataac

SEQ ID NO: 11972 - DNA, 396 bp, Glycine max
tctagcttatacgggcagacatcttattaactaataaagttttgatgtaatccttcattaaccctcctgcatttgtataattatcttcatctttgtaaagcacgtcaatcatgcgcacaaggttgacaacacgcaaaagaaaattcattggcacttcagtaggattaaggcatgcctcattgatgtccttccaagcactcttaaccatctcaagtagtttattaatggcatcttgccttgaggtgttatgttgcttcatatagctttcaatgcttgatgcaacgtgtcttctttcctgctcaaactttggggaaaaaaattaatactaaagaaaccaatgtttaacccgtaaagtaaaagttggtattaccaaaattataaggtaaattaaatgtc

SEQ ID NO: 11973 - DNA, 297 bp, Glycine max
agcttgtgcctcttcacgtctggaatatgaatgtatcatatagatccaaagacccttatgtgctttgctgatggcttcttcccgttccaagcttcaattggagtcttgtcttttacagacttagttggacatctgttgagtatgtaaacagcagtgtagactgcttcagcccaaaatgtgttaggtagtcccttctccttaagcatcgatctagccatcttcataaatgtgctattctttctctcggacactccattttgttgacgagaatatgcaactgtaagttggcgctcaatg

SEQ ID NO: 11974 - DNA, 366 bp, Glycine max
tgtaatctttggatccttgaagatatcttaacactttctttgcaactgactaatgctctattcctgaattactttgatatattccaagcattccaaccacaaatgccatgtcaggtcttgttcacacctgctcatacataatgctttctacaatggaagcatatggaatgtttctcatttgttccctttgaagcttatttttaggacattgattcaaactgaatatatcacctttcacaataggtgtcatgttgggtgaacaatcttcatgcaaaacatctctagaactttgatagtattggccctttgagagaacccgagaataccttgatatcagtttctatggatctctatgccaatgacata

SEQ ID NO: 11975 - DNA, 271 bp, Glycine max
agctttatgcaagtcaattttcaggaggcatctcggagaggatcttttccgggcatatttgcacaaaatctcttgaactaggaagatgttgtccatcatctttctgttcttaatgaaagcagtttgagtttccccaataatagtctcaagcactggggctatgcggttggccagaattttagatacaatcttgtataacaaattacagcaagatatgggtctaaaatggttaacctgggaggcctgatcatgcttaggaataagcgcaata

SEQ ID NO: 11976 - DNA, 269 bp, Glycine max
agctttgttctaattcaaatgacaataatgatttgctcggatgtctgattgagtcccgtaatacatcgagacgctcgaaattgaatgttgaagctctcagcaaattcaaacgacaataactttttactcggatgtctgattgagtcccgtaatacatcgagacgctcgaaattgaattctgaagctctgagctaattcaaacgacaataactttttgctcggatgtctgattgagtctcgtaatctattgagacgctcgaaattgaatt

SEQ ID NO: 11977 - DNA, 256 bp, Glycine max
  unsure (1)..(256): unsure at all n locations
agctngtatcaaaatcgaacgacaataacttttcactcggaagtccgattgagtcccgtaatatatctacacgctcgaaatttaaaaccgaagcttgtagcaaattcgaacgacaataacttttcactcggaagtccgattgagtcccgtcatatatcgagacgctcgaaatttaaaaccgaagctcgtagcaaattcgaacaacattaccttttccctcggaggtccaatggaggcccgtactttatcagaaccc

SEQ ID NO: 11978 - DNA, 260 bp, Glycine max
agcttttatcaaattcaaacaggaataactttttactcggatgtccgattgtgtctcgtagtatatcgagcgctcgttattgaaaacagatgctcatagaaaattcaaacaacaataaatttttattcaaatgttcgattgtgtcccgtaatatatcgagatgctcaaaattgaaaacgaaagctcgtagcaaatgcaaaccagaataacttttaactcggatatccgattaagtcccgtaatatatcgtgacgctcgaa

SEQ ID NO: 11979 - DNA, 258 bp, Glycine max
agcttttgtgaaattcaaatggtctaaacttttcacacggaggtccgattcgggcgcataatttatcgagacactcgaaattgaacaatgcaagctctcgagaaattcaaatggtcataacttttcaatcggaggaccgattcaggcgcataatatatcgagacactcgaaattgaacaacggaagctctcgagaatttcaaatggtcataacttttcactcggaggtccgattcaggcgcataatatatcgagacgc

SEQ ID NO: 11980 - DNA, 242 bp, Glycine max
aatccctgggcttctttgcgaccatatgggcatgaggtccatggccatcaaaaacaccacagaaaacggcggccttggttgaagagaaattatcccagagaagcatggcatcctggctgatccctttgcgaccttgcttacagaacaaggaagcaacctgggacgaacagttcaagaataatctgccaggaactctgtggagccgcatttccatgttataatcagaggcagttctggaactg

SEQ ID NO: 11981 - DNA, 262 bp, Glycine max
agctttgagccaactcaaacgataataactttttactcggatgtctgattgagtcccgtaacatatcgagacgctcgaaattgaatgttgaacctctgagccaattcaaacgacaataacttttttctcggatgtctgattgagtcccgtaacatattgagacgctcgaaattgaatgttgaacctctgagccaattcaaacgacaataactttttactcggatgtctgattgagtcccgtaacatatcgagacgctcgaaa

SEQ ID NO: 11982 - DNA, 262 bp, Glycine max
agcttgatttgaaaatgaaattcaacaataataaaatatcatacattgcagccaaaaaaataaaatcccagatttcataattagggttcatgcataattgggagaaaagaaacctttcttggagaatcataattttcataacttatgctctaataccacatgtaaattttaaggatttcttagattaacaattgtaggaaaccaataggatcttgaaacctatgattctcacaaacaatggataaacaatgcgtatttttct

SEQ ID NO: 11983 - DNA, 260 bp, Glycine max
agctttaacattaattaaaagctcattgttgcaggggcaagcactttcggtaattttgatgcatgtgactgaacttgtcccaatttatatgaaataaaataaatgcattctcaggttttgtttgctgaatgctacaggctttgcaaaacttttttgctgctttagtctattctgcaaatactagttttgattctctgctggagtcactacttgcctgtgctaagccttctccacagtctggtggcattgctaaacaagct

SEQ ID NO: 11984 - DNA, 262 bp, Glycine max
agcttttgctgcaaacatttataaaagaccccctcagcagcaaaaccaacaacagcggaataattatgacctttcaagcaacagatataatctaggttggagaaatcatccaaatctgagatgggcaagtcctccacaacaacaacaacctgaccctcctttccagaaggctggtggtccaagcaagccatatgttcctcctccaatatagcagcagcaacaacaacagtcacaacaaagacaacaagcaactgaggctcct

SEQ ID NO: 11985 - DNA, 260 bp, Glycine max
agctttatcttgttcaggtgcaggtgctgctactggtggaggcacttgaatttggttgccagacctcaaggtgatggcactcacatttttcagattttgcacagtttgtgaaggcaatttgtcagaattttgggactgagcttgattcatctgagtagccatctgtcccatctgatttgtcagactctaaatgaaggctcttgtctcttgctgaaattgcatattctggatggtcatttgcctcactaactcttctaagg

SEQ ID NO: 11986 - DNA, 333 bp, Glycine max
actaggagagtctcttatataacagtaacagattcgttggttgaatctgttgtggttgctagagaggatgacaaggagaaactactgagcatgcttctatatgatgatgatgccatgtctaatgatatagaagtgatcacagtattgggcatgggaggtttaggaaaaacaacccttgttcaatccctttacaatgtaagtgaagtgcagaaacattttgatttgacagcttgggcatgggtgtctgatgatcttgatattctcaatggaacaaagaaaattgttgagtctctcacattgaacgagtgtcatttacttatcttggcgttttcg

SEQ ID NO: 11987 - DNA, 433 bp, Glycine max
  unsure (1)..(433): unsure at all n locations
taagtttctctacacacgnaacaagctaagtttcttgtttattaaatagcataagtaagggaatcccacttatgaaacatttaccttggattagatccttggattttgaagcttcatcaccgttaagggtaaagactcttcctgtggccttcgaacatccagtttggtcattcaggcccacaccattccgctccttcttgggatataggcaatctctctgaatatgccctttctgcttacagttgaaacaagtcatgcctttattagcacaatttgaggagatatgccctggcttaccacatttgtaacatgtgatctgagttgaggaagtagtgggtttgctaccactaacaccacccatagcaacagtcctttgattgttggggcgaataccatattgcttagagggagttgagtacggtttttccctatg

SEQ ID NO: 11988 - DNA, 373 bp, Glycine max
  unsure (1)..(373): unsure at all n locations
tcatcanaatgaaatgaaactacgtgttcattatattttttgaggctcggcaatcttagaaaaatccttgatgaaacacctgtcaaacccgacatgtcctataaagtctttgatgcctctgacattggttggcagatgcaatatttcaatgactgacaccctggcttcatcgacattaatgccatgaacaaagactttgcggcctaatacaatacctttagttactataaagcggcaatctttctaactgagctcaaatatttttgcaacacgctgcttcagtacagagtcaagattacaaattcataaatcacaagaagagccacacacacagacttcatccatgaacactctaatactcttctccacgaga

SEQ ID NO: 11989 - DNA, 381 bp, Glycine max
  unsure (1)..(381): unsure at all n locations
tctggctgttcttatatacatccacacagaaagtgtcagtacttcatgtcatgctctctatttttcctatcaattntcttttgctctttcaatatattttttctaagcaattcagcttcaacaatgtcatgagttagtgtgtgacttcatcaatgtgcatgggacaggtacttgacgggtttcctatatttcacgggcattaatttcgttttgacatttgttgctgctattctctgtgtgtgttttgcacccacaccagcaggacctggaattcctgagatcaaagcttatcttaatggtgctgatactcccaacatgtttggtgccacaacattgattgtcaaggtacattaattatttgattgtatgcaacactgtctc

SEQ ID NO: 11990 - DNA, 398 bp, Glycine max
  unsure (1)..(398): unsure at all n locations
tatgctcctaccataagtgcctcgtggagtcattaatattcttattngcaccgccatcgacccgtacctcatcggaaacccaaacagtaccccatctgcggccgtcaactacggcattgttatctctggtatggcgtcatccttgggcgacgccctcatctgatatatcacctcaatcggcaatgtctccgagaccctatacagaaccccttccacaccttccactctgtccatgtcgatcttcaacctcttcgacatccccccatgccgtctgagagagacgaccacgacgaccacgctgctttacgtgctggcactggcgtgtagggtcacgcggcaggcattgtctggaggcgacatcagaggcaacatgggggttgtggtgacatcagtgggag

SEQ ID NO: 11991 - DNA, 395 bp, Glycine max
cccatggaagctcctaatatctcccacactttttggtgtgggccattcttggatggccttgattctctcagggtccacttggaccccatttctaccaactacaaaacctaagaaaactatattatctacacaaaaggtacacttctctatatttgcataaagggtgttcttcctaaagactgaaagaacttgtctgagatgtcctaagtgaaaatctatgctcctactatacactaaaatatcatcaaaataaacaactacaaatctacctatgaaatcccttaagacatgatgcataagcctcataaaggtgcttggtgcattagtgaacccaaaaagcatcactagccattcatacaaaccaacactggtcttgaagcagtcttcactcatca

SEQ ID NO: 11992 - DNA, 468 bp, Glycine max
  unsure (1)..(468): unsure at all n locations
tcgtatgctcagctacagaatgctcagnctccttatgatcctgatggaattcaagnngctgatcaattgatagtctcagagttcaagaccttgtctgagctaaagcaatgttacttcaaaaaacaatntgatcctttaccagatagagcaattcttgcagctaaattaaaggagctgcaaagtgtcaacaaaacctttgagaatacagggaagaagttagaatcgcaggcagggctcaaggactctgagattatatttctccaagaaaagctagaggaagctaatgtgcacaataagtcaattgagaagagttaaatcaaagtggatcattatcagttcttgataatctccatatgtcaggactaagtcctagccattttgtcaccgctcttcgccacacagttaggtccattcggagctntgtgaaaattgttagtaatgaaatgagatctgcttggtgggatattg

SEQ ID NO: 11993 - DNA, 464 bp, Glycine max
  unsure (1)..(464): unsure at all n locations
tctaatcaactctaattcagtatcagcccggcttactatctcatgttaaatgagagaaactgaccttcagatagcatagaaattgcaattcttcaggaatgaggaaaagcaaagcatttcctttcccaccttcaccacgagctgttctaccaaccctgtggatatattcctggtagcagtataaaaaaaatgtgacatagtacatcaaagtataagacttctaagaagcaaatgaaaagggatattgattgataaatagaagaatgaaaagtacctttggttcatcaggtggatcatactgcacaatccagtcctacagcacaaataaggagacaataaacataaatcttatatatgtaatgaatttcaattaacagaacagaatgctgaataaacacggttcattcaagtgttgtaaaatgtntaccattagtattagtatagaaaaccaaattaaacataga

SEQ ID NO: 11994 - DNA, 355 bp, Glycine max
tgaagctccttctttctgtcttattccctagtggatggtgcctcccctatcctcttctcctttgccttccgctgcatctccatggtgaaaaatcaccattgaaggacctcattgaagctcaaagatccagcctccatagaagctccacaagcaagcttccatcacttttcacacagaggtcagattcgggcacataatatgtccagatgctcggaattgaaccacggaagctctcgagtaatacaaatggtcataacatttcacacaaatgtccgattcgggcgcataatatgtcgagttgctctaaattgaacaacagaagctgtctataaattcaattggtcataaattttca

SEQ ID NO: 11995 - DNA, 394 bp, Glycine max
  unsure (1)..(394): unsure at all n locations
ggtatatggtcttattcaaaacaggaccactcttatttcttctctngcgttggcataatgttcaattactgtcaaggcttttggagcatctataacttgttcaactatattttcagcgacatttcggttgataagctgcaccaaatctctctttttcctctgtattctttcagcacgaaagtattttttggttttcaattgcttggcaactatagtttgtatctctcctttggtgatcttcttccggatctcatccagagaagcccccttctcaagctctgctaacaattgttttcttgcttcctcaaattccatctaattcaattaagcagtgagtgccaaaaagtatggttagagaaaatgaaatatagttntgacaatctatgtcattaat

SEQ ID NO: 11996 - DNA, 411 bp, Glycine max
  unsure (1)..(411): unsure at all n locations
tgtagaatcacttgtatcaacagccatatctntttaatttctattataagcctatctgcttcaaagaaaaaatcgactcatagtcaggggcgtttaacaaaatcttctgggaaagggactcattttttgaaattcaatcttgaaaggtgttcagtacatgtatggngtgagacaggtttggaaaatacaattgttccagaccccaagcgagttaattacggctcacaggggggtagagttatgctaaatgtgtcagcagatggtaccccacgcaatgcaaatataatgtccactatttccgatgaataccagaagctgaagtactctgtctctcttgaaatatttcaatatagtttgtgtgtgaacaaagagaaacagtccacacagatggaacttgaaagagcagatctg

SEQ ID NO: 11997 - DNA, 449 bp, Glycine max
  unsure (1)..(449): unsure at all n locations
acaaatntacgtcgttttcctctcataatattagaggtttgtatttgatttcaatattaaaatattatttttacataaaaagtcatctatattttaaaaggtcatgtaaaaattataataacctatatatatatatatatatgatttattgtaaaagacttttataataaatatcttgttatttaaatcttaatagatttatatcataaggataagatttttaaaaaatctataaatttataagatttaaaaaaatcatatagaattttaacaaacattcaaaattcaaatgataaaattaaatatctgctgtgttctattataaacaacctaaataatgaaatgccatttttaatctgttcatatctaattgtcagcttcatcatcatattcagtctatcctctgcctaacatttactaaatctttccgactgtactccaacattatg

SEQ ID NO: 11998 - DNA, 398 bp, Glycine max
  unsure (1)..(398): unsure at all n locations
aaacataagcacttagacaatgtttgttagcnggagnngctgcacatgatgtccaacgttatgtcaaagaataagatcgggctgcacaatgcacaaggctagatgaaatgtcaaatgaagaattgaagctgcatgattcacgatgtctgatacaatgtccaggacatcctgctcgaaaatactggaattgctaaaagcattgaagctgcaggatccacgatgtcggatacaatgtccaggacattctgcccgacaatactggagttgctgtacaatgcaagataaaagtcaagttgtgaagctgcaggatccacgatgtcngatacgatgtcctgacttccggcccgataatactggacatataattctgtttatttttacagattattggcagttgc

SEQ ID NO: 11999 - DNA, 270 bp, Glycine max
ctatacgagacatcttgccgaacgaagtcaagctatccataacttgcctgtgctccttcttgcatgccatatgtaacggagacgatgatcctgtcatgatcgacgacttggaaaatgatgtcgtaactatactgtgccagttggagatgtattttacccctgctttctttgacatcatgattcacttgattgcgcatttggtgagagacatcacatgttgaggtcttgatcatttgcggaggatgtacccgggtgagcgaaacatgaaga

SEQ ID NO: 12000 - DNA, 336 bp, Glycine max
  unsure (1)..(336): unsure at all n locations
tactaagcttaagagatcatccnctcgataacatcattggtgatattcatttgngtaacaactagacattctctgaaagacttatgcaataatatggattttgtatctatgattgaacctaaaaatatgaaagaagccattatagatgataactggatcattgccatgcgagaagaattgaacccatttgaaggaaacaatgtgtggaaattagtagacaaacctgataattatactgtcataggaacaaaatgggttcttagaaataaattagatgaacatggtgtaattattagaaataaagccaggttagtagcacgagggtataatcgagaa

SEQ ID NO: 12001 - DNA, 412 bp, Glycine max
tcttagtctcacctgatgaaatgaatacgtggttcatcatgcactcctctaatgacaatagcatcacttctggcactaaattgctaagagttggaagccatcttctcaattaaatttctggcttcagcaaaggtcatgtctccaagggctccaccactggcaacatctatcatacttctctccatgttactgagtccttcataaaaatattggagaagaagttgctctaaaatctggtggtgagggcaactggcacataatattttaaatctctcctagtattcatataagttctctccactgagttgcctgatgcctgaaatgtcttttctgatggaagtggtcctagatgcatggaagaatttctccaacaacactctcttaatgtcatcccagctggagatggatctga

SEQ ID NO: 12002 - DNA, 461 bp, Glycine max
  unsure (1)..(461): unsure at all n locations
atcttcttcttcactacatcaagaatcaccgggttgagtcttctctggggctgtcttactggtttagctccatcctctaaatttattcgatgcatacatgtggatgggctaataccaggaatgtccgccagggtccagcctatagccttcttatgcttcttgagaactggcaacaacttctcctcttgctcatcagcaagggaggcagatataatcactggaaaactcttgctatcatccaagtaagccgtatttaaattngatggcagaggcttcaattttggtgtggttggttggacagtggtagaaggagatggtttctcagcctttacctcataaagaaagtcagaggtatgtgtacttccctgaacatggttagtcctatctgactctatnaaatcaatcttgagaggtaanacaccaccaccagacattgcatcaatatcactctcagatcactc

SEQ ID NO: 12003 - DNA, 327 bp, Glycine max
cacatgaactaacatcactactttcatatttggctatctctttcttacacttgaacatcattggattccaatcgtttcatgactcaagaagttttgactactcccaagtgtcatttttcttgatgatattaatttcctcctccatggcttgtctccaccttttgtgtttcatagcttcttcaaaggtgaaaaactccttgtctacaaaaagacaaaacacctcattcatgacttcagtttcatcatgtatgtcttgaacgcttcttcattattcttagtctttcacttgaactcccttcggaagacgaacttcctgaattgaatgac

SEQ ID NO: 12004 - DNA, 355 bp, Glycine max
  unsure (1)..(355): unsure at all n locations
aaagtgaaattgaagctttctatgatgcttcaatggatcaaactcctcaaaacgtgtgataaaaccagcaacaacacctatgatatcctcttgagttccatgtttgacaagagcttcattccacaggtccctccaccttgtagaaagaaggctggtttctagcgatgattcatttggtagaaatgaaactatgcgacctagaatttcgtctggtaaattactaaacagatcctttcccatatggaatgaatctgttgnttcagtatggtcttgtttggactaagaatacaatgacatctatatatttgtaactntataattcatgtgaactatgcangtcacaacaaggagatat

SEQ ID NO: 12005 - DNA, 206 bp, Glycine max
gatcgatcatgatgagcagcgtttgaagcaagacttatagcagatttattatcacaaaatagcatcacagagggcacatcaacttcaaagtgaataagtaacttgtttaaccacacaatttcactagtaacagaagacaaggcataatattcaacttcagtgcatgattttgaaacagggggttgtttcttataacgccaagaaag

SEQ ID NO: 12006 - DNA, 465 bp, Glycine max
tgtaagaaagcatgaagatgagagcattgtggtggtgatttccctttatgacagcattcagttctgaggttgcaccatgatgttttccttgcacctagatgtttgaatatgcctcataaaatgtatgtatgttgcatataagtaacaaaatgcctcgtgaaatgtatgtatgttgcatgtaagtaacaaatgtctcataaaatgtatctatgttgcatatatgtaaaaaaatgcctcataaaatgtatgtatgttgcatataggtaacatatgcctcataaaataccttgttaatttaggtagcaaaataccttatctatttatgtagcatacataccttatcaaattacgtagcaaaatacttgaatacacattgaaatgtagatttttacgtagcaaaaatactcgaatatgcatgaaatataatttgggtagcaaaaatacttgaatgtgcataaaatatat

SEQ ID NO: 12007 - DNA, 450 bp, Glycine max
  unsure (1)..(450): unsure at all n locations
agcttcaacattcaatatcgagcgtntcgatatatttctgtactgaatcagacatccgagtaaaaagttactgtagtttgaagttgctcacagctaaggcattcaagtccgagcgtctcgatatactgcgagactcaatcagacatccgagtaaaaagttattgtcgtttgaatntgctcagagcttcaacattcaatttcaagcgttccgatattttacaggactcaatcggatagccgagcaaaaagttattgtcatttgaatttgctcagagcttcggtattcaatttcgagcgtctcgatatattacgggactcaatcagacatccgagtcaaaagttattgtcgtttgaatatgaacagaacttcggtattccattttgagcaactcgatatattacaggactcaatcagacatccgagtaacaagttattggtcgttgatttgc

SEQ ID NO: 12008 - DNA, 406 bp, Glycine max
  unsure (1)..(406): unsure at all n locations
cttctggcttcaattcatcagtgggctntccttctgtgtccagcatcttgggatgttcccagcctttgatgacagctttccaggttctgctatccagtgatttgagaaaggccaccatccttgctttccagtattcatagttggtcccatccagaattggtggtctgttcactggtccgccttctttctccatgttcatcagaatntatctccctagatctcactcagtgatttcgagtgcctgctctgataccaattgaaattctgatactggggacagatgtcgtacaggatgtcacgacatcacgcttcagaacatgcagattgtctttgactgtatgaacagattaaacaagtaaataacacaagagaattgttaacccagttcggtgcaacctcacctaca

SEQ ID NO: 12009 - DNA, 460 bp, Glycine max
  unsure (1)..(460): unsure at all n locations
agctntntcgcgcactaatactgagctgtatgtttgtgttaaggtatgtggactccaaaattgatatggtagataatgaagctctaaccaagtcttttgtattagaagaatttaaatatgcccttttccaaatgcacttggataaggcgtccggacctgacagattgagcccgaccctttataaacggttttggaatgtttgtggatttgagattttctaggcttgtgtctcctggctgcatgaagggactatgcctcctcacttgaatgatactaatattgtcttaattccgaagaaggagaatccagcatctatgaaggacctttgtcctatatctttgtgcaacgtggtgtacaagatcatgctaatagtgttagccaatacgttgaagcccgtgttggataatgtatctccgcagagcaatctgtgtttgtggagaacagatctattattgataat

SEQ ID NO: 12010 - DNA, 484 bp, Glycine max
  unsure (1)..(484): unsure at all n locations
agcttgtacatggcaacatcaaatccttttcttctttctcaacaccaaacagtatggctgcgtgtctgaccttggcctggcaaccatatcaagctcacttgccttaccaatatcacgagcagccggttaccgtgcaccagaagttacagacaccagaaaggcagcacagccctcagatgtttacagctttggtgtggtgttgctagagcttctgactgggaaatcccctatccacacaactgctggcgatgagattatccaccttgtgaggtgggttcattcagttgtgcgcgaggagtggacagctgaagtgtttgacttatagctgatgagatatcctaacatagaagaagagatggtggaaatgttacagatagccatgtcatgtgtggttaggatgcccgatcagaggcctaagatgtctgaagtagtgaagatgatagataatgtganggcagatgatgcagatactcactcatcatct

SEQ ID NO: 12011 - DNA, 445 bp, Glycine max
  unsure (1)..(445): unsure at all n locations
agcttaaccaaagtctatactgttttgtttgttatagctctngactactatccttgccttattcctagtgatcaaaccatgttcattcaatttatttttaaacactcatttagtgtaaatgatgttcatgtttttaaaataaggtattaattcccatatatcatttcttttaaattggntcaactcctcatgcatggacatcatccaaaacttacatttgagtgcctctcctatagacaatggttctacttgtgacacaaatgcagtatgctcacaaaataagttcaaagagtgtctagtagttactcctttttctatgtcttgcatgatgtttgctatagaaatatccattggtgctctccattccttaagaagataatcgtgctgtgatgagagccattcttgatgtttatttctcacaaactcttcactcttcgatgaactt

SEQ ID NO: 12012 - DNA, 477 bp, Glycine max
  unsure (1)..(477): unsure at all n locations
agcttggttcccaatgctntgttcaagctctttcaatacctataggtaaatctaggatctctatcagatactatgctagatggcacaccatgtaacctgacaacctcacttatatacaaggtggtcaacttctccaaggaaaatctgatattaatgggaatgaagtgagcagacttagtcaatctgtcaacaataacccagatagaatctaaacctctaggggttctaggtagccctaccacaaaatccatggaaatactttcccacttccactgnggtatctctaagggttgtaacttccctgaagatctctaatgttctatcttagccttctgacagactangcttgcatacacaaactcactaacccctctctttcatgtgggccaccaaaacatcgtctttaaatcctgataccatcttggagcaccaagatggatgctcaaattactccaatgtccttcctctaagatcatc

SEQ ID NO: 12013 - DNA, 314 bp, Glycine max
  unsure (1)..(314): unsure at all n locations
ctcacaagctgctcanagaagttcataagttgtaaaagctatttggatgcaagtcaaagacttgcttttatagactcttcatgtctagtcaagagaaccattggaagagttattatcttgagaaaatcttgagaaagccattggaagagttacatctcttgatcttgtattcataacttgccgcttggtatcgattaccataaccatgtaatcaattacacaatgcattgtatgacaagatgtgactcttcacaattgaatttgaatttctacgttcagatacactggtaatcgattaccaatatattgtaatc

SEQ ID NO: 12014 - DNA, 450 bp, Glycine max
ttcagcttcacccacctattgagcacaattaatcatggagaatcttctgaagtcataaccaattaaccattacttaaacatattaacataagaaataaatgagttaaacaaggatactgctagaatatatgaaaaattatccaaaaatatcttgattttaattttaaaataattcagaatatctaggattaggactacctgtttgggattaacttccatattttctaatgtttcatgatttgtaatcatacctagcagtagtttaaataaggattttgtaacacatataacacatcatatcaaatcaattaaaaagtcaaatttccatgtataaattttcttttatttccctttcctccctctatacttaaaaccttataattccgactgatacacagatagagacatacccattttgatgtcaaggaagctgctgtgacattaaaaaat

SEQ ID NO: 12015 - DNA, 458 bp, Glycine max
  unsure (1)..(458): unsure at all n locations
tggagtttccaagcgccaattcgtcttcttctntagtccagtcttcttctggcttcaattcatcagtgggctttccttctgtgtccagcatcttgggatgttcccagcctttgatgacagctttccaggttctgctatccagtgatttgaggaaggccaccattcttgctttccagtattcatagttggttccatcaagaaatggtggtctgttcactggtcctccttctttctccatgttcatcagaatttatctccctagatctcactctgtgatttcgagtgtttgctctgataccaattgaaattctgataccacgggacagatgtcgtaccggatgtcacgacatcacgcttcagaacatgcagattagatgcgtccgtntgaacagattanacaagtaaataacacaagaagattgttaacccagttcggtgcaacctcacctacatctggg

SEQ ID NO: 12016 - DNA, 387 bp, Glycine max
  unsure (1)..(387): unsure at all n locations
agcttctagtgggacatcttgacttgctctccaatctgacattcaccacagattctgccttcttctattttcagaatgngaatgcctctaacagcacctttgacaatgattntcttcatgcctcttaagtgcagatgtccaaatctttgatgccatattctgacttcatcttctttggaggatagacatgtggaggagtagctggtttcttggggtgtccataggtaacaattgtcctttgatctgctgcccttcattacaacttcactcttctcatttgtcaccaagcattctgactttgtgaagtttacattgaatccttcatcacacagctgactgatgctgatctaagttgcagtcagtcccttcaccagccagactttgttc

SEQ ID NO: 12017 - DNA, 411 bp, Glycine max
ccgctactcccatacatataaaaacaactcttgaatctggcttctcatccagccatagtaatatcctatcatgatgggcttgatccacattttggttatgttgacccttcaaaataatcaatggaccaacagcatacattgggggtgtgtgaatttgaccatcacatattgcattaatagcatactgctctcactctgaaaaagagatatcaaagatccctttggagtccttgtacctctgagcaatgttataattagtagcatatccaccttgtttgtttaaaacagcatcaggcacaacactataatgaactggatcagggagacccggttccaaccactgatgatcagaatcatcgaatgcatcaccaactctacgtctctgaagggataacatgatattcaaaaacc

SEQ ID NO: 12018 - DNA, 452 bp, Glycine max
  unsure (1)..(452): unsure at all n locations
tacggacctatgaatactaagcttgtagggagccacagagaatggtgaatcctaccattcttgatatggtgaagaaagaggtgatgaagctactagctgtagggatcatttagcctatgttagataaaacttgggtttcacctatccaagtggtccctaagaagtcaggcatcattgttgtggagacttaggataatgagttgatcccggctagaatgaccaatagttggcaagtttgtattaattataggagactgaaccaagcaactcgcaaggatcactttcctctctcattcgtggatcgggttttggagaggttggtaggtaaatcacactatngatttcttgatggttttataggttacatgcagattcatattgcattggaggactagcataagaccacattcacttgtccattcgacacatttgcctacaccaagatgcttatg

SEQ ID NO: 12019 - DNA, 499 bp, Glycine max
  unsure (1)..(499): unsure at all n locations
ttaagcacctgagctgcagctgccttgcccttgatatattgagggacttatggtcactatgaatgacaaattccttgggataaaggtagtgttgccatgttttcaaagcccgtactaaggcatacaactccttatcataagttgaatagttaagggtaggaccacttaacttttcactaaaataagcaattggatggccttcttgcatcaacacagccccaatcccaacatttgaagcatcacactcaatttcaaaagatttttgaaagtttggcaacgcaagtatggggacattagttagcttttgcttaagaacattgaaagcttcttcttgtttctctccccatttgaaaccaacatttntcttgagcacttcattgagaggtgctgccaatgtgctaaaatccttcacaaatcgtctataanaacttgctaagccatgaaaactcctcacctcggtcacagacttangtgtatgccattcttgaatagccctaac

SEQ ID NO: 12020 - DNA, 268 bp, Glycine max
  unsure (1)..(268): unsure at all n locations
attcacgcgcataatatatccagacgctcgaaattgaacaacgaatgctctcgataaaataaagtggtcataatttgacacacggaagtccgattcaggcgcatactatatcgacgactctctanattgaacaacgaaagctcttgagaaattcaaacgtgccaaaccttgtcacacggtagtccgattcacgcgcatattatttcgagactctccatatgatatacggaagctctcgagaaattcaaatggtcatatacttatcaca

SEQ ID NO: 12021 - DNA, 442 bp, Glycine max
  unsure (1)..(442): unsure at all n locations
tattatannactaattaaaagactagaagccaacttatctggtatgtcaaaaactataaaanaaatgtactgacaattgaaataatatatacttggtgtacttaacatccaatttgtaataatttgttttaatgatctagcaatacatacttggattacaacaaaaaaaaatgtacacaaacaatcaaaatcaaactaatctaaatatgtaatcagtcgtcctgaataaagcagacctgttatttttgtttaatggttttggtatataggtatctgggagacacagatgaagctgttaaatcactgatcaaggccgtggatatactacggattactcatggcacagatacacctttcatgaaggacctcttgatgaagttggaagaagcccgtgccgaagcgtcttacagattgtcnctaaagagtatagaatgtcgaaata

SEQ ID NO: 12022 - DNA, 412 bp, Glycine max
  unsure (1)..(412): unsure at all n locations
agcttgtgtggtagcaaaaatacctaggttttttctcttagattcgagtgaagtctgacgatattccgaagactacttttaggacccgttatggtcactacgagtatctagtcatgccctttggtgtgactaatgctccaggtgtgtttatggactacatgaataaagtctttcacccttactttgatagttgtgtggtagtattcatagatgaatatttggtatattcaaagactagagaggaacatgaagagcacttgaggattatgctgcttacccttangaatcgacaacttttatgctagttgtccaagtgtgagttttggttagagaaagttagtttcctagggcatgtgatatctcaagggggtatagtngtagacccctctaagatagaaagtgttcttgagtg

SEQ ID NO: 12023 - DNA, 403 bp, Glycine max
actagatgccttggttaacctggtaatccaactggtcatgaatcaaaaatctacacctgtcgccagactccgtgggttatgctcctctgctgaccacctcataaacctttgcccttctgtgcagcaattgaacagcctgaatcttatgctgcaaataactacaatagacctcctcaacctcagcagcaaaatcagccacaacagaacaattatgacttctccagcaacatgtacaatccctggtggaggaatcatcccaaccttagatggtcgaatccttcacaacaacaacaacaacaacaacaaccttattttcagaatgttgctggcccaagcaaaccatatgttcctccaccaatccagcagcaacaacaacaacaacaacaacagccccagaaatagc

SEQ ID NO: 12024 - DNA, 386 bp, Glycine max
  unsure (1)..(386): unsure at all n locations
ggcagcaagcttgttaatccatcttctccaagagctccttgataaagaactntatgtgaatcctgagatttaacacatcaataggaaggatgaaactcaaagaaacagttattatcgcgagtgaatttactaacactaagtaaattcttggtaagggagggaactagcagtaaatttttaagggagagagtagtgtttggaaaatagggggacctaaacagatttgagcctatggaagagattcttgtacctgtgccattagccattatgatatgttcatttcctgcagcttgactgctctgaaggagaatatgtggatcattggttgcatggtgtgaagcacctgaatctggaaaccaagcctgtgaaatgttagcagtatgtgg

SEQ ID NO: 12025 - DNA, 415 bp, Glycine max
  unsure (1)..(415): unsure at all n locations
agcttcatgcttaagtatgcatggcaattcttcattattgttgntcaagacatacaagagagcttgtaacaaatcttctagacttggagtcatcacatgcaatcctcttgaacccttaccacccaccctgtcatcatgccgagactaacgaaggccatctagtatatccttcttaatgtattctgaacaaaattcaatggcttcttttgcaaagtacctctcaacaatagatgcttcacgacgatatacattatttgtataccctgttaagatctttatgtatcgctcaaccgggtacatccatctgagataaacaggaccacaccatttgatttctctgaccaaatgctcaatcaagtgaatcactgatgccagagaaagcagggtgaatatacatctccaactggcacaatat

SEQ ID NO: 12026 - DNA, 385 bp, Glycine max
  unsure (1)..(385): unsure at all n locations
ccgagcatgctcgacgtatgatatgcccgacatctgacatccgagcgataggttacgaccatttgaatctgtcgagagctttcgatgatcagctaccagcgtcccgacatattatgcgcccgagtcggacatccgtgtgaatacttatgaccctttgaatgtctggagaacatccgatgttcagtttctaacgtctctatatgtgatgcgcccgaatcagacatccgtgtgataagttctgaccatatgaatgtctcgagagcttccgatggttaattacgagcgtctatatatattataagcgtgaatccgacctgagtgtgaaaagttatgaccatttgagtntctcgagagctttcgtcgttcatttctagcgtctctatat

SEQ ID NO: 12027 - DNA, 213 bp, Glycine max
agcttatatatatcgaggcgctcgtaactgacttctgaagctctcgagaaatacaaatggtcgtgatcttctactaggatgtccgattgaggctcattacatatacagacgcgtcgatatgaacaacggactctcttgagataatcaaatggacatatacttacgcgctgacgtccgatacatgcgcatcacattgtcacaccctctgaattg

SEQ ID NO: 12028 - DNA, 352 bp, Glycine max
  unsure (1)..(352): unsure at all n locations
atcgtaaccgagcctctanttttcatcaacattaattagcaagcagtgagccttttaatactctctgtgttgcataataatcattatttaatattttaacataaattagaaaataataattcttttaatgtaatattaaatcattttttacttatatttcttatatattaaagataaataccaaaaactaaaaatgaattaatatgataataatgttaattttataaaattcgttattttctatttcttaatggatnttttttatctggacaaaataactaatacacgtgaagacaaagtgagttcatactgaatatgcttatgcaaaaagtgtttacactataacctacat

SEQ ID NO: 12029 - DNA, 463 bp, Glycine max
  unsure (1)..(463): unsure at all n locations
agcnttgtgatttcttcaagattatcttcactatattgcatnntgctgcttcaatttggcctgcagatttcacaaataatacatttactatgcttatttggtaggtttaaattttcatttttttaagggaggtataattttttattaaaagtcattgtatttttttagaattntattttatgtgaggtcaacttaagttttttattttacacaaatgtaatttattttattgccatattatccaattcattaatttgatttagcaacacactgaatttctataagtgttaatatttagcaacatattctctagcacatcttttatatcacacattntattatagattaaaatttattaaanactacaaaattaaaagaaaaataactcattaaataagaagtgagactaannaaaaatgtgattttaataaatttaatcatcttaaatatatattaaatgagt

SEQ ID NO: 12030 - DNA, 471 bp, Glycine max
  unsure (1)..(471): unsure at all n locations
agctntagctctnntcttattggataatgctttttgaggaagtctctnttcaagtggatcaaatcatttttaatgatgtatgtgtttcctcttctttagcttaataatgtccagtattttgactctaaataaaagatagagctaattattattatttattgttagaggaaattaaatcatttttattgttagagcttaataatgtccagtattagtttttgttatcctcctatatatgacaacttttgatctgactgttgttaaattaaaagattagattaaattacaatattatatacgtgctatatttattgaatcaaccacttgatacatgaaacatagttcttatgtcaggaatcaagatctagaaaaaagaaaacaaatgtacctaanaatatntctcattaactntnntttaataaatatngtattccttaaccacaaatcaataactactccatcatagattct

SEQ ID NO: 12031 - DNA, 413 bp, Glycine max
  unsure (1)..(413): unsure at all n locations
cgcacgtgattcactctattcttagtctgaatatttgtaagtttctgttcgaatatgggtttacatgtcttcactctgcagtacgaatgatgtgagaaatttgtaggacattttacttcaatcatttttcctttgactatcttctgaatgcagatcgcacggaatgggttttgagagaggttggggtgatactgctgaacgggtattggaaatgatgcatctgctattggatattcttcaggctcctgatccttctacactagagacttttcttgggagagtaccaatgcgtttcaatgatgctatattatctcctcatggctactttggacaagccaatgtcttgngttcgcctgacactggtgggcaagtatctcctttgtcatataccgataagactatttgagctggat

SEQ ID NO: 12032 - DNA, 276 bp, Glycine max
  unsure (1)..(276): unsure at all n locations
agcttctcgatatattatgcgcctgaatcatactctcgtttaaaagttatgaccatatgaatttctccactgtattccgngtgacaagntatgaccatttgaatttctcgatagcattcgttgtcaatttcgagcgtctcgatatattatgtgccagaatccgacttccgtgtgacaagatatgaccattngaatttgttgagagcatcctgtgctagaattcgagtatctcgatatattatgcgcctgaatcggacatccgtgtgacaagttatg

SEQ ID NO: 12033 - DNA, 375 bp, Glycine max
  unsure (1)..(375): unsure at all n locations
agcttgcttctacactntcatgtntcactactctgtaaatatatccatgatccttctcacgtggtcaaattagacgacgttcaagtaaaggagaacttgacatatgaaacattgcctttgaggatcaaggatagatggaaaaaaacttaagagggaaaaagatttcgttgatcaaggtggtctggggaggtgcagcangagacgaagcaacatgggaactaaagagtcaaatgcgagaaaccaatccagccttgtttgagtcaagtaaattttggggatgaaatttgtaaaagggtgggagagttgtaacgccctgaaatttcgataactgaaaatagatgcctgatgtatntattgtattagttaattacttaa

SEQ ID NO: 12034 - DNA, 466 bp, Glycine max
  unsure (1)..(466): unsure at all n locations
agcttgtaggccttggatcttcttcatcaatgatatcatctgcttcttgaagatcatggaagtggaatggagaaggaagaaagatgattggagacgccacttcaaggagaagataagtgtagaagctcaccaccataggaagccatagataagagcttgaaggttgcagaagatgaattgatggagagggagacaaggagcatgaaattttgtgcctcacaagaggtttgaactttgagggttaattctcaaatgatcaaagttgaaaaaatgcacacacatgacctctatttatagcgtaagtgtcaaacaaaattagaggggaatttgaatttctattcaaatttcacttgaatntgaaatttgaattgtggagccaaaatttcactaattatgattagtgaattntagctatggttcaacccactaatccaagatcaagtccaagattctccactaagtgtgc

SEQ ID NO: 12035 - DNA, 355 bp, Glycine max
  unsure (1)..(355): unsure at all n locations
agcttctgttttcaattacgagcgtctcgatattcttcggngctctatccgacatccgagttaaaagttattgtcgtttgatttttctaagagcttcccttttcaattacgagcgtctcgatatattacgggacacaatcggacacccgtgttaaaagttatggtcgttggaatttgctcagagcttctattttcaattacgagcgtctcgatatattacggtactcaatcggacatccgagtaaaaaggttttgtccgttgaattctctcagagcttctgttttcaatcacgagcgttctgatatattacgggactcaatcggacatccgagtaaaagtttggtcgttgaattt

SEQ ID NO: 12036 - DNA, 343 bp, Glycine max
  unsure (1)..(343): unsure at all n locations
tcacttaaaaacccnncctagtagtctttgttagatgagtatattagctgggcaacttcacttaaaaaatctaatatagtataatagcctatatcacatctttgtgaatcgtctattctggtacgcatcacctcttctgtcaggcatttgtggagaggggctgatgaaaagtcccacatcaccaatggtctcaatttttggggtgcaacttatatatttgttgggcaacatttcacttaatgccaattggttttaggatgaaatctagcagnagatatgtttatagtgattcattgagtaatcatgccaaattgcattttattatatctcatgttttcttcac

SEQ ID NO: 12037 - DNA, 347 bp, Glycine max
tccattttcaattaccacgtctcgatatattacgggacccaattggacatgcgagcacaaagttattgtcgtttgacttttctcagagcttttattctgaatttcgagcgtctcgatatactacgggacacaatcggacatccgagtaaaaagttattgtcgtttgattttgctcagagcttctgttctgaatttccagggtgtcgatataccacttgccaccatcggacatccgagtaaaaagttattgtcgtttgaatttgctcagagcttttgttttcacatttgagcgtctcgatatataacgagactcaatcggacatccgagtaaaaagttattatcgttt

SEQ ID NO: 12038 - DNA, 378 bp, Glycine max
agcttgccctagttaagattattaattttattcattaaatgacagtacatttgtttcatgttttgctgttttacaaaaagagctaaaactactctgttgcacttcgtctacatatacctcaacattactatgcttaataaaatttggtgatcttagtaaaacataaagcactttctcaaatattaagatcaaataacattcagcgtatccaagagatgcagccaaaataaataatgagaacattaaaaaactgaattacctcacttaaaatgagaacccctttcttggatgcttgacacgcaacaaattcatagctgacaagattcattccatcccttaaagatgtaacaagtgctacatctaaattcgatgtgagtc

SEQ ID NO: 12039 - DNA, 312 bp, Glycine max
ctttccattgctaaatacaaagcatttgtaaccaaaaacatgaacgtgtgaaattttgggtgttctaccattaaacagctcatatggagttttctttaaaatgggtcttattaaagcccttttcatgatatagcatgcagtgttaacagcttcagcccaaaagtattttggaagaagagtgtcatttaataaggctctagcaattttttccttacaacaactccattttgatgaggggttctaggcgcagaaaagttatgttcaatgccatgcttatcacagaataattcagaatctctattttcaaattca

SEQ ID NO: 12040 - DNA, 343 bp, Glycine max
  unsure (1)..(343): unsure at all n locations
ttctatgacatgcnnnntttataggcgattcataaaagacatttcaaaaattgccaaaccacttagcaatttactaaacaaggatgttgtgttagcatttgatgaagactgtttggaagcttttaatattctcaagaccaggctagtatctgcccctgtgattatagcactagattgggggcaagagttcgaattgatatgtgatgttagtgactatgttgtaggtgccgtacttgggcagagaaagggcagagttttccatgccatctattatgccagcaaagtcttgaatgatgcacaaatcaattatgctaccaccgagaaagaaatgttaggaattgtc

SEQ ID NO: 12041 - DNA, 330 bp, Glycine max
acattccatcaactatcctgttgatgttggcaagagggtatgcggctttggggcatgccctattcagatcagtgtagtcagtgcacattcgtcatttgccattcatctttttgaccatgacaacattgacgagccaggtagaaaacctgacatctatgataaagtgtgcatgaaggagcttttcgacttcttctttgaaggctttacgtcgttcttctcccatcttctttttcttctgtgatataagtttggcttgggggaagatagcaagtttgtggtagattatgccgaggtggattcccgacatgtcaaatggctgccaagcaaata

SEQ ID NO: 12042 - DNA, 339 bp, Glycine max
cttctatagaaagggagtactaatttctctttattgcctcatctctcaatgagctagtgaagaagaatgtggcatttacttggggtgaaagataagagcaagcctttgctttgctcaaagaaaagcccaccaaggaacttgttctagctcttcccgacttttctaaaacttttgaaatgtgatgcctctggagtgggagttgcagttgtattgttacaaggtgggcacgctattgcttattttagtgcaaaacttcatggtgccaccctcaactaccccacctatgataaaaagctttatgtcttaataagatacctcaaaacttgggatcattacctt

SEQ ID NO: 12043 - DNA, 345 bp, Glycine max
taatactgatggtacgcttttggttatttctgggacaagcaagatttggcggaatcataagggatggtcttgggaattggcacacaagttttatgggatcctgtggctttacaacttcagttcatgcagagttactcgccatctatcatggtttgaagatagctagagacaaaggaattgaaagattgatctgcaaatcatattcgaagcttgattaggacctaatcactggagaaatcaacttgtttcatcaatatttccctaccatcatgctgatccatttgttgaagcacatggattgggaggtgacctttgagcacgtgtaccgtgaagggaacaagtgtg

SEQ ID NO: 12044 - DNA, 395 bp, Glycine max
agctgactagtgaaggaagttctatatatttttcggcgccaagatggtcatatctgtttcctgtgagacaaagttatgagctgacagatagcgctcaacttccgatgcggtagcataatgggaaattcccgcctggcctggttgcatgcctagctcagcgtaatggctaccatctcaagggtagttcacgaaagggattaccttgtgcctatgcagtacatgcgagcaaggacgcgctagcgacggtgtagggatcattggatatagctactatcagcatagcatactgtaagaaggattattttatatcgcaccatatgataattttttacagcagagtatagcatctatccgggcctattttaaattgtggaaggtgtattgtgatataactc

SEQ ID NO: 12045 - DNA, 329 bp, Glycine max
cacaatgagtactttggaatatggatatatttggtgtcaccaactcttggagctgtggctggtacttgagcctataatttcattaggtacacgaataagccagcgcatgaaatcaccaagagtgcctctttcctcaaaggtggtgaagctgagtgattcaacagcaaatgcaagaatgtggttttttcttcttcattttcttatcttcaatttcaccatgcattagggttaaaatttaagaaagaattactggtttagtgtgctgaataaccctataatatagatagaggaaatgaaaaatacagtttctcctaatccatgcaacaatc

SEQ ID NO: 12046 - DNA, 342 bp, Glycine max
  unsure (1)..(342): unsure at all n locations
tctatagaangnnagtcctaatttctcttctattgcatcacctctcaatgagctggtgaagaagaatgtggcatttacctggggtgaaaaacaagagcaagcctttgctttgctcaaagaaaagcttactaaggcacctgttctagctcttcctgacttttctaaaacttttgagctagaatgtgatgcctctggagtgggagttggagctgtattgttacaaggtgggcaccctattgcttattttagtgaaaaacttcatagtgccaccctcaactaccccacctatgataaagagctttatgccttaataagagccctccaaacttgggaacattacct

SEQ ID NO: 12047 - DNA, 301 bp, Glycine max
gagacgctctaaattgatctttggaagctctcgagaaattccaatggtcataagttttgacgcggaggtcagattcaggcgcatagtatatcgagatgttcgaaattgaacaatggaagctctcgagaaattcaaatggtcataacttttcactcggaggtccgattcaattgcataatatatcgaaactctcgaaattgaacaacggaagctctcgagaaattcaaatggtcataacttttaactcggatgtcagattcaggcgcataatatatcgagatgctcgaaattgaacaacgga

SEQ ID NO: 12048 - DNA, 370 bp, Glycine max
agctttccctcttttatcatatacccctcagccaaatagaatccatcttgggcctttttcccacaactctcataaatgggagagaaatgttcatctaaagcatacaagtccctaatattatcaaatcctaaaattcgagctcctagggagcaaaacaatgtgtgtctcctagagagggcatcagctaccacatttgtttttccctttttgtatttgataacatatggaaattgctctaggtactctacccattttgcatgcctcttgtttaacttgctttgccctctaatgtacttaagtgatcgatgatcactatgaatgacaaattccttggaaacaaagtaatgttcccaagtttggagggctctta

SEQ ID NO: 12049 - DNA, 359 bp, Glycine max
agctttacacttatgggggttatgtttcttcggctattggaagttgcattttcacctttgccagagcatttcttgctgtgatagctggatacaagacagccactgttctcctcaataaaatgcatttgtgcatttttcaagcaccgatatcattatttgatgccaccccaagtggtcgaatcctttatagagcatgtcataatattgcataatccttcattggactaatttgaagagagaactcctttacctgatatatggcttagcgcattgttttttagaagacgacttctctctttttatttcctcatgaccataatgaatgtaattggtggctaaaacctagatttactttatct

SEQ ID NO: 12050 - DNA, 378 bp, Glycine max
agcttgtaatcgattacaacttgtgtgttattgattaccagacatgaaaattcaaatttcaaatctgaagagtcacaattctttagaaactaactgtgtaatcgattacaacaattatgtgatcgattactagtaaggaattttcaaaaataactcccaatagtcacaactattcaaaaagtttttgaatggttatcaaaggcctataaataggtgacttgggacatgaaattttttaagagagtttttctgaacaaattgtcttatcctctcaatacaaaattgtcttataactctcaaaatattccttggccaaaatacttgcaaattcaacaaggaatcttgattgatcttcaattgtaatatccttctcttaag

SEQ ID NO: 12051 - DNA, 306 bp, Glycine max
ttaggctccaagaggattgggctagagctactgaagaaggccctagggttctcatgaacctgagggtagatttctgagcccatgggccaatgttgggtccaattatgtttgtacatattagactaggatgtcattatatttggtctttgtatttaacactccataatgtaagtagggtaccttaaaaatataggatttttcaactctggtattttagggcacctagactaggtattgtataaggggtagattagaatttcacatgcactaagtgaatatttgatgtgagtgctgggaaataaaaat

SEQ ID NO: 12052 - DNA, 374 bp, Glycine max
  unsure (1)..(374): unsure at all n locations
agcttcaagaaaaagatggtctcagcaaattccttatttccagaagggaattctatcaatagacctccaatctttaatggagagggttaccactactggaaaacccgaatgcaaatttttattgaggcaatagatctaaatatctgggaagccatagaaatagggccttatatacccaccacagtagaaagagtttcaatagatggtagttcatcaagtgaaagcataactatagaaaaacctatagatagatggtctgaagaggatagaaaacgagtacaatacaacttaaaagccaaaaacataataacatctgccctgngaatggatgaatatttcagggtttcaaattgtaagagtgctaacgaaatgtg

SEQ ID NO: 12053 - DNA, 346 bp, Glycine max
tctaaactttgttcattatgaagctctgatatttcttgttagacaagtggcctcagatatcttaagaagggggggttgaattaagatattcgaaactttttcccctaattaaaaatctatcttactttttacttaagttatgaattcccttaatgacaatcttcttaaatattaattcaaatgaagcaacttgaatatgaatataaagcaataataaataaaggagattaagggaagagaaaatgcaaactcagttttatactggttcggccacacccttgtgcctacgtccagtccccaagcaacccgcttgagagttccactaacttgtaaattccttttacaa

SEQ ID NO: 12054 - DNA, 331 bp, Glycine max
  unsure (1)..(331): unsure at all n locations
agaggcatttgaggagctgaggaggaggcttaccaccttttccatcatgcaaccattagaatgggagcttccatgtgaatatatgtgagaagcctccaaatatgcactcggggaagttctcgacaagagagttgatagactatcacatgtcattggttacgcctcaccactctggatgcaaaccangtcaactacaccacccccgaaaaagagattgtagctattatttttgcattagataaattcagatctgtatttgttcgctcctatattactatttgtactgaccatgcaggcttgagatacttgttgaagaaacctaatgctaaac

SEQ ID NO: 12055 - DNA, 326 bp, Glycine max
tcaaccccatatgtgtattttttagtgttgaggcgcatgttatacttgcgaatctctctgaacacctattccaagactgtgatgtgttgggtcatgctataagacttgacagccatgtcatcaacatagacctcgatatttcatcctattttttgtttggagacccggtccatgagcctttggtacgtggcccctgtgttcttcaatccaaagggcataaccatgtagcagaaattgatgtcttcaattatgaaggcaattttttcctcgtcgggagggtgcatcctgatctggttataccctgagtaggcatctaggaaacttaa

SEQ ID NO: 12056 - DNA, 339 bp, Glycine max
  unsure (1)..(339): unsure at all n locations
tgtttacccnataagaatttgctttctatttagctgttcatagcaccactaattgttctccttttgaagttgtttatggttttaacccactaactcctcttgatcttttgcctatgcctaatgtttctgtttttaagcataaagaaggtcaagcaaaggcggactatgtgaagaagcttcatgagagagtcaaagatcaaattgagaggaaaaataaaagctatgctaaacaagccaacaaagggagaaagaaggttgtcttctaacccggagattgggtttgggtgcacatgagaaaagaaaggtttccggaacaaaggaaatcaaagcttcaaccaa

SEQ ID NO: 12057 - DNA, 238 bp, Glycine max
agcttctagatgagttttgtttgtttttctgacatcctgcgaaaagttataatcatttgaatttctccagcgctcccgttgcttaatatcgagcgtctagatattttatgtactcgaatggtacatcggggcgaagcgttatgacccttcgattttgtcgagagcttccgccattcaatttccaacggccaaatgaagtatgtcctccaaccaaacatttgagggaaatgatatgacc

SEQ ID NO: 12058 - DNA, 338 bp, Glycine max
  unsure (1)..(338): unsure at all n locations
tgctnnnnagggaagctccttatatcttccacactttttggggtgggccattcttggatggccttgattttctcagggtccacttggaccccatttctaccaactacaaaccctaagaaaactatattatctacacaaaaggtacacttctctatatttgtagagagggtgtttttcctaaggactgaaagaacttgcctgagatgtccttagtgatcatctaggctcctactatacactaaaatatcatcaaaataaacaactacaaatctacctatgaaatcccttaagacatgatgcataagcctcataaaggtgtttggtgcattagtgagccc

SEQ ID NO: 12059 - DNA, 348 bp, Glycine max
tattatcggcgacaacgggagtttttccttgattcaattcaatgctttctttattcttctctaattgttaaatattattactagctgttgttgagaatagggattagtgtttaatttctgattatatatggcattattggttctgttgctctctggtttattttatttgtgacccaaaatcattgtaggtgtggggaagagttgtctacttttgaggttttctgatggctcattcacaacaagttttatcaccaccattgggttagtatattatgtgtagacaccttttttttatcgcttgtgaaaaatgctgcagctgtttcttgtcttgtttcaagattcttacat

SEQ ID NO: 12060 - DNA, 340 bp, Glycine max
tagacctcacgccagctgtccctccgttctcagcgtcatcataaactcatgaagcgatacttcggcccatttcccattctggaacgcattggcagcgttgcttaccgtttgcaactacctgaagggtctcgtatccaccccgtcttccattgttccttactacgccctcatcacagacctcttgacctcccaacctcttcccttccggcggatacttcctccccacaccctatacttgagccactagccatccttgactctcgaatggacttctctgtggaccccccaactcgtttcgttcttgttcaatgggttggtcttcctccggaagactccacgt

SEQ ID NO: 12061 - DNA, 322 bp, Glycine max
gagggtgtttcatatgttctcaagactggactaatacatttgctgcgcaagtttcatggtcttgcaggtgaagatcctcttaagcatcttaaggagttccatattgtttgttccaccatgaagccccctgatgtccaggaagatcatatctttctaaaggcttttcctcattctctggagggagtggcaaaagattggctatactaccttgctcccaggtccatttttagctgggatgaccttaagagggtgttcttggagaaattcttccctgcatctaggaccactgccatcagaaaagacatttcaagcatcaggcaac

SEQ ID NO: 12062 - DNA, 348 bp, Glycine max
tcggacaactaattttacgaacataaacttatatgaattaattattatttctatactaacaagacacatatatttttttagtaatttatcacttaacaattttataatttagtgaacttaacttgaaataattaggggaagagtgatatattaaaaaaaatttccataaaacccgtcagtaagtaaaaatatgctaaaatatctcatattaattggtagatataatcaatgacttgagtaaattacaatataaagcgtgaataatcgaaatgttaactccaaggatcattacaatataaattatgaattatatgtcaacactttaaaaacttaattttattattaaaa

SEQ ID NO: 12063 - DNA, 360 bp, Glycine max
  unsure (1)..(360): unsure at all n locations
acactatagaaactcagcttgcctctgtnttggctaggcaggtatcacaaaagaaaaggaagatgggagaagaacgactcaaagctttcagagaagaagtagaaaaactccttaatgctaacttcatcagaaaagttagatactccacatggctcgccaatgacaaatggcgaatgtgcacaaactatactgatctgaatagggtgtgccccaaagatgcaatcctctgcccaacattgacatgctagccgatggagcgtctgggctctaggtgctaagcttcttagacacttgttctggatacaactagattagaatgcacgctagagacgaggagaaaatgagattcatcactgaaga

SEQ ID NO: 12064 - DNA, 344 bp, Glycine max
tggaacatattttcgaattttaggcccccttattgatttagtcaaaatatctgctggctgatcattggaattaatgaattcagtgacaatctctttagacagtagcttctcccgaataaagtgacagtcaatctctatgtgcttggttctctcatggaagactggatttgaagcaatatgaagagcagcctgattatcacaatacaacttcatttgcatcactttgcagaatttcaactcttcaagaatttgtttgacccacataagttcacatgtagctacatccatagatctatattcaacctctgcactagatctagcaacaacagtttgcttcttacttt

SEQ ID NO: 12065 - DNA, 381 bp, Glycine max
agcttttatcatgcaacttacccatgtaaaactccaattcttattaaaaagcaacataaaaaacatataaagaattacatctaagttttatctttatcattattagtagcacaaaacttagatgcagtttcataaatattttgtgtggttctttgatcaaaattagagctttaccctaataacttgtaacttataatgacttttaatgtaaatctttattacaaggaagtgaaactcaaactactattggagaacaacaagttaatcatgatgatgtaaaaatttgtatgtgtatgattatttttttgatattgatatgaatgatttatcagttttattaataactaatatttataagaaaacttaactgatttaccttta

SEQ ID NO: 12066 - DNA, 385 bp, Glycine max
agcttgtgacttgcataaacttcttttcagtggatgacaatagaagctaaaagttaccaagcatacatcaaactgtttcaaaaagtccaactatcattttattcttaataaatgggagttaccagtataaaataaactatggctgcaaaattgtacttcaaaaaaatataaaatataacctgatcaaagacatcaatatagacttgttgcagagaatgagaactgcagaactgattaatctcatgatgaatcttgtcatatatccatgtcttatcataatgtacaccatagttgagcaatgtctcaaagacaaattccttatggagttgattcacaacctaaaagaagaatatgcatcactgctatgaaattattgaagatgtga

SEQ ID NO: 12067 - DNA, 338 bp, Glycine max
  unsure (1)..(338): unsure at all n locations
tggnnnnnttgtgttactcttctcttgtatcaagaaattcatattatttattattctttttctcctctaccaattgcatcaaaagaattttttcggttttttttctcaatccttgagcaacatattaataccaagagagaccatttatatgtgtgattttaagagaaagaattgtctactcttatataagaattatgcgcaatttgaaatttatttattgatctatctttatatattatttttattacctgtaattataatcatctttaaccaattnaatatattattatactaacatttttttcaaaataaaaattacaatctattatattaaaata

SEQ ID NO: 12068 - DNA, 341 bp, Glycine max
tggccaaagggttttggtcctgtatatatagtaagtatgcaacatattgccttgtaaattgtaattaatacagtaattaataatatatgacatagcttatcctttccatttaactatgtgaatgtgattttttcgaagggcacattaccagatggacaagatattgcagtcaaaaggctttcacaaacatctacacaaggattaacagaatttaagaatgaagttatattttgttctaaacttcaacatcgaaatcttgttaaagttcttggttgttgcatcaatgagcaggagaaattactcatctatgagtacatgccgaacaaaagcctagacttctt

SEQ ID NO: 12069 - DNA, 367 bp, Glycine max
agcttgtaacatgggatgcttatcatttttactaatcttatatatttcaaatgaaatagtgatcatcaagacaaagggaaaaattattgagagcgaagaaaaagatctagagctacctttgtttgattttgagacaatagcatttgctactagtgacttctcaagtgacaacatgcttgggcaaggtggttttggccctgtatacaaagtacgtatgcaactagtttctttgcaattaaaagctaagaacaaacaaagaacatagcctgaccttttctgtttgtcatttaccttctttgtaaatgtgaatttttaagggcacgttaccagactgacataatattgcagtcaaaggcttttatatcat

SEQ ID NO: 12070 - DNA, 264 bp, Glycine max
tgtaggcctaggatcttcttcatctatggattcctttgcttcttggaagatgaatggcagcggaatggagaaggaagagagagaggagacgccacttcaaggagaagatgagtttagaaaaagctcaccaccataggaggtcatggataagagcctggaggaagaagatgaatgaagggagagggagagaagagcaggaaattttgtgctctaaaagagctctaaaatctgaagtttaatattcaaatgatcaaagttgaaaaa

SEQ ID NO: 12071 - DNA, 266 bp, Glycine max
tctgaaagctggaatcatttatcctatctccgacagccaatgggtgagtcccgtccaggtagtcccgaagaacaccggcctcacagttgtaaaaaatgagaaggaggagctgattcctactcgggtgcacaacagttggagagtctgcattgactataggaagttgaaccaggttaccaaaaaggaccattttcccctacctttcattgaccagatgcttgaacgtctggccggtaaatcacactactggtttcttgatggctttt

SEQ ID NO: 12072 - DNA, 255 bp, Glycine max
catcataggagctgtgcacgtcaaacagagggggattccaactcttataggtgactttgagcagctgtttatggaggagtccgagtcaattgctgattatttttctccagtattggccgtactcaatcaacttaaaataaatggtgaagatgttgatgaggtgaccgtcatggaccatatacttctaactttaaatccccgtattgacttccttgttgccagcattgaacactactgggattttgagaccatgac

SEQ ID NO: 12073 - DNA, 266 bp, Glycine max
ttgagcaaattcaaacgacaataactttttactccgatgtccgattgtgtcccttagtatatcgagactctcgtaattgaaaacagaagctcgtagcaaattcaaacgacaataactttttactcagatgtccgattatgtcccgtagtttatccataccctcgtaattgaaaacagaagctcgtagtaaattcaaacgacaacaacttttaactcagatgtccgattgagtgctctaatatatcgagacgctcgaaattgaaaat

SEQ ID NO: 12074 - DNA, 268 bp, Glycine max
agcttcacgatatactacgggacacaatcggacatccgagtaaaaagttattgtcattttaattttcttagagcttccgttttaactacgagcggctcgatatattacgggactgaatcagacatccgaggaaaacgtttttgtcgttagaatttgctcagagcttttgttttcaatatcaagcgtctcgttatattacgggacttaattgtacatctgagttaaaatttaatggggtttgaatttgctacgaccttctctttgcaat

SEQ ID NO: 12075 - DNA, 265 bp, Glycine max
agcttaaacattctttttcgagcgtctcgatatattacgagtctcaatcagacatccgagtaaaaagttatggtcgtttgaattggctcagagcttcaacattcaatttcgagcgtctcgatatatttcgggactcaatcagacatccgagtaaaaagttgttgtcgtttgaattcactcagaggttcaacattcaattttgagcgtctcgatatatgacgggacttaatcagacatccgagtaaaaagttattgccgtttgaat

SEQ ID NO: 12076 - DNA, 259 bp, Glycine max
agctttgcatatcctttgataaaccttcgatagtgaccagtgaggcctaagaaacctcttagctgcttgatattgagtggtgtaggccactctagaactgcatgcgccttagtagcatccatagcaactccttcacctgaaactatatgtcccaagtactctatctccaatacaccaaaagagcatttatacaacttagcaaacaaaacatttctttcaatactttgaatacaacctttatatggcataagtgttcatg

SEQ ID NO: 12077 - DNA, 259 bp, Glycine max
agcttgaaccctcgttgtagagcaaacaaaccgaaacacattcaccacgatggcgaccaaagcgatggaggtggtgaagggtctggacgtgaaacggtacatgggtcggtggtacgagattgcgtgtttcccgtcgaggtttcagcccagtgacggcgtcaacaccagagccacctacgctctcagagatgacggcaccgtcaacgttctcaatgagacttggagtggcggcaaaagaagcttcattgagggcactgct

SEQ ID NO: 12078 - DNA, 266 bp, Glycine max
agcttggacttcctgtgttttgggaacctctccttcctcaggtgtacccaaacccaatcacctggttcaagcacgactttctttctgcttttgttggcttgccttgcatagctcgcatttttcttttcaatttgaaccttcacttgctcatgcaacttcttcacatactcagctttagcctgtgcatccttatgcttaaacatagcaatgttaggcataggcaacaaatcaagaggagtcaaaggattaaatccatacactatctc

SEQ ID NO: 12079 - DNA, 263 bp, Glycine max
agcttggtgacctttcacactatatccactcaaattcccataagctggaaagtcattaatggtgcaaaatatcatcgcatgcaacctaaaagtctcaccctgatttgcatcatacacatcaaccccgtctacctaaaacttacgcatgtcttcaatcaaaggagtaaggtacatatcaatatcgtttcctggctgtcttggacgtgatatcatcatagacaacataatgtatttgcgcttcatgcataacgaaggaggaaggt

SEQ ID NO: 12080 - DNA, 268 bp, Glycine max
tcttcacatagtccgcctttgcttgactcttctttatgcttaaaaacagaaacattaggcataggcaaaagatcaagaggagttagtgggttaaaaccataaacaacttcaaaaggagaacaattagtggtgctatgaacagctctattgtaagcaaattcaacatggggtaaacaagcttcccaagtttttaagttcttcctcaaaactgtcctaagcaaagttcccaaagtcctattaacaacttccgtttgcccatcggtttgtg

SEQ ID NO: 12081 - DNA, 260 bp, Glycine max
agctttatgagagagtttagatcaaattgagaggaaaaataaaagctatgctaaacaagccaacaaagggagaaagaaggttgtcttcgaacccggagattgggtttgggtgcacatgagaaaagaaaggttttccggaacaaaggaaatcaaagcttcaaccaaggggagatggaccatttcaagtgcttgaaagaatcaatgacaatgtttacaaagttgagctgcccggtgagtataatgttagttccaccttcaat

SEQ ID NO: 12082 - DNA, 265 bp, Glycine max
tttgcaagagttatgactactataggaggcatgtctctctcttttcatttctttcattatttttcttctttcttcctctcttattttctttctttcatcttgacttatttcttccactattttttccctttttcttttctctggtgtttttctttccataacttgagggaactcaactcatctaagattctagataaagggtctttatgactagtacccttgccattaacactagatgaatgatgactcatgttggttcctaagt

SEQ ID NO: 12083 - DNA, 262 bp, Glycine max
ttgagccaattaagacgacaatatctttttactcggatgactgattgagtcccgtcatatatcgagacgctcgaaattgaatgttgatgctctgagcaaattcaaacgacaataatattttactcggatgtttgattgagtcccgtaatatatcgagacgctcgaaattgaatgttgatgctctgagcaaattcaaacgacaataactttttactcggatgtctgattcagtcccgtcacatattgagatgctcgaaattga

SEQ ID NO: 12084 - DNA, 263 bp, Glycine max
agcttagtaaagcttggcactaacaatctccccctttggcaaattttgtctaaaacatacttagacacttcctgagcaggtacgagcagttatgcaagtgggatcagcaactttcattatcagagtaatcaagcacagcggaaattctgcaagttgcaagtcgtttccaggatgtcaagacatctcacatgacatcagctttctgcttctgctccccctgtctccatgctcttactgcagcatcttctatcagctactagtct

SEQ ID NO: 12085 - DNA, 264 bp, Glycine max
tgaatcggacatccgtgtgaaaagttgtgaccatttgaatttctcaagagcttcggttgttcaatttctagactctcgacatattatgcgcccgaatcggacatccgtgtaaaaagttatgaccatttgaatttctcgagagttttcgatgtttaattttgagcgtctcgatatagtataagcttgaatcggacctcagtgtgaaaagttttgaccatttaaatttcacgagagcttccgttgttcaattccgagcctctcgac

SEQ ID NO: 12086 - DNA, 259 bp, Glycine max
agcttcttcttctttgccacaatgcgctgcttctcagcgagaagagccattctcttagcggtcttggcatagggattgagcttcaacatcgcattgaggttggtgagagggttcttcttgagaggagctctcttaacatctttcttaatgggcctgaccacggactggacctcatcggagttaatgatgcgggccaagtccgagttaaccattctgggcctaggaagcaggtagccctttttcttctcagaagccttat

SEQ ID NO: 12087 - DNA, 260 bp, Glycine max
agctttgcaacagatgccactctactcaaagtttttgaaagatatgtggacaaggaagcacaaatacgttcaccaggagaatattgttgtggaaggcaactgtagtgctatgatacagaagatccttccaccaaaacacaaggacactagaagtgtgacttttccttgttcaataggtgaagtcacggtgggaaagactctcattgacttgggagccagtatcaacttaatgccactctccatgtgtagaaggttgggag

SEQ ID NO: 12088 - DNA, 497 bp, Glycine max
  unsure (1)..(497): unsure at all n locations
tctagcttacaaagctcattggatactggaacagctaaaggcttaaccaaaggaaaaatattcatcttaccttcaacgttgggtgggagcccacgttatatggatcaactttactttgatggtatgacaatatgcagntatgttggtttcccaaatctttttattactctaaccttgaatccaaattggcttgaaattggtagattacttttacctttgaatctcaaatcaacagacagaccagacattgtatcacgaattttcagattgaaatatgaacaaatgctctcagacttaacaaagggtcaattactgggaaaagtggttgcatgtaagttgactataatttttattcttaaacacaaatataagttgatcatttggccacttttctttattctataatgcagatattaatntcgaanatattacaattngactgatactttttacagatatgaaatacaaaatatacttaccatcgtaacattatcatt

SEQ ID NO: 12089 - DNA, 348 bp, Glycine max
gagcttagtcataaagcccttttctaataattgacctaaggtgagtagattacttttcatacctggaacaaagagtacatcagtgatgcaagactgacctccatcctttgttttgataaggaccttcccaattccttcagcagtcaagattctatcatcagcaaatttgacttggctcttcacagattgatcaaggatgaaaaaccactctcttattcctgtcatatgaatggagcaacctgtgtctatggaccaacaattatcacttgcccatgtaatttgagtagttaccattagcactacctattaagtgacatcatcttcttcctgagccaattttgcatcatc

SEQ ID NO: 12090 - DNA, 341 bp, Glycine max
agcttattgaaagcatgccttttgaagctgatgacgtaatttggagaactttgctcactaattgcaagatgcaagggaatgtagaagttgcagaaaaggcattcaattctttattgcaggtggaccctaaatattcttctgcttacgttcctttagcaaacgtatatgctatcagagggatgtggggtgaggtcacaaaaataacaagtttaatgaagaactgtaagttaaataaggagccaggttgtatctggattgaggtcacacatgaagtacactcattttttgttggagacaacgcacatccaaaatctgaagagatttatgagcaaactcatttg

SEQ ID NO: 12091 - DNA, 367 bp, Glycine max
tctggtgggacatcttgacttgctatccaatctgacattcaccactgattctgccttcctctatcttcagagtgggaatgcctctaacagcacttttgtcacggattatcttcatgcctcttaagagcagatgtccaaacctttgatgccatattctgacttcatcttctttggaggatagacatgtggaggagtagctgcgttcttggggtgtccataagtaacaattgtcctttgatctgctgcccttcattagaacttcactcttctcatttgtcaccacgcattctgactttgtgaaagtgacattgaatccttcatcacacaactgactgatgctgatcaagtttgcagtcagtcccttcac

SEQ ID NO: 12092 - DNA, 354 bp, Glycine max
agctttcatttattttaatttatgttaccattttaagagaaaataaattaccataagaatttgcattaatgttattcacgtttaaaaatagtaatgtagctacatttgggcattaagtataataattgtaaattgattatgattacataatagatgaatatttcaatcaaatcaatttattttgaaaatcttacatgcaattttttttatttcaaaacaaattattttataaaattccagaaagccatgtgacaatgtgctttctttaaaaatattttcgtatgcatatagtatagagtatagattgacagctctatccttattggcttcttcctttatatatttataacttat

SEQ ID NO: 12093 - DNA, 349 bp, Glycine max
agcttatagaatatataattagagaacaatgacaattgaagaatcgattcatgtttcctttgatgagtctaatgctatttctccaagaaaggatattttagataatattgcagaatcttcagaacaaatgcatattcatggagaagattctaaaggaaaaggagaaggaagcaatgaagatcctccagtggaagtcaaagcaaataatgatattccaagagagtggaaaccttcaagagatcatccccttgacaacattattggtgatatctcaaaaggggtaacaactagacactctctcaaagatttatgtaataacatggcttttgtatctatgattgaacctaaa

SEQ ID NO: 12094 - DNA, 346 bp, Glycine max
agcttcaacattcaatttcttgcgtctcgatatatgacgggactcaaccagacatccgagtaaaaagttaatttcgtttgaattggctcacagcttcaacattcaattttgagggtctcgatatattgcgggactcaatcagacatccgagtaaaacgttattgtcgtttgaattggctcagagcttcaacattcaatttcgagcgtcccgatatatgatgggactcaatcagacatccgagtaaaatgttattgtcgtttgaattggctcagagctttaacattcaatttcgagggtctcgatatattacgggactcaatcagacatccgagcaaaaacttattg

SEQ ID NO: 12095 - DNA, 345 bp, Glycine max
ttctagattgcaatcctcttctcgttgcggatgaagtggtatctaatgtcaatatgtttagttctctcatcatggacttaatccttggctagacaaattgcactcgaaaaatgatagctttatcttttggaaactttaggttgctattaagactttttagccaaatgccttcctttgctacttctaccagagccatgtatttttcctctatagtggacaaggcaactgtaggtggaagtgtagccttccaattgacaagagaattaccaattataaatgcataccctgtcacaaatcatcttgcatctagatttgtagcgtagttagaatctaaatattcaaaaa

SEQ ID NO: 12096 - DNA, 314 bp, Glycine max
ttccctctttgaacaaatacccctccgccaattagaatccatcttgggcttttttcccacaactttcataaatgagagagaaatgttcatctaaagcttacaagtccctaatattatcaaatcctaaaatttgagctcctagggagcaaaaccatgtgtgtctcatagagagggcatcaactaccacatttgtttttccctttttgtatttgataacatatggaaatttctctaggtactctacccatttttcatgccttttgtttaacttgctttgccctctaatgtacttaagtgaatgatgatcactatga

SEQ ID NO: 12097 - DNA, 350 bp, Glycine max
gcaagcttgtgtcacgattcactgtgacagtcaaagagtcattcacttagaaaatcaccaaatgtaccatgagaggacagagcacatagatgtgaaactacacttcatcatagatgtgattgaatctgagaaggtgaatgtggagaagggttcaaccaaagaaaacctggctgatatgttcacaaagtccctctctagtgtcaagttcaagcactgcctgtacttgatcaatttggaagatgcctaaagcagattggtagaagtgcagccctgaatcacaaggtaaacacttgctgatttggagtcaaggtggagatttgtggtgtgtgactaaaacatacattggcaca

SEQ ID NO: 12098 - DNA, 345 bp, Glycine max
agcttgtagggttaaagtcttacgattgtcacgtgctcatgcaacaattgttagccgtggctatacgagacatcttgccaaacaaagtcaggttaacgataactcgcctgtgctttttcttccatgctatatgtaacaaagtcattgatccagtcatgtttgatgagttggaaaatgaggctgtaattatactgtgctagttggagatgtattttccccctgctttctttgacatcataattcacttgattgtgcatctggtcagagaaatcaaatgttgtggtcctgtttatctacgatggatgtacccggctgagcgatacatgaagatcttaaaagggtata

SEQ ID NO: 12099 - DNA, 342 bp, Glycine max
agcttatgctgcaaacatcttcaatagacctcctcaacctcaacaacaaaatcaaccacaacagaacaattatgacctctccagcaacaggtacaatctcaggtggaggaatcatcccaaccttagatggtcgaatccttcacaacaacagcagcaacaacaacaacaaccttatttttagaatgctgttggcccaagcagaccatacattcctccaccaatccagcagcaacaacaacaacagcaacaacccagaaacaacaaacagttgaggctcctccacaaccttcccttgaagaacttgtgaggcaaatgactatgcaaaacatgcagtttcaacaa

SEQ ID NO: 12100 - DNA, 354 bp, Glycine max
tcttagtctcatctgatgacaatgaattcgtggctactttatgcactcctctaatgacaatagcatcacttatggcactaaattgttgggtccttcataaaaatattggaggagaagctgctcataaatctggtggtgagggcaactagcacatagttttttaaatctctcccagtattcatataggctttctccactgagttgcccaatgcctaaaatatcctttctgatggtcgtggtcctagaagcagggaaattttttttctgagaatactctcttgaggtcatcccagctcgtgatggaccttggagcaaggtaatatagccagttctttgccactccctctaaagaat

SEQ ID NO: 12101 - DNA, 389 bp, Glycine max
tcatgcttaactatgtatggcaaaacttcattatctgttgttcaagacatacaagtgagcttgtaacaaatcttctacacttggagtgatcacatgcagtcctcttgaacccttaccacccactctgtcatcatgctgagactcaggaagcccaacaggtttagctttctctaattattctgaacaaaattcaatggcttcttctacaatgtacctttcaacaatagatgcatctggatgatatagattctttgtatacccttttaagatcttcatgtatcgcttaaccgggtacatccaccgtagataaacaggaccagaacatttgatttctcttgccagatgccccatcaagggaatcatgatggtcaaaaaagtgggggaaaaaa

SEQ ID NO: 12102 - DNA, 366 bp, Glycine max
aagcttgtccaatcgagtaggagaaatgccttcatattcatatctgcatattgatcaattgcaaggtacatgaaggacacgattatgagcaagagaaatagtgctcaaattatcaccaaaaattcgaggaatagtgtgagaaactttcagcttaaacaacaaggtctgaatttgttggacctctaaagtagctggagcaaggttccagtacttagcttcagtgcttgaacgagcaacaacagtttgctttttggaccaccaagaaaccatgctgggtcctaaaaagaaaaaagcattgaatgtagaccccctgtcatttggatccgaggcctaatctacatcacaataggcttgaaaaataaaaag

SEQ ID NO: 12103 - DNA, 347 bp, Glycine max
agcttctcgtcagtggtactttaagtttcatgggataatttcttcatttggttttgatgaaaaccccatggatcaatgcatataccacaaggttagtgggagtaaaatatgctttcttgttttatatgtagatgatattttacttgcagccaatgatcggggtttgctacatgaggtgaaacaatttctctctaagaattttgacatgaaggatatgggtgatgcatcttatgtcatcggcattaagattcatagagatagatctcgaggtattttgggtctatcacaggaaacctatattaacaaaattctagagagatttcggatgaaagattgttcaccaagtg

SEQ ID NO: 12104 - DNA, 330 bp, Glycine max
tgttggttataacaaactttaaccaactaactactaactaataaaattaactaccatatgaattaactaatttcaacacttcctcttaattcatattggtacaagacattactcctagcctatctctcatttccttaaatttgatacacttcaaaggctttgtcaacatgtttgctagttgatcttaagatctacaaaactcaagctcaaacttctccttattcacatgatctctcaaaaagtgaaacttggtctcaatatgtttacttctcccatgtgtcactgggtgttttgccaagtcaatagttaacctattattaattaacaatc

SEQ ID NO: 12105 - DNA, 365 bp, Glycine max
  unsure (1)..(365): unsure at all n locations
ttaagtcaccgcggctgcagcttgatgcacattnggtaggttaatgaaacaacgaaatgatgtgctccatgagaggtttgatcaaatggagaatagagatcataatgaagaagaaaggaggagaagagggaatgatggtgttcctagacaaaaccgaattgatggtataaaactcaacattcctctctttaaaggaaagaatgatccggaggcctacttggagtggaagatgaaaatagagcatgttttctcatgcaacaactataaggaggaccaaaaggtgaagcttgccaccatggagttttccaactatgctcttgtgtggtggaacaagctacaaaaggagagagcaagaaatgaagagc

SEQ ID NO: 12106 - DNA, 354 bp, Glycine max
tgtcccacaagcctctcctacatttggtccatgaaaggcaaaagatagtggtctttcctcatggcttctttgagcttgaggtaatcgatgcatattctccagccagtgaaagtccttgttgggattaggtcattcttttcatcctgaatgattttcgtgccccctttctttggtaccacctggattgggcttacccaagtactatcagaaatggggtagataatccaagcctctaaaagcttgagcacctcttccttcattgatgggttaaggcttctcttgggctgtctgactggtttgtaatcttccgccatcattatggtgggcatattagaaaacggggtgaatcttttg

SEQ ID NO: 12107 - DNA, 344 bp, Glycine max
tgacactataaaactaagcttgtaggtaaagtctcacgattgcacgtgttgatgcatcaattgttagctgtggctatacgagacatcttgccaaacaaagtcaagttatccataacttgcctgtgctttttcttccatgccatatgtaacaaagtcgttgatcctgtcaagtttgatgacttggaaaatgaggtcgtaattatactgtgccaactggagatgtattttccccctgctttctttgacatcatgattcactagattgcgcatttggtgagagaaatcacatgttgaggacttcgttatttgcggaggatgtacccggttgagcgatacatgaaaat

SEQ ID NO: 12108 - DNA, 387 bp, Glycine max
ttaatcgattaccatgagcatataatcgattaccaatgttttaaaacgttagatttcaaatttcaagagtcacaacttgtgataaaacattttcaaatcatttcaaacttgtgtaatcgattacacaatacttgtaatcgattaccagtgtttctaaacgttggttttcaaatttaaacatgaagagtcacatctgttgatgtgtaattgattacactacaatggtaatcgattaccagtgacttattttgaaaaaataaattaccaaaagtcacaattcttaaagtgacttgtttctgaagattttttcaaaagtcacaacctttaagtgactagttttcaaaagagtcacaacttttagagtgactaattttcaaaagagtcaca

SEQ ID NO: 12109 - DNA, 349 bp, Glycine max
agcttctgtattcaatttcgttcatctcaatatattacgggacttaatcggacatccgagttaaaagttattgttgtttgcatttgctacgagcttccgttttcaattacgagcgtctcgatatattacgggactcaatccaacctccgagttaaaagttattgtcgtttgaatttgctacgagcttccgttttcaatttctagtgtattgatatattacgggacttgatcgaacattcgagttaaaagttattggcatttgcatttactcacagctttcgttttcaatgacgagtgtttcgatatattacgggactcatccgagttgaaagttagtgtcatttgaatt

SEQ ID NO: 12110 - DNA, 404 bp, Glycine max
  unsure (1)..(404): unsure at all n locations
ttctgccttctgggtatgacaccataatctatggctttttctctctctctcttaatcttgaacctctatctttntgtttcaagcacaagcaacaatttgtgttatcaaggctttgaagtggtggaagaagaccctaaagcctaatatgattgagatccattcagcacaagaactggtccattctttggtcaacgctggcgattcattgcttgtggttgatttctattcacctggttgtggaggctgcaaagcccttcatcctaaggtatgtttgtttttgttgtttggtgttggaaaagtcatattcttataattttctattactaacaaaatgcttcatttttttttctaggtntttcgttttttgttacaatatttgacttgctttcatcatgcgcgactag

SEQ ID NO: 12111 - DNA, 386 bp, Glycine max
  unsure (1)..(386): unsure at all n locations
tcattgaattggttgtgttattgaagaagatgcttcctgaacaaaacacattgcccanaaatcactacgaggcgaagaagattttatgtcctgtgggaatggagtaccaaaagatccatgcatgcactaatgattgcatattatacagaaatcagtttgcagaaatgcataagtgccccacatgtggggtatcatggtacaaagtccaggataacaaatttgttgatggtgcaagcaaaagcaatagtcatttagcaaaggtgtgctggtatcttcttataataccaaggtttaagcgattgtttactaatggacatgaagcaaaaaaccttacatggcatgtagatggcagaaaaagtgatgaattgctctgacatccagctgat

SEQ ID NO: 12112 - DNA, 364 bp, Glycine max
cgcttattctggtgcgatatatacttcaccaatgggtcaaagcggcttcttattctaatgtcacgagaagggtgggggttagattcataaagatggagctgatgtgtctatacgaactccctaggaagatcattactgacaatggcaccgatttgaacaacaaaatgatgcacgatatgtgcgaagatttcaagatccagcatcataactccaccccttatcgaccaaagatgaatgggtctatataagctttcaatcagaatattaagaagattgttcagaagataacggtgtcatacaaagattggcatgagatgatgcctttcaccttgcacggatatagaacctcggtgcgaacttctac

SEQ ID NO: 12113 - DNA, 379 bp, Glycine max
tctgtatgcttaactatgtatggcaaaactccattactgttgctcaagacatacaagtgagcttgtaacacatcttctacacttggagtgatcacctgcagtcctcttgaacccttaccaccgactgtgtcatcatgccgagactcatgaaacccaccaggtttagccttctctaagtattctgaacaaaattcaatggcttcttttgcaatgtacctttcatcaatagatgcttgtggacgatatagattctttgtatacccttttaaaatcttcatgtatcgctcaaccgggtacatacaccggagataaacaggaccacaacatttgatttctctgaccagatgcataatcaagtgaatcatgatgcaaacaaagt

SEQ ID NO: 12114 - DNA, 404 bp, Glycine max
  unsure (1)..(404): unsure at all n locations
gtgatctatccaccaccgccaccaccatcattntagttnttctcttattttaatattactagtattttgatttccagccgtgtatttggctatattattatgacatttgaacaatatagtatttctttatttgcatggtgtgtttgaaaaattatgaattatgttatatgactatgtgatttttctatatatttgatctagtcatgtttcttgcttcatgattggtttatattttttccatgattgttgtgtgaatgattagttgtatttgtatgtttcatacttgttacgcactttggctttttattggtgccaaagggggagagaaataggggttaaatcaaggtaatgaatntaatttcaagtgaagcatatattcaaaaacaaagggggagaatggaaat

SEQ ID NO: 12115 - DNA, 401 bp, Glycine max
cgcacatatctcctttgatgtttaagaaaattacacatgtctttcttgtatttttaatacctacacaaactccctaaatgtcgtctcaacatttggcagtaacaagtcatatacattaacaattttgattaaaaaatattaaaatatgtttttcttccttataaatatgaaaatgtttgaaattaatcattacaaaactttttgtctatatttcattctcgcaaaatttaaatgttatttttatgtttgagactaagttcaagttactaaaatttacgtgtatgttattatagaatgtgtcaattttttcaacttttttgcatcatttatatgtataaaccatgcagaaacattgtttttgcattatataattgatgtaaaaaagtaaaaaaaaaacatga

SEQ ID NO: 12116 - DNA, 352 bp, Glycine max
  unsure (1)..(352): unsure at all n locations
tcttacaaagcatacggctttctggatgtagatgatgatatctatacagatggatcttatatatctatatatctatagatagatatatagatatagatatatagatatagatcatacaatgaagtaccgcacgagtgggtatataggaatccaaatctgccgaatcactcatgttatgatcttctacatcctaggtcttcccgttccttcatctggcttatgttcttcatgtagcattcagactgaatgactctatgaaattacgtcgctacttccacatggtacgggtaacgtaggagacatctctanttttcccgggggaatccttagaattacacaagctagcttcaat

SEQ ID NO: 12117 - DNA, 400 bp, Glycine max
  unsure (1)..(400): unsure at all n locations
tactcagctttactttgtttgctctgtttggggtttccaagcgttagagagaaggggaagagattgtagcctccatttcactgtcaacgtgcgagactaatttctctctgcaaaacaattatttcataaatcccaacggcagtgatgtgcgaaaaatgggttttgaaggtggtgtccaaatttcacaatggtcccacggttgacgagtccgggatcgtagttttactgagatagattttaccacggtggtatccaaacatgattgattcaaaaggtgaactatcaaatccattaattactatgtacaataaaagagtttcaggagtttgacaagtttcacaagataaactntgtaaaggcaaatatcataagaatgagagttgaattgtgattntcaaaa

SEQ ID NO: 12118 - DNA, 362 bp, Glycine max
  unsure (1)..(362): unsure at all n locations
tgtacaagattattgcaaaggtcttggcaaatatactaggaaggtcttgagcaaggtggtggatgatagacaattggcttttttgggtgaaaggaataatatatttgatgggatcttggttgcaaatgaggttgttcatgaagctaaggttgagaaggaacatgtttcattttcaaggctgatttcaagaaagcatgtgactcggtaagataggaatttctaacctatatgctacataggctaggagtttgtagtaaatggattagatggatgtggtgtttcctacaatcttcatctacctctatccttgtaaacgggatcccaatggaagaattntatgctaaaaaaggacttcgtcaaga

SEQ ID NO: 12119 - DNA, 387 bp, Glycine max
  unsure (1)..(387): unsure at all n locations
tcactcatgtgtccaagtcnttgatgccacagggttgaattattgacaacctcagtaattgttatcatatcctcatctgcaattatgtaaagagatcattgcttctttccatgagccacaacgagattgccttttgttaccttccaagctccatctccaaaagcggtgtaatgccccccatcatccaactgccctatagatattagatttctctttaaggcaagaatatgtctgacattatgcaatgtccatagggatccactggaagtcttgatgtcaatatcacctcttccgacaatgtcaagagattttccatctacaaggtaaacttttccaaatcttctagaaatatagttagacaataaatcttacaggactatccaagct

SEQ ID NO: 12120 - DNA, 380 bp, Glycine max
tgcaagcttaaccatggaacggtatgagataattaaagatattgggtcaggaaactttggtgtggcaaagctggtcaaggaaaaatggagtggtgaattatatgctatcaagttcattgagagaggcttcaaggttctattttcaaattccatgtatcttttcttttgtcatatcttaatcttgtcttgtgtacatatgttttttagattgtcctttgttaatggggttctattgggttttgcagattgatgaacacgtgcaaagagagattataaatcataggtccttgaagcatcccaatatcattagatttaaagaggtacggaattggagacgtttttggtttcaatgagtataaactcaaagtgtaattatttgc

SEQ ID NO: 12121 - DNA, 368 bp, Glycine max
tgtgctattccaagttcattaatcatacctttaatccagattgcttccttcacaccttcagctagggccatgtattatgtttcagttgttgaaagagcaacaactgattgttgatttgctttccaactgattgatgtaccaaacaaagtaaacacatatcctgttaaggacttccttgtgtctacatttcttgcaaaatctgcatctgcatagcctgtgactactgcttcatgtgttgtcttcttgtactttaaaccagctttcaaagatccatttagataccttagtgtccacttcacagcttcccaatgtgcgctgccaggatctcccatgaatttgcttataatacttataacatgagccaaatc

SEQ ID NO: 12122 - DNA, 380 bp, Glycine max
  unsure (1)..(380): unsure at all n locations
aacagttctctaaccattccaatccattcaaatcatacaactgctcattcaaatcattctcacactcatttcataccaaacaatcaattgcatatcattntcaatcaattcactgttcaaacacactttttgtacaagcaaacaactcaaagtgccatggataagagcttggaggaagaaggagatgaatgaagggagagggagagaagagcacggaattttgtgctctaagagagctctgaaatctgaagtttaatttttaaatgatcaaagttgaaaaaatgcacacacatggcttctatgtatagcctaagtgtcacacaaaattggagggaagattgaatttctattcaaatttttcttgaaattgaaattgaatt

SEQ ID NO: 12123 - DNA, 370 bp, Glycine max
  unsure (1)..(370): unsure at all n locations
tttgaattatcaatatccaaacttgcttctacacccataattcttgcacctaattggaaatatggttttgagctcatatgttacgcaagtgattatgtagttggtgttgtcttgggacaaaaaaaagaagacaaaatttttcatgctatacattatgctagtaaagtccttaatgagcatcaagtgaattatgcaacaaccaaaaatgaattactagctataatctatgcattggaaaaatttagatcttatctcatttgctctaaagtggttgtttatacagattatgcaactattaagtatcttctatctaagcccgattccaaaccaaggcttattaggtggatacttatgttgtangaatttgatc

SEQ ID NO: 12124 - DNA, 390 bp, Glycine max
  unsure (1)..(390): unsure at all n locations
gagaagctttcttgagaagattcctagagaagctagagcttagctacacacacccctttaatagctaagctcatctcttccttgagatgataagatagagcttagctacacacacaccctataataggtaagctctcccccatgccaaaatacataaaaatacaaaaaagtccctactacaaagactactcaaaatgccttgaaatataagactaaaaccatatactactagaatgaccaaaatacaaggtccaaaagaaggaaaaacctattctaatatttacaaagaagagtggacccaatcttggcccatgggatcagaaatctaccttgaggttcatgagaaccctanggccttctntaacagctctagcctaatcctctttgagg

SEQ ID NO: 12125 - DNA, 398 bp, Glycine max
ttatcggccttgtatggtctgaaacaagctcccatagcttggaacaagagaatagacacctttctcttgcaaattggattcatgaaatgcactactgaatatggtgtgtatgttaaaggagaaagtctttcagatatcctcatagtgtgtttatatgtggatgatttactgataacaggaaaggattgcagtgctatctcgacattcaagcaagagatgaagtctaagttcgaaatgtcagatcttggagaattatcatattttctgggcatatagttcaagaggacaaaggctggaatttttatgcaccaaagcaaatacacaattgatgtcctaaagaggtttcagatgcttgactgcaactcagttttaactcttgttgaaactagtgctgtgct

SEQ ID NO: 12126 - DNA, 381 bp, Glycine max
  unsure (1)..(381): unsure at all n locations
agctcttgctacaacctttntctccccctttggcaacatcaaaaagccaaagaactcggaaatcaacacagttataacaatggagtagcaagatataagtatcagagtattaaatacaataagccaaactcataatcaataaaataatcaaaccagaattcaaataacataaaatgtcaacaaccacaaaatatccaagactgaaatttaaaaacacaagataaataagcaaaatacttagcataataatgtaaattctaagaaactaaaaaccaaaatacacggcttataaaagataaataagcagaatctaaaatctaagaagacggaggaggtggtggaagatcgaaactctgacgaatgtatccgacatcctcttca

SEQ ID NO: 12127 - DNA, 333 bp, Glycine max
tgttgatgcggccttatcttgagatacacccattctccctccttaatctttgaaggtaggtgacgattattggcatactttgtcatgtgattctgagctttgtttagatgaaacttcaactgattaagtggttcatctctttccataagatcataagtcactgcctcaactaggacttcccctggaatgaaccttgccaaagatggggtgttagaccataaactatttcaaatggggtacacctagcagctccctggtgacatgtattataccagtattctgacatgggataaactcagtccaatgattccacaaaacctaacaacaaaacat

SEQ ID NO: 12128 - DNA, 294 bp, Glycine max
tgtgacactactcaagcctgactcttatgagaacttcatctggtcagattttttaaaaaggaacccttaccattgccatcaaatgcaccaactcagctaaggaacaaaaagcaaggttttacatcatgaggaggtgtgttgccatgttgggttggtggcacaagcatggggattcatgaaagaagtgcacagatcttgagcttagtttttattgaattatgaccttttattggcctactttgaatactataaattcgattgtaattacaagttgactaacgtgagttataagat

SEQ ID NO: 12129 - DNA, 419 bp, Glycine max
  unsure (1)..(419): unsure at all n locations
agcttaaacattcaaatntgagcgtctcgttatattacaggactcaatcagacatccgagtaaaaagttattgttctttgaattggctcagaggttcaacattcaattntgagcgtctcgatatattacgggactcaatcagacatccgagtaaaaagttattgtcgtttgaattggctcagagcttcaacattcnaattcgagcgtctcaatatattacgggactcaatcagacatccgagtaaaaagttattgtcgtttgaattggctcagaggttcaacattcaatttcgagcgtctcgatatattacgggactgaaccagacatccgagntaaaagttattgtcgtttgaattggctcacagcttcaacattcaatttcgagccgctcgatatattttcggactcaatcagacat

SEQ ID NO: 12130 - DNA, 502 bp, Glycine max
  unsure (1)..(502): unsure at all n locations
gatcctcttagtcacctgcggcatgcaagcttanggaaattactgaggaggccaaaagttntgcaattgngaacagggctcttgctgcactatntgtacatacaccagcgggtgagctgcagcgtcaaattagatcctggcttgcagagagttntgagtttctatctttaacgggagaagatgcatcaggggggtcaactggtcagttggaacttctttcaactgcaattatggatggttggatggcgggacttggtgctgctcttcctccccacactgatgcccttggccagctattatttgaatattcaaaacgtgtctatacttctcaattacaacacttgaaggtatgcctctagttagttctgtgttgcatgacttataaatgcatacctcacaagttctcgatggaagccttgtttactttaggactttgttgagagatgacactcatacatttcattgcattcaaatattacaatagtctaaacataataccgag

SEQ ID NO: 12131 - DNA, 271 bp, Glycine max
tttgagaaattcaaatggtcatttcttttcactcgaaggtctgatcaggcgcatcagatatagagacgctcgaaattgatcaacggaagctctcgagatattcaaatggtcataacttttagctcggaggtcggatttaggcacataatatatcgagacgcccgaaattgaacaacagaagctcttgagaaattcaaatggtcattacttttcactcggaggtccgattcaggcgcatcacctatagagacgctcaaaattgaacaacgaa

SEQ ID NO: 12132 - DNA, 451 bp, Glycine max
  unsure (1)..(451): unsure at all n locations
agcttgagantgaacaactgatagctctcgatatattagaaggtctaccttttgacacgaagtcagattcacgcacataatatatcgagacgctcgaaattaaataacggaagctgtcgagaaattcaaatgctcattacttttcactcggaggtccgagtcaggcgcataatatatcgagacgctcgaaattgaacaacggaagctctcgagaaattcaaatggtcataacttttgacacggaggtcagcttcacgcgcataatatattgagacgctcgatattgaacaacagaagctctcgagaaattcaaatggtcataacttttgacccgaaagtcagattcaggcgcataatatatcgagacgcttgaattgagcaacggaagctctcgagaaattcatatagccataacttttcactcggatgtcagagtcaagcgcataatata

SEQ ID NO: 12133 - DNA, 420 bp, Glycine max
  unsure (1)..(420): unsure at all n locations
agctnttgcaagctggaatcatttatcctatctccgacagccaatgggtgagtcccatccaggtagtcccgaagaanaccggcctcaccgtgataaaaaatgagaaggatgagcttattcctactcgagtgcagaacagttggagagtatgcattgactataggaggctgaactatgttaccaaaaaggaccattttccactgccattcattgaccagatgcttgaacgcctggcaggtaaatctcactactgtttccttgatggtttttctggttatatgcaaatcactattgctcctgaggatcagganaagaccacattcacctgccccttcggcacttttgcttataggaggatgcctttcggcctgtgcaatagccctggtaccttcctgcggtgcatgattagtatttttagtg

SEQ ID NO: 12134 - DNA, 458 bp, Glycine max
  unsure (1)..(458): unsure at all n locations
agcttcatgatgaatgaagagtgattcaaagatgttntgatgataacaaagatgataacaaaagatgatgacaaaggtgatgacaaaaagctcanaggtcaatcaaagaatgagttcaagatattcaagataaaatcaagaacacatcaagattcaagaggaaagttaatttcaagaatcaagattcaagagatcaagattcaagactcatgactcaagaatcaagagaaggcttaatcaagataagtctganaaggtttatcaaaaattgagtggcacatggatttttctcanaacatgtttacgaaagaagttttactctctggttatcgattaccagagtggtgtaatcgattatcagtagcaaaatggatttgataaagttctcatatgagattacaacgtttcaattgatttcaaaaagctgtnatcgactacaatattttggtaatcgatta

SEQ ID NO: 12135 - DNA, 384 bp, Glycine max
  unsure (1)..(384): unsure at all n locations
agcttcttagtttcggattatgcaactgagtttgtagctacctcatgcactcctctaatgactataacatcatttctggcgctaaactgctgggagttggaaaccatcttctcaattaaatttctggcttcagcaggagtcatgtctccaagggctccaccactggaagcatctatcatacttctctccatattattgagtccttcataaaaatattggagaagctactccgaaatctaatggtgagggcaactggcacatagttnttttaaatctctcccagtattcatacaggctctctccactgagttgtctaatacctgagatatcctttctgatggctgtggtcctagaagcagggaaaattttttctaagaatagtct

SEQ ID NO: 12136 - DNA, 279 bp, Glycine max
ttgtttttatacattcagtgtcatattaaaatatttttatatttgtcaaaaggaatgcttgcaatatattctgttttgtaaagaagtaaggaaatttattaaattgtgagtgaaccaaacatttcgtaaaattcacgttaattatatctaatattaaaaaataagttagaaatatattaatatttttcttgtcaaagtatagtagatcttctcggtgctagtgattttgattaatataatttaacaatctatccaaaatatgaatatgtctatatatta

SEQ ID NO: 12137 - DNA, 433 bp, Glycine max
  unsure (1)..(433): unsure at all n locations
agcttcacagcggagaggagataacacctgcacttttgaaggcaattaaagattccagaattgccatcactgtgctctctgaagactntgcttcttcctcattntgcttagatgaacttacatccattgttcactgcgcccagtataatgggatgatgattataccagtgttttataaggtgtatccttctgatgtcagacaccagaagggtacttatggagaagcattggctaagcataagataagatttccagaanagttccagaattgggagatggctctgcgtcaagttgctgacttgtctggctntcatttcanatacaggtacccaatgataccaatctttttatgttttaatttttattggaattaattaagttactcgtctcacaanttaatgttcaaatattaataacagagatgaatatgagt

SEQ ID NO: 12138 - DNA, 282 bp, Glycine max
tctggtgggacatcttgacttgctttccaatttgacatgcaccacagattctgccttcttctattttcagattaggaatgcctctaacagcacctttgtcaatgattttcttcatacctcttaagtgcagatgtccaaatctttgatgccatattttgacttcatcttctttggagaatagacatgtggaggaggaactggtttcttgaggcgtccataggtagcaattgtcctttgatctgctgcccttcattagaacttcactcttctcatttgtcacca

SEQ ID NO: 12139 - DNA, 392 bp, Glycine max
  unsure (1)..(392): unsure at all n locations
acaatataccttctcaacctcagcagcaaaatcaaccacagcagaacaattatgacctctctagcaacagatataaccctggatggaggaatcaccctaacctcagatggtccagccctcagcaacaacaacagcagcctgctccttccttccaaaatgctgctggcccaagcagaccatacattcctccaccaatccaacaacagcaacaaccccagaaacagacaacagttgaggcccctccacaaccttccctcgaagaacttgtgaggcatatgactatgcaaaacatgcagtntcagcaagagaccagagcctncattcagagcttaaccaatcaaatgggacaattggctacccaattgaatcaacaacagtcccagaattctgac

SEQ ID NO: 12140 - DNA, 446 bp, Glycine max
  unsure (1)..(446): unsure at all n locations
agcttaggctgcanacatttataatagaccctctcagcagcataaccaacaacagcaaaataattatgatctttcaagcaacagatacaatccaggttagagaaatcatccaaatctgggatgggcaagtcctccacaacaacaacagcctgttcctcctttccagaatgttgttggtccaagcaagccatatgttcctcctccaatacagcaacaacaacaacaacagtcacaacaaagacaacaagcaactaaggatcctccttaaccttccttagaagagttagtgagacaaatgaccatccagaatatgcnaatttagcaagagacaagagcctctattcagagtttgacaaatcagatggggcagatggctactcacttgaaccaagctcagtcccaaattctgacaaattgcttcaccactgtacataatcnaaaaatgt

SEQ ID NO: 12141 - DNA, 279 bp, Glycine max
tgccgccacggagttttccgactatgctcttgtgtggtggaacaagctacaaaaggagagagcaagaaatgaagagccaatggttgatacatggacagagatgaaaaagatcatgaggaagcggtatgtgccggctagttactcaagggacttgaaattcaagctccaaaaactaacccaaggcaacaagggggttgaggagtatttcaaggaaatggatgtgctcatgattcaagcaaatattgaagaagatgaggaggtaactatggctcgatttct

SEQ ID NO: 12142 - DNA, 396 bp, Glycine max
  unsure (1)..(396): unsure at all n locations
agcttctcgatatattatgcaccttaatcggacttccgtttgataagttatgaccatntgaatntctcgagagcttccattgttcaatttcgagcgtctcaatatattatgcgcctgaagcggagcttcgtgtgacaagttatgaccatttgaatatctcgagagattccgttgttcaatttcgagcgtctcaatatattatgcgcctgaatcggacatccgtgtgacaagttatgaccacttgaatntctcgagagcttctattgttcaatttcaagcttctcgatatattatgcgcctgaatcggacttccatgtgataaggtatgaccatntgaattctcgagagcttgcggtgttcaattcgagccgctccatatattatgcgcctgaatcg

SEQ ID NO: 12143 - DNA, 272 bp, Glycine max
tccattgttcaatttcgagtgtctcgatatattatgcgcctgaatcggacctccgaatgaaaagttatgaccatttgaatttctcgagagctacctttgttcaatttcgtgcgtctcgatatattttgcgcctgaatcggacctccgagtgaaaagttatgaccatttgaatttctcgagagcttccgatgttcaatttcgagcgtcttgatatactatgcgactgaatctaacctccgtgtgaaaagttatgaccattttaatttctcaag

SEQ ID NO: 12144 - DNA, 409 bp, Glycine max
  unsure (1)..(409): unsure at all n locations
ctgcagactgagaaagagtttgtatggagcttgtatgaaaattcctatgaanagcattgggagattgaagaccggattacagaaatgcagataagggtttgcagctggcaagatgagtttggcattaatacaatgatagaagataacgatgcacgagctttgatggctgcaacagctttatattcttgcaaagagacccttgctaagtngcaagagacacaggcacaatcatctgaagaggctaaagaatcctaccaaagggttaaggaagctcgtgacatgtttgaaaccattagaggccaacttcattctaaacttttatagtcagaagaccaaggaactgaaccataaagcatagaggaagaagacatgtctagcttggaagagaaaggcatgagcctgatgtgga

SEQ ID NO: 12145 - DNA, 267 bp, Glycine max
cgccacggagttttccgactatgctcttgtgtggtggaacaagctacaaaaggagagagcaagaaatgaagagccaatggttgatacatggacggagatgaaaaagatcatgaggaagcggtatgttccggctagttactcaagggacttgaaattcaagctccaaaaactaacccaaggcaacaagggggttgaggagtatttcaaggaaatggatgtgctcatgattcaagcaaatattgaagaagatgaggaggtaactatggc

SEQ ID NO: 12146 - DNA, 271 bp, Glycine max
ttgaacaacggaagctctcgagaaatttgaatggtcataacatttcactcggatgttcgatccggggacataatttatcgagacgctcgaaattgaacaaccgaagctcttcgacaaattagaatgtgcgtaacttttcacgcgaatgttcgattcggggacataactcatctagacgctcgaaattgaacaacggaagctctcgagaaatttgaatggtcataagttttcacacggatgtccgattcggaacatatttatctagacatcg

SEQ ID NO: 12147 - DNA, 276 bp, Glycine max
tgtgtagcgataattctagctgggaaaagattttcgcacctattacccagatgtcggtgcagcttgataatagtttcctcctcttccttggtgtagtttcctcttttgaggtttggccttaggtaattcagccaccttagtctgcaactctttccacatctcgcaagacctaacaaattaataacaacaacaacaaagtaaaaccaattacaatggattcatatatgatttagctataagctgtgcatgtatataattaaatattgaatatatggt

SEQ ID NO: 12148 - DNA, 406 bp, Glycine max
  unsure (1)..(406): unsure at all n locations
tgttagctataagaaatatggaaaccaatatttacaatataataagattgttagtttaaggtaatgattgaaattaaattaacaaatatatttaattttttagttataaaaaatatcgaaaccaaaatttaaaatctaagataggataagattgttagtttaaaataatgattgaaataaaatttaaaaatatattagatttggtagttataataaatattgaaaccaaaatttaagatttaaaatttatttattaatccatatgttntaattattttaaattattcttttagaaatattttataaattatatttctagaaattttttacttcttttaatttatctatagaaatctatacattagaagatttgatatttaatngaatgatgtatttagatgtttat

SEQ ID NO: 12149 - DNA, 353 bp, Glycine max
  unsure (1)..(353): unsure at all n locations
aaaattgtaggaaaactattgccactaaaacgttnttctattctaagaatatcataaacaagaacatatgccatatatattcattaactgaagaaagtataaatatacataccgtatctgcaaccacatgatcaagagatggaacataaccatgcaatccatcactgcctccatgaccttaaaaataaaacaaatcattccagatccatcacaaaatggtaagtacggaatggaaaaagaaatcttaaactacctatccagtccattgcatagacaccaaagttgcatgatgttaatagccttgcanagtccgcatatcttccactgaaaaatgagtgccaagtcagagaagt

SEQ ID NO: 12150 - DNA, 383 bp, Glycine max
agcttgtactttaccttaggagccacatagttcggactcccacaagttgtcccacaagttgtccgaaggatactcgccccctatcagaatattcaaaagtttgaagcagtttggtattattatatcttacatgagtcgaagtcatatataaaagctaatttggtgacaagctcacctgctcaggaaatgcactcaaaccataatcggaaatctttatatttcctagtgaatcaagtaaaagattttcaggctgcacaaggcaaaaagaaaaaaagaaaattagaagatatcacaataaggacaacaaacaacttctcagatctcactcaatgcaaacctttaaatctcagtgataaactcccttactgtggcaataatctaca

SEQ ID NO: 12151 - DNA, 314 bp, Glycine max
ttctcgagagcttccgttgttcaatttcgagtgcctgtatattgatgcgcctgaatcggacatccgagtgaaaagttatgaccatttgaatttctcgagagcttcctatgtttaatttcgagcgtgtcgatatattatacgcctgaatcgaacctcagtgtaaaaagttatgaccatttgaatttctttagagcatccgttgttcattttcgagcgtctctatatgtgatgcaccttaatcggacctccgcgtgaaaagttaggaccatttgaatttctcgagagcttccgttgttcaatttcgagcgtctcga

SEQ ID NO: 12152 - DNA, 420 bp, Glycine max
  unsure (1)..(420): unsure at all n locations
agctntactatgcagagaatatccaaggaaaataccttcatctgacttagcatcaaattttcctaagttatcttttccattattcaatacaaaacatttacaaccaaagatatgaagatgtgagatgtttggttttctgccattgaacaattcatatggagttttctttaaaatgggtcttattaaagccctatttaaaatgtagcacgcagtgttaacggcttcagcccaaaagtattttggaagaggagtatcatttaataaagttctagcaatctcttccaaagatctatttttcctttccacaacaccattttgttgaggggttcttggtgcagaaaagttatgctcaatcccatgcttatcacanaataattcaaattcttttatttcaaactcacccncatgatcactcctaat

SEQ ID NO: 12153 - DNA, 460 bp, Glycine max
  unsure (1)..(460): unsure at all n locations
gcttaagaatcattttcggatcaagagaaagattgttggacagttggatctctcattgtggattattgagttgaccttgcggatttaattattattaatatgaatatgccctacctttacattttaattttaattcatggaattgattgtaaggtgtcgaccaatttattttttatatgtttgtttataggtaagaattgaagatatataccaagaaatttacaattcacatacatattcaatcaattgagttagattccttattgatattgaccaatttattaatacttttatataaatgtcattattgccttaaaaaatgtcattattganacaatnggtactttttttttcgagcacgaaacaattggtacttgtttatatccacatgttgtaaatgtctatttccaaatatgtgatatagttggacagtatgtatttaagtatatttttaatttct

SEQ ID NO: 12154 - DNA, 431 bp, Glycine max
  unsure (1)..(431): unsure at all n locations
agcctgacaggttcaggtgcatgtgctgctactggnggaggcacttgaatttggttgccatacctcaaggtgatggcactcacattttttggattctgcacagtttgtgaaggcaaattgtcagaattttgggactgagcttggttcaactgagtatccatctgccctatctgatttgtcagactctgaatggaggctcttatctcttgcgtgaaatgcatattctggatggtcatatgcctcactaactcttctaaggaaggttgaggaagagccatagttgcttgttgctttgttgcgactactgttgttgctgctactggataggaggaagaacattggcttacttggaccancaacattctgaaaaggagggacaggctgttgttgtgtggaggactttccatctacatttgatgattcttcacctg

SEQ ID NO: 12155 - DNA, 281 bp, Glycine max
tgtagagcatcgatcgggtgtgggtgtaggggggcacgtaaaactgcacctgctagtcaggggagcatccgttgctacccatcacgtggcggaggtgcttgccggcgtggagggcctgagccaccatgccttgcattgttgattgaatgttatggttgggtgtggtggtgcacgtcaccgtgtcttggtgtccctgcaacttcatgtgttgcattaatattcttctctttggaagcacaccaaccatatgttctcttttctttgcattcattttctttcac

SEQ ID NO: 12156 - DNA, 368 bp, Glycine max
  unsure (1)..(368): unsure at all n locations
agcttgttgcaattcttctaggctgggagtcataacatgcaatcctctagaacccttacctcccactctttcgttataccgagactcgggaaccccaataggttttgcctttntaatgtactccgaacaaaacttaatagctntttttgcaacgtaccttttaacaatagatgcttcaggatagtgtaaattctttgtatacccttttatgatcttcatgtattgctcaaccgagtacttccattggtaaataaacaaaaccacaacattaatttccctcaccagatgaacaattaatagaaccatgatgctgaaaaacaaaggaaggaaatacatctccaatggacataagataataacaacctcat

SEQ ID NO: 12157 - DNA, 400 bp, Glycine max
  unsure (1)..(400): unsure at all n locations
agcttcatctaagtaccctgctctgccaagtatatccactaaacatgaataatgagttggtctaggctccacactatagtctctagtcattttgtagaanatctctttaccctcgtccactaatccagaatgactacaagccgataaaactgcagtgaaaatgccctcatctggtgtcacacctttacctagcatttcataaaaaatggagatggcctctctccccctcccatgaattccaaatccagtaaccataaccgtacaagcaggcaaatttttctcatgcatctcatcaaacacacgacaagcacanaaccaaacttcacagttagcatacatgccaataagtgcccgtcccacaacaacattcacaacataacccctcttaacaacatatgac

SEQ ID NO: 12158 - DNA, 301 bp, Glycine max
  unsure (1)..(301): unsure at all n locations
gcaagcttaagtattgtattcccatttcttttgtacagaactcctcttcctggtggccncttaaggtaatggagaattatataggtatcttgtaagtggatttctcttggacagtgcataaataggctcaccaagctaacaaaaaaagtaatatcagaccttgtgtgagacaagtaaatcaattttccaactagacgatgatacatctccttatccacttctgcactgccatcttcattacccaatttaatgtttgaatccatgggagtacctctcaatcgacccatctaccctatatttt

SEQ ID NO: 12159 - DNA, 278 bp, Glycine max
tcaaaagatcatccccttgacaacattattgcttatatctcaaaaggggtaacaactagacattctcttaaagatttatgcaataatatggcttttgaatctatgattgaacctaaaaatataaaagaagtcatagtagatgataactggattattgccatgcaagaagaactgaatcaatttgaaagaaacaatgtgtgggaacttgtagagaaacctaaaaattatcccatcataggaacaaaatgggtatttagaaataagttagatgaacatgg

SEQ ID NO: 12160 - DNA, 267 bp, Glycine max
tccattttcaattaccagtgtctctatatattacgggattaattcggacatcccagtaaaaagttattgttgtttgattttgctcagagcttctgttctgaatttccaacgtcttgatgtaccactagccacaatcagacatccgagtaaaaagttattgtcgtttcaatttgctcaaagcttttgttttcaattttgagtgtctcgatatattacaagactcaatcggacatccaagtaaaaagttattatcgttagaatttgctc

SEQ ID NO: 12161 - DNA, 277 bp, Glycine max
ttatagagagccatgccaatagtatagtgaatactattgttataagtgaactctatcaacggaagaaaactctcccaacttccttttttctctaagacacatgccatcaaaaggtcctctagcgactgaatggttcgttcagtttgtccatcagtctgaggatggcaggctgaacttagtcaaagcttggttcccaatgctctgttcaggctctcccaaaatctagaggtaaacctaggatctctatcagacactatgctagatggcacaccatgta

SEQ ID NO: 12162 - DNA, 387 bp, Glycine max
  unsure (1)..(387): unsure at all n locations
agcttgtcaactcctcataccatatattgctgtctaattcctccttagaatcatcacattcagagtagtatactatagtagagactctttaaattaatactctgtcaatcaataaactctctaaaataataaatntttccggtcccgacatgggccaatgcaaaaaattggaaaactcaataaaataataagataataatctttcgtgagatccctgtattattttcggtcccaagaaaatcataaattaataattcatagaaactagaaacaaatatattacactctattgaaatatgattcaatagttgtctgtttcctttatagtcaagtctatttggagctcatctctaacttttcttattgcatccaatagctcaggtgttg

SEQ ID NO: 12163 - DNA, 317 bp, Glycine max
  unsure (1)..(317): unsure at all n locations
agcttgctaaagcactgctntcaactccaacttnttgaaaggtcaatgatgaanaataaagaactccatttatgcctgcaaactgctgaagtacaaaaagagtacctccaataaaggcaactgcaatcatacaaagaaaatccacagcaaattttatgcttcaaactttcaagtgccatgcacaagtaatgattataaatatgtatttgtttataaaaagagaaagttttgttttatggagctaaattcattcccctatccagctgaaactattactntaatgtacttatttttctcctgacatggtaagcaatcta

SEQ ID NO: 12164 - DNA, 455 bp, Glycine max
  unsure (1)..(455): unsure at all n locations
agcttaagaaaaagatggccttagcaaatttcttatttccagaagggaattctatcaatagacctccaatctttaatggagagggttaccactactggaaaacccgaatgcaaatttttattgaggcaatagatctaaatatttgggaagccatagaaatagggccttatatacgcaccacagtagaaagagtttcaatagatggtagttcatcaagtgaaagcataactatagaaaaacctanggatagatggtctgaagaggatagaaaacgagtacaatacaacttataagccaaaaacataataacatttgccctgggaatggatgaatattntanggtttcanatngtaagagtgctaaggaaatgtgggacactcttcgattaacacatgaaggaactacaaatgttaaaagatctaggattaatgcactaactcatgaatatgaatta

SEQ ID NO: 12165 - DNA, 278 bp, Glycine max
tattcaagcaaatttacgtatggttgtccatgttgccaaaagttatcaggggcgtggtctcagccttcaggacttattacaggtagccttttagaaattaaagaccttcctttccctgtagcaaaggctgtttagtgtatggttttcctggtttgttatattctaaattgtgaatatcattcaagaattttttggattgcctagtatttcatcaattagttaaccaagattcttgacttttcttaaatgtgaaagagatacactaggataaaaagact

SEQ ID NO: 12166 - DNA, 277 bp, Glycine max
tcaagaataatggcctcatcaaactatttatttcctgaagggaattcaataaataggcctcctatttttaatggagtgggttaccattactggaaaacccatatgcaaatttttatagaggcaatagatttaaatgtttgggatgcaattgaagtagggccttatattcccaccatggttgctgggaatacaacaatataaaagcctagagaagattggagtgaggaagaaagaagactagtacaatacaacttaaaagccaaaaacataattacat

SEQ ID NO: 12167 - DNA, 388 bp, Glycine max
  unsure (1)..(388): unsure at all n locations
acccttgatgcaacatttggagaggttaatgaaacaatgagatgatgcgctccatgagaggttggatcaaatggagaatagagatcataatgaagaagaaaggatgagaagagggaatgatggtgttcctagacaaaaccgaattgatggtattaaactcaacatttctccctttaaaggaaagaatgatccggaggcctacttggtgtgggagatgaaaatagagaattttttctcatgcaacaactatgaggaggaccaaaaggtgaagcttgctgccacggagttttcggactatgctcttgtgtggtggaacaagctataaaaggagagagcaagaaatgaanagccaatggttgatacatgggcggagatgaaaaggatcatg

SEQ ID NO: 12168 - DNA, 280 bp, Glycine max
tcggtattcaatttcgagcgtctcaatatattacgggactcaatcagacatccgactaaaaagttattgtcgtttgaattagctcggaggttcaaaattcaatttcgaacgtctcaatagattacgggactcaatcagacatccgagcaaaaagttattgtcgtttgaattaactcagagcttcaaaattcaatttcgatcgtctcgatatattacgggactcaatcaaacatctgagtaaaaaagttattgtcgtttgaatttgctgaaagcttcaact

SEQ ID NO: 12169 - DNA, 377 bp, Glycine max
  unsure (1)..(377): unsure at all n locations
caaactaacatgggacctgaaaaaaattacatcaaagacgcgaaacaatggagcgaagaagtctgaagaatggcctcaacactgtacctatggttccacccaattctacgacacatacatcaactggaccgatcattccatctcccgnnntngngcccctctttcaatccaatcttgaatagcatcactgatatgaggcacgacctacagaggaaaacaccatcataagaataagaataatgattctcatgacaataataatattaggaccaacatggaaaatgaaaaccttggcttataaatatcatcacantataaacatantacaaaatnnnttaagccnnncctgaacngttttgctacctantctccttttc

SEQ ID NO: 12170 - DNA, 417 bp, Glycine max
agcttggctaactctataggagacatcttatatgttgctatggatatgggtccagcaccaggtactaggtctatggaaaactctatctctctcgggtggtagactgaatatatcctcaaggaacacttcaggaaactctctaacaatagagaggccacacatggaaacctttgtctgtatttctaagttggacaagatcatgtacacttgagcttcttcttttaaagatgccacaacttggttggcagagatacatcatatccttactcactccagaatcatcaaacaccacagttttatcaaaacagtttaacaagacatggttggaagataaccagcccatacccagaataacatctatttggctcaaagacaaacagatcagatcaatctagaatgttatgccagaaatttcta

SEQ ID NO: 12171 - DNA, 428 bp, Glycine max
  unsure (1)..(428): unsure at all n locations
ttcagcacctaatgtcatattatattgtaattgggtatcttaacataagagatttcagatggactttaatcctaatcccacaatcgaccttttcacgagatctctacttaaccctttggttaaatgatcggccaaattatgctgagttctcacaaactccactgatatcacaccatgcatgattaactcccgaatcatgttgtgtctaacacccaagtgtctagacttcccattatacacttgactatatgccttagccaaagttgcctgactatcacacctgatagacatgggaggtataggtttgggccacaatggaatctcatagatcagatttcttagccactcaacttctntaccagctgctgctaaagctacaaattcaaattccattggtgaatttgtaatgcaggtctgtttcttggatg

SEQ ID NO: 12172 - DNA, 428 bp, Glycine max
  unsure (1)..(428): unsure at all n locations
agcttgctaaagctgaagaattcttcttttctggattgggacccggagatacttcaaacccactaggatcaaaggtggcagctgtcacagtcaatgaaatattangtctcaattcacttggcatatatatccttggcacgcatagattttgcacctaactcaccctagagggacagagattcttgtagtcttggaaggtaccctctacgttggttttgtcgcgtccaatcaaaacgacaaccgtttattcaccaaagtgctgaacaagggtgatgtgtttgtgttcccaatagggctgattcacttccagcaaaacatangttatggaaatgctttggccattgctggtcttagtagccaaaaccctggagttatttccattgcaaatgctgtgtttggatctanacctcctatctctgatgaagttc

SEQ ID NO: 12173 - DNA, 433 bp, Glycine max
agcttatgctgcaaacatctacaatagtattcttatacctaagcagcaaaatcagccacaacaaaacaattatgacctctccagcaacaggtacaatcctaggtggaggaatcatcccaaccttagatggttgaatccttcacaacagcagcagcaataacaacaacatccttatttccataatgttgctggcccaagcagaccatacgttcctccaccaattcaacaacagcaacaaccccagaaacaacaaacagttgaggctcctccacaaccttctcttaaagaacttgtgaggcaaatgattatgcaaaacatgcagtttcaacaagaaaccagagcctccattcagagcttaactaatcagatgggacaattggctacacaattaaatcaacaacagtcccagaattctgacagattacccttttaa

SEQ ID NO: 12174 - DNA, 358 bp, Glycine max
gctgtgccgaaaggaggattgtattatgtattatttagagccagctggagaccatcaatgctttccacataatttccttgtcggaggggttcaatttgtcgcccttgttcgaggacaagaggagggaggagatgaggttcgccaccgcggggacgcccagcaccgtcatttctcggctggaggaggtggccaaggccgggaagttcgacgtcaggagtagcgagaccaaggtgaggcttcagggtcaggagcgtgggaggaaggggaagctggcgattgccgcggatatctactccgtgactccttcttttatggtgctggacgccaagaaggaccatggggataccttggagtataa

SEQ ID NO: 12175 - DNA, 428 bp, Glycine max
  unsure (1)..(428): unsure at all n locations
agcttggatttccttttagtatttaatttatccttcctaagatggagccaaacccagtcaccctcattaagaactagctcttttcttcctctattgcctttagttgaatacacctttgtttggttctctatttggttcttaaccctctcatgcatcttctttacaaattctgacctagattccccttctttatgtattaaagaagtgtccagtgggaggggaatgaggtctaacggtgttaggggattgaacccatagacaacctcaaaaggggactgcttggtggttctatgaacccccctgttgtaggcaaattctacatgaggaagatactcatcccaagacttatggttgcctttcagaagagcccttaaaagggtggataaagacctattcactacctctgtttgcccatcagnttgtggatg

SEQ ID NO: 12176 - DNA, 403 bp, Glycine max
  unsure (1)..(403): unsure at all n locations
agcttagtggcactcatcttcgaatgttttctgttaccatccacagagtgatggacagacagaagtcatgaacagagtaattgaaggttatttacgagcttttgttcatcgtaggccaacatcgtgggggaagttcttaccctgngtagaactatctcataatacttcatggaatagcagcacaggctcaaccccttatgagataacatatggacgcaagcctttttcttttccagattatattgcaagatcctctaaaattgatgcagtagatgatcttctcttgtctcgtgatgaagtgttcactactattcgccggaaattactcaaggcacaggtttccatgaagaaaactgcggatgccaaacggagagaggtaattatgagcccggcaggtgggtat

SEQ ID NO: 12177 - DNA, 353 bp, Glycine max
  unsure (1)..(353): unsure at all n locations
tttatgtggtcttgaatggctatcacaggcctatatatatgtgacttgagacacgaatttgctaagagagtttttcagaacaaaaaggtcttatcctcttataaagaacaatcgttttatcctcttacaaattccttggccaaattacttgtgattcaataaggaattatttgagtgctcaaattgttcaatctatctctttcaagagagatttcttcttctcttcttcttcattctgaaaagggattaagagaccgagggtctcttgttgcgaaagaattctaaacacanaggaagggttgtccttgtgtgtttagaacttgaanaggaatttacaagatagtggaactctc

SEQ ID NO: 12178 - DNA, 379 bp, Glycine max
  unsure (1)..(379): unsure at all n locations
agcttctatgatcagtcaagattataatttggtgccctaaaagatactgcctccattttttaacagcagtggtgatcgcagcgagttcacgaacataagtttaagaagagagtaacctgnggcaaaactgcttgctaaaaaaagctatcgggtgtcttccttgggacagcaccacacccatacccgaacccgaggcgtctgtctccaccgcgaaaggttttgtgtgctaagactagagaatgtgtcatagcatgcttcaatttgttgaaggcaacatcagcttccacggtccagtggaactcttccttggtcaacagacttgtaagtggtgctgccaacattgcgtagctccttataaatcttcaataaaagccaagca

SEQ ID NO: 12179 - DNA, 395 bp, Glycine max
  unsure (1)..(395): unsure at all n locations
agcttctcgatatattatgctctctgaattggatttccgngngagaaggtatgaccatnggaatttctcgagagcttacttcgtgcaatatcaagcatgtcgatataatatacgacttaatcggacttccattcgataagctatgaccatttgaattcttcgagagcttccgctgatcaatttcgagcgtctccatatactatgcgccagaatcagactttcgtgatacaaggtatgaccatgggaatatcccgagagcttccgttgatcaattttgagcgtctccatatactatgcgcctgaatcggactcccgtgtgatgagagatgaccattttaattaatagagagctcgcggtgtacaataccaagcgcaactctttattatgcgcctga

SEQ ID NO: 12180 - DNA, 386 bp, Glycine max
  unsure (1)..(386): unsure at all n locations
agctntggagtttccaagggtttattcttcttcttcttttgtccagtcttcttctggcttcaattcatcagtgggctttccttctgtgtccagcatcttgggatgttcccagcctttgatgacaactttccaggttctgctatccagtgatttgaggaaggccaccatccttgctttccagtattcatagttggttccatccagaattggtggtctgttcactggtcctccttctttctccatgttcatcagaatttatctccctagatctcactcagtgatttcgagtgcctgctctgataccaattgaaattctgatacagaggtcagatgtcgtaccggatgtcacgacatcacgcttcagaacatggagattatatttgact

SEQ ID NO: 12181 - DNA, 419 bp, Glycine max
  unsure (1)..(419): unsure at all n locations
agcttctaaactttgtacaagtatgattctctgataccacttgttagacaagtggcctcagatatcttaagaagggggggttgaattaagatattccaaacttttctcctaattaaaaatctatcttactttttacttaagttatgaattcccttaatgacaatcttcttaaatattaattcaaatgaagcaacttgaattatgaatataaagcaataataaataaaggagattaagggaagagaaaatgcaaactcagttttatactggttcggccacacccttgtgcctacgtccagtccccaagcaacccgcttgagagttccactaacttgtaaattccttttacaagttctaaacacacaaggacaacccttcctttgtgtntagagattctttacaacaagagactcacagtc

SEQ ID NO: 12182 - DNA, 437 bp, Glycine max
  unsure (1)..(437): unsure at all n locations
agcttccatgtaagaaggcaattttaacttcaaattgaagcatctcccaactaaagtgcgctgttaaggagatgatgatcctaactgtattcattttttccattggagcgaatgtctcctcataattgattccataggtttgggtgtatccctttgcaaccaaccttgccttatatcggtccaatgtgccattagcctgatatttaacggtatacatccacttataacccattgtctttttgtcttttagtctctctacaatctcccctctcatttctttccaatgcacccatttcttcattcatggctcatacccagttctcatccttcaaggcttcttgtattgatgcagggattttgatagaatcaatagctgaaataaaactatggtgctgtagagaaagatntttagtagacacaaattgngatatatgata

SEQ ID NO: 12183 - DNA, 443 bp, Glycine max
tatagacaactcaagccttttttagtaagaatgtgggctcagtctctcaaaatattaatgtcactagtctccgtgctttcaattaagtccattgcttcctcgggggttttcattttgatcttacccctagctaaagcatccaagagctgcttagattgtagtctcaacccatctatgaatatgttgagctgtattggttttgaaaaaccgtgagtgggattcttccgcaataaacctctaaatctttcaagtgcctcattcaaagattcatctggaaattggtggaaggaagagatggtagctttgccttctgcagtcttcgattcagggaagtacgtctttaagaaattttctactacttcatcccatgacttcagactgtttcctttaaaagaatgaagccatctcttagcttctccaactaaagataatgagaacagact

SEQ ID NO: 12184 - DNA, 448 bp, Glycine max
  unsure (1)..(448): unsure at all n locations
attttggttggggctttgctagaatctaattcttacaattttntataaaaatttctatccaatagttgctatgctaacttggtaataaatttgctcagattcaacaagacgcacattattaggttgggctaagcgattcgaaattattggtggaattgctcgaggacttctatatcttcatcaagactctagactaaaaatcattcatagggatctcaagactggtaatgttcttctcgatagtaatatgaacccaaaaatatcagattttggtatggctaggacatttgggctggatcaagatgaagcaaacacaaatagagtgatgggaacatagtaagcttttctatagttggttatttttttatttccccttttacaatggcttctagcttctcatgtggactcctgttttctatgcagtggtatatgcctcctgaatatgctg

SEQ ID NO: 12185 - DNA, 376 bp, Glycine max
agcttatgctgcaaacatttataatagacccccttagcatcaaaatcaacaacaatagaataattatgatctttcaagcaacacatacaatccaggttggaggaatcattcaaatctgagatggacaagtactccacaacaacaacagcctgcccctcccttccagaatgttgctggtccatgcaagccatgtgttcctcctccaatgcagcaacaacaaagacaacaagcaactgaggcccctcctcaaccttccttagaagatttagtgaggcaaatgaccatctagaatatgcaatttcagcaagagacaagacctccattcagagtctaacaaatcagatggggcagatggcaactcagttgaaccaagctc

SEQ ID NO: 12186 - DNA, 443 bp, Glycine max
gacactatgctactcagcttgagcaattcaaacaacaataactttgatatcggtgtccgattctgtcccgtaagatatcgagacactcgtaattttaaacggaagctctgagaaaaatcaaacgacaataacttttaactcggatgtccgactgagccctgtaatatagcgagacgctcgaaattgaaaacggaagctctaagaaaagtcaaacgacaataacttttaactcggaagtccgattgagccttataatatatcgagacgctcgaaattgaaaacggaagctctaagaagagccaaaagacaataacttttaactcggatgtccgattgagtaccgtaatatatggagacgctcgtaattggaaacggatgctctaataataatctaacgacaataactcttaactcggatgtccgattgagtcccatattatatc

SEQ ID NO: 12187 - DNA, 278 bp, Glycine max
  unsure (1)..(278): unsure at all n locations
catgcaagcntgacattcatttctgtcgtnctatatattacgggactcaatcggacatccgagtaaaaagttattgttgcttgaattttttcagagcttcaccattcaatttcgagcttttcgatatattacgggactcaatcagacatccgagtaaaaagttattgtcgtttgaatatgctcacagctgcggcattcaatttcgagcgtctcgatatattacgggactcaatcagacatccgagtaaaaagttattgtcgcttgaatttgctcagag

SEQ ID NO: 12188 - DNA, 358 bp, Glycine max
agcttcttagtttcagatgatgcagattggtttttatctacctcatgcactcctctaatgactatggcatcatttctggcgctaaactgctgggagttggaggccatcttctcaattaaatttctggcttcagcaggagtcatgtctccaagggctccaccactggcagcatctatcatacttctctccatattactgagtccttcataaaaatattggagaagaagctgttctgaaatctaatggtgggggtaactggcacatagtttcttaaatctctcccagtactcatacaggctctctccactgagttgtctaatacctgagatatctttcctgatgggtgtggtcctggaag

SEQ ID NO: 12189 - DNA, 432 bp, Glycine max
agcttccttaagaagattccttaagaatctagttcttagctacacatacctctctaatagctaagctcacctccttgagatgagaagctagagcttagctacacaccccctataatagctaagctcacccccatgacaaaaaacatgaaaataacaaaaaaaaaagtccttattacaaagacaactcaaaatgccccgaaatacaaggctaaaaccctatactactagaatggccaaaatacaaggcctagacgaaggaataacctattctaatatttagaaagataagcgggctcatacttagcccatgggctcgaaatctaccctaaggctcatgagaaccctagggcctttccttggatctctagcccaatctacttggagtcttctagccaatgcccttgcggggtaggattgcatcaagttgtagta

SEQ ID NO: 12190 - DNA, 409 bp, Glycine max
  unsure (1)..(409): unsure at all n locations
agccatccacatacaagcatataatgaaacaatcatctttcatagacttcttgtacacacatctatcaacatcactagaggaaaaaccatcactaagcaaagtctaattaaacttttcatgccattgtttttgtgcttgtttcaaacgatatggaaattttaaaagttgtcacactttgttttcttgattagtgaatttcagctatggttcaacccnctnngcggaaatcaaatgctagagtctccactaagtgtgcttaagtttcatgaagcatgtaaagcatgaaggacatgccccnnnnntttcaattgggtgtcacatgctaatgctcacctcccccttaagcttggtcaaatttaattggattgaacttgtggcatgtaattaaatttctttccaacacacaca

SEQ ID NO: 12191 - DNA, 458 bp, Glycine max
  unsure (1)..(458): unsure at all n locations
tgtaatgcgaaccaagaagaatgaaatgaacttaagatgctgttgggattatcgtctacgggccttaaacagagaaacgaatcaaggacctaaaaagggattattaaagaggttaaaaaaacggaaattgtaaaacaagaataacataataacagtattttacttgagtcataacataatttcttttatatttattatttgataatcgatacacattataagtatttagttttactatttatattgtttactagatataaaacttagacggaatatacgcgttaaccgtaaaaatcataaaaatgtctttcgatagataattatattttcatgctagattttattgacaaatacgatttttttttatcatgaatcataaaatttatattttgattgtaagttttttttatcanatatataattntcaacttaagataatngtttatatgttgacaaaa

SEQ ID NO: 12192 - DNA, 395 bp, Glycine max
ctgcagcttctgtccctgagaaacttttcttgattacaacagggagtgaagattgctgaaaaccctagccttgcaacaagtcctagggaagtagacacggagatggacaagaaaatccgcagtattgtgagtagcattttgaaagacgcctctgttcctgatgctgagaaagatgttccaacatcctccaccccagatgttgctgtccctgaagctgatgaagatgtcccaacatcttccaccccgaatgtttctgtgcctgatgctgagaaagatgttccaacatcttccggcccaaatgctgaagtactctctttccccagcaaagagagatcaacagaggaagatgatcaagccacagaggagacccctgcaccaagggcacaagaacctgc

SEQ ID NO: 12193 - DNA, 435 bp, Glycine max
  unsure (1)..(435): unsure at all n locations
tatcctatctgttaaatacagggcatccttgtctttatantgcttggacaaaacagagaaataacagaataaacttccatatggcatttggtcacatcccaacaattcaccaccttgaactaacatccatataggacacaaactgcaccctccaaacacacatgattttaaccccaacaatctacattgagcaagcttaagcagtgatcaaacttgctctttggaactggctttgtgaacatatcagcaagattgtgcagagtgctgatcttatgaactttgattcttctctctgaccgaatgaagtgatatctaacatctatatgtttggttctatcatgatgaacctgatccttggccaagcatatagcactaatgctgtcacagtagatgttagcatattcttgattaattctgagatcatttatcagacct

SEQ ID NO: 12194 - DNA, 422 bp, Glycine max
  unsure (1)..(422): unsure at all n locations
agctttaaataggctcngggttcaatttctacttttatgtaagccgagtcgagccttaaaaaaagcctatgacaggtaatgagtcaagctcaagtcatacgtattcaactcaagccgagctcaagcctagtaaagcttggcttggcttggctcatttccacccctaataatgaagaggaaatggacatttgggtgtacaacacaacctaccaaaagtgcagttctagtgaaagatgagggaatgggataaagtaagctagtcggcgcccgtcactttcctctttcattcattcattcattcatttacttttcctcacacaaattacctctgccatcaacctgcactcaccaacccaacttcttcccaaaccccaaacagaacaaaaatacaacacctttaattactctcttgctaaatatat

SEQ ID NO: 12195 - DNA, 400 bp, Glycine max
agcttgcaattgacatatagggtcgttctaaaatgactggaacctcatggtcttcctccagatccatgaccacaaaatcagctggaaagaccttcacttttatcagaacatcctcaattaccccgtaaggtcttgtgatggatcggtcaacaagttgtaaagtcattctcgtgggcatgatttccaactctcacaaccttctacacatggagagcggcattaggttgctactggttcccaaatcaatgagagtctttctgatgtgccatcattttcttctatttcttaaaccctttttgcaccattttaattactgattagtcttaattgtcaaattaattaagcagttttattatttgggcacattgagctaatttgatgtttttaatctaatttcatg

SEQ ID NO: 12196 - DNA, 442 bp, Glycine max
  unsure (1)..(442): unsure at all n locations
taacatcagaccacttccagggttctggttctacttttcatggatttgatggggcctatgcaagttgaaagccttggaggaaagaggtatgcctatgttgttgtggatgatttctccagatttacctgngtaaactttatcagagagaaatcagaaacctttgaagtattcaaagagttgagtctaagacttcaaagagagaaagactgtgtcatcaagagaatcaggagtgaccatggcagagaatttgaaaacagcaggttcactgaattctgcacatctgaaggcatcactcatgagttctctgcagccattacaccacaacagaatgggatagttgagaggaaaaacaggaccttgcaagaggctgctcgggtcatgcttcatgccaaagaacttccctataatctctgggctgaagccatgaacacagcatgttaca

SEQ ID NO: 12197 - DNA, 327 bp, Glycine max
agcttaaacattcaatttcgtttctctctatatattacgggacttaatcaagcatccaagaaaaaatttattgtcgtttgaatttgctcagagattcaacattcaatttcgagcgtctcgatatattacgggactcaatcagacatccgagtaaaaagttattgtcgtttgaattggctccgagcttcaacattcaatttcgagcgtctcgatatgttacgagactcaatcagacatccgagtaaaaagctattgtcgtttgaatttgctcagagattcaacattgaatttcgagggtctcgatatattacgggactcaatcagaca

SEQ ID NO: 12198 - DNA, 453 bp, Glycine max
  unsure (1)..(453): unsure at all n locations
nttgttagacaagtggcctcagatatcttaagaagggttgttaatataagatattgcaaactatttccccaattaaaattctatttcaatttcaatgcaagttacaagttcccttaaaaatgaattcttaaataatgattcaaatagaacaatctgaatataaattaaagcaataataaataaaagagtttaagggaagataaagtgcaaactcaaatttatactggttcagccacacccttgtgcctacgtccagtccccaagcaacccgcttgagagtttcactatcttgtaatatccctttacaagttctgaacacacaaggacaatccttcctttgtgttcagatntctttacaacaagagaccttcggtctctcaatcccctttgagaatttagaaagaagagaagaataaatctctcttgaaaagatagattggcaatctgacactc

SEQ ID NO: 12199 - DNA, 380 bp, Glycine max
gtttagaggtattagttgactaattatggtttattgcttctgacttattaaggtttagggttatttgaaaagatagggttgcttgactaattgggtttaggggtatttgacaaataaaggtttagggttactcgacgaattcgaatttaagggtatttgactaatgagggtttatgtgtagttgagttaattacggtttagtgttacttggccaattagggtttatgggtatttgacaaattacggttacttgactaattaaggtttatgggtatttgaaaattaaggtttaaggttacttgacaatttggggtttaggtgtatgtgactaattaagatttataggtacttgactaattaaagtttagtggtacttgact

SEQ ID NO: 12200 - DNA, 372 bp, Glycine max
  unsure (1)..(372): unsure at all n locations
agctntgataaatctgacaaagaaacgtgttnattgtctctatattaagggggtatctagtgaaggagacactagagacagtggaagcagcaaaatgcagacaatagttgttgtgatcattgtcatagtaacattgcttgtcatttctggtatgctattcgtggcacatagatgcttcaggaaaaaggaagatttgcttgagtctcctcaagaggattcagaagatgacagtttcttggagagtttaactggcatgccaatccgttacagctacactgatctagaaactgcaacaagtaacttctctgtgaggcttggagaagggggtttcggttcagtatataaaggagttctaccagatgggactcaact

SEQ ID NO: 12201 - DNA, 443 bp, Glycine max
  unsure (1)..(443): unsure at all n locations
ctcaagctagcttaagacacgatatagattnctttaatttgcactctatgttttcctctccttcaactgagaaccccattggttggtccatataaacatcctcctctaaatctctattcaaaaaggcagttttcacatccacctgatgtagctccaattcataatgggctactaatgccatgataatcctaaataaatcctttcgtgagactggagataacgtctctttataatcaatgtcatctttttgagtaaatcccttagcaacaagtctagccttgtaacgttcaaagttgccatgagagtcacatctagtcttgaagacccacttacaaccaactctgttacaaccctttggtaattctacaaggtcccaaacaccattatgttccatggaatctatctcttctttcatagcattaaccatctctcaaaattatcac

SEQ ID NO: 12202 - DNA, 445 bp, Glycine max
  unsure (1)..(445): unsure at all n locations
tagcagttcagtttcatgttgtacagaaggacatgatttcttatttaattttgattcaacacatatttcacatttcttatttttttttatcattcatattaattaaacctagttgttgcaaattcataacatacgttggattaacatgtcctaatctagcatgccatatatcataagaatcaatcaagtaagcaaaagaagatgcattctcattaatcactttagaaacatatagtacaaagagaccccgatcacaataacccatccccataaatacattattcttggccataattatcttattagactcaaacctttcgcaacaatgttatagaaacaaggtcaactctcatagagggaacctgtagcacattattcatagctagtantttcccacatatgagtntgagaagaaatatcccctttccttgaaccagagtagttc

SEQ ID NO: 12203 - DNA, 432 bp, Glycine max
  unsure (1)..(432): unsure at all n locations
agcttatgcatgcaagactttcttatttcaaagtcactttaatagctcatattataaaatgacatacaaacatatgagtccagctagctatcttaaacaatatgaaacttaattttttgtgatagccttcaaactacaacaatgattattatcttcttttttaacaaatctatatttttttattacaacgtagctaatgtggtttatgttgaattcaaatttctaatatcaatttttaggatgttttagattttaaagatactatccaatctttttaagatgtttattttagaaattaatgtgttttttatgttaagtttatgatttgttataaaatagaggttttataaaaaaaattatcaagcatggaatagatangaaaattacaaattttacacgaaatattagtaaaaaaataggcttaattaaata

SEQ ID NO: 12204 - DNA, 461 bp, Glycine max
  unsure (1)..(461): unsure at all n locations
tggcctagcccacatcacatgttaagtgcaaagcaattgcatacaaatgctgacttttccttttaaaaaaataataaaacaaagatatttgcgggtcccatgttgctcaaaacgtttcgttttcagttttcacatcttctgtaagtacatgaacatgtcctgcaagggcgagagctggcccatntgatactgaacagtgccaaaaaggtaatcatccacggaaaggttattatcgtccaagtaattaaactgaaaatcaaacgcgttttctagctttaggtccagatcatcgttccacttggggtcgctctgcacctccctctcgcacgtgacatcgggcgaaaccacgtgctccgaactgctcgagtccgtgttcaaccttggcaccgaatccgaagtctccatgtacaattgctcatttcctagcttatgaatctctggcttcgtctcgttctcgtgct

SEQ ID NO: 12205 - DNA, 454 bp, Glycine max
  unsure (1)..(454): unsure at all n locations
tctaagtcacctgcggcatgcaagctttaaatagaaaagaatatnnaaatattgatttaaagcaaagggtgtttgctttgttgattttttttatttcatttatattaatattttttatatgtcaatttctttttataaatttagaataaaatcagtgaaatcaaatcaaataccaagtacttgagcattctattcaaaactctctcctatgcccatagctactgttcatgttacgcgaatagcaaacattattaatacatatttagcattaagtcaattatatatttaatttagttttttaaatgattgagtgttacgtataatttaagaattaattcaaatatacagattgtgtaaatatttttatgtgactatttaatcataaatcagtatttttttggtattatcttaaatttagagttaggtttttctcattaatcatcggtataaaaat

SEQ ID NO: 12206 - DNA, 309 bp, Glycine max
  unsure (1)..(309): unsure at all n locations
actccttcgcatactgttntttatcacccctgtccacgttatgaagaaacacgtgcgtcacacccgatccctttctcccacgcgccatcattgcggcggagtatatcaccgccatcctcccaggcgcggccgcaaaatatcctcgcggcccatcaatcatgatcacatcccaatcacggttgtacacctcattgggcagcgtgccaagtgccagcttacaccaccgatcacctttcagtgggtggtcagaggtgttcttgctgacaccgggacaataatctttataagaggagaggaggttcttggcct

SEQ ID NO: 12207 - DNA, 458 bp, Glycine max
  unsure (1)..(458): unsure at all n locations
taatcaagataagtatgaaaaggttnttttttcaaattctgagtagcacatgaatttttctcaaaacatgtttaccaaagagtttttactctctggtaatcgattaccagattattgtaatcgattaccagtaccaaaacggatttgaaaaagttttcaaattgaatttacaatgttccaattaatttcaaaaggctgtaatcgattacaatgttttggtaatcgattactagtgcctttgaacgttgaaattcaaattcaaaagtgaagagtcacatcctttcacataaaagctttgtgtaatcgattacactgatttggtaatcgattaccantgattggttatgagtaaatcaaaagatgtaactcttcaaatggtttttgactttntcaaattgggtttaagttttctaannagtataactcttcaaaatgatcctcttgaccagacatgaaga

SEQ ID NO: 12208 - DNA, 369 bp, Glycine max
  unsure (1)..(369): unsure at all n locations
agctngaatggaaacnagatttctnggtttatttggtaacccaacnggccatgaattaaaaatgtgcacctgtcgccagactctgtgctttatgctcctctgccaaccaccacacagacctttgcccttctatgcagcaacttggagcaattgaatagcctgaagcttatgctgcacacatctacaatagacctccggaacctcagtatacaaaatcaaccacaacagaacaattatgacctgtccaccaacaggaacaatcccgggtggaggaatcatcccagccttatatggtcgagtccttcacaacagctaccacaacaacgacagccttatgttcagaaagtggctggcctaagtagaccatat

SEQ ID NO: 12209 - DNA, 343 bp, Glycine max
agcttgatgatgaatgtctagttgcctttcatactttgaaagaaaagcttgtatcagccccaataatgattgcacctgactggagcaaggagttcgagctaatgtgtgatgccaatgattttgttgaggatgaggttctatgatagcggcgagacaagatattccacgccatatattatgctagcaaggttttgaatgaggcacaattgagatatgcgattgttgagaaggatatgttggccatcgtctataccaacttataaccaaacttctctttatcaaatatcactcgagatcgcttcatgggtcaacgccttaacgaatcttcgttctcatattgaat

SEQ ID NO: 12210 - DNA, 420 bp, Glycine max
tgcatcttccttggtcgggtacatgagcatatgcaatgctccttatactctcaagtgatcaactcttggcttcactccactccatgcttcttgtggtgtttgatctttgacattctttgttggggagcgattggacaaataaacggcacatgcaacagcttcggcccaaaattcctttggcatatttttagccttcaacatacatctagtcatattaagaatagttctattttttctctctgctaccccattttgttgtggagatctaggaaccgttagagggcgacgaatcccatatttttcacaaaattcattaaattcttttgatgtgaattcaccacctctatcggatcttatagctttgattacataaccactctccttttccacaaaacttaaaatttttaaaactcaaatgcc

SEQ ID NO: 12211 - DNA, 420 bp, Glycine max
tctaagtcaccgccgctgcagcttgggaagtacccggctctgttggttggtattggttttgctgacaaatagtgtagttgcaaacaaaatctttagtgtcaaagtacatgtgttggatcgagtggcctcagaataattaagaaggaggggtttaattaattattcctaagcctttactaattaaaaatttactcttctaaggcttttactatgttgttaagagaataaggagtagaagagaaacttaaccaaaagtaaaagcggaaattaaaatgcacagcggaaagtaaaagagtagggaagaaggagacaaacatacaagagtttttatactggttcggcaacaactcgtgcctacatccagtccccaagcgacctgcggtccttgagatttctttccaccttgtaaaaatcctttta

SEQ ID NO: 12212 - DNA, 447 bp, Glycine max
  unsure (1)..(447): unsure at all n locations
accaaacctgacatacctagcacatggagagcaatgtaggcactctacaattctggcaaggctcaagctataggggtcagcaatttctctgtaaagaagcttcaagatttgttggatgtggcaagtgtgcctccagctgttaaccaagtggaattgcacccttcattacagcagccagaattgcatgctttctgtaaatccaagggagtgcacttatcagtgagtgtgcaaatttaaatccaaacatttatgcatgctacatgaacaatgattttaagatcggaccagtgattgaaactagttcaatggttcgactgtagttgaatcggttttatattttttaaatataatataatatttcaactaataaaataatatataattaanaaattataaattaatataaatgattaaattatatatttcgtaagataaaaattaataata

SEQ ID NO: 12213 - DNA, 391 bp, Glycine max
agctatggagtttccaagtgccaattcttcttcttctttagtccagtcttcttctggcttcaatccatcagtgggctttccttctgtgtccagcatcttgggatgttcccagcctttgatgacagctttccaggttctgctatccagtgatttgaggaaggccaccatccttgctttccagtattcatagttggttccatccagaattggtggtctgttcactggtcctccttctttctccatgttcatcagaatttatctccctaggtctcactcagtgatttcgagtgcctgctctgataccaattgaaattctgataccaatgccagatgtcgtacaggatgtcacgacatcacgcttcagaacatgcatattatctctgagtgtatg

SEQ ID NO: 12214 - DNA, 429 bp, Glycine max
  unsure (1)..(429): unsure at all n locations
agctnggtgaccctnanagattttggtttagtgtatncctttccatctttgtgatttgattcaaaacagcttttaacatttttctgtcacaagataaagggtctaagcaataacccaaatttggtgctcctccatatgttgtagttgcatggttgagagggaacttaggctccatagtggtcatgtggttgaaaatggggtttgtttggttctgagagaaaatggagaagcacggcacttgctcaaactcatctgcatgggtttgagtttggtcaaaacttatgtaagagtccattaacgcaggaagagttgaagatcccgtgtcctcataacagctacccatgctatgtttggctaaaacttcactggttttgtagaacaccctacacaaaacccaatctttctgcatgtacacaaggtgcaaacatt

SEQ ID NO: 12215 - DNA, 408 bp, Glycine max
  unsure (1)..(408): unsure at all n locations
agctcgaggganaacttgatttcttgttcaacctantaactcagcttgccatcaatcacaaatctgcacctgttgcaagagtctgtggtctatgttcttctgcagatcaccatacagatctctgtctttctttgcaacaatctggagttaatgaacaactggaagcttatgctgcaaacatttataatagacttcctcagcaacaaaaccaacaacagcaaaataattatgacctttcaagcaacagatacaatccaggttggaggaatcatccaaatctgaaatggacaagtgctccacaacaacatcagtctatccctcgtttccataatgctactggtctaagcaagccatatgttccttctccaatgcaacaacagtagcaatagtctcaacaaagaccacaag

SEQ ID NO: 12216 - DNA, 388 bp, Glycine max
  unsure (1)..(388): unsure at all n locations
tatggcggcaaaagataagctacttatcctgaagcatgttgaagttggtgtttaaaaacactgtatccttgaatagcagataaaggtcagcttctcaaaggcaagtaagactcctaaaattgaaaagctataattggtgcacacaaatgtttgggggccagccccattgaaatctgttggaaactcacgctattatgtctcttttatcaactagtctaccaaaaaagtatgggtttattttcttaaaaataaatctgatgtgttttctgtgtttaaaaggcgnaaaataaatatttaatatcaaacaagtcttaacggtaaaagactgaaatcttacaatggtaaggagtatgatagtcaggaagttatagacttctgttctgaacat

SEQ ID NO: 12217 - DNA, 290 bp, Glycine max
  unsure (1)..(290): unsure at all n locations
tttgggtgcacatgataaaagataggttttcggaacaaaggaaatctaagcttcaaccaaggggagatggaccatttcaagtgcttgaaagaatcaatgacaatgcttacaaagttgagctgcccggtgagtataatgttagttccaccttcaatgtctctgatatacctctttctgatgcagatggagatattcgattgaggacaaatccttctcatgatggagagaatgatgaggacatgaccaatagcatnggcaaggatccacttgaatgacttggaggacctatg

SEQ ID NO: 12218 - DNA, 352 bp, Glycine max
  unsure (1)..(352): unsure at all n locations
gacattgagatgctatatattgagaaatggaagttcttgagaaattcaattggtcataacttttcactcggatgtcagattcagagcaaaatatacagagacgctcgaaattgaacaacggatgctctctagaaatttaaatggtaaaatnttttcacatggatgttatattcgacacataatatatcgagacgttcgaaattcaagaattcaaaaattaaagttctcaagaaatatagagatgaaaaattatgaccatgggtgtacgaatgagacccatgatatatcgatatgctcaaaattcacaaattggtccaattcacaaattcacagagccctaacttttgacatg

SEQ ID NO: 12219 - DNA, 133 bp, Glycine max
  unsure (1)..(133): unsure at all n locations
agtcctattaacaacttccgttggcccatcggtttgtgggtgacaagtggttgaaaataacatttagtgcccaacttgctccacanagtcctccaaaaatgacttaggaacttagagtccctatcactaacaa

SEQ ID NO: 12220 - DNA, 426 bp, Glycine max
  unsure (1)..(426): unsure at all n locations
acaatcagtgtcatactatngatcanaacanagcatgtataaatatgcaatactagactcaaaatatgcaacaaacactagacctaaatcagtgtcacagaaattggaagaaaatattttatccaagcacaaacttcaagccttattccatgtattgtggggaagttatggctggccatatgggtagaggtgtcatanaggagcangtatggaggaagggaccttggactgctgaagaggacaagttgcttgttgagtatgtcangttgcatggtgaaggcagatggaactctgttgctatgcttgcaagtaagaaacaccaaactttnttcacntgtttgtttcttaatatatatgattggattttcacatttataagtgacaatatagcanaaaaacaactgannattgtttcaacttctactg

SEQ ID NO: 12221 - DNA, 314 bp, Glycine max
  unsure (1)..(314): unsure at all n locations
ataataagtcanaatgtgtaacacggatatttctgttatatttatttagaaaggaaaattggctgcgtgaattgctaactttcttttgttactaaactaaactatttcacaactatttggggaacttggtgatttgaatgtgatttcatggaaaagtggacgagcttttctgttntctcatgcaatgaacgttactgtaggaccaacagaagacagagaactaatgactggtcttcacactgttgctgatgtctactgttctgactgccatgaagtgcttggctggaagtatgagagagcctactaggaatcac

SEQ ID NO: 12222 - DNA, 285 bp, Glycine max
ccttctcgcttagtcatctgccttggtgtgggcggcccaccgtctaaggcaatacatgctgagccatactacctggttggtgtccaagatggatcagttaagtatatgtttgagaagcctgcccttacgggatagatcgctcgatggcaggtgttgctatccgaatttgacatcgtctatgtcacctgaaagtgataaagggaagcaccttggcagattatctggcccaacaacctctcaatgattatcagcccatgcatcctaagtttccagatgaggacatca

SEQ ID NO: 12223 - DNA, 305 bp, Glycine max
atgacaatctgaattgctctagagattccattgttcaatttcgagcgtctcgatatattatgaatttgaatcggacctccgagttaaaagatatgaccatttgaatttctcgagagcttccgttgttcaatttcgagcgtctcgatatatgatgcgccagaatcggaacttcgagtgaaaagttgtgaccatatgaatttctacagagattcccgtggtcaatttctagcgtatagatatattatgcgcccgaatcggacctccgagtgataagttatgacgatttaaatttctcgagagcctct

SEQ ID NO: 12224 - DNA, 340 bp, Glycine max
  unsure (1)..(340): unsure at all n locations
nntgatgcaacattggagaggttaatgaaacaacgagatgatgcgctccatgagagggtggatcaaatggagaatagagatcataatgaagaagaaaggaggagaagagggaatgatggtgttcctatacaaaaccgaattgatggtattaaactcaacattcctccatttaaaggaaagaatgatccggaggcctacttggagtgggagatgaaaatagagcatgttttctcatgcaacaactatgaggaggaccagaaggtgaagcttgccgccacggagttttccgactatgctcttgtgtggtggaacaagctacanaaggagagagcaagaaatg

SEQ ID NO: 12225 - DNA, 134 bp, Glycine max
tatatcgagacgcaagaaattgaacaacggaagctctcgagaaattcaatgctcataacttttaacacggaagtccgattcaggcgcataatatatcgagactcacgaaattgaacaacggatgctctcgagaa

SEQ ID NO: 12226 - DNA, 323 bp, Glycine max
ctatacaagtagccgtttggttccaaaaccgccgagccagatggaaaaccaaacaattggagagagattatggtgtcctcaaagccaattatgatgctcttaagcttaactttggcaccctcaatcaggacaacgaagccttacgaaagcaggtagaataataatacaacatagtataatatttagaagaattgatgttgagtctaattaattttaaattaaaaagtatatgtgaatgttgagtgagaaaacaaacttcatgctgaagtgtcctagtaatttttgttctgggtcgcgcctttcaatctagaaactatgctcga

SEQ ID NO: 12227 - DNA, 375 bp, Glycine max
  unsure (1)..(375): unsure at all n locations
acctctccttcctcaggtgtacccaaacccaatcacctggttcaagcacgactttctttctggctttgttggcttgcttgcatagctcgcattnttcttttcaatttgaaccttcacttgctcatgcaacttcttcacatactcagctttagcctgtgcatcctttgcttaaacatagcaatgttaggcataggcaacaaatcaagaggagtcaaaggattaaatccatacactatctcaaatggtgaacaattagttgtgctatggacagcccgattataagcaaactcaacatgaggcaaacagggcttccaagatataagattttctttaaaacagtcctaagcagtgtgcctaaagtcctattgactacct

SEQ ID NO: 12228 - DNA, 453 bp, Glycine max
  unsure (1)..(453): unsure at all n locations
tattaaaaaaatttaattntaatatatattcagtataatgtttttacattattaattaatgagaaatcacgttagatataattatgactttttaagtaattataacaaaatttagcaattntttttttacaattttgctattcataacaattatattcttaagtgacaatataaaaaactgttagtacattctattctaattaaatttcattatagaaatgcaaaattagatgtgtaaaattagcaatggtttttgctntatttgcatttgatgtttgatatatgttatgagcatcaatcgataatatttcacaagatgattcctaagttagaaatgtcaccatctctagtgctgcatgacgaanatcccataaaagaatttcacattaaaatattagatgatcacaaaaataattgatcaatcaatgcttgatgacgacattacaaaaagtt

SEQ ID NO: 12229 - DNA, 258 bp, Glycine max
tcgatggtctgtaatgatcacacagtgatgacctataatgtattgccgccacttcttaacggcgttggtgatggctgcaagctcgcgtacatatgttgaggatctcctagcttggtgaaaactgcttgctgaaaaaaacgattgggtgtccttcctgagatagcactgcacccatgccggaacctgatgcatctatctccacggtgaacggtttggtgaagtccggcagtgctaacaccggagtgttagtgacaacat

SEQ ID NO: 12230 - DNA, 327 bp, Glycine max
  unsure (1)..(327): unsure at all n locations
cacgttgcctaanagncactatcatgcgaaaaagatactgtgtccgatgggtatggatatcacaagattcatgcttgcctgaatgattgcacattgtacagaatcaatttgaagaattgtccaaatgccctacgtgtggggtatcacgtacaaagtcaagatgataaggattatagtagtgatgaaaactcaaagaagggccccctatagaaagtgttgtggtatctgctgatcattctaaggtttaagcgtgtntgctaataaagacgatgcttangaccttacatggcatgcatatgggagaaaatgcgacacaatggtccgtca

SEQ ID NO: 12231 - DNA, 351 bp, Glycine max
  unsure (1)..(351): unsure at all n locations
atattcgacanagtatttcggttatctatcaatattctctcttagttataagtcgaaagttgaaaagttggatactagctaatttaattacaatgattaattagattagttgataatttaataaataaatgtcaagtgacgtaaaatgatatatntaatatttctaatatatttaaatttatttctaagtattaatcatcttanaagtaggataacaatgttntaaattatgtattataaaattntgcatagggtaagttaacaaacaggggaactnttactttccctgattcaatccaaaaaaaaattatgcatggaactaaatangataatattaatttacgaaaaaca

SEQ ID NO: 12232 - DNA, 379 bp, Glycine max
  unsure (1)..(379): unsure at all n locations
agctngccgccacggagttntccgactatgctcttgtgtggtggaacaagctacanaaggagagagcaaganatgaagagccaatggttgatacatggacggagatgaataagatcatgggaagcggtatgtgccggctagttactcaagggacttgaaattcaagctccaaaaactaacccaaggcaacaagggggttgaggagtattcaaggaaatggatgtgctcatgattcaagcaaatattgaagaagatgaggaggtaactatggctcgatttcttaatggtttgactaatgatatccgtgatattgttgagctgcacgagtttgttgaaatggatgatatgcttcacaaagcaatccaagtggagcaacaat

SEQ ID NO: 12233 - DNA, 413 bp, Glycine max
  unsure (1)..(413): unsure at all n locations
gagagattcctaagtattggcatgttccacttgngcttttcccatatagcttgcatcctacatagttagaatgtgaaaagccaattatatttaacgatgtacctttgggataccacaatccaacattggtggtgtccttaaggtacttaatgatcattttaacaactgctaagtgagattccttaaagttagcttgataccttgcacacaagcaaacactaagcataatatttagttggctttcaattaagtaaaaaagtgagccaatcatacatctatactttgattcatccactaatttacctgtttcatccgaatcaagataagtggatgttgccattggagttcatgtntctttgcactcttccatgttgaatttcataattagatctatacagtatnnttgttgacat

SEQ ID NO: 12234 - DNA, 437 bp, Glycine max
  unsure (1)..(437): unsure at all n locations
tggcactggcttgtgttggtntctgttagatatttaaatggctgctccccccatcctaaacaatacattggcaataagcttggacttggtattacctctgtagccatttggggctacagcttccatgctaagaactaaagccagcgaaattttgtgaactctcggcagatctttggccaggcttattggcagcaatatggcgctgcaacccattccactcaggttcacactctttacgttgctccggaatccaaacttgttaatgatcattgatgtaatggatggtgtaggacagaataggctacagtttgacacaaggatgtcaaagctcttggatacactntgtgtttcacaaggaggtctttgacaattctgaatagaaacgattcaccttctgcttgcgcgcgcctcatggaatcgtccggggggagctcatg

SEQ ID NO: 12235 - DNA, 350 bp, Glycine max
  unsure (1)..(350): unsure at all n locations
gtttgtggagattcagtttgatcaanaggggagaatntcaggagctgctatcataacatatntgctcgaacgatctcgtgtctgtcaagtctctgatcctgagagaaattatcattgcttttatatgctttgcgctgcaccacaagaggtacattacttccatttcggataactaatttaggcctatatagttaagatttgcttccatggtatgcgaatttgatgtaagattaagatctgcttccaagaaagtaatgattttttctctttcaattaatacaagttagttcatgaataagaatattgcttgcaagaaattaaagattggctgcatactctactattttctg

SEQ ID NO: 12236 - DNA, 417 bp, Glycine max
  unsure (1)..(417): unsure at all n locations
tcagcgtctcgatatattataagcatgaatcggacctacgtgtgaaaatntatgaccattgaattatttgagagcttccgttgttcaatttcgagcgtctcgacatattatgcgcctgaatatgacttgcctgtgaaggttatgaccattgaatatctcacagagcttccgttattcaacttcgagcttctctatatgtgatccgcctaaatcagacatccgagttaatagttatgagcaattgaatttctcacaagcttctgtagttcaatttcgagcatctcgatatattatgcgcctgaatctgacatctgtgtanaaagttatgaccattntagtnctatcggagccttccgtttcaatttgagcgtctctatatgtgatgactcgaatcggacatcgagtagaagttatgac

SEQ ID NO: 12237 - DNA, 384 bp, Glycine max
  unsure (1)..(384): unsure at all n locations
tcttagtttcagatgatgcacatgggtgtgtagctacctcatgcactcctctaatgactatggcatcatttctggcgctaaactgctgggagttggaagccatcttctcaattaaatttctggcttcagcaagagtcatgtctccaagggctccaccactggcagcatctatcatacttctctccatattacagagtccttcataaaaatattggagaagaagctattctgaaatctgatggtgggggcaactggcacatattctcttaaatctctcccagtactcatacaggctctctccactaagttgtctaatacctgagatatccttcctgatggctgtggtcctggaagcanggaatattttttctaagaatactctct

SEQ ID NO: 12238 - DNA, 349 bp, Glycine max
  unsure (1)..(349): unsure at all n locations
taccttgatatacttcagctgaattctgcanagacaactgatagcctggatgaattgaactccactaatcaagttaagatatagacatggatgaaaatgctgattcttttgtggatgaatctgttatggaaaaggttctccacaagaggagtttgaggatgcgtaaatgcaaagagcttggcaggttttgtttgatttcttgaattttccatttggatattgcatntggtatcacatgtgcttggaatggaatagtaatgatcaagagtgtgtgactgttggtttantttttgtannattgttaatttcttttccattccaatttcatatccaaactatgagttagtct

SEQ ID NO: 12239 - DNA, 449 bp, Glycine max
tctctgatagccaatgtgtgagtcccgttcagggtagtttcgatgaataccggcctcgccgtgatcaaaaatgagaaggaggagttgattcctactcgggtgctgaacagttggagagtctgcattgactataggaggcagaaccaggttaccaaagaggaccattttcccctgccattcattgaccagatgcttgaacgcctggtaagtaaatctcactactgtttccttgatggtttttctagttatatgcaaatcactattgctcctaaggatcatgacaagaccacattcacctgccccttcagcacttttgcctataagaagatgccttatggcctgtgcaatgcccctggtaccttacagcggtgcatgatcaatatatttagtgattctttataacatttcctagaggtgtttatggatgatatcactgtatatggatcgtc

SEQ ID NO: 12240 - DNA, 331 bp, Glycine max
  unsure (1)..(331): unsure at all n locations
gctctgataccactngctaaacaagtgacctcagatatcttaagaagggggggttgaattaatatattacaaattatttccccaattaaaattctatttaactttctattcaagttataaattcccttaataatgaatatcttagatgttgattcaaatagaacaatctgaatatgaatataaacaataataaataaaggagtttaatggaagagaaagtgcacactcagatttatactgtgtcggccacacccttgtgcctacgtccagtccccaagcaacccgcttgagagttcattatcttgtaattcctttacaagttctaacacac

SEQ ID NO: 12241 - DNA, 468 bp, Glycine max
  unsure (1)..(468): unsure at all n locations
tcgtccgaaactacgtgtcgagtctgtggcgatgagattgtatacatggaaaatggngagctgtntgtggcttgtcatgtgtgtagatttcctgtttgtcgaccgtgttatgaatatgagaggagtgaagggaaccagagctgtccacaatgcaacactcgctataagcgccacaaaggttagttcagctctttaagctttgtgttatgtattaatgtattaggacaaaacatagatgcagttccttacatgcatttggtgatgttctcagattataagaattggagttttatcttgataatctgggtaataaatgtttacattaaatgtccaagtggttttgggaccaccgtgtttctgaccaaggataaaatngaaaataaaaaaatccgtcagtttgaagctgaaattctaattctgattagagaataacaaaacacctaaagaaatgcatcttagtatgataac

SEQ ID NO: 12242 - DNA, 404 bp, Glycine max
  unsure (1)..(404): unsure at all n locations
agtgttattatgtttataatatatgtatgtcttgagagnattatgataacaaaattaattgaaaatcaattagagaacatcaacccttcaaaattgtgtcctctcatagttgaagaanaaaaagatgtcacatctaattattcattntttaagaaaagtacatgtgattgatataattaatataatttatataattctaattatagaaattgaaaccaattggtgatatcactataagataagagcacatangacaaggaatgctctgatactaaatggagtatttaatttaatgcacattcttttgaataatttcaattattatctttatataagatatatggaatctttgtattataaaacttctataggtgctgtgttcgaggatgtntctttacaatata

SEQ ID NO: 12243 - DNA, 280 bp, Glycine max
ctgagagaaccactccaagtctagatacttgggtattctcacattcttcacaacatatattatcctaaagtcattcttcttactatcatccataaaccttgtatcaagcttggtgagaacagcttgagagcactgaaattctgataccaggggacagatgtcgtacaggatgtcacgacatcacgctttagaacatgcagtttatgtgtgtccgtatgaacagattaaacaagtaataacacaagagaattgttacccagttcggtgcacctcacctaca

SEQ ID NO: 12244 - DNA, 397 bp, Glycine max
  unsure (1)..(397): unsure at all n locations
actcggagatctgattcaggcgcataatatatcgagacgctctgaaatgaacaacggaagctctcgagaaattccaatggtcattacctttaactcggagtctgatttaggcgcataatatatcaagacgctcgaaattgaacaacggaagctctctagaaattcaaatggtcataacttntcactccgagttcgattcaagtgcatgatatatccagacgctcgaaattgaacaatagaagctctcgagaaattcaaatggccataacctttaactcggaggtccgatttaggcgcataatatatcgagacgctcgaaatttaacaatggaagctcttgggcaattccaatggtcataactattaactcggacgtccgattcgagtgcaaaatata

SEQ ID NO: 12245 - DNA, 338 bp, Glycine max
tgaatcggatgttcgattgtgtcccataggatatctagacgctcgttatcgaaatcggaagctctaagaaaagacaaacgacaataactttaaactaggatgtccgattgcgccctgcaagatatccagacgctcgaaattgagaaccgaagctctcagataagtcaaacgacaatcactgttaactctgatgtcctattgagccctgtaatatatcgagacgctcgttattgaaaactgaagctctaagataagtctaactacaataacttttgactcggatgttcgattgagtcccgtattatatctagactctcgtaattgataacagaagctct

SEQ ID NO: 12246 - DNA, 430 bp, Glycine max
  unsure (1)..(430): unsure at all n locations
ctgctatatttcctcgttgtttctggttcatgcaggagttattaagctgtgacttacttttcctgttatgtgaaattgcagacgggcattctgggacaagaggatttcacacgatgtcaacatatatgctctgggtgaggtatgctctgtaaatcaaaaccttcaaatacttgtttcaatatgcttcgaggagcattgataattattgatcctcgcaactctaaaattatgctactaatatgaacttacaggatatgtcttcaaaatcactggtggttgtgacaaacaaggattgccaatgaagcatggagtgctaacgacctgctgtgttcatcttttgctccacagaggtagaactgtnatgaagcatcgatcttcaaattgtgatcatttatcatattataatgtgacatcatctgccacatttgtt

SEQ ID NO: 12247 - DNA, 440 bp, Glycine max
  unsure (1)..(440): unsure at all n locations
ctgcagctagtagacattcacaccatgaatccttattattactacaccanaattcttcatgaatgatgaatttcataacattaataggatacaaactntgtttattcttataactcataaaacaattatatatatgcttggaattgatttaaaaactcttaagaaaacacttagcataataaaacactgaacatcagcagttttgaaataataataatgataaaatctaagtacattttgaaacaaatatattataataataagataaaanaatctaatatattagcaagaattgaatctcanaatggtgagtctataaaataaataagagaggtcatatntatantttcaaataatcataattaagtacgtagttataattgattgaatgtgggggtttttttagtacggataacatatnaaaatagtgttttttttaa

SEQ ID NO: 12248 - DNA, 447 bp, Glycine max
  unsure (1)..(447): unsure at all n locations
gctacttcaacatctgcctgcagntatataatattgttatatgtatttatttggatgaacatacactcattaatgcataattaagaattagacctgggctgcagtgattccttttacttcgctataatctcccttctcaagcctttgattgtctatgttaacttctttgcctctgagactgtttaactcttcaacaggccattgcaccaattgtctcccagtaaaatcgagccacacagttcgtggaatcgcctaattattntaccagacacatacatgcatattacaattcctttaatttgtataaggatacaaaaataaaacacttatagctgaatgccanacanaaaacatganagggagttagagattcagaatcgagcanagattgagtaaatctagaaatatctctctcaatccaggaaaaaaaatattgaanacatatgt

SEQ ID NO: 12249 - DNA, 338 bp, Glycine max
  unsure (1)..(338): unsure at all n locations
acactngtaacaacactttgcttgtcctanattatgtagattntccccttagatgtacagatgataanacttagtgaagtcacgaacaagatcacggtgaccctcaacttagtgaagcctacactattagaaattacactttcaacatcggttattaggacattctacatcagttctaaaaccgatgttaaaagtgccggtgttgaatgtatcatcgttaagatcggttntgaaaaatcgatgttaacataaatacaataacattggttgtctaaatacccaatgttaaacacaatgaactacaacaaaaaaagtgtatgcgtgatgaaagttgacat

SEQ ID NO: 12250 - DNA, 368 bp, Glycine max
tcacaaagagaatcatcttgatatgataactctggaagttctcttacaaggctatgcttttgaagcgttgagattaacctcaagctagcatgaccaagcttcttatgtcaaacccaataatgctctttgactgagagtaggcatgaaacttttggactagacagatcaccaagtttaatcttatacagatttccttgtctcttagcctagaagagtgaagagttttccttgttctcaatgatacacatatccttgttaaaagtgacattgtatccactatcacataatttacttatgcgtaagcaaatatgcttcaaccctttaacaagcaaaacattatctatgaaggataaggaggaatacatact

SEQ ID NO: 12251 - DNA, 308 bp, Glycine max
  unsure (1)..(308): unsure at all n locations
ntngactgttcactaacaccaagaaaaatgcntttttcttctttgtcatctagctntcttctcttgtgatccggaatgtgagcataggcaacacacccaaaaatttggaaatgatctactgctggtctttccccgctccatgcttcctctggtgtcatattttgaacaacaagtgtgggacttctattcaaaatatgaatgctccagttgacagcttcaggctagaaagttttggaaactccactccttgtcaaaatactccgcaccatgttcttaattgtacaatttttcctctcgcacacaccatt

SEQ ID NO: 12252 - DNA, 175 bp, Glycine max
agagattgaagccttcattttgtactgtcttcgtgcgaatcacttttctctcttgataaatagtatttcgtaaatcccaacggtagaagtgtttaccattgaatcgggaaccaggtgtccaaatttcatgacgatccaatggtttatgattccgggatcgtagttttactggaca

SEQ ID NO: 12253 - DNA, 476 bp, Glycine max
  unsure (1)..(476): unsure at all n locations
agcttgcaattacaaatgaggggcataacaaaaagtctattatactacaaaggaagcaaaaaccaaacacaatagtgtccgtaaaaaatggttgaatttccaatggcaagtatagaacaatttattctcgtttttttttttccttttgaatacttcaaatttcattttgtctcggttaattgtgggaaagcaatattactatggtgttggcacattttcatcttgcaattgtggaagcacaagtaggatcatctttgtttgaccaactttctttaattcgacaagcctgcattggtctttcaatttggactacttctgcagcttccttctccaattgcctacaatatcttccaaacgtttctacaccaacctgaagtctaaaatctatgccaaatagaaagctcatctcgaacctgtttaattcagatgtgctcactcctccaacttttgcatagtangcattgttgtagaatctg

SEQ ID NO: 12254 - DNA, 426 bp, Glycine max
  unsure (1)..(426): unsure at all n locations
agcttgaaatacagaatagaggctctgagcttaatcttacgataataactttttactcggatgtccgattgtgtcccgtagtatatcgagacgctcgaaattcaaaatagaagctctgagcaaaatcaatcgacaataacattttactcgggtgtccgattgtctcccgtagtatatcgagacgcttgatattcaaaatagaagctctgagcaaaatctaacgacaataaccttttactcggatgtccgattgtgtcccgctgtatatcgagacgctcgaaactcagaacagaagctctgagcaaaatcaatcgacaataactttttactcggatgtccgattgtgtcctgatgtatatcgagacgcttganattcagaatagaagctctgagcaatatcaaacgacaataactntttactcggat

SEQ ID NO: 12255 - DNA, 470 bp, Glycine max
  unsure (1)..(470): unsure at all n locations
gaattcattaatcttcttttccaactaaaaaccattgtgagggggaagcatatgacgaaagttaagaatctttttatttgacttcccatttaggtaaacaaaatgggtagtcaaagttatgaaacccttagtattaatagatgtccataaatcagaagttaaacagatcctgccaggaatagcacacaacagttctttactgatggttttcttcctctcatatattctcaacatattagtcttaaaagtatttctagaaattggttaattgaggacacaaataacttatcaaagcctgaaactctggatacttaacaaaaatgaagggcaaattacgcctaatcattagattacacaacaattcgcgtgccatcatttgatctatctctttggccttaaactttccttgcatgtctaanatcatttgactcatatcttncaaattttttatctcacatctcccattatga

SEQ ID NO: 12256 - DNA, 445 bp, Glycine max
attcaacgacatactttattttgatgtctgattgagtccgaatatatcgagacgctcgaaattgaatgttgatggtcgttgcaaattgaaacgacaataactttttactctgatgtctgattgagtcccgtaatatatcgagacgctcgaaattgaatcttgatgctctgagcaaattcaaacgacaataactttttactcggatgtctgattgagtcctgtaatatatcgagacgctcgaaatttaatacgaaagctatgagcaaattcaaacgacaataattttttactcggatgtctgattgagtctcgtaatatatcgacacgctcgaaattgaatgttgatgctctggtcgatttcaaacgacaataatttttcggccaacattgcagaattttttacaaacactggtcgataatatttctttatggtagacgaagtttt

SEQ ID NO: 12257 - DNA, 472 bp, Glycine max
  unsure (1)..(472): unsure at all n locations
agcttaggctttgaaaaatgtctaagtgagtttattttgatgtcagaagaacgatgctggaatagtcattgtctccttgtatgttgatgacttacttatgacaagaaagtcaaaagagctgattgaagaatttaaaggaggaatgaaagaagcctttgaaatgactaatcttggaaaaatgtcatttttcctttgtatgcaggtgcaacaagatagaggtgaagtctttgtaagtcaagaaaaatatgcaaaggaaattcatagaaagttcaagatggaggaatgcaagccaattgcaacgccaatgaatcaaaagttgaaattcagcaatgaagatggagctganaaggttgatgaaaaattgtacaggagcttaataggatgtctgatgtatttgactgcaaccaggccagacattacctatgcagtangcttgttgtcacgatatatgcactgtgctagtgagattcat

SEQ ID NO: 12258 - DNA, 521 bp, Glycine max
  unsure (1)..(521): unsure at all n locations
agcttatgaatgatatgaatcgaactcattttctatattcaatttctaattataattattatccatactttatttatttatttattttatcaagaaacatttaatgtgaatttaattaattaaaacacgtcacttagtaaatcattaaaatttatacattaattatatttttgtattaaattaaataatataataatgaaggaaaaatccctcgagaaaaacataatttatagaaatgaaccactcctctcacattaaagttctaccaacacatgtatggggcgtatacaaatattgtttttatcaggcgtatgagaatggttctatagtacccttttgagatcctatccattgttatccatattgatgatccatttttgtgctcaagagctactcatattttttatactagtaataggtataattnttatttgtaataaaatactcatacaatgttaaattggtttctagaatactttttaatgttattaatataatatntataaataggtacatttgtc

SEQ ID NO: 12259 - DNA, 590 bp, Glycine max
  unsure (1)..(590): unsure at all n locations
agcttgcttctacacttaagtgtttggggtgtagttttataaaatgttggggggagttaaaacaaaatgggcttttcaaataaaaatccgacccactttaagtgactcagtacaaaaacattgcatttcattaagcttgcgtttagtgatcacaatccatatgttggatgcatgtgtatagtgcacaagacttactaagctcattggacgataggtcctttggatgcatatcaatgtgttgagaccttccacataaatttgaaacttcattccacaagaagcatgccaagcaaactcttagcgagattaacctatcctcagtaaagggttttgtaaataaataaacaagttgatctcctgtagatacaaaatgtaattccatagtacccttctaagtgtgatcccttatgaaatggtgttttatttctatatgtttggctcatgaatgcatgatangattnttagaaagatcaatagcaacaatattatcacaaaggatagtaatggtactctcanataggttatagtcgtcaagctgatgtttaatccacaggagttgaaaacaaaaacatgcagntgatatatactct

SEQ ID NO: 12260 - DNA, 470 bp, Glycine max
  unsure (1)..(470): unsure at all n locations
gctttgaaccattaaatgacaataacttttattctgatgntganngaggnctgtaatataacgagacactcgaaattgaatgttgaacctctgagcaaattcaaacgacaataactttcttctcggatgtttgattgagactcgtaatatatcgagacgctcgaagttgaatgtttaagctttgagctaattcaaacgacaataactttttactcggatgcctgattgagtcccgtgatataacgagacactcgaaattgaatgttgaacctctgagctaattcaaacgacaataacttttttctcagatgtttgattgagactcgtaatatatcgagacgctcgaagttgaatgttgaagctttgaactaattcaaacgacaataactttttactcggatgtcagattgaggcccgcatatatcgagacgctcgaaattgaatgttgaagctctgagccaattcaaacg

SEQ ID NO: 12261 - DNA, 607 bp, Glycine max
  unsure (1)..(607): unsure at all n locations
atccttaagtcacctgcggcatgcaagcttcataaccattaccacaccaccctactacatttctacctttagtcttggtcttagagatggcttgtgaaaccaagtcatggttggttatgtttcttgttttcttggttgctaattgcatgcaacattgtgtccacggggtgtctcaagtgccttgcctttttatctttggggactctatgtctgatagtggaaacaacaatgaacttccaaccacttcaaaatctaatttcagaccatatgggatcgactttccattaggaccaactgggagatataccaatggccgaacagaaattgacataatcagtaacatttctttacactaattaagatcctcttgtttttccttaaagtatatatttagcattcagtacagcaattaaagattntaaattcaaacctcattatgaattgttttgagttgtgatggactaccttctgttaattaactcancaattttttagtagtggtgaaagaatannaactatatttatntatagagccaagtgtcctttctcttgctctatacatttttgtcaagctcacactagagttctacaatngcagctcaatttc

SEQ ID NO: 12262 - DNA, 555 bp, Glycine max
ttttgaatcatgaatcataatttatcgaattctaagataaaaaaacatcaaaaatagcttttaatatatatataaatgataatgatgtgaatactcaatgtataatttaaactaaaaaatcgccgtaagtctcacaaaacgaaatcacaactcatactctacttgatatgtgaaacctttaatttaaagataaaagaaaagcaacggacaaccaaatatagtgcataaagagagagtgacagtgtgaaacccaatttagaaaataaaatagatatctgaatatcaagtgtgtgtgtaaaagatgaccttcattccttttattaacagcttagctataaaacatttcatttctttataagtagtaaattaaagaaaaaaaaataaaatcatgaatgttgactgtgcgtctatcgtgatcaaacatgccatcatcatgattcaattctagtatctggatcatcacatcatgatgacagtcaatattgtgattcaatctgaatgaagatccagtatatgttcttgtgactaaacaatttctactaaaaccaaactctg

SEQ ID NO: 12263 - DNA, 550 bp, Glycine max
gtttttgttgtgttactattccacatgttaaaccttttcaaaacatctaaaatatacttcttttggtgcatgaaaattccctgttcactgtatgcaaactccaatcctagaaagtatgataatgttcccaggtctatcatttcaaattccttcttcaaattctgttttagtgagtcaatcccaattgagctactcctagtaagtgatagatcatccacatatagacaagtgatagatcaatcccaattgagctactcctagaaagtatgataatgttcccgctccttcagcttgcataactctattgtctgcaaaccttacattactcttctgcattgcatcaaaattgacaagccaatccctatgtccagtcatatggtttgagcatccagaatctatgtaccaagtttcattattatgagattctgaatcggtaatcatcatcagcatcaagggttgttcttcaaagtctgcttcattctcttctttggccatatgtgcttgataatcattgtgtgattgattccccctgtgatctatgctacttggc

SEQ ID NO: 12264 - DNA, 540 bp, Glycine max
tttcgtgaaattgaaatggtcataacacttcactctgatgtccgattcaggcgcctcatatatcgagacgctcgaaattcaacaacggaagctctcgagaaattaaaattggcataactttccacttggatgtccgattcaagcacatcacatatggagacgctcgaaattgaagcacggaagctcttgagaaattgaaattgtcataacttttcactcggatgtccgattcaggcacatcatttattgagatgctcgaaattgaacaacggaagctctcgagaaattcaaatggtcataagttatcacacggaggtccgattcaggaacatcacatattgagacgctcgaaattgaacaacggaagctctcgagaaattcaaatggtcataagttatcacacggaggtccgattcaggaacatcacatatcgagacgctcgaaattgaacaacggaagctctcgagaaattgaaatggtcataacccttcacacggatgtccgattcaggcgcatatatatcgagacgctcgaaattga

SEQ ID NO: 12265 - DNA, 499 bp, Glycine max
agcttgatgaatctggaatgacacatgcctatcctgttatattatgggtcagccctgtgccctgagacaccatgatatgctgactcactgcgacacaacatacgacccggatacttgattcctacaaggatcatggcctaatgaataatgtgaattgattaccttgcttttaactcagcgaccgcgatatagccctttacctcttcccttcctggagcatatgcgagacaggctacccgaaccagctttctattgctatctagatggatactccgggtataatcaaattcttgttaagataggggatcaagagaaaaaacacttcacttgcctctttggactttgcaatgcaccagccacattccaaaggtgcatgaatgccatcctttttgacctggtagaaaaatgcatagaggtgtttatgcatgatttctctgtattaagagattcattcatgccatgtctcatcagctttgtaagtcctagaaagatgcattga

SEQ ID NO: 12266 - DNA, 524 bp, Glycine max
  unsure (1)..(524): unsure at all n locations
agctttaggctcaatggccccacatagagaatggcctaggtgtagccatgacgttcaaaggtatggtggagcattaacattatcagtgaaggcctgacacttatggcatttcctcacatggatgcaacaattgctctccatagtgagctagtaatacccagttctcagaattttctaggccatggcatgtccattggtatgcgttccaaaggatcctttatgcacctctactagaatttgctcagcccctttagcatccatacaccgaagtagtaccatgtcatggttattcttgtataggatattcccactcangaagaagtcggtcgccaaccttcacaacattcttttatcgttgtcagaggcctcccgtgggcattccttgtcttcgatgtatcgnttgatattgaagtaccaaggcttaccatctttctcttcttctattaagcaacaatgtgcaagctcatcacgacatctgaattcaatgtacgacaaatctccatgcgggcttancaggaacatgg

SEQ ID NO: 12267 - DNA, 371 bp, Glycine max
tagctttgagcaaattcaaatgacaataacttttgattctgatgtccgatagagtcccgtattatatcgagatgctcctaattgaaaatagaagctccgagccaattcaaacaacaataactgttgactcggatgtccgattgtgtcccgcaatatatcgagacgctcgaaattgaacactgaagcactgagaaaaatccaacgactatacatatttactcggatgtgcgataagggcccataaaacatcgaaacactcgtaattgaaaacagaagctctgagcgaattcgaacgacaataacctattgaactcgggtgtcgcaagtgagtccccgaataaatatctagacgcctagagattgaaatacag

SEQ ID NO: 12268 - DNA, 515 bp, Glycine max
  unsure (1)..(515): unsure at all n locations
agcttgtgttgttgtgtgctgtaaaagatgttccnctaatctaacatcctggaccaccacgtgttatctcacagactttgactgcagttatggtcaaactaatccatggctctctgcttctgggtacagattacagattacacctgtttctgttccttccattaattgctgaagggttatttctactcactaatttcctttgattaagttttataaatttgaattttaacaattaaatttaatgtatttcgaaatgagtacattttaataacaataagaataatgatatattagtaataaaatttcttaacttaatattatttattttcaaatatatatatatatatatatatatatatatatatatatatatatatatatatataaaataaaatatgtcttagctttaatattaccttttaaattatataatttacttatatatggtataatataaaaatgttatgagatagttaattatccctttcatagattataaactctatcaaataact

SEQ ID NO: 12269 - DNA, 363 bp, Glycine max
agcttcaacattcaatttcgagcatctcgatttatttctggactcagtcagacatccgagtaaaaagttattgtcgtttgaattagctcagagcttcaaaattcaatttcgatcgtcttgatatattacgggactcaatcagacatctgagtaaaaagttattgtcgtttgaatttgctgagagcttcaacattccatttcgatcgtcttaatatattacggatctcaatcagacatccgagtaaaaagttattgtcgtttgaattagctcagaggttcagaattcaatttcgagcggctcgatagattacgggactcaattagacatccgagaaaaaattattggggtttgaaatatctcac

SEQ ID NO: 12270 - DNA, 449 bp, Glycine max
gctctgcttctgaaagagattcgattttctcaacttgaatcagtttatcatcattcttgatcctgccaaaggcaaacaatttacatctattgtccctcaaaacattaataaggttattaactgaatatggtaaatttaataaaagaaatactgtagtttaaaaaacacataaaccttcaagtgtggtgtgcagtgcaaaatataagaaatttatgaaattgcaaaaatccttatctaaacaaccagatacaaagaaaattttcaccataaagcataaaatgaaaattaccagagaagaaccaatgagccatgcatatataaaaaaaaaacagagttttgacagaaagggaaaatgaataaatgaatcttactcctgtaatcttttgcggagcatgtaacgcaaatatgcatcagttccatatgggctgatgcccatatatttacacata

SEQ ID NO: 12271 - DNA, 519 bp, Glycine max
  unsure (1)..(519): unsure at all n locations
agcttcttagtttcagatgatgcagatgggtttgtatctacctcatgcactcctctaatgactatggcatcatttctggcgctaaactgctgggagttggaggccatcttctcaattaaatttctggcttcagcatgggtcatgaatccaatggctccaccactggcagcatctatcatacttctctccatattattgagtccttcataaaaatattggagaagaagctgttctgaaatctgatggtgggggcaactgacacatattttcttaaatctctcccagtactcatacaagctctctccactgagttgactaatacctgagatatccttcctgatggctgcggtcctggaagcatggaaaattcctcctaagaatactctcttaaggtcatcctagctcgtgatggaccttggagcaaagtattacagccagaccattgccactccctctaatgaatgaagaaaagccttcacaaatatgtgatcctnctggacatctggnggtttcatggtg

SEQ ID NO: 12272 - DNA, 503 bp, Glycine max
agctttgatgcaacatttggagaggtgaattttatttctagatgatgcgctccatgagaggttggatcaaatggagaatacagatcataatgaagaagaaaggaggagaagagggaatgatggtgttcctagacaaaaccgaattgatggtattaaactcaacattcctccatttaaaggaaagaatgatccggaggcctacttggagtgggagatgaaaatagagcatgtattctcatgcaacaactgaggaggacaaaaaggtgaagcttgccgccacggaattttccgactatgctcttgtgtggtggaacaagctacaaaaggagagagcaagaaatgaagagccaatggttgatacatggacggagatgaaaaagatcatgaggaagcggtatgtgccggctagttactcaagggacttgaaattcaagctccagaaactaacccaaggcaacaagggggttgaggagtatttcaaggaaatggatgtgctcatgatt

SEQ ID NO: 12273 - DNA, 518 bp, Glycine max
  unsure (1)..(518): unsure at all n locations
gcttggtgggactntttgttctaacttacacagcatcactgttatgttattttccataattcttaagtgctcaatatttaaagttgtcgaaattaattctctgaaaaactggctaagttcaacaaatggcttccaaataagttttggtaatgagtcaaatgcaattggaagcaaccgttgcatgaaaacatgacaatcatgacttttcattccatgaatttttctcttgttaagatccacacaccgacctaaattggaggcatagccatctggtaactttagttctttgacccatttaagaacagcgagtctctgggatttggtcattgcataagctgcctttggtttaaagaacttgtcacgaccaacatctaccagctcaagctctttccaattacatatttctgctaagtccattcgagcattgtgtgtatccttgctttttccattgatgtccatcacaatgttaaagacattcataaacacatttatttctgtgtgcatgacatcaatgttat

SEQ ID NO: 12274 - DNA, 562 bp, Glycine max
  unsure (1)..(562): unsure at all n locations
gcttgctaacctatggaagctcctaatatctcccattctttttggggtgggccattctggatggctttgattttcttatggtccacttggacccatttctaccaactacaaaccctaaaaacactatattatctacacaaaaagtacacttctctatatttgcatagagggtgtttttcctaaggactgaaagaacttgcctgagatgttctaagtgatcatctaggctcctactgtacactaaaatatcatcaaaataaacaactacaaaaatctacttatgaaatcccttaagacatgatgcataagcctcataaaggtgcttggtgcattagtgagcccaaaaggcatcactagccattcatacaaatcgaacttggtcttgaaagcggntttccactcatcaccctttttcatcttgatttggtgatacccacttttaagatcaattttgaaaagatattggcccatgcaactcatcaagcgaatcatcaagtctaggaatggggtgcctatactttacaatgatgatgttgatggccctgcaatctgtacacattct

SEQ ID NO: 12275 - DNA, 559 bp, Glycine max
  unsure (1)..(559): unsure at all n locations
agcttatatgagcttaaaatgtaatcttttatggttttctanattaacaattataagaaaccaataagatcttgaaatatatgattctcacaaataatagataaatagtgcatctctttgtccatagtatgacttgtctccgatgcactttaattcctaggaagatgagagaaccaagattttgctttcatgattattctttctgtctctccacgtttgtgataggtagggattagagagaacatttttttgtcaagaagaggaccttatttcacgttagtgtgtattagtgccttttataaccactactcacatcaagtagcagttatctttagaaacttgtgctattcaaccaaatacaatttacgccttaattattatttatttatttattagtccctacataagtcacatgtctctcacataagacattaattttaacattctctcacttgacttatgtgacattactaaacattatggactaaataataaattgattaactaacataatgtgcataaaatgactaacccttctatacatggtacatcataattc

SEQ ID NO: 12276 - DNA, 425 bp, Glycine max
agcttccatcacacatagcagggtttatcctcaattgatacctcctaagcctttcgaacaacttcctcaggttgacaaggtgttcctcctcggtcttagatttggcaattatgtcatccacgtagacctcgatctcttagtgcatcatatcgtggaacaaagctaccatagcccgttgataagttgccccggcattcttgagtccaaaggacatcaccttgtaacagaatgttccccacagggtgacgaaggtaatcttttccatatcctccgacgccatctttatctgattgtaactggagaacccgtccatgaaggaaaacaaagcgaaattggccgtattatccacgaggatatcgatatgcggaaaaggaaaattgtctttgggactggctcgattcaaatccttgatatccacacacatt

SEQ ID NO: 12277 - DNA, 439 bp, Glycine max
cttcaacattcaatttgagcgtctcgatatatgacgatactacatcatacatccgagtaaaaagttatagtcgtttgaatttgctcagagcttcaacattcaatttcgagcatctcgctatattacgggactcaatcagacatccgagtaaaaagtttgttgtttgaattggctgagagcctcaacattcaatttcgagcgtctcgatatattaagggactcaatcagacatccgagtaaaaagttattgtcgtttgaatttgctcagagcatcgacattgaattgcgagcgtctcgatatattacgggactcaatcagacatccgagtaaatagttattgtcgtcggaatttgctcagaggttcaacattcaatttcgagcgtctcgatatattacgggactcaatcagacatccgagtaaaaagttattgtcgtctg

SEQ ID NO: 12278 - DNA, 423 bp, Glycine max
  unsure (1)..(423): unsure at all n locations
agcttcaacatcagaccacttccagttttctggaactacttcacatggatttgatggggcctatgcaagttgaaagccttggaggaaagaggtatgcctatgttgttgtggatgatttctccagatttacctgngtaaactttatcagagagaaatcagaaacctttgaagtattcaaagagttgagtctaagacttcaaagagagaaagactgtgtcatcaagagaatcaggagtgaccatggcagagaatttgaaaacagcaggttcactgaattctgcacatctgaaggcatcactcatgagttctctgcagccattacaccacaacagaatgggatagttgagaggaaaaacaggaccttgcaagaggctgctcgggtcatgcttcatgccaaagaacttccctataatctctgggctg

SEQ ID NO: 12279 - DNA, 434 bp, Glycine max
  unsure (1)..(434): unsure at all n locations
gggcaattntaaggtgtaaattctcgcattgaantgatataagtttaattaaaaacatctaagaaaatgaaggaaaactcttttctaattaagacaaaaataaataaataatcttgcgagacaatatataatatgctaaaattataaatagcttacccagcagccaacaaaaacattaaattcgaacgcaaatttaattaggagaaaataaaatttctcatgtaaaacaataacctttagatggggttaattaatgtccaccaaaaaaaacagtgtatattcatatgaaaatatacttcccgtgttcctatatacaaagtacataaccttcataaaaaaattaatcattaaaattttcaacaattcatttagattttttagatttgtttataaaattattagcacctcatttgcttcatttctttctacctaat

SEQ ID NO: 12280 - DNA, 438 bp, Glycine max
gtcccttttctcgctgtttcgtgttctttgcatttttttcctattattttacttttgatcattgtcagtgtgaaaagtttttacagaagtgccttattaacataataactaaggtttttgatttgctgtgatttgaaaggtttcaagtttcaacagttctttgaactatttctgtgtgttgaagtgatagtttatctataactgcaggatatgaatatccgtgaagcagtaatgagggccgagaaagctttaaagataagcaaacgcaaggactactacaaaattttgggaatttcaaaaacagcttcggctgctgatataaaacgtgcctacaagaaactcgccttacaatggcatccagataagaacgtcgacaagagggaagaagcagaggctaaattccgagaaattgctgctgcttatgaggtctattattat

SEQ ID NO: 12281 - DNA, 436 bp, Glycine max
ctcagcttcacattcaatttcgagcgtctcgatatatgacggtactcaaccagacatccgagtaaaaagttaatttcgtttgaattggctcagagcttcaacattcaattttgagggtctcgatatattgcgggactcaatcagacatccgagtaaaacgttattgtcgtttgaattggctcggagcttcaacattcaatttcgagcgtcccgatatatgacgggactcaatcagacatccgagtaaaatgttattgtcgtttgaattggctcagagcttcaacattcaatttcgagggtctcgatatattacgggactcaatcagacatccgagtaaaaagttattgtcgtttgaattggctcagaggttcaacattcaatttcgagcgtctagatatattacgggactcaatcagacatccgagtaaaacgtta

SEQ ID NO: 12282 - DNA, 439 bp, Glycine max
  unsure (1)..(439): unsure at all n locations
tataaaactcaagctgggctagttatggcgttatgctctttactttatttgttgcccttaagttacttgcgcaaccttgttcatcttcatgttgtgaaagaaattggggtacatattcatgtatccattctttaaagagaaacaagatggcactacatagagctgaagatttagtatttgttcatagcaacctacgacttctctcaaggaatactccacaatatcatcaagaggaaactaaaatgtgggatgtaactggagatgattttgaatcacttgatgattgtggtattcttgaaattgctagattgtctttagatgaaccagagttagagggtgtctttttcaatgatgattgctagtttgtgaaattcttgaagacttgaagttgctaattcatcatcttgctnntataattttnntgtaagaaacaaagcgt

SEQ ID NO: 12283 - DNA, 431 bp, Glycine max
tcgaatcacggggatagatttgccacaacctggtttaatgccacgacagagggtgctcgagacagggcgtaagctcgcaaattattgcaagcgtttcaatgttccatttgagttcaatgctatggcacagagatgggacaccatcaaagtggacgacctcaagatacaaaggaatgaatttgtggctgtgaactgcatgtttcagtttgagcatctgctagacgagactgtggtgttgaataatcccagggatgctgttttgagattgattaagaatgcaaatcctgacatatttgtgcatggcattgtcaacggatcctatgatgtaccattctttgtgtcatggttccgggaggctctctttcattacactgcattgtttgacatgcttgacaccaacgttgctcgcaagatcccatgaggttgatgtt

SEQ ID NO: 12284 - DNA, 165 bp, Glycine max
  unsure (1)..(165): unsure at all n locations
agctntgcttccacaattggtgtaggaggccgcttcgacccatttggtgaaataatctatcgccacgaggatgaagtgatgaccgttcgaagccttgggtttgatggcccctatgacatctataccccatatggaaaaaggccaaggagcgcgacatgacgttta

SEQ ID NO: 12285 - DNA, 436 bp, Glycine max
  unsure (1)..(436): unsure at all n locations
tattttgtttgcaatatttatgttgtgtgtggattgatttctatttagaataaagtttagaccaattggaaataggcatgactgagatcacattgcatgtaactttcatgttgcttatccatattgacctatgtcattgagtgtactaatgtagtagtcattggggtctagttacatttattgatgcaatcctccctaggaagggaccaatcactagaaccatgagcaagaggctccaagaagattgggctagagctgctgaagaaggccctagggttctcatgaaccttagggtagatttctgagcccatgggccaaggttgggtccaattatctttgtacatattagactaggatgtcattatatttggtccttgtatttagggctccatattgtaggtagggtaccctagaaatataggattnttcagccctt

SEQ ID NO: 12286 - DNA, 423 bp, Glycine max
  unsure (1)..(423): unsure at all n locations
agcttgaagcatgcaattnttccagcttactctttctccaactcatcaatggcaggggctatcatcctgtatggaccacaccatggtgcaatggggtctcacttgcaatgacaatgttattccagcttgaatctgtcacagctcgcactgcaaaatagggccagccacttactactacctagattgctntatggcaaaataaaaatcataaattcaacacaaggtaaaggatattcaactattcatcactcaaggatataatatttgggtgcaaaatgttaaatgaccgatatgagttttgtacaatgattccccccgcccccctataaagagtttttatattatcatccaataataatctaacatttatgataagtttgttaacttttacattaagtccttagaagttaaactaatttctaa

SEQ ID NO: 12287 - DNA, 421 bp, Glycine max
catttactacagacctcctcaaccatagttgttatttcaaccacagcagaacaattatgacctctccagcaacagatacaatcccggatggaggaatcaccctaatctcagatggtctagccctcaacaacaacaacagcagcctgctccttcctttcaaaatgatgctggcctaagcaagccatacattcctccaccaatccaacaacagcaacagccccagaaacaacaaacagttgaggctcctccgcaaccttccctcgaagaacttgtgaggcaaatgactatgcataacatgtagtttcaacaagagaacatagcctccattcagagcttaactcgccagatgggacaattggctacacaattaaatcaacaacagtcccagaattctgacaagttgccttctcaatttgtcctg

SEQ ID NO: 12288 - DNA, 237 bp, Glycine max
aaaatgatgctagactaagcaagccatacattccttcaccaatccaacaacaacgacagccccataaacaacaaacagttgaagctccttcacaaccttccctcgaagaactagtgaggcaaatgactatgcagaacatgtagtgccaactagagaacaaagcctccattcagagcttaactcgccagatgggacaattggctacacaattaatataacaacagtcccagaattctg

SEQ ID NO: 12289 - DNA, 422 bp, Glycine max
  unsure (1)..(422): unsure at all n locations
tatgctgcanacatttacaacagacctcctcaacctttcagcaaaatcaaccacagcagaacaattatgacctctccagcaacagatacaatcccggatggaggaatcaccctaatctcagatggtctagccctcaacaacaacaacagcagcctgctccttcctttcaaaatgatgctggcctaagcaagccatacattcctccaccaatccaacaacagcaacagccccagaaacaacaaacagttgaggctcctccgcaaccttccctcgaagaacttgtgaggcaaatgactatgcagaacatgtagtttcaacaagagaacagagcctccattcagagcttaactcgccagatgggacaattggctacacaattaaatcaacaacagtcccagaattctgacaagttgccttctcaa

SEQ ID NO: 12290 - DNA, 342 bp, Glycine max
  unsure (1)..(342): unsure at all n locations
agcttgacaggttcaggcgcaggtgcttctactggtggaggcacttaaatttggttgccaaacctcaaggtgatggcactcacatttttcagattctgcacagtttgtgaaggcaatttgttagaatttttggattgagcttggtttaactgagtagccatttgccccatctgatttgttagactttgaatggaggctcttgtctcttgctgaaattgcatattctggatggtcatttgcctcactaactcttctaangaaggttaaggagaggcctcagttgcttgttgtctttgttgttgttgctgttgtattggaggaggaacatatggcttgcttgga

SEQ ID NO: 12291 - DNA, 406 bp, Glycine max
  unsure (1)..(406): unsure at all n locations
agcttctggtgggacttcttgacttgctttccaatctgacattcaccacagattctgccttcttctattttcagattgggaatgcctctaacagcacctttgtcaatgattttcttcatgcctcttaagtgcagatgtccaaatctttgatgccatattctgacttcatcttctttggaggatagacatgtggaggagtaactggtttcttgaggtgtccataggtaacagttgtcctttgatctgctgcccttcattagaacttcactcttctcatttgtcacaaagcattctgactntgtgaagtttacattgaatccttcatcacacaactgactgatgctgatncaagttgcagtcagtcccttcaccaacagtactttgtccagactangaagtccatcat

SEQ ID NO: 12292 - DNA, 431 bp, Glycine max
  unsure (1)..(431): unsure at all n locations
tcaacattcaatttcgagcgtctagatatattacattattcaatcaaacatccgagtaaaatgttactgtcgtttaaatttgcttggctctccagcattaaatttcgagcgtctcgatatattacgggactatatcagacatccgagtaaaaagttgttgtcgtttgaatttgcttagagattcaacattcatcttcgagtgtctcgttatattacggngctcaattagacatccgagtaaaaagttattgtcgttggaattggctttgagcttcaatattcaattacgagggtctcgatatattacgggactcaatcagacatccgagtaaaaagttattgtcgtttgaatnttctcatagcttcatcanttcaatttgagcgtctctatatattacangactcaataagatatccgactagaaaagtat

SEQ ID NO: 12293 - DNA, 424 bp, Glycine max
agcttcaagaaaaagatggcctcaacttatttcttatttccagaagggaattctatcaatagacctccaatctttaatggagagggttaccactactggaaaacccgaattcaaatttttatcgaggcaatagatctaaatatctgggaagccatagaaatagggccttatatacccaccacagtagaaagagtttcaatagatggtagttcatcaagtgaaagcataaccatagaaaaacctagagatagatgctctgaagaggatagaaaacgagtacaatacaacctaaaagccaaaaacataataacatctgccctaggaatggatgaatatttcagggtttcaaattgtaagagtgctaatgaaatgtgggacactcttcgattacacatgaaggaactacagatgttaatagatctag

SEQ ID NO: 12294 - DNA, 451 bp, Glycine max
  unsure (1)..(451): unsure at all n locations
ggacctataaaactcagcttcacataggagctgcatcatgtgtgatttatagcatcttcatctaagngaggttcttttgcttcctctatctttttattcggtcaattcactttaattccttgttcttcatcttattctccatgtatatccttcattgtcttgtgttttgatgctgtttagagtatattcaaaaaataaaccgattaaatcttagatctacacttgttcttgcatttctatggttcaaattttatatatctactcttgaatcatgtttttgtgttgattttaggttcaatcattttccagtcataatcttcttgtactgaacctttaaatctaaattttattccanaatattgattataaaaaaagcacaaaaatctaagtgtaaatcacttaatctatgttgtcttagagtcatgtntagtcataataattgtcacattat

SEQ ID NO: 12295 - DNA, 437 bp, Glycine max
  unsure (1)..(437): unsure at all n locations
ngacattaatagtttgaatatatttattacctaaattgttgtaattntatttattacatttacttgacaaattataattttgtttattattatctaagatataccatttaccgaatttcaattttaaatgggtgactacaagttgtataaaattcaccatttccatcatcaaagatttcattttaaatcttgagtaatctttatgaatataaaattatgttttattacttatttacttcactttctagcttcaaagtatctatcagaaaaataatcaagccataaacaaataaacgaatcaagcccaagcttcatatattttaaccaactcaagttgaagttttaaatttgttcagtttaaataaacgagtgaagcttgagtaacccattttcttcacaaggcaaacctaaactatagctcagctaaacttgtttac

SEQ ID NO: 12296 - DNA, 420 bp, Glycine max
  unsure (1)..(420): unsure at all n locations
agcttcctaataatgatgaacgattattaacatgtttcctaatatatattgtcttattttatatatttttaatatcactaataactaatttttaacattctatcattcaaaagtatttttaaagaaataatgaattaactttcaaatattttagtaccatattgtgaaattgtgtctaanatctttatttcatcttctaaatcacaaaattgataataaggttcaaaactaattgttaatcacgataagaatcacccatgagggaaaaaaaacctctataaagttcatttacattaaaataaactcaaagataatacagattatttttaaaagataaattttatattttaaaataaaaaggaggggtctaattaggaatgcaaataagacaagactntacttaaacaaggtctgacttat

SEQ ID NO: 12297 - DNA, 348 bp, Glycine max
  unsure (1)..(348): unsure at all n locations
agcttgaccaaccctattctatggatngactcttattaatacataatcaccatccacgatatccaggtctttcctcttcttatcctgataactcttctgcctactctgagcagttctcatcctctcttgaatcaacttaaccttcttagtggtttgttgtaccacttcagatcctaaggtgaggttctctccaagttctagccagcacaagggtgtcctacaccttctaccatacagaacttcataaggagccatgccaatggtagaatgaanactattgttataggtgaactctatcaacgacaaaagctctcccaatttccttttttgtttaatacataagctctc

SEQ ID NO: 12298 - DNA, 331 bp, Glycine max
  unsure (1)..(331): unsure at all n locations
gagaggagacaccacttcactgagaagatgagactagaagaagctcaccaccataggaggccatggataagagcttggaagaagaaggagatgaatgaagggagaggaagagaagagcacgtaattntgtgctctaaaagagctctgacatctgaagtttaatattcaaaagatcaaagttgagaaaatgcacacacatggcctttatttatagcctaagtgtcacacaatattggagggaaatttgaatttctattcacatgtcacttgaatttgagattgagtctgttgagccatattttggagccaaaatttcactaattatgattag

SEQ ID NO: 12299 - DNA, 333 bp, Glycine max
  unsure (1)..(333): unsure at all n locations
gcctaattcgtctaagagctcgtcaatgttgggtatcgganaccgttcacgcaccgtgagtgcatttaaagctctgtagtccatgcaaaagtgccatgaaccatcctgcttgcgaactangagcacagacaagaagggtcctttctagagcattgattcaacctgcgattcaatctcatgtttctggtaatgtggataacgatagggccgtacgttgactggcgcancttgcggcangaggtggatgtggtggtctgtttcgcgggccggtggcagtgaagaaggtggctgaaataatgcacganaatgatcaattaaagattggatacgtgg

SEQ ID NO: 12300 - DNA, 376 bp, Glycine max
  unsure (1)..(376): unsure at all n locations
tcttctccttcacctttcttctctcattattctcccttctctttntcccatgttgttactcccttgatgagcaaggccaagctcttatagcatggaaaaacagtttaaacatcacttcagatgtgttagcatcatggaacccttcagcctcaagcccatgcaactggtttggggtgtattgcaactcacaaggagaagtgatagagataagcctgaagtcagtgaacttgcaaggctcattgccttcaaattttcaacctctaaggtccttgaagattcttgtcctctcatcaaccaacctcacaggaagtataccanaagagaatggagactatgtagagctcatcattgttgatctcagtggcaattctctctt

SEQ ID NO: 12301 - DNA, 442 bp, Glycine max
  unsure (1)..(442): unsure at all n locations
gcttgtcatccagtcttctaacctctttgaccatgctactaangagagttttagcttcagaatactccttactttccattagaaatgctgcaagccttgcctcaactcgctgcctcagaaaggtatgctnttcagcacgtgtccattgcaccatttctttgcagagtgtaatttgtagatcagtagtccctggtatttttgcaacagaatcaattatgcccctcactatctttgctgtttttgccttangaatcaaggaaaagaagggcctcaactgagtaagaaggctatgcagatcctctgccctatnttgttccctgagatgctcagtgaggtttgtgatggcctgttctttcatgcgcagagcatctggagaagaagaaggataatcaagtacctgataaagaatggagatggactcngatgggtctttgcatccact

SEQ ID NO: 12302 - DNA, 347 bp, Glycine max
  unsure (1)..(347): unsure at all n locations
gtctcacgagtgtctcgtgctcatgcaacttttgttagccgtggctatacgagacatcttgccaaacaaagtcaggttaacgataactcgcctgtgctttttcttccatgctatatgtagcaaagtcattgatccagtcatgtntgatgagttggaaaatgaggccgcaattaaactgtgccagttggagatgtattttccctctgctttctttgacatcatgattcacttgattgtgcatctggtcagagaaatcaaatgttgtggtcctgtttatctacggtggatgtacccggttgagcgatacatgaagatcttaanagggtatacaaagaatctatatcatc

SEQ ID NO: 12303 - DNA, 345 bp, Glycine max
  unsure (1)..(345): unsure at all n locations
acaattaaactttgtgcttatcacggtatgatagtgtatcaaatggacataanaagtgtgttcctcaatggacttatcaaggaagaagttgatgtggaacagccccttgggtttgagagttctatatacccttatcatgttntcaaatntaacaaggctttgtatantttanaaatagctccttgagctntgtatganaagctaagttcanttttaattgaaaatggctntataagaggaaaggtagatactactctgtttcacanagattatggtagtcaattcctaatcatccagatatacgtggacgatatcatattcgatgctactaatgactctctgtgt

SEQ ID NO: 12304 - DNA, 257 bp, Glycine max
  unsure (1)..(257): unsure at all n locations
ttgtagaacaatatatcccaacacaccanattattggctntctcagcacattgctttgaaaagaggtattccttcttctcccttcttgcatcgtcaataacctcattgaccaccaaggtactatgaagaagatacctatctttcaagaaggtgttgtgcttttgatcaataactccatttaatactttcatcaacctattggcaagtaattttgcaaatattttgtacaagcaactaacaagtgagatgagtctaaa

SEQ ID NO: 12305 - DNA, 337 bp, Glycine max
  unsure (1)..(337): unsure at all n locations
gtatgtactacgtgtcactatgcagatcataaacgatcatccttttcatcaagcacttcacatgaattaatcantttttatctcatacatatagatatatggngaccctgttcaaaggtttctatgcatgggcatcgttattttttaaccattgtggacgatcattctcgctntacatggatttacctaatgcaaacaaaagctgaggctcgaanactcattatcaccttcgttacatatgttcaaacgcaatntaataaaaccattanaatcatacgtagtgataatggtgctgaatttcttatgaatgaattttatgctcanaggggaatcatac

SEQ ID NO: 12306 - DNA, 386 bp, Glycine max
  unsure (1)..(386): unsure at all n locations
ggaggtgttgctgtatccaatgaatactctgagttctgttcnnttatcaagttggcccttttaacctgtggaacataagagaaacaaacacaaccacagatttttagattttgtaaatctggttcgtaaccaaaccaaccttcaaatggagtttttttgtgcagaactcttgtaggtagtctattcagcaaaaatactgcagtgtttgcagcctccgcctatagctcctttggcaactccttttcatgcagcatacaccttgtcatctccatgatacttctattttttctctcactcacaccattttgttgtggggtgtaaggtacggtgaattggtgctcaatgccaacttcttcacaaaatttatcacaaacatcatttatgta

SEQ ID NO: 12307 - DNA, 450 bp, Glycine max
  unsure (1)..(450): unsure at all n locations
gcttctgttggatcgagtggcctcagaataatttatataggggggttgaattaattattcctagacctttactaattaanaaattactcttctaaggcttttacttatgttgttaagagagtatggagtagaagagaaacttaacagaaagtaaaagcggaaattaaatgcacagcgganagtaaaagagtagggatgaaggaaacaaacacacaagagttnttatactggtttggcaacaacccgtgcctacatccagtccccaagcgacctgcggtccttgagatttctttcaaccttgtaaaaatccatttacaagcaaagatccacaagggatgtaccctcccttgttctctntgaacctagtggatgtaccctccactagaactgatccacaagagatgtaccctctcttgttctcagtcaaacccaagtagatgtaccgtctac

SEQ ID NO: 12308 - DNA, 300 bp, Glycine max
tctgtacctggtgcaagggtctgcggattgtgctcctctgctgaccaccatacagacctttgcccttccatgcagcaacctggagcaattgagcagcctgaagcttatgttgcaaatatttacaatagacctcctcaacctcagcagcagaatcaaccacagcagaacaattatgacctctccagcaacagatacaacccttgatggaggaatcaccctaacctcagatggtccagccctcagcaacaacaacagcagcctgctcttaccatcaaatgctgtggccaagcgaacatacat

SEQ ID NO: 12309 - DNA, 393 bp, Glycine max
  unsure (1)..(393): unsure at all n locations
ttcgagcgtctcgatatgtgatacgactgtatctgaagtctgagtttaaagttttaaccgttagaatttatcagacagctttcgttgttcaattntgagagtctcgacatattatgtgcccgaactcgacatccgtgtgaaatgttatgaccagttgaatttctcgagagcttccgttgttcaatttctagcgtctcgatatattatgcgctcgaatcagacctcctcgtgaaatgttatgaccattagaatttctcgagagcctgcatatttcaatttcgagcctctcggtatattatattaccgaatccggcatccatgtgtaatgttatgaccatatggaatttctcgtggacttccattgttcaacttcgagcgtctcgatatattatg

SEQ ID NO: 12310 - DNA, 415 bp, Glycine max
  unsure (1)..(415): unsure at all n locations
ctttaaagggaagtggtgtcgcctggtntctttcccgctcttctctttcgtaaaatntcttctcttatgtccacaatcttgtccttgtaaccctggtcaagaacatgacgttatgtaaagaactctaactcactcattggttctcaacaaaaattaaaaattactaagtggtaatcatagtttctattaatctttgcatgacataattgaaggatntaattatatgtactgacagaataaaatntattntatatagtgatcggttgataatataaaaaactttgcactnttntaattaaataataataataacaactaacatataanaattagtcaaaccgcgtaattngacaccatacaataatttctcgcanaaatatgtcacgcatactanggttngttattcttaataact

SEQ ID NO: 12311 - DNA, 449 bp, Glycine max
  unsure (1)..(449): unsure at all n locations
aaaaatatttgttttagttncttatatacaaaaaaataataagttatatattgacaaaagaacacagtatatttctcatttaaaataaaatatttctcttagaatttactttatgtcttactaatgtgtccgtggtctgtggatagcatgtcattaaccatcactctcgacaacataataattgttattaaaagatacataaataatgtttgattaaaatatttttcaatctataaaattatggagctnttataaaattaataattactttaatttgtttttgttcctgtctctaaaaaatatgagaataatggtatttatttattgaanaaagattanaactatagagtgaatagtctacatatacactcataatataaataatttttacactcttatttaatgataaactntcgttcaatcacatnattgttatcgtgtgtatatat

SEQ ID NO: 12312 - DNA, 367 bp, Glycine max
  unsure (1)..(367): unsure at all n locations
gaaaaagaggtattccttcttctcccttcttgcatcgtcaataacctcattgaccaccaaggtactatgaagaagatacctatctttcaagaaggtgttttgcttttgatcaataactccatttaatactttcatcaacctattggcaagtaattntgcaaatattttgtacaagcaactaacaagtgagatgagtctaaattccccaaggctntgtgggtcatctacctttgngacaagagcaatgaaagaagcattgctatcccttagaagcacacaattagagtgaaactcaattacaaacttcaaaatatcatcccttaataattttcaaaaagatttagaanattgaagtgtaaccatttga

SEQ ID NO: 12313 - DNA, 384 bp, Glycine max
  unsure (1)..(384): unsure at all n locations
cgttcaattggatacatccaccgcagaataaccggaccacacaaccgaatttccctcacaagatgaacaatgaggtgaaccatgatgtcaaaaaatgatggtgggaaatacatctctaactgacaaatgacaatggcagcctcattctccaagtcatccaattgatgaggattaatgactntactacatatggcattaaaaagaaagcacaaacgggttatggcaactctaactatgtcaggcaagatgccgcgaatcgcaacaggcaataattgttgcattaagacatggcaatcatgagacttcaagccaaccaacttaagatcattgannggcgacaggctcttgatatttgaagagtatccttgtggaactntgacattc

SEQ ID NO: 12314 - DNA, 350 bp, Glycine max
  unsure (1)..(350): unsure at all n locations
atatttttattattcaagcgtagttagtaatcgtggtagttagtaatgattntagttagtaatgatntgagttagtaattatattacttaaattttcaatcaggtaatataattagaattgatatttaattatttgtaattattttagttagtaattatatttaacataaaatataagtgaattcaagacaatattagatagtattatatagatgtatgtaattcttctaagtattatatagtgtaaaaataatctaatgttatattagatagtattagatagatgttatataaatgttacttgttatatatgggagtacgtagatgtgtttaaaacaaagtagataata

SEQ ID NO: 12315 - DNA, 430 bp, Glycine max
  unsure (1)..(430): unsure at all n locations
ctcagctttctttgagaaataaaggcttgctcttgttnttcacccctggtaaatgtcacattcttcttcaccaactcattgagaggtgatgcaattgtagaanaattangaacgaaccttctatagaagcttgctaacccatggaagctcctaatatctcccacactntttggggtgggccattcttggatggccttgattttctcagggtccaccgggaccccatttctaccaactacaaaccctaagaaaactatattatctacacaaaaggtacacttctctatatttgcatagaaggtgttnttcctaaggactgaaagaactttcctgagatgtcctaagtgatcatctaggctcttattgtacactaaaatatcatcaaaataaacaaccacaaatctacctatgaaatcccttaagacatgat

SEQ ID NO: 12316 - DNA, 400 bp, Glycine max
  unsure (1)..(400): unsure at all n locations
gcttgcacattgctgtttgatagaagaagagctttgatggtaaccttggtacttcgatatcaaacggtacatcgaagacaaggaatacccgtaagaggcctctgacaacgacaatggcagccggttttttcctaagtgggaatatcctgtacaagaggaaccatgatatggttntgcttcgatgtgtgaatgctagagaggctgagcaaatgctggtagaagtgtatgagggctcctttggaacacatgccaatggacatgccatggcctggaagattctaagagtagggtattactggctcattatggaaaatgattgttgcatccatgtgaggaagtgccacaagtgccaggcccttcaccgatatgtcaatgctctgctcgtacctttgaacgtctt

SEQ ID NO: 12317 - DNA, 364 bp, Glycine max
cccagctggcctcgaatcagaaatctgtacctgtcgcaagggtttgtggtttgtgctcctctactgaccaccatacagacctttgcccttccatgcagcaacctggagcaattgagcagcctgaagcttatgctgcaaatatttacaatagacctcctcaacctcagcagcaaaatcaaccacagcagaacaattatgacctctccagcaacagatataaccctggatggaggaatcaccctaacctcagatggtccagccctcagcaacaacagcagcctgctcctttcttcaaaatgctgctggcccagcagccatacattcctgcaccaatcacaacaacaacaccccaaaacagccacag

SEQ ID NO: 12318 - DNA, 386 bp, Glycine max
  unsure (1)..(386): unsure at all n locations
tattctaaagcccgattatagttgtaangcttctatcacatccaagcctaatgcctgcaaaccatgattgtctaatatnntcacggattgagccttcttgagcctattttaacattattatgacctggtcttgtgaggaaaaggcagtgatggttcnaatgttataaatagcttcaatagctattttgctagtttcatcttgggctttgatagcctttntagacatacccttgaggagtacaagtcttgtgtagaaacttgcaatgccaataggttgaacaacaatcaatataatggcanatctccatgcaatgattangcccattgtgcatgctatcaccactgctganatagtttgtaccaacagagccattctatctcccact

SEQ ID NO: 12319 - DNA, 300 bp, Glycine max
  unsure (1)..(300): unsure at all n locations
aagcgtcttgatatattacgggactcattcatacatccgagttattagttattgtcggtngactnttcttagaccttccgttttcaatttcgagcgtctcgatatattacagggatcaataggacatctgagttaaaacttattgtcgtttgatttttctccgagcttccgttatcaattacgagcctctcgatatcctacgggacacaatgggacatccgattcaaaagttattgtcgtctgaattcgctcacagcttcagttttcaattacgagcgtctccatatattactggactca

SEQ ID NO: 12320 - DNA, 301 bp, Glycine max
  unsure (1)..(301): unsure at all n locations
agctgaattgaaactaaagctctgagcanattcatacgacataatttgactcggatgtgctattgtgtcccgtaggatatcgagacgctcgtgattgacaacggaagctctgagaataatcaaacgacaataactcttatctcggatgtccgattgagccatgtaatatatcgaaacgctcgaaattgaaaacgaaacctctatgataagacaaacgacaataacttttgattcggatgtccgattaagtctcgtaatatatcgagacgctcgtaattgagaacagaagctctgagtcccg

SEQ ID NO: 12321 - DNA, 324 bp, Glycine max
  unsure (1)..(324): unsure at all n locations
gagcatgatattgcgtctataccgttgactgtttatcaggtatatgagcgggttcaacacctgaacactgtatttgggaagacccacacgaaggataaaagtcagagttgcatatggaagaagaggttcattntctttgatcttccgtactggtgtgatcttgacgttagacattgtattgatgttatgcatgtggagaanaatgtttgtgacagtgtgattgngacgctccttaacattcaaggaaagacgaaagatggcttgaatacccgtcaagatctagctgatatgggtataagatcacagctgcatccaaggtctgat

SEQ ID NO: 12322 - DNA, 360 bp, Glycine max
  unsure (1)..(360): unsure at all n locations
atcttgtntactctactttctcacacgatgaactttactggactctctgtatacaacatcaatgaataaatcaatattagttctatgatcatcttaggttcttaagcaattagccaagctatctagaggaagctcccttcaacttctttgtaacaggaagctccctctttntatattcaagggtagctagctatgggcaagctttaccttgctgatgggaagctagctaagtgttagtgtttggctctactgagctttaaaagattggctaagattntgttaaaacataagcacttagacaatgaaggaaagctggagttgctgcacatgatgtccaacgttatgtcaaggaataagatc

SEQ ID NO: 12323 - DNA, 370 bp, Glycine max
  unsure (1)..(370): unsure at all n locations
tctgcagagtggaatcatttatcgtatctccgatagccaatgtgtgagtctcgtcccggtagtcccgaagaggaccggccttaccttcataaacaatgagaaggaggagttgattcctactcgggtgcagaacagttagagagtctgcatcgattataggaggctgaactaggttaccaaaaaggaccattttcccttgccattcattgaccatatgcttgaacgcctggcaggtaaatctcactattgtttccttgatggttnttctggttatatganaatcactattgctcctgaggatcaggaaaagaccacattcacctgcccctttggcacttttgcctataccgtgcaatgcccctggtacctt

SEQ ID NO: 12324 - DNA, 412 bp, Glycine max
  unsure (1)..(412): unsure at all n locations
agtgtgtgntaaatgtctaaaatataaagaaaattatgtaataatgtttctttgaagaatatnttatcagtgaaaataaaatattttgaatattgaatttgtagtatttttttaattagattaggttggtgttaatgatttattagtgtgttaataattcatgaacgtttcaactttcatttaaaaaaattagtagatcatatttatttgaagaaagtattttgagtatgaaatttattntaatatgaagttgtagtatttttttaattagattaggttcattnttttgtgttaaaaattgataagcgttcaagttgaaagtgttatttgatgatgttntnngtgttcttgtatcatatttanattaatatatttggtagtaatttgtaattacctattttcattttgaagt

SEQ ID NO: 12325 - DNA, 321 bp, Glycine max
  unsure (1)..(321): unsure at all n locations
taataattcanataatacttttaatatattaagattcaatgataaatactcttaatatatntntagtttaattatttattaactcttttaatcgaaaataatatagttcgatttaatatatacatgttttgtgtcatgtaaatattaatattgtctgatgtgtatatgattcatggggcgtgataacgtgatatattgngattatgagagtgtgatgaactgtgtgtaagagacaagtcgagtatatgttaaattatgagatcacgcgtgtattgagatattgtgtggattaagntatgagttatgaattgtacaatcaca

SEQ ID NO: 12326 - DNA, 451 bp, Glycine max
  unsure (1)..(451): unsure at all n locations
ttaagttcttcctcaaaactgtcctaagcaaagntcctttgtcctattagcaacttttgtttgcccatcggtttgtgggtgacaagctggtgaaaataacaatttactgcccaacttgctccacaaagtcctccaaaaatggcttaggaacttagagtccctatcactaacaatgctccttggcaaaccatggagtctcacaatctccttgaaaaacaaatcagccacatgggaagcatcatcaacttttntacatggaataaaatgagtcattttagaaaacctatcaacaaccacaaaaatggaatctctaccatttgcttgttttggcagccacaaaacaaaatccatggataaatcaatccaaggatactccgaaattggcaatggagtatacaatccatgaggctttacttagactntgcctttntacatacaatgcaatgttgac

SEQ ID NO: 12327 - DNA, 300 bp, Glycine max
  unsure (1)..(300): unsure at all n locations
cgagacgctctanatngaatgttgaagctctcagcanattcacacgacaataactatntacttgaatgtctgattgagtcccgtaatatatcgagacgctcgaaattgaatgttgaagctctcagcacattcaaacgacaataactattttactcggatgtctgattgagtcccgcaatatattgacacgatccgaaattgaatatctgacttctgagcaaantcaaacgacaataactctgtactcggatgtctgattgagtccgctaatatatcgagacgctctaaattgaatgttga

SEQ ID NO: 12328 - DNA, 217 bp, Glycine max
  unsure (1)..(217): unsure at all n locations
gctatatatatcgatacgctcganataaacatcgaattctctcgagatattcatatggtcataactnttcacacgaatgtccgattctggcgcataatatgtcgagaggctcagaatcgaacgatagaagctcttgagaaattcatatggtcataactnttaacacggatgttcgatccaggcttattatatatcgatacgctcgaaattaaacatc

SEQ ID NO: 12329 - DNA, 313 bp, Glycine max
agcgtgccttgtcccttgatatattcgagttttcatggtgactatgaatgacaaaatccttgtgataaacgtagtgatgccatgttatcaaagcccgtactaaggcatacaactccttatcatatgttgaatagttaagggtcggaccacttaactgttcactaatataagcaactggatggccttcttgcatcaacacagccccaatcccaacatatgaagcatcacactcaatttcaaaagatttttgaaagattggcaacgcaagtatggcggcattagttagcttttgcttaagaacatagaaagcttc

SEQ ID NO: 12330 - DNA, 432 bp, Glycine max
  unsure (1)..(432): unsure at all n locations
agcnttgcaatattgagaatgtgttctttcattttagttgtcaaagttgataagttcgtttcatttttctaattttattcgtttaattgtttgtattctgataattaaattagttattttagatattataaaatttgtacaaagttttaggtatagtaaattagtagtgtattaattttctatcttaccttagttatagttttaaatggtaaattagatttactttgatgatttaagttttgtacggtaggttcatgtttagttatagttttaaatgatattagttctagttctagtttgaaataatattagttctagttttaattgtaaatgatattagtcttgtacgttaggtttagttntagttaaatatatttaaattttttatggtaggttagttatatgatacattgtattaattntgcgtatata

SEQ ID NO: 12331 - DNA, 443 bp, Glycine max
  unsure (1)..(443): unsure at all n locations
tgataaaaaagaatgtattctctattttttatgtacaaggaaaagggagaaaaaaatanannaataataactgcggcgctctagtctcgggcacattaacgtctcttggcccgcagacatttcaattcccacttattcggaatcgacacagaatangttagttcaggtttagagatngcttatatccttggtttggatntagaannatatttaatccanataaatggaataatggtaattgacgtaattggatangggtgtttacttttttgctaatcattaagaattaatgttatatatanaagtgtaaataatatgaaaactatatctataattacacttatttctatattaaacaacaattgatatattggtagttaatctcagtaataataatttatanataaagcggcaacatatatttattaatattatatttatat

SEQ ID NO: 12332 - DNA, 454 bp, Glycine max
  unsure (1)..(454): unsure at all n locations
catgcaagcttctggcccagtgngcccgtaaaactcactatgataagcggtattattaaaccagacaaagcatcaagcaataaaaccaaaaacagataaagcacctaaactataagataagtaagcttctccagaccatacaagtgcacgccgagcccatgcaaaaggtttggttaagatatgccagattccaccaagtatacaaatggaacccaaccatacatgccccccaattatatcttccaaatcgtccacactaacaatccacccttctcccccaaaaggtgattttaataaatatccaaatataatacttggactaagggtcaaattggttatttttcttacatctccgccccccggagcccacgtatcatatatacctncaaaataaagagccttgaatactagaagaaacgcacctatacctaacaagattaagtgaatacccaaa

SEQ ID NO: 12333 - DNA, 378 bp, Glycine max
  unsure (1)..(378): unsure at all n locations
acttgagcatgcttgtagtatgaatagataaattatcacgtggttctagattactgcggtgtttattaatctatgatacatacataagattattaactctctcaaagatcataacatctaaatgatattttttcacatatatagttgacatngaaatntgttaacaagttatatatacattatcgtaanatatatacaccgcattattttatgagtgtgttgtaactaaaaacataaataagtgtatattaacacatgtctataagatgtgttaattcacacttatntattctttaattagaataagtctatatattatagctaaagatatctcgaatacatccagatgtacttataattacttaactatatcatata

SEQ ID NO: 12334 - DNA, 459 bp, Glycine max
  unsure (1)..(459): unsure at all n locations
tcacctgcggcatgcaagcttgctaacccatggaagctcctaatatctctcacactntntggggtgggccattcttggatggctatgattttctctgggtccacttggaccccatttctaccaactacaaaatctaagaaaactatattatctacacaaaaggtacacttctctatatttgcattgagggtgtttttcctaaggactgaaagaacttgcctgagatgtcctaagtgatcatctaggctcctactatacactaaaatatcatgaaaataaacaactacaaatctacctatgaaatcccttaagacatgatgcataagcctcataaaggtgcttggtgcatttgtgagcccaaaaggcatcactaaccattcatacaaaccaaacttggtcttgaaagcggttttccactcatcaccctttttcatcctggattggtgataaccactttta

SEQ ID NO: 12335 - DNA, 434 bp, Glycine max
  unsure (1)..(434): unsure at all n locations
agctttatatctttctggcgccgagctatnctcccgcaggacctcccctacagtatcgtcgccgcagtagagtctaaccaccaagttcgggatggattggtgtggttcctctacgcctaggacaccagaatatcgaaccatgaacgaagaaaggcatgagataaaagcaaatatattggctattcattgtgaggccctaattctcgactggaggggacaccanaggcctatgcccttccattccttggatagatagagaggaggggcagagtttttggttatttcatgttgtcaaagagttgaacaatgaaaatggatgactagtgcctgatcgaattgatcggatcatgtatgaacaaggttcacgtctaccggtctgttaggatgcctcagctgcatacatcactgcacttccacttgacacctatcattaa

SEQ ID NO: 12336 - DNA, 444 bp, Glycine max
atgctatcagtcacctgcggcatgcaagcttctatatttgttcgttcctaatttctctacaattgcatcacctctcaatgagctggtgaagaagaatgtggcatttacctgcggtgaaaaacaagagcaagcctttgctttgctcaaagaaaagcttactaaggcacctgttctagctcttcctgacttttctaaaacttttgagctagaatgtgacgcctctggagtgggagttggagctgtattgttacaaggtgggcaccctattgcttattttagtgaaaaacttgatagtgccaccctcaactaccccacctatgataaagagctttatgccttaataagagccctccaaacttgggaacattaccttgtttccaggaatttgtcattcatagtgatcatcaatcacttatgtacattagaggacaaagcaagttaaac

SEQ ID NO: 12337 - DNA, 377 bp, Glycine max
  unsure (1)..(377): unsure at all n locations
catgcaagctntaattctgatgagcatgtctgattcattctgaaccacagaaatagcattacactcaactaaacttcctcgagacaatgcatcagccaccatattttcttaaccctgcttctattctatgcaaaaatcaaattctatgagtttaactaaccatttctgctggaatgctgtagctaacctctgatccaaaatatacttgagactcctatgatcggttcttattacaaacttcttaggtaacaaataatgtctccacttctgcactgcaaagacaacaaccagcaattccttcttataagtggatagggactgttgctacacattcaagctcctgctgatgaaggctatgggatgattgtcctgcatca

SEQ ID NO: 12338 - DNA, 431 bp, Glycine max
  unsure (1)..(431): unsure at all n locations
agcttttagaatatataataaaagaactatgtctattgaagaataaattcatgttactttntatgagactaactctattagcccaagagaggatatacttgatgatattacaaatactttagaagatacgcttattcatgaagaagtccacaaagacaaagaagacaaaaatagtagagatgctcaatccaaagaaaatcaaataaatgtggatcttccaacggagtggagaacttcaaggtaacaccctcttgataatatcataggtgacatctcanaagggataacaactcgacactctcttaaagatgcatgcaataacatgagatttgtctctttaattgaacctaanaacataaatgaagccataattgatgaacattggattatngctatgncagaaagaataaatcaatttgaaagaaatcaag

SEQ ID NO: 12339 - DNA, 288 bp, Glycine max
  unsure (1)..(288): unsure at all n locations
gctatatatatcgggcgctanaattgtattcagaagctcttgagttattcaaagggtcataactnttaactcggatgtccaattcatgcgcatcacatatagagacgctaaaaaatgaacaacagaagctctccagaagttaaaacggccataagtcttcacactgatgtccgaattaagcttatattatatcgagacgctcaaaaattaacatcgtaagctctcgagaaattcaaatggtcataacttttcactcggatgtccgattcaggcgcataacatatacag

SEQ ID NO: 12340 - DNA, 449 bp, Glycine max
  unsure (1)..(449): unsure at all n locations
ttcgatagcgggaagaganaaaagattatccatagaaaaactaaactcaagccgagaagcaaagaagcaactcacggtttgcgaataattttgaaaaggagactattagaggccaggagaggtgcaacagagagtacccggtgaaagcgcttaacaacttttgaaagtcagacacgacgtcattctcgccgccaccaccgtgctgtgcagaggcaacatcgactgtgtgcatctcagctcctgcgaaatcctacaacagaccaacgacaacaacgacaaatcgataattctaaggcttatttgcgattaggagcaaaaacgaacatcgtatgacgaagggaaacctggtcaataaggactggtgaatatgagaaaaggaggaagctggtttggagaatgaagaagcgcgaatgtntgaattgatggctgattttatagatgaaattgat

SEQ ID NO: 12341 - DNA, 388 bp, Glycine max
tgctattttcatctccttacttcttcaaaaacatgtaaaatgatactattgcccatccctgtttttctacaggccttcccctttcttgcacaccacttttccttctcttgatatatatatttttatttaatttaattatgatatagtttatcattttaactataactgaatgaactatgacacagattatcatatgatgacacaagctatcctttcttaataataatcaacataattattatacaaattagcatcataatatagcaaatttgcatagtaattaacttgagtatttttataaatgataactcctatcataattaaatctaattggtattcattactattcaaaaaatggaattttaatgtataaaagataatttgatca

SEQ ID NO: 12342 - DNA, 387 bp, Glycine max
agcttccttattatgattcctaaagaagctatagcttagctacacatacctctttaatagctaagctcaccttcttaagatgagaagctagagcttagctacacacccgctataataactacgctcacccccatggcaaaatacatgaaaatacaaaaaaaatccctactacaaagactactcaaaatacctcgaaatacaaggctaaaaccctatactactagaatggcccaaatacaaggcccaaacaaaggaaaaacctattctaatatttacaaagataagcgggctcatgcttagcccatgggctcaaaatctaccctaaggctcatgagaaccctagggccttcccttggatctctagccgaatctacttggagccttcta

SEQ ID NO: 12343 - DNA, 296 bp, Glycine max
  unsure (1)..(296): unsure at all n locations
taatcattgaggccttatggatcatntactntangaatcaaagctagaaaagatgcattgcttccttttggaaagactccattggcatgaaattcattcaagaatctaagcacatctgattntatgagatcccataattgtttaataaaattaacattcagtccatctggacagggctttcggactaccacaatcccatatagctgccttaactggatcctctttgaaatgagccaccaacaattcattatgttgcggatcaatggacctgaatctaacctcaatctctcccactc

SEQ ID NO: 12344 - DNA, 437 bp, Glycine max
  unsure (1)..(437): unsure at all n locations
tcttgtgaactatagctctgagatactgctctactatcctgttcagcacctctgtttgtccatcgctctgcggatggtacgcagagctcatgcgtaaatgagtgccgctagccttgaacagctcttgccaaaacttgctgataaagagggggtccctatcggaaaccaagcttcgaggaatcccatgtattttaaccaccatgtcgacgaacaaggatgccaccatatgagcagtgtgagacgttggtaacattcccagatgaatccccttcgaaaaacggtccaccaccacgagaattgtggtttttcgtgatacgccggcaggccgacaatgaaatctaacgagaggtcctcccaaggtcgatggngcaccggtaaggggcataatagtcctgcgacgcgttgtgtctggtacttagtgacctgacaatccatgc

SEQ ID NO: 12345 - DNA, 328 bp, Glycine max
  unsure (1)..(328): unsure at all n locations
gcagacaatcgcgttccacggtttccaacggcacagcccgatgtaatggcagcgaacccgccaagcaggccgttacacacgtcaatcacgttccagtggccaaccaataaccgcttgctgaacaacgtcgtcagagccgcagtgctcccagccaatgtcgtcgtgacagctgtcctccctatagcgctccattgaccataatacccttcacttntcatacccttgtctattgtcacaaacgaaccagggttgaagccgtaccagccgaaccataacataaacgtaccaagcacaactaaagacgcgctgtggccacgtaaagcaaccg

SEQ ID NO: 12346 - DNA, 347 bp, Glycine max
  unsure (1)..(347): unsure at all n locations
aagattactcattgtatagaattctgcanagatattctccattattggcatgaagtcaggatcttggcacatccaaatacaagaatctgataggtacaatactgtcttcactgtacctttcgggcaatatgaatagaacgttatgccatgtggtttgaagaatgccccttcagaattccaaacaatcatgaatgacatctttacatcctattcanaattnttcattatctatatagatgatgctgtaactgtttctcacgatattgatcaatatctttaacatctgtagaccttcattcacattatcaaacaaaatggtcttacgggtctccaatcgaacatcaatc

SEQ ID NO: 12347 - DNA, 280 bp, Glycine max
  unsure (1)..(280): unsure at all n locations
ctcaagagcttccgtngctcaatttcgaacgtgtcgatatattatgcgccggaatctgacatccgtgtcaaaagttatgaccattngaatttctcgagagacttccgtgttcaatttcgagcgtctcgatatattatgcgctngaatcggacatccgagtgaaaagttatggctatatgaatttctcgacagcttcccgttgttcaattttgagcgtgtcgatatattatgcgcctgaatctgacgtccgtgtcaaaagtatgaccatttgatttctcga

SEQ ID NO: 12348 - DNA, 304 bp, Glycine max
  unsure (1)..(304): unsure at all n locations
tgctntcaagaatttcaaatggtcataattttgacacggaggtcagattcaggcgcctaatatatcgagacactcgaaattgagcaacggacgctctcgagaaattcaaatggtcataacttttaactcggatgtctgattcaggcgcataatatatcgagacgctcgaaattgaacaacggaaactctcgagaaattcaaatgctcataacttttcactcggaggtcagattcaggcgcataatatatcgagacgctcgaaattaaacaacggaagctcacgagaaattcaaaaggtcataac

SEQ ID NO: 12349 - DNA, 423 bp, Glycine max
  unsure (1)..(423): unsure at all n locations
agctnttaacattggttatntaggactntcatcatcagttattaaccgatgatgaaagtattatcgttaacatcggttntgttgaaaactgatgttaacgtaaaattacaacatcggttttttaaataaccgatgttgttagtattcgtcaacatcggttttttaaaataccgatgttaactaaaactgatgttaacgttggtagttaacatcggttttttaataaaccagtgttgttagtgtaggttaacatcggttttttaaaaaactgatgttgttagtggatgttaacatcattntttttaaaaccgatgttgcttttaggaatttttttaatatactgtctgctttttcaataaacccaaaaattaagctgcanatttaaattagatcacacaacacaacatatataattttcattct

SEQ ID NO: 12350 - DNA, 310 bp, Glycine max
gaccaccatacagacctttgcccttccatgcagcaacctggagcaatcgagcagcctgaagcttatgatgcaatatattacaatagaccttctcaacctcagcagcaaaatcaaccacagcaaaacaaatatgacctctccagcaacagatacaaccctggatggaggaatcaccctaacctcagatggtccagccctcagcaacaacaacagcagcctgccctttctttcaaatgctgtggcccagcagacatacattctcaccaaccaacacagcacacctagaacaccaacgtgaggccctcacaac

SEQ ID NO: 12351 - DNA, 478 bp, Glycine max
  unsure (1)..(478): unsure at all n locations
agctgttatgatctgtgtgcacaataaattctctgcccaataattaatgtctccagggctgaatacaaagcacaagggccatcaattccttctcatagacagattttgccagattcccatcagataaagctttactgaagaaagcaataggtcgtctctgctgcattagaacagcacctatacctctgccagccgcatcacactcaacttcaaaaggtaaatcaaaatttggaagaattagcacagggggggaagtcatgatccccttcatctcctcaaaggccttgacagcctctattccccaagaaaaattgtctttcttaatcaattcggtgagaagggttgctattttaccatacttctggataaaccttctattataccctgcgagactcaaaaaaccacgtacccccttcacattctttggtgtgggccatgccanaatacacttcacctttttatgggccactgcccacct

SEQ ID NO: 12352 - DNA, 459 bp, Glycine max
  unsure (1)..(459): unsure at all n locations
tctggtaagctactgggctgagcntttgaatgactnggaaggtgccgtagtatctntatgcaagtttcgtgtatggtgcgcccacgacggtggattggcgtcttggatggagttttaccagaaccatgtctccttcngtgaagtggagttcgcgatggtgcttgtctgcaagttctttcatgtgnttgtgggccttgaacagtttgtgtcgcaagctcttgaacattaagtcgcgatcagttaaccaagtgtcgacaacgtctatatttgaatttctcgccacgtattgaggaaggttgtggtggttcttcccaaaggtaatctcgtaaggagacatgcctgtagcggagtggacagaggtgttgtatgaccactccatccacattangaagcgaccccatgttgagggtttgtcgtgaacgaatgccctgaggtattgttcaacgactctatttatca

SEQ ID NO: 12353 - DNA, 562 bp, Glycine max
agcttaagctccttcaactgcacattgttcttaatatttgaagagtatccttatggaaccttcacccgacgaagacactgacaaaaacttatcttctccttcttggacaaagtatggcaggctggggggaagtaaattttcttcccatcagaccttggatgcaactgtgatcttatacccatatcacctagatcttgacgggtattcaagccatccttcgtcttgccttgaatgttaaagagcgtcccaatcacactgtcacaaacatttttctccacatgcataacatcaatacaatgtctaacgtcaagatcacaccagtacggaagatcaaagaaaatggacctcttttccatatgcaactctgactattatcctctctttgggtcttcccaaatacagtgttcaggtgttgaacccgctgatatacctgctcaccagtcaacggtttcagcgtgttagaaagcggcgatgcctactgtagactggttttcttccatgtttcagttgtatgtaacttgcattttcttcacagatggggcatgcatgatgacccttaaca

SEQ ID NO: 12354 - DNA, 355 bp, Glycine max
  unsure (1)..(355): unsure at all n locations
ggatgtctcagtcaactcagtagagtctaagattatctctgctcaacctttagttgcttcaggttcagacgacagtgatgaggcgaagcccaacgatggtccaaaacgatgcagcatctgcaataagcgggttggtttgacaggatttaattgtcgatgcggtgaccttttctgttctgaacatcgctactcagacaagcataattgcccatttgattatcgcactgctgcaagggatgccatagctaaagcaaatccaactgtcaaggctgagaaacttgttaagatctagatttgntgtctctacagttcatgctctangtgctagtatgctcattgtngtcctcatgagatg

SEQ ID NO: 12355 - DNA, 453 bp, Glycine max
  unsure (1)..(453): unsure at all n locations
cctgcngctgcaactatttgataacagcggatgatcattcttgtgtcaaagctacatcatcttatctggatcacagacacttagctaagctataaatggtcatgagtgagcaggtgaccacactgagaagagtggggaatacatgctaatgtcattccacatgtggagtatgagaaggagcaaagctaatttcttcagaataaccaaagttctaggagggttgttagcctttggaaagtggtttgatcagatatgcaattggaaaaaccctctcacatccatactcattcatatccgtttcataatactggttctttatccagagctaatacttccaacaatttttctttacctttttttggttggaatttggaattttcgatggaggccaagacactctcctcatatggacacaagactatcacatgctgatgctgctcatcctgatgaact

SEQ ID NO: 12356 - DNA, 403 bp, Glycine max
  unsure (1)..(403): unsure at all n locations
atttccaagagtgatatctattcaaatggcnnatgaatgggcatcacaggtctatttatatgtgacttggagacacgaatnnaaagagagttttcattgcccaaaaagttttatcctctcaaaagattaagagaagttttctgaactgaaatgtcttatcctctcaaaaagattccttggtcaaccacttgcatattcaataaggaatattgattgatcttcattgtacaatctatctcttttaagagagatntcttcttctcttcttcttatttctgaaaagggattaagagaccgtgggtctcttggtgtagaggattcctgaacacaagggaagggttgtccctgtgtggctcaaactttgtataaggagttttacacagagagtggcacatctcaagtg

SEQ ID NO: 12357 - DNA, 448 bp, Glycine max
  unsure (1)..(448): unsure at all n locations
agacacgttacttggagtaatgtggtgggttcttaaatataatttcaaatggngattttcatttgttagatcatgttggtgaatgccacaatttattgagggaggactatggacatggtgaatntttggaggggacatagaagattgcaacttatacacctgatcttcagtctttccttgcagaagaaccgctcccgttgtcaggctctttacctcaaaatgcaagggaaaaattcaacagacacagagttagtttgacgtaattgagaaacagaaatgagattttgagagacagagggaacatagtatattggaaagacgaagagggatggtaggggtgttcaattcagttgagccatgatgttgaatgaaaagacccttatcattggcaatgtgaagctgatccggaccagtgcagtcattggaaatnagagacaattgatgatgt

SEQ ID NO: 12358 - DNA, 487 bp, Glycine max
  unsure (1)..(487): unsure at all n locations
agcttaatgaggcaaccaggaaagatcattttcccttgtctttcatggatcagatgctggagcgattagcaggacagtccttctactgtttcttatacgggtattcaggatacaatcagatagcacttgagcctaaggactatgagaagacaacatttacatgcctttttggtgtttttgcctatataaggatgccatttgggttatgtaatgcacctgccactttccaaaggtgcatgctagccatctttgcggacatcataaagaagtgcatataagtcttgatggacaatttcttagtgcttggtttatcctttgattgctgcctgacgaatttagagatggtgctgcgaagatgtgtcgagaccaatctggtactaaactgggagaagtgtcacttcatggttcgagaggggatagtcttgggccataaaatttcagccccgggcattgaggtggataaagcanaaattgacatcattgaaaa

SEQ ID NO: 12359 - DNA, 669 bp, Glycine max
agcttgctgagcataggctactgcacacgatctcacattgccattatgggggaaatgttgacattttgcagtaacattcatggactgagctaattaaacggatcggcaaatctggcttaccttgccatgtgctttgagtttctctgagtttttgtttcctcattttttgtgtaatatagggcggaacaaaagaaagaaggaaggcttagccaagtcaacagaagattcacttaaaaacatgagttaacatttcacatgtatactctctttcctaatttggttttctttctggtaaaattcgtgaggaagtcacaataacaaatagtttttcactataaagtaattatggtaatatttgttgtataaaatatttaaaatgagaattttatcataaaaatatttgcacttatcttggtaataaatactggtacatgcactaaattatatatctaataagaaattcatatgtgtatatcttgaacattgaatatttagaatgagaatgttgttgaactagctgtactcatcctcctataaatcatattttgggtgtgttgtcatgttaaaagtataaagtacctaattttgttgtacaatttaatcgatgattctaatggttcttcatctaataaaaaatattaatgtttagatattccttgcgaataatac

SEQ ID NO: 12360 - DNA, 504 bp, Glycine max
agcttctggatatattatgcacctgaatcttactttcgtttgaaatgttatgaccatttaaatttctcgagagcttccgttgttcaattccgaccttctcgatatactatccgccagaatcggacctccgggtgacaagtcatgaccatttgaatttctcgagagcttccgttgttcaatttcgagcgtctagatatattatgcgcctgaatcggacttcccggggataagttatgaccatttgaatttctcaggagcttctgttgttcaattccaagcttctcgatatattatgcaccttaatcggactaccgtgtgaaaagttatgaccatttgaatttctcgagagcttccgttgttcaattccgaccttctcgatatactatacaccggaatcggacctccgtgtgacaagttatgaccatttgaatttctcgagagcttccgttgttcaatttcgagcgtctcggtatattatgcccctgaatcggacttccgtgtgat

SEQ ID NO: 12361 - DNA, 489 bp, Glycine max
  unsure (1)..(489): unsure at all n locations
agcttgtagctctttgtcattgcaaatcatgcttgcttggcggtagtagtggttcacataagtgcggacccaggtctcaattgcagaccacatcaaaagtccatccgttgcataagggtagtcttcaattaagagctctacaccatttggttgtgttgggtctggtaccgccattcccctgcgcatgagatctgcagggaggccctccatgtcaaagctccacccgtttttgtatgctccacaactgatctccatgcagtagcgcccaggagtaaaacaagactcaatgattccatcagcattgatcagtttctggcgagctaaagcattgatgtctaacgtgtacctcatgtgtggatccaacagcttaaagacacgatgcattgcacttaattgcctatgagcaaacaatattaaatggttccatgcccgcatgtgtgcgttacctgtatacaattaatttaccaaaatttatcccacancatgcat

SEQ ID NO: 12362 - DNA, 583 bp, Glycine max
  unsure (1)..(583): unsure at all n locations
agcttgaaggcaaactggatgcattggtttacttgtttacccagctggccttgaatcagaaatctgtacctgtcgcaagggtttgtggtttgtgctcctctactgaccaccattcaggcctttgcccttccatgcagcaacctggagcaattgagcagcctgaagcctatgctacaaatatttacaatagacctcctcaacctcagcagcaaaatcaaccacagcagaacaattatgacctctccagcaacagatacaacccttgttggaccttgtggcctcaataatcttaagagggataggcttagaatacagaagaagcaacaccaatcaatttaacaatgttctttaaacatgcaagacacaattgattgcaacanaataaataagataagggaagagagaatgcaaacacagttttatactggttcggccacaacccgtgcctacgtccaatactcaagcaacccacttgagattccactatctttgtaaaatctttaaaagtctgacnccacagggcaacccattcttttgtcagatgcttacaacaagagactacagtctcttaccaatctcattg

SEQ ID NO: 12363 - DNA, 619 bp, Glycine max
  unsure (1)..(619): unsure at all n locations
agcttgtttgaacttataacaatggtttatgagttatgaccttttataagtttttaacaacgtttaataagtttcacaaaatcaaatataatttattttaataaattttacagtgatatttacaaatgagttttactaaataattgcttgattaagttatttatctaaatacatccaaaactaattgtcattcataaaacaccactaatgtgattgaaataatttcaaaatccagtgggtcagaaaataaatgataaggaaaggataaaaaactgccttgaaaatttagagcatgtataacaatgaaatgagactagctttcatgtaatgtcgctaaagaaaaacggatgttgatagtaacaaaattgtttctaaaatgctggttgcaacaagttatctttggttctttcattttcagtatcaagcatgtggtctgtgcttcaacaaggatggatttaaaggttgtgaatttttgtataggagacattatccagacaaacacatggtccgtgaaattgtacactgatactttntaatgtaagaaaggttttcaagttatatctaancgaattagattcgtatagcgacantattctatctatttctttaatttattttt

SEQ ID NO: 12364 - DNA, 550 bp, Glycine max
agcttgatgataaaagtgagaagtacatgtttgtgggttacgactcaagatccaaggggtacaagctctataatccaaatagtagaaagatcgtcataagtcgcgacgtggagttcgaagaagaagattgttgggattggagtgttcaagaagataagtatgattttcttccttattttgaagaagatgatgaaattgaataaccaatcatagaggaacatattacaccacctgcctcaccgacaccaaggctggatgaaacaagttcaagtgagaggacaccgcgactaaggagcattgaagagatttatgaggtaaccaaaaacctaaacgacattaacctcttttgtttttttggtgtttgtgaacctctaagctatcaagaagcagcgaaaaacataaagtggaaagacaccatggacgaagaaatcaagtcaatcacgaagaatgatacgtgggaacttactacacttccacgaggacacaaagcaatcggagtaagatgggtgtacaaggcaaagaagaatgctaaaggagatgtggagagata

SEQ ID NO: 12365 - DNA, 609 bp, Glycine max
  unsure (1)..(609): unsure at all n locations
agcttcttgtggttgaagaacttgctccagtcggtgttgaagaggtggcgacatggcgtgccgcggtagatgtggtggaagcgccactcaacgccgtggatgtcggcgacagagaggagctggataggtggatcggcataaaagtcgagtggagggaagcacaagtcggcgcaaaagcacggcacggagaagccaccgctgttgttggcgtcggagggagtgaggatcttcacaaacgaaacgacgccgttggtctcgcggtctttatcatcattgtcatttcgaacctccttggtgttgttttggaaaggttgttgttgtgattgttagaggggagtgaggaggaacttggcggggacaaaggggagagagcggataagagggttgtggtaatgcgagggagaggcatgctccatgtgaccctangcctaggggaagcagtaaaccctattcacacattaattttgggaatgagaacgaagacgagttntaagtaaaacccgtcgtaattttcattccattaaattacaagattgccaacaacatacattctaagacggtnttgtataatcaccttagaatgttagtcataaaaagattttttattta

SEQ ID NO: 12366 - DNA, 505 bp, Glycine max
  unsure (1)..(505): unsure at all n locations
agcttggacaatggcagggagtcgcaacctacccttcgacgggagggcgacacaagggctcacgggtgcgtcttccaagggaggaaggcgcgcggagtcgccaccaatgttggttaagttgtttttatctttttttttgcaagatatattttaaccgaacaaaagtcgtttaaggcgttggaccattaaacgatcttttgattcttttgaaaggagagaaacgttaaggcgttggaccattaacgatctctgggtagagaaacgttaaggcgttgaatcattaacgatctcttggggtggtcgacaaaagcggggtttttgctcctacgtatcctcaattgcgatgaggaaatcagacctacgtagttcttgcaaaagcggtaaagttatgtgttgattttatgcttttgaacggtccatgttaactgataaaagcaaagaggaccgtttaaggcgttggactntaaaacggtttcaagtgatttttgcagacaaagcttgattt

SEQ ID NO: 12367 - DNA, 385 bp, Glycine max
  unsure (1)..(385): unsure at all n locations
gtataatatatgtatgagcacatatgtaaaatagagtatatcagattcctcttaatctcaagaggatcaaaatacctcacgctcagtaatggggtaacgacaagagtgacaccgaaagcagtctggatgaaaataattatgaccaactcctaaacaattgccatagagtatctcttggttgcaccctccacatgttctattatgcgattgcatactgcacattaccagttgtcaataagaaatgattgagcacggtcatcataatgcattagcatcacaagaatgaaatcaaaattaattacatgtatggagaagtcaacagagaaatcaaaacttattttaannatttgttcaaatttatgctaacaacacaatgacatacata

SEQ ID NO: 12368 - DNA, 333 bp, Glycine max
  unsure (1)..(333): unsure at all n locations
ttcacaaatcatctataaaaacttgctaagccaggaaaactcctcacctcagtcacagacttaggtgtaggccattcttgaatagccctaaccttcatctcaccaaactgcactgcctgtgaacttacaacccatcccagaaacacaacatggctagtacaaaagatgcatttttcaacgattggcatacaattgttcttctctacgcacacacaggacaaattntatatgatcaatatgcaaagtctgtgaagcgctgtagacaataatatcatcactgtacaccacaatgaactttcctatgaactctctcaagatatggctcattaatct

SEQ ID NO: 12369 - DNA, 294 bp, Glycine max
  unsure (1)..(294): unsure at all n locations
gagtcccgtcatatatcgagacgtctcgaaatgaatgttgatgctctgagcaaactcaaacgacaataatatttacttggatgtctgattgagtcccgtcatatatcgagacgctcgaaaatgaatgttgatgctctgagccaattcaaacgaccataactttttactcggatgtctgattcagtcccgtcacatatcgagatgctcgaaattgaatgttgaagctctgggccaattcanacgacaacaacattttactcggatgtctgattgagtcccgtaacatatcgagac

SEQ ID NO: 12370 - DNA, 313 bp, Glycine max
cttgacgactgcatataactttatctgtccgccatactacatgaaactcacagaatcctgcatgaaagaccgcactatgcgacaacaatgcggcacagtggatgaaaatggcgccacatagggaagagctggtatgatatctgaagtctgtatctggaaagatagcacatgcgtggaatactcatacatccttcttcatcaacatctgctcaaagttatcagccacaaccgcctccgcaatctgggtactacagtcacacaaaagcaggtcatggtactaattcctatgtttgcgcataacatcaagctacgc

SEQ ID NO: 12371 - DNA, 236 bp, Glycine max
atggtgatgtggatgatttctccagaatgacctgggtcaactttatcagagagaaatcagaaacctttgaagtattcaaggagttgagtctaagacttcaaagagaaaaggactgtgtcatcaacagaatcacgagtgaccatggcagagagtttgaaaacagcaggttcactgaattctgcacatctgaaggcatcactcatgagttctctgcagccattacaccacaacagaat

SEQ ID NO: 12372 - DNA, 616 bp, Glycine max
  unsure (1)..(616): unsure at all n locations
agcttgagaagtaaatttgtttttgccacataaacttcgaaaatgtttatggattcagaaatttattagacacatataaattgatcaaattaggtgtacaaattaagggccctatcaatgaaatccaaaaatgatttaaaagtatagattaatatacaattagtgatttgagttaatagttattaattaattttntaattttaatttttaatttaaaattaacaacaaattaattgtttataactctagagaatgccacgtgtcaacatttttttttatagaaaatattcttgtatgtatagactatagattatatccgtaacaattgaagacggatatcacaagttttactacaatttatatacattgcttaactaattgagcgagacatatgacaaaatatagaaataattatttttaataaaaatagaaatataacacattttctattgtgttttaattaaaatatagaaaaattataattctttgtataacattatagtttattgtaaacaatatttttagtatatattatgtgtgtgtatcattaaaaacaataatctaaattatgacatattntttggtagaatatggttctcatatatcaatgataact

SEQ ID NO: 12373 - DNA, 388 bp, Glycine max
  unsure (1)..(388): unsure at all n locations
ctcttccctattaagatcccttaagaagctagagcttcgctacttatacctctctaatagctaagctcacctccttgatatgagaagctagagcttagctacacaccccctataatagctaagctcacccccatgacaaaaaacatgataataacaaataatagtccttattacatagacaactcanaatgccccgaaatacaaggctaaaaccctctactactagaatggccaaaatacaaggcctggacgaaggaataacctattctaatatttacaaagataagcgggctcatacttagcccatgggctcaaaatctaccctaaggctcatgagaaccctagggcctttccttggatctctagcccaatctacttggagtcttct

SEQ ID NO: 12374 - DNA, 279 bp, Glycine max
  unsure (1)..(279): unsure at all n locations
ctccgcttaacatcagaccacttccaggtgctggaactacttctcatggacttgatggggcctatgcaagttgaaagccttggaggaaagaggtatgcctatgttgttgtggatgatttttccagatatacctgngtcaactttatcagagagaaaacagacacctttgaagtattcaaagagttgagtctaagacttcaaagagaaaaagactgtgtcatcaagagaattaagagtgaccatggcagagagtttgaaaacagcaagtttactgaattc

SEQ ID NO: 12375 - DNA, 546 bp, Glycine max
agcttatgctgcaaatatttacaatagacctcctcaacctcagctgcaaaatcaaccatagcagaacaattatgacctctccagcaacagatacaaccctggatggaggaatcaccctaatctcagatggtccagccctcagcaacaacaacagcaacctgctccttccttccaaaatgttgctggcccaagcagaccatacattcctccaccaatccaacaacaacaacagccccagaaacagccaatagttgagacccctccacaaccttccctcaaagaacttgtgaggcaaatgactatgcacaacatgcagtttcaacaagagaccagagcctccattcagagcttaaccaatcagatgggacaattggctacccaattgaatcaacaacagtcccagaattctgacaagctgccttctcaagctgtccaaaatctaaaaaatgtcaatgccatttcattgaggtcgggaaagcagtgtcaaggacctcaacccgtagcaccttccttatctgcaaatgaacctgccaaacttcactctac

SEQ ID NO: 12376 - DNA, 412 bp, Glycine max
  unsure (1)..(412): unsure at all n locations
ccctgaacaggcaattatcctctgtgtatgcaaggggtgggatttttgaagaagtacatgccatggacgtgtccgaacatttgtttcagtgtgaagaatagtaaaatctggagtgggcagtacccaagcttttgtcattaattcctttaacttgcaaatactttgtgtgcctctgagtgccacgagagttgatccttgcaaatgagagatgttaaaggttccacgatggcgacatagccctagattaatttttggcaaaaccctatcagacccaagaatccttttaaagtatgaggagaagtaggggaggccaatccaccatgacctgtattttatcanggtacgacgtgacaccctggacaaataccatgtgtctgagatactacagttgggtgtgggtgaanacacactt

SEQ ID NO: 12377 - DNA, 361 bp, Glycine max
  unsure (1)..(361): unsure at all n locations
tccatttgtttaatctntcataccacgccctaggtgccttgtttaacccatagatagctctcttgagtttgcagaccatactttntatcagaatcagcaaatccaggtggctgggtcatgtagatttcttccaaatagccattaaggaaagcattgttcacaccaatttactgaatagaccagtgatgagcaagagcaatagtcaacattattttgatngtgacaggtttcacagcaacacgtggaaaggtttctgaataatcctgactagttatttgattaaatcccttggcaaagctactagccaacagattgaagaacgtcatgccgttcatcatagacaaaaggcaatctgcattca

SEQ ID NO: 12378 - DNA, 585 bp, Glycine max
agcttgaaggcaaactggatgcattggttaacttggtaacccagctggccttgaatcagaaatctgtacctgtcacaagggtttgtggtttgtgctcctctgctaaccaccatacagacctttgccctttcatgcagcaacctggagcaattgagcagcctgaagcttatgctgcaaatatttacaatagacctcctcaaccttagcagcaaaatcaaccacagcagagcaattatgacctctccagcaacaaatacaaccctggatggaggaatcaccctaacctcagatggtccagccctcaacaacaacaacaacaagcctgctccttccttccaaaatgctgctggcccaagcagaccatacatttctgcaccaatccaacaacagcaacaaccccagaaacaaccaacaattgaggcccctccacaacctttcctcgaagaacttgtgaggcaaatgactatgcagaacatgcaatttcagctagagaccagagcctccatttatagcttaaccaatcaaatgggacaattggctacccaattgaatcaacaacagttccagaattcttgacagctggct

SEQ ID NO: 12379 - DNA, 443 bp, Glycine max
  unsure (1)..(443): unsure at all n locations
agtctccatacanagtcaggttaacgattactcgcctgtgctntttcttccatgctatatgtagcanagtcattgatccagtcatgtttgatgagttggaaaatgaggccgcaattatactgtgccagttggagatgtattttccccctgctttctttgacatcatgattcactttgattgtgcatctggtcagagaaatcaaatgttgtggtcctgtttatctatggtggatgtacccggctgagcgatacatgaagatcttaanagggtatacaaataatctatatcatccagaagcatctattgttgagaggtacattgcagannaagccattgaatntttttcagaatacttagagaaggctaaacctgttggccttcctgagtctcgacatgatgacagagtgggtggtaagggttcaagaggactgcatgtgatcac

SEQ ID NO: 12380 - DNA, 528 bp, Glycine max
  unsure (1)..(528): unsure at all n locations
agcttgatacaagattctccttgcctggctcttcattaccttctggntgggtcatatagatgtcttcctctaaatccccatgcaagaatgcagttttaacatctaactgctccaagtgaagattctctgcagctactatgctcagaataactctgatggtagtcatctttacaactggagagaagatctctgtgaaatcaattccttgtttctgctgaaaccctttcaccacaagtctcgccttgtatcttcttctaccgtcagattcttcctttagcctatagacccacctattctgtaatgccttctttccttctggcaatttagttaaagaccacgtcttattcttttgaagggatgtcatctcatctttcatcgctagctcccactcaatagtgtcattcccctgtgtagcctcattgaaacattctggctcaccagcatcagttaacaacaaataatgcaatgaaggggaatacctatctggtggtactgaaattctgctatattttcttggaggagttgatg

SEQ ID NO: 12381 - DNA, 369 bp, Glycine max
agcttgtaagatttgcaagaatttcttccttgtacaactccttgaaaattattgccatcaatataaagatatgacaatttagagagtgatccaagactttcaaatggatttccactgaatttattaaaagagagagagagagattttaaatctatctcccttaagttgcggagattacccaaaaaagtcggaattgttccttcaagttgattacgtgataaatcaagttcaacaagagaagtcaaatttcccgaagaagttggaatggttccttcaagttgattatatgacaaatcaagttcaacaagagaagtcaaattttccggggcatcagaaatagtcccatgcaagttgctggaacttaggtcc

SEQ ID NO: 12382 - DNA, 359 bp, Glycine max
cgcatgcaagcttccacttttaagggataacacatgaacagcgctaggcaatgacattcatggtgctccgaacaaaggtggagtatggaggattgccttgagggtccgcacttatgcaatcatgaaactcagctccaaacttgaaagtggaggacacatgaacaaccctaagcaataacattcatgtggctccgaaaaaggatgagaatggaggattgccttgagggtactctcttaggcaatcatgaaactcatctccaaactcaaaagtggaggacacatgaacagccctaagcaataacattcatgtggctccggaaaaggatgagaatggaggattgccttgagggtcctctttt

SEQ ID NO: 12383 - DNA, 444 bp, Glycine max
aaaatggcctcagcaaacttcttaatctctatggaaattcaatcaataggcctccaatctttaatggagagggttaccactactcgaaaacccgaatgcaaatttttattgaggcaatagacttaattatttgggaagccatagaaatagggtcttatatatccaccacagtagaaagaattacaatagatggaagcacatcaagtgaaagcataacaatagaaaaacctagagatagatggtctgaagaggataaaagacgagtacaatacaatttaaaagccaaaaatataattacatctgccctgcgaatggatgaatatttcagggtttcaaattgtaagagtgctaaggaaatgtgggacactctacacttaacacatgaaggaacaacatatgttaaaagatctaggatatacacattaactcatgaatatgaactat

SEQ ID NO: 12384 - DNA, 440 bp, Glycine max
tgctacaaacatctacaacagacctccttaatttttcagcaaaatcagccacaacagaataattatgacctctccagcaacaggtacaatcccgagtggagaatcatcccaaccttagatggtcgaatccttcacaacaacagcagcaacaacaacaaccttattttcaaaatgctgctggcccaagcagaccatacgttcctccaccaatccagcaacaacaacagcaacagccccaaaaacagcaaacagttgaggctcctccgcaaccttccctagaagaacttgtgaggcaaatgactatgcaaaacatgcagtttcgacaagagaccagagcttccattcagagcttaactaatcagatgggacaattggctacacagttaaatcaacaacagtcccagaattctgacagaataccttctcaatctatctagaat

SEQ ID NO: 12385 - DNA, 229 bp, Glycine max
aaaccgaagctcctagcaaattcgaacgacaataacggtgcactaagaagtccgattgagtcccgcaggatatcgagacgctcgaaagtgaaaaccgaagctcgtagcaaattcgaacgacaataactgttccctcggaagtccgactgagacccgcaatatatcgagacgcgcgaaatttagaaccgaagcttggagcaaaagcgaacaacaataacaattcactcga

SEQ ID NO: 12386 - DNA, 312 bp, Glycine max
cttccgactgaaaacttattgtcgttcgaatttgctacgagcttcgggtttaaatttctagtgtctcatatatattccgggactcaatcggacttccgagtgaaatgttattgtcgttcgaaattgctagtagcttcggttttaaatttcgagcgtctcgatatatttcgggactcaatcggacatccgagtgaaatgttattgtcgatcgaatattgctacaagcttcgattttaaatttcaagcgtctcgatatattacgggactcaatcggacttccgagtgaaaagttattgtcgctcgaatttgcta

SEQ ID NO: 12387 - DNA, 414 bp, Glycine max
gtgcagactaagtgctcaccaacactagataagaatttcttggttgtttcatgaaacctctgatgctagatcaccattcaggaatgccattttcacatccattggatgcagcttatgatcaaaatgagctactaatgccagaattactcgaagagagtctttcttagatacaggggaaaaagtctctctgtaatcgaatccttctctttgagtgaatcctttagcaaccagtattgccttatgtctctcaatggtgccttctgagtattcctttgttgtgaagacccatctacatccgatggcttttacaccaacaggcaactcatcgagatcccaatcttgggtagatgccatagaagccatctcatctctcatagcattataccacaaagttgattccttagaactcatggc

SEQ ID NO: 12388 - DNA, 371 bp, Glycine max
  unsure (1)..(371): unsure at all n locations
gcatgcaagcttagaagaaaagcnctgtttctgagatttgtgggattttttgangnngggctaggntacgtagggcaatacagccccaacgtgagatggatgcttcttggttatgtgggagagactgatgcagggcttttggaattctctaagggctgccccagtcttcagaaacttgaaatgagaggatgctcctttttcagtgagtatgcactagctattgctgcaactcaactgaattctctcaggtacctatgggtgcaagggtatagtgcatctgcatctggacgcgatcttctggcaatggctcgcccctattggaacattgagctgattccttctagaagcgtggttgttagcaatcagcaaga

SEQ ID NO: 12389 - DNA, 393 bp, Glycine max
  unsure (1)..(393): unsure at all n locations
tggtgatcagtcaggatgatgaaaggatgaccataaagtagtggtgccacttgagtattgcagttgtaattacatgaagctcacaaacataagtagaagcttgttatagcctgnggcacaattgcttggctatggggtgggagttctgtaacaggactgctcctatggcggtgccggaggcgtcggtttcaatggtaaattgaattgtaaagtctggagtggtgagggcaggagcttgggtcatgatggtttttaattgttgaaaagcttcttgagccgtgggactccatgaaaatttgtccttacacaagagcgtagttaacggtgctgctatggcggcataacttctgatgaattttcgatagaatcctatgaggctcatgaaacttctca

SEQ ID NO: 12390 - DNA, 401 bp, Glycine max
  unsure (1)..(401): unsure at all n locations
ngaaggcaaactggatgcattggttaacttggtattctatctgaccttgaaccagaaatctgtacctgttgcaagggtctgtagtttgtgctcctctgctgaccaccatacagacctttgcccttccatgcagcaacttggagaaattgagaagcccgaagcttatgctgcaaatatttacaatagacctcctcaacctcagtagcaaaatcaaccacagtagaacaattatgacctctctagaaacagatacaaccctggatggaggaatcaccctaatctcagatggtctagccctcagcaacaacaacagcagcctgctccctccttccaaaatgttgctggcccaagcagaccatacattcctccaccaatccaacaacaacaacagccccagaaac

SEQ ID NO: 12391 - DNA, 422 bp, Glycine max
  unsure (1)..(422): unsure at all n locations
nntgacggactatacctagctctaggcaccagggatggataaagatctatatataggctggctaagggtagagagaggaagactagagatttggatcaagtaaagtgtgttaaggatgaagaaggcaaagtcttagtgcatgaaaaagatatcaaggaaaggtggaaggcgtatttccacaacttatttaatgatggatatggatatgactctagcagtctagacacaagagaagaggaccggaactataagtactatcgtcggatttagaaacaggaagtaaaggaagcattgaaaagaatgagtaatggtaaggcggtggggccagacaacatacctattgaagtgtggaaaactcttggagatagaggtcttgagtggctcaccanactctntaatgaaattatgaggtcaaaacgcat

SEQ ID NO: 12392 - DNA, 357 bp, Glycine max
  unsure (1)..(357): unsure at all n locations
agctngagagccttccaaagctttcaggnaatcttgccacacaagnggcctccatgaagaagtgacacagagaagccaaagancctatagaagctggaagctcgctgagcattttacatttgttcaatcttaaggtgacaagattttctagccatccaatggactctggcaattccctgatatttccattgaacatgttcagtgtagtaagaaatgctaggcggccaatagattctggtaaatattcaagatttttgcaattcatcatctcaagtttcctcaataatttcatctctccaatctcatctggcaaatctgtgatggttgttccatctaactgaagctcaacaactgaag

SEQ ID NO: 12393 - DNA, 366 bp, Glycine max
  unsure (1)..(366): unsure at all n locations
agcttggcaaacatagntgatttataagggttatctcctctagatagaagcataatatcatctgcaaaagccaaatgagatagctgaatacctgcacagttgagatgaaatttaaaattggcatcatccttgaggctgctcatatctctggaaaagtactccaaacagagcacaaacagataaggggagagaggatccccttgtctaagaccccgctgtcctttgaagtgaccataaatggatccattgactgccacactaaaggaagtagaagaaacacattccatgatccaagtacagaaatgagctgggaagccaatggacttaagcatccaatccaagaattcccagaaaatggaatcataa

SEQ ID NO: 12394 - DNA, 363 bp, Glycine max
agcttgaaaggtagtcataccttataaaatatatatatgtttgtttaggtagaaagataccttagatatgcatgtatgtaaacaaaaaaatacttcacaaaatatatatatgtatgtttaggtagaaagataccttagatatgcatgtatgtaacaaaaaaatacttcacaaaatatatatatgtatgtttaggtagaaagataccttatatatgcatgtatgtaaacaaaaaaacacttcacaaaatatatatatgtatgtttaggtagaaagttaccttctatatgcatgtatgtaacaaaaaatacttcacaaaatatatatatgtatgtttaggtggaaagataccttagatatgcatg

SEQ ID NO: 12395 - DNA, 399 bp, Glycine max
  unsure (1)..(399): unsure at all n locations
tcatcttacagacagcaaanaagaatgtttatatggataaccactcgagtacttccctcccgtcagcgtgactcaaatgtcagtatgacagatcttgtgagcgcggaagatgacataaatctccgcgtgtcaacgggcttgtcggccgcgattgacgaagggcgcagaagacgacgttagtctctgcgtgctatcaggcttttcgtcttaccgacagcaaaaaagttttgaaagtgcggacaaccacttgggtatctccgcatgtcacgtgactccagtgccagcatgacagaacttgtgagggtggccgacaaaagtgaggctcttgctcctacgtatcctccaatgaggaactcagacttacgtagttcttgataacttgtgagacttgaaaaagtc

SEQ ID NO: 12396 - DNA, 448 bp, Glycine max
  unsure (1)..(448): unsure at all n locations
tgcatccggtgcttgttgtcagggtgatgtttccttctcaacagtcttgctcctatcttgatttcccatttgcatcgtaccaaagtcaccgctttggtaggatgagaagaaacttccatgtggagtaacatggaaggaggcaccggaatcgacaatccaagagctatcatcacaagcaatgtttaggatattaccttcaccaacgagatataacaaatcttcttttgaaactacggcagtagtattcttcttttctttcttctttgttgggctgacttggtctggcttaacgttaccgattgtttgatctctcttgaaggattgacattctattttcctgtggcccatccttccacagtagtagcatgtaattntttagcgtgatttggatctacctcgagaatgatgcgaatctcggctcttaatacgtccacgagtctcattcata

SEQ ID NO: 12397 - DNA, 290 bp, Glycine max
atttgcaaaagccaaatgagatagctgtatacctgcacagttgagatgaaatttaaaatcggcatcatccttgaggctgctcatatctctggaaaagtactccaaacagagctcaaacagattaggggagagaggatccccttgtctaagaccccgctgtcctttgaaacgaccatttatggatccattgactgccacactaaaggaagtagaagaaacacattccatgatccaagtactgaaatgatctgggaagccaatggacttaaacatccattccaaaaattccc

SEQ ID NO: 12398 - DNA, 363 bp, Glycine max
cacctgcagctgcagcttctctccccacatttttctgagtctcggagtagcaaaggagatgcacttgccacaattactaacgactccaaattatcatgattcctcaatagttcagttatcaattctacaatccgctgattgattctccacaacttctgacctagattggcatctttggcaatccatggctgcaattccttctcggcctgacaagcaacaagtcaggggatgaaaaatgaaatattgtaaaaaaatctacaaaatggaagctgatttggaacacaggttagatgagctcttctgcataagatatttaaactttctatacattaaaagctatgtctcatgtgggaattaaatatg

SEQ ID NO: 12399 - DNA, 357 bp, Glycine max
agcttgaaagatttctcaagatccggtggttgcttagggactggatgtaggcacgggttgttgccgaaccagtataaaattcttgtgtttttcttcttcttccatacactttttaatttccgttgtgtactttacttttatgctttacttttgtttaagttacataacttagtagtaaagcctaattgaatctagtaacattaagaaggatcagttttaattagtcaaggttacttaataattaattcaacccccctattctcaattactccaaggccacttgatccaacacattgtaccctgagcaactgccagttagttcttcttccttttcttttcttttcttaagagttgaat

SEQ ID NO: 12400 - DNA, 358 bp, Glycine max
agctttgaatgctctattcaatttagttgacaagaacatcttcagactgatcaacacttgcacagtggccaaagatgcatgggagatcctgaaaatcactcatgaaggaacctccaaagtaaagatgtccagattgcaactcctggctacaaaattcgaaaatctgaagatgaaggaggaagagtgtattcatgacttccacatgaacattcttgaaattgccaatgcttgcactgccttgggagagaggataacagatgaaaagctggtgagaaagatcctcagatccttgcctaagagatttgacatgaaagtcactgcaatagaggaggcccaagacatttgcaacatgagagta

SEQ ID NO: 12401 - DNA, 364 bp, Glycine max
  unsure (1)..(364): unsure at all n locations
agctttgaatgctctattcaatttagnngtttataatatcttcagactgatcaacacatgtacagtggccaaggatgcttgggagatcctgaaaaccactcatgaaggaacctccaaagtgaagatgtccagattgcaactattggccacaaaatttgaaaatctgaagatgaaggaggaagaatgtattcatgacttccacatgaacattcttgaaattgccaatgcttgcactgccttgggagagaggatgacagatgaaaagctggtgagaaagatcctcagatccttgcctaagagatttgacatgaaagtcactgcaatagaggaggcccaagacatttgcaacatgagagtagatgaa

SEQ ID NO: 12402 - DNA, 382 bp, Glycine max
agaccctaatcgactgagctgcagctttgagcacttggtttgtaatttacaacgagatgatgcgctccatgagaggttggatcaaatggagaatagagatcataatgaagaagaaaggaggagaagagggaatgatggtattcctagacaaaaccgaattgatggtattaaactcaacattcctccatttaaaggaaagaatgatccggaggcctacttggagtgggagatgaaaatagagcatgttttctcatgcaacaactatgaggaggaccaaaaggtgaagcttgccgccacggagttttccgactatgctcttgtgtggtggaacaagctacaaaaggagagagcatgaaatgaagaggcattggttgatacatgg

SEQ ID NO: 12403 - DNA, 358 bp, Glycine max
  unsure (1)..(358): unsure at all n locations
agctttgagtgcttgcatctttaatcacgaaaaaattacttttctcagataaaagaagattaaaaaaagtggtttgaataaaaaggtttgtcttctgtagttaaatagaaaaacctgttgatgcaaaacaaaagaagtggccaacaaagaagaagaacatggctaattaataaactaaactcacaaaacacataatataatatccaaaataatatggcacagttctacaaatttaccttgagactcatcttgaccatctttactttgttttggtgccactccaaaatcagctagaagagcctcaagctctgcaagntccttcttcttcctttcctttttagagagctgcctttctgtc

SEQ ID NO: 12404 - DNA, 356 bp, Glycine max
agcttgacaaaattctgagatttcttgccagagatttttcccttctgttttctgcaaaacatgaagtggtgtcaatacttgtaatatcacaatgctctatttgtaaataccacaccctccttttatgtttcatatttcaaagaaaaggaatgttaataatgttaggaagtcccacatgtctagttcttgggatacaacttatatatctcttggataacttcacttagtgtcaattggttttaagttgagatctaacatagtatcaaagtctatagcccatcttagttcttgcctattccagaggcaggcctctgtgtaggggtgttaggaagtcccactcagtgtcattggtttta

SEQ ID NO: 12405 - DNA, 449 bp, Glycine max
  unsure (1)..(449): unsure at all n locations
tgagttnnntttaaaatcatatttagctaaatggtgataccatgaactttaaaaaaaacctattaagtctgatgaaccgacctgtttagcaataatattttatattaaagatattattattaatatgatatatagtataattattatatttaaattataaaattattttagtagtttgacaattttaattagtgtttgaaatatcttaattcgtataaatataaatgtgtagcaaaaatatacattcttttcttttggtgagacttaaaagactttagtaatatgtcacccacaatgttttcccatattttattgtttaaaattgtcttattatttttaataaaaatatttggttntgcttaaaagataatactttnttacactttttaatatgaaacaaacctttaaatggattaattggcctaaccaacttatacaaaagctaagtc

SEQ ID NO: 12406 - DNA, 342 bp, Glycine max
  unsure (1)..(342): unsure at all n locations
tctcgatatattatgcacatgaatcggacctcnattgacaagnnanggccannngaatnnttcgagagcttccgctgctcaatttcgagcgtctcgatatattatactcctgaatcggacctccgagtgaaaagttaagaccatttgaatttctcgagagcttccgttgttcaattttgagcgtctcgatatattatgcgcctgagtcggacctccgagtggcaagttatgaacatttgaatttctcgagagcttccgttgcttcaattcgaccgtttcgatatattatactcctgaatcggacctccgagtgaaaagttatgaccatttgaatttctcgag

SEQ ID NO: 12407 - DNA, 365 bp, Glycine max
agcttcctcaattcttgtggatttatgctctttagacggctgcgtatatattaaatcgagttccaaccaaggctgtctcaaggacaccttttgagttattcaagggttggaaaccaagtttgtgacatatacgcgtttggggatgcccgtctgaagtaagaatttataatccacaagagaagaaactagaccctaagactattactgggtatttcattggatatgctgaaaggtctaaagggtataggttctattgtccatcccacaacactaggattatggaatcaaggaatacaaagtttcttgaaaatgacttgattagtgggagtgatcaatttcagaacatttcttctgaaagggatcac

SEQ ID NO: 12408 - DNA, 357 bp, Glycine max
  unsure (1)..(357): unsure at all n locations
agcttgcttactgtcttcgtttctcaagaacttctcggntttcctgagtagcttatagaaaggcttcgttttttctacgagtttcgaaaggaacctggacaaaaacgcccatctaccattcaacttttgaacttctctgatgttgttaggactctgcatttccaatattgccgtacacttgtttgggttggcttcgatcccttggtgggtgatcatgaaccccaagaatttttcactgccgaccccaaaggtgcattttcagggttgaggcatatgtcatatttacgggtttctccaaatacttccttcaagtctgctacatgttgggccacactataagacttgataaccatgtcg

SEQ ID NO: 12409 - DNA, 347 bp, Glycine max
agcttggatttcctttgctcctgaaacctctcctttctcatgtgaacccaaaaccaatctttgggttggaaaacaacctttttgcgccccttgtttgcatgtttagcatagctctcattcctcttttcaatttgggccttgactctttcatggagctttttcacatagtccactttggcttgtccttccttatgctttaaaactgaaatattaggctttggcaacaaatcaagaggagttagtggattgaaaccataaacaacctcaaaaggagaacaagtagtggtgctatgcacagtcctattataagcaaattcaatgtgaggtaagcaaacttcccaattttt

SEQ ID NO: 12410 - DNA, 370 bp, Glycine max
  unsure (1)..(370): unsure at all n locations
nganattgaacaagggaagctctcgacaaactctattgatcataacttatcacacggaggttcgattcaggcacataatatatcgagacgttggaaattgaagaacgaatgctctccagaaattcaaatggtcataacttgtcacacggaggtccggttcaggcgcataatatatcaagatgctcgaaattgaacaacgaatcctctcgagaaattcaaatggtcataacttgtcaaacagatgtccgattcaggcgcataatatatccagacgctcgaagttgaatatcggaagctcttgagaaattcaaatggtcattacttgtcacacggaagtccgattctggcgcatcacatatcgagacactct

SEQ ID NO: 12411 - DNA, 457 bp, Glycine max
  unsure (1)..(457): unsure at all n locations
tatgctgcanacatctacaatagacctcctcaacctcatcagcaaaatcaaccacaacaaaacaattatgacctctctagcaacaagtagaaccccgggtcgaggaatcatcccaaccttagatggtcgaatccttcacaacaacagcaacaacaacaacaaccttattttcaaaatgctgctggcccaagcagaccatacgttcctccaccaatccaacaacaacaaaaacagcaacaaccccataaacaacaaacagttgaggctcctccgcaacctttccttgaagaacttgtgaggcaaatgactatgcaaaacatgcaatttcaacaagagaccagagcctccatttagagcttaactaatcagatgggacaattggctacacagttaaatcaacaacagtcccagaattctgacagattatcttctcaatctgtccagaatcccaaaatgt

SEQ ID NO: 12412 - DNA, 354 bp, Glycine max
agcttgaagacaaactggatgtattggttaacttggtaacccaactggccttgaatcagaaatctgtacctgtcgcaagggtttatggtttgtgctcctctgctgaccaccatacagacctttgcccttccatgcagcaacctggagcaattgagtagcctgaagcttatgctgcaaacatttacaatagacctcctcaacctcagcagcaaaatcaaccacagcagaacaattatgacctctccagcaacagatacaaccctggatggaggaatcaccctaatcttagatggtctagccctcaacaacaacaacagcagcctgctccttccttccaaaatgctgctggcccaa

SEQ ID NO: 12413 - DNA, 411 bp, Glycine max
  unsure (1)..(411): unsure at all n locations
catggacgaattgcagtggccataatgatctcacagtaagatcttgatgagcctcaaggcataaagaacttagtgaatatcatatacaagcagatcaaagtagaagccttcacagtttatgattactatcacctctatgctaaattcttggatactgttttgccttacattagggaagggaagataacatatgttgaagacataactgagggtcttgagaacggtccaatngcactagaagcaatgttccaaggtcgtagtgctggtaaacaagtcattatacttgctcgtgaataaattagtacaaccttactggttgatctttcannatcattttggttgtgtntgcaactctcactttgagaggttgttgagtaataaacaacgtggatcatgttgaccatctttaat

SEQ ID NO: 12414 - DNA, 417 bp, Glycine max
  unsure (1)..(417): unsure at all n locations
aatatatcgagacgctagaaattgaataatggaaactctccagaaattcaaatggtcataacatttcactcggaggtccgattcatgcgcataatatatcgagacgctcgaaattgaacaacggaagctctcgagaaattcaaactgtcataacttttcactcggaggaccgaatcacgcgcataatatatcgagacgctcgaaattgaacaacggaagctctcgagaaattcaaatggtcataacttttcacacggaggtccgattcaggcgccatatatatcgagacactcgaaantgaacaacggaagctctcgagagattcaaatggtcataacttttcactcggaggtccgaatcaggcgcataatatatcgagacgctcgaaattgaacaacggaagctctcgagaaattc

SEQ ID NO: 12415 - DNA, 462 bp, Glycine max
  unsure (1)..(462): unsure at all n locations
attctatcaatagacctccaatctttaatggagagggttaccacaactggaaaacccgaatgcaaatttttattgaggcaatagatctaaatatctgggaagccatagaaatagggccttatatacccaccacagtagaaagagtttcaatagatggtagttcatcaagtgaaagcataaccatagaaaaatctagagatagatggtctgaagaggatagaaaatgagtacaacacaacctanaagccaaaaacataataacatctgccctaggaatggatgagtatttcagagtttcaaattgtaagagtgctaaggaaatgtgggacactcttcgattaacacatgaaggaactacagatgttaaaagatctanngataatgcactaactcatgagtatgaattattttagaatgaatgcaaatgaaatattcagagtatgcaaaagagatttacacata

SEQ ID NO: 12416 - DNA, 361 bp, Glycine max
  unsure (1)..(361): unsure at all n locations
attactgacatgctagccaagcccaccctgaaccaaattgtgttgcagcagcagccttgaactcatcaaggaattntacaaatgaaccacagtctctttcaatcagttctagaagctccccggatggctttccacctccacactggttcatgcactcccagaagaagtcatggttccatacctgcactatgcattacaagattgattgattaattaagtactaagccatggtgttgaaacatgaattagagattctggttgcaagcatgcatgcctgtgctgcattgttgaaagctggaagaagtcacccttattgtatgatgtgacaataatctcttctagtgacataccatcaagctct

SEQ ID NO: 12417 - DNA, 330 bp, Glycine max
  unsure (1)..(330): unsure at all n locations
atatgtaaagagggtggtnttggattcatacccatgaccaatcggtcaccaaggtgcaactttaccgctgcgccatgacttgctttggggggcttttaatcatcttgataaaattagttcttactttttacttataaatttttatcacaggaagaatgattcatagcttaaataaaaatgagcatgctctcgatatggctgctcctgttcatgagagattgggtgatatggatggtcctactgacgacaattcctcattgaagaagagaaccaatgttctcctccatcgtgatcacactggagacttggaatgtcttgatggttgaatat

SEQ ID NO: 12418 - DNA, 381 bp, Glycine max
gcttgattctcattggagaggtaatgattctctagatgatgcgctccatgagaggttggatcaaatggagaatagagatcataatgaagaagaaaggaggagaagagggaatgatggtgttcctagacaaaaccgaattgatggtattaaactcaacattcctccatttaaaggaaagaatgatccggaggcctacttggagagggagatgaaaatagagcatgttttctcatgcaacaactatgaggaggaccaaaaggtgaagcttgccgccacggaagtttccgactatgctcttgtgtggtggaacaagctacaaaaggagagagcaagaaatgaagagccaatggttgatacatggacggagatgaaaaaatcatg

SEQ ID NO: 12419 - DNA, 226 bp, Glycine max
  unsure (1)..(226): unsure at all n locations
ttttgagcatctcgatatattatgcacctgaatcgggcatctgagtgaaaaggtatgccatatgagctaaccgagagcttcggtgntctatttcgagcgtctccacatattattggcctgaatcggacatccgagtcataagttatgggcagttagactatccatgtgcttccgtgtttaattntgagcatctgcatatatgatgcacctgaatcggacatctgag

SEQ ID NO: 12420 - DNA, 426 bp, Glycine max
  unsure (1)..(426): unsure at all n locations
aattctatttatagacctccaatctttaatgtttagggttaccactactggaaaacccgaatgcaaatttttattgaggcaatagatctaaatatttgggaagccatagaaatagggccttatatacccaccacagtagaaagagtttcaatagatggtagttcatcaagtgaaagcataaccatagaaaaacctatagatagatggtctgaagaggataaaaaacgagtacaatacaacttanaagccaaaaacataataacatctgccctaggaatggatgaatatttcagggtttcaacatgtaagagtgctaagganatgtgggacactcttcgataacacatgaaggaactacagatgttaaaagatctatgataaatgcactaactcatgagtatgaaaatattagaatgaatgcaaatg

SEQ ID NO: 12421 - DNA, 506 bp, Glycine max
  unsure (1)..(506): unsure at all n locations
atactcacgagtataaatcaatcttgtacaaatcataactaaattattatnntagtgtctgaaggcacttcaacattntaaaagaagatataactctaatcacacacacacacacaaaaaccaattcaatttatggaagagaactaattctatataattcaaaaatgttgtatataaaagtaaaaaaattataataaaactcagcttatataaaatgtcattttttattattaattatcactaaacaccaaacatttcagctcaactatctcaattgattcatacaacataatcataacacanatcatacattatcatcaacaacatactttcatcaccaataatcatcataaactatcaaatatcatgagtcgcatacaatcataaactatcacaaaacctcatcatactcaatcaccaacaaccatcatcataactgaagtacatcatagaccaagacaacatcaaacatcaaccacttattctanctcatgngagtcaacaca

SEQ ID NO: 12422 - DNA, 479 bp, Glycine max
  unsure (1)..(479): unsure at all n locations
acgctcgacattaaacatcagaagctcttatatattcaaatgggcctattttttcatgcggatgtccgattatggcgaatcacatgtcgagacgctcaaaattgaacaacggaagctcttgagaaattctaatggtcataaattttaactcggatgttcgattcaggcgcatcacatatagcggcgctcgaacaggaacaacggaagctctcgagatattcaaatggtcatgaactttcagactgaggtccgattctggattataatatatcaagacgctcgaaattaaacatcggaagctctcgagaaattcaattggtcatcactcttcacacggatgtccgattcgggcgcataatatgttgacacgctcgatactgaacaacggaagctctcgagaaattcanatggtcataacttttcacacggatgtccaattcatgcgcatcacatattgagacgcatcgaaatgaacaacg

SEQ ID NO: 12423 - DNA, 412 bp, Glycine max
  unsure (1)..(412): unsure at all n locations
tcccgagagctttttttgntcattntcgagcgtttctatatgtgatgcgccttaatctaacatccgtgcgaagagttatgaccatttgaatttctcaagagcttccgttgttcaatattgagcgtctcgatatgtgattcgcctgaatcgtacattcgtgtgaaaagttatgaccatttgaatttctcaagagcttccgttggtcaatttcgagcctctcgatatattatgcgcccgaatcggacatccgtgtgaaaagttatgaccatttggatttcgcgagagtttacgatgtttaatttcgagcgtatcgatatattattcgcctgaatcagacatccgtgtgatagttatgaccatttgaattttcaagagcttcctgtgttcatattcgaacttctctacatattat

SEQ ID NO: 12424 - DNA, 438 bp, Glycine max
  unsure (1)..(438): unsure at all n locations
cttcaatatctttattctagatgactnngncactttttgtgtctctaatccctccattncaaaacttcctatatttaaggtttttacacagattaaaaaactatttatatatacaaacttaaactaaattattctaatttataaatcataaagataaactaatagtccacaatacaaaataattatccaataattgtccaataactcanactcaataataataatcataaacataaactcaagactactcaatgtccaataattatccataaactcacattagcatcaaagccaatgtccacactaattgtccacaaactcatattcaagcatcaaactcaatgtccacactaatngtccacaaagtgaaatttaagattataaatatatatggtagatttacaaatggtaacgcataattccaaaaaccccatattc

SEQ ID NO: 12425 - DNA, 328 bp, Glycine max
  unsure (1)..(328): unsure at all n locations
atcttgggcctttttcccacaactctngtaaatgggagagaaatgttcatctaaagcatacaaatctctaatgttatcaaatcctaaaatntgagctcctagtgagcaaaacaatgtgtgtctcctagagagggcatcagctaccacatttgtttttcccttnttgtatttgataacatatggaaattgctctangtactctacnnccatttgcatgcctttgtttaacttgctttgcactctaatgaacttaagtgattgatgatcactatgaatgacanattccttggaaacaaggtaatgttcccaagttcttagtgctcttatt

SEQ ID NO: 12426 - DNA, 405 bp, Glycine max
  unsure (1)..(405): unsure at all n locations
tgttagtcttattcgtcagttctttgaccttccaccaccatcttcatagatttagattattattatattntgttttttaagccttgcatttggctatgtntttatgacattcgaacacttagtatttcttttaatatttgcttagtatgattgaacatgatgataatatttacttgctcttggttgtttatggctatggttgttaaacttaattattntgatgatatatatgtctagtggtatgtacttacatttggtattgtgctntatgtatgttttagaattatntatgtatgaattattttacacacttttggccttttgatgttgccaaagggggagagaaaaatgggtattttagaaatcaagatattatattttcaaagtcttaaattaagcataaat

SEQ ID NO: 12427 - DNA, 378 bp, Glycine max
  unsure (1)..(378): unsure at all n locations
cgtaccaagcttcaattggagtcttgtcttttacagacttagttggacatctgttgagtatgtaaacaacagtgtagactgcttcagcccaaaatatgttaggtagtcccttttccttgagcatcgatctagccatctccataactgtgcgattctttctctcggacactccattttgttgaggagaatatgcgactgtaagttgtctctcaatgccttcatcctcacaaaatctttcaaactcgcgagaggtgtactctctgctgcgatcacttcttagtgactttatccgtcttccactttgattttcagcaagggccttgaactctatgaatactccaaagacttctgatgattctnttagaaaatatacccatg

SEQ ID NO: 12428 - DNA, 322 bp, Glycine max
gcgtctcgttatattatacgactctattagacatccgagtaaaatgtgattgtcgtttgagttggctcagagcttcaacattcaatttcgagcatctcgatatgttacgggactcaatcagacatccgagtaaaaagttattgtcttatgagttggctcagagcttcaacattcaatttcgagcgtctcgatatatgacgggactcaatcagacatccgagtaaaaagttattgtcgtttgaattggctgagagcttcaacatgtcaattcgagcgtctcgatatgttacgggactcaatcagacatccgagtaaaaagata

SEQ ID NO: 12429 - DNA, 399 bp, Glycine max
  unsure (1)..(399): unsure at all n locations
tgtctgcatgaatccttgtttatatcgagacgctcgatattgaatgttgaagctctgagcaaattcaaacgacaataacgttttactcggatgtctgattgagtcccgtaatatatcgagacgctcgaaattgattgttgaagctctgagaaaattcaaacgactataactttttactcggatgtctaattgagtgccgtaatataacgagacactcgaagatgaatggtgaatctctaagcaaattcaaacgacaataactttttactcggatgtctaaatgagtctcgtaatataacgagacactcgaagatgaatgttgaagctctgagcagattcaaacgacnactacattttactcggatgtctgattgagtcccgtaatatatcgacacgctc

SEQ ID NO: 12430 - DNA, 296 bp, Glycine max
  unsure (1)..(296): unsure at all n locations
cacagcaagactaacttttctctctctgcttcgtggacgttagataatgggataccaatccatttgctaacaatctctgtgatatcaaggtcagtgacctcttctccaaataaagaatgtccggactttctgaagtcggttaggctcttttcagcttcttctaattggcgctgaagggacatcaaagttccatacttaagctcggcagcacggttcatgtcataatcacgctcagcagctttcatctctaagttgactctatcaatctatacacgtgtntataacaattaagtcgc

SEQ ID NO: 12431 - DNA, 437 bp, Glycine max
  unsure (1)..(437): unsure at all n locations
ctggaactacttcacattgtctngatggngcctatgcaagttgaaagccttggaggaaagaggtatgcctatgttgttgtggatgatttctccagatttacctgggtcaactntatcagagagaaatcagacacctttgaagtattcaaggagttgagtctaagacttcaaagagaaaaagactgtgtcatcaagagaatcangagtgaccatggcagagagtttgaaaacagcaagtttactgaattctgcacatccgaaggcatcactcatgagttctctgcaaccattacaccacaacaaaatggcatagttgaaaggaaaaacaagactttgcaagaagctgctanggtcatgcttcatgccaaagaacttccctataatctctgggctgaagccatgaacacagcatgctacatccacaacagagtcacact

SEQ ID NO: 12432 - DNA, 382 bp, Glycine max
  unsure (1)..(382): unsure at all n locations
atgcaagcttaatatatctatatatggtttanaacaagttttccgtcagtggtaccttaagtttcatgggataatttcttcattnggttttgatgaanatcccatggatcaatgcatataccacaaggttagtgggagtaaaatatgttttcttgttttatatgtagatgatattntacttgtagccaacgatcggggtttgctacatgaggtgaaacaatttctctctaagaattntgacatgaaggatatgggtgatgcatcttatgtcatcggcattaagattcatagagatagatctcgaggtattttgggtctatcacagganacctatattaacaaaattctagagagatttcggatgaaagattgttcaccaagt

SEQ ID NO: 12433 - DNA, 515 bp, Glycine max
  unsure (1)..(515): unsure at all n locations
acatagacagtatcatctgcatattgcagaaagtnaattggcaccttctgctnnccttctaaataactgctgtacagaccttnggatagagctgtcctcatcatgccagtcaagccttcagccacaatattgaaaaggaaaggggctaaggggtccccttgcctcaaacctctagtgggggaaaattcatttgaggggctgccatttatgagaatggatatagaagctgattgattgcaagcattgatccatttcctccatataggacagaaccccattctgaccatcatataatccagaaagttccatgagacagagtcataagcctttgcaaagtccactttaaacaccagagctggtttcttacttcttttagcttactctattgcttcattgagaatcaaagatccatgaaggatgtgtctatcctttatgaaagctgtctgtctctcatcaatgagtccaggcaatatatttcttaacctattggccaggaatntaacaatgatcttata

SEQ ID NO: 12434 - DNA, 462 bp, Glycine max
  unsure (1)..(462): unsure at all n locations
gttgtcatcatcaaatagtggagaatgtgaatgtatgtatacatgattntgatgatgtcaaagaagaatctaacaaggctgcttcaaatgataagcatttgcttcaagaataattcaagattgcttcaacaaacaaagccttgtttcaagattcactaaagaccaagccttgccttanaacaaagtgctttcaagacatgcaaggctctggtaatcgattaccaggaagtgtaatcgattaccagaagacagggttgagaaatagctgttgaaaaatgttttgaatttgaattttcaacatgtaatcgattaccatatgtctgtaatcgattaccagcaacgaaactttggaaattcaaattcacaagtcataacccttcacattataactgtgtagatcgatacacaaacattgtaatcgattaccagtggaaagtttcagaagatctgcaacagcacatc

SEQ ID NO: 12435 - DNA, 508 bp, Glycine max
  unsure (1)..(508): unsure at all n locations
caagactgtatcatgtgtcctactaatttataaattacaacgcgacttgtatatcagaggcatgactggaatcagtacatgatatttaatattaaatagagtttaatcaacaatctcgttctataattacttaaatcgattaatcacccaagttaattcacatgcatttttaataacactaaaaactaggtacatagaataccaatatttttgttcatttgaatgtgtccatcctgtgagatgactattggaggaaatcttaagcaatttctctgtcaagatattgatgtgtgattattaatttattggcaagtgtattaattcgtctaaatagtattntaaaataataagatcgagtattaagtccacaaaaactntgactgtactcanagtttgtatacgtctaattntaaacaattaatgaattaaattcaatattggtcgaataataatacagaatggtaaattcaacatacataaagataattaagtagagcatattaaagag

SEQ ID NO: 12436 - DNA, 488 bp, Glycine max
  unsure (1)..(488): unsure at all n locations
ctacagcagatgccactctattctaagttcttgaaggatatgttaacaatgtaacataagtatattcaccaggaaaacatcgtagtggaaggaaattgtagtgctgtgattcaaaagatccttccaccaaagcataaagaccctgcgagtgtaactatttcttgttcaattggagaagtcattatgggaaaggctcttattgacctgngagccaacattaatttaatgccactctccatgtgcagaatgttgggagagttggagatcatgcccactaaaatgactttacaactggctgaccgctccattaccagaccatatggagtaattaaagatgtgctggtcaaagtgaaacattttatcttcccgacagactntgtggtaatggatatctgtgaagatattgacattcctgtaatattgggaaagccattcatgttaactgcaagtngcatagntgatatgggtagaaagaagctggaaatggg

SEQ ID NO: 12437 - DNA, 299 bp, Glycine max
  unsure (1)..(299): unsure at all n locations
gacattcgacttaaatgttatgaccatttgaatttctcaagagcttccgttgttcaattctgagcgtctcgttatgtgatttgcctgaatcggacatccgtgtgacaagttatgaccatttgtatttctcaagagcttccgatgttcaatttcgagcctctcgacatattatgcgcccgaatcggacatccgtgtgaaaagttatgaccatttgaatntctcaagagcttccgatgttcaatttcaagcctctcgatatattatgcgcccgaatcggacatccgtgtgaaacagtatga

SEQ ID NO: 12438 - DNA, 442 bp, Glycine max
  unsure (1)..(442): unsure at all n locations
agcttataatatattgatacgctcganattaaatgtctganactctcgggaaattcanatagccataaattttcacacggatgtccgattcgggcgtataatatgtcgagaggctcgaaattgaacaatggaagctcttgagaaatttaaatgggcataacttttcacacggatgtccgattcaggcttataatatatcgatacgctcgaaattaaacatcggaaactctcgagagattcaaatggtcataactcttcacacggatgtccgattcgagcgcataatatgtcgagaggctcgaaattgaacaacggaaactctcgagaaaatcanatggtcataacttttcacacagatgtccgattcaggcttataatatatcgatacgctcgaaataaacatcggaactctcgagaattcaatgtcatactttcacacgat

SEQ ID NO: 12439 - DNA, 298 bp, Glycine max
gaagtagacccggagatggacaagacaatccgcagtattgtgagtagcattctgaaagatgcttctgtgcctgatgctgagaaagatgttccaacatcttccaccccaagtggttccgtgcctgatgctgagaaagatgttccaacatcctccgctccaaatgctgaagccctcccttcacccagtgaagaggaatcaacagaagaagaggatcaagcctcagaggagactcctgcaccacgggcaccagaaactgctccaggtgacctcattgacctggaagaagtcgaatctgatg

SEQ ID NO: 12440 - DNA, 495 bp, Glycine max
  unsure (1)..(495): unsure at all n locations
cgtccaatcctctaataggatcatctccataaatataatcactttcatcaccatctccatcatcatcaatgccttcctcagattgtgcatcatcatcaggttccacgaaaattaaattatctagatcaagagcttaaaatagatatcaaagatgttatatcagaaatagttaaaacttaaaataatacacaagcacattntaaatttgagaaagttcataaattataccttctcttggtgttattaaaattgcattntatcttctcttttgcattttccatctcatatatgaaaagtattcagtaacaagattgatccaactccaacattgtagggtcagttggtgtgttttgtaatagactaatataaagtatgaactatgaactatgagtttatcgtcatttgtttggcaaatggtgcattntaaatatatntacttattattcatatnnttttttacgaagtagactcttaagagtctacgagtcgactcgt

SEQ ID NO: 12441 - DNA, 429 bp, Glycine max
  unsure (1)..(429): unsure at all n locations
aagagctaattatctgaaaacttatatacctttatttaaactatcttataaatgagncaaaataacttataagctgactaattaaaaagacttaattataagttattgaagtaacttactaaacacatgtgtcgaattagtttatattaagaaatatgatattctgttgatcattctgaagatcattttaagaatattatttataagatngaattttcaaataacgcttctttatggcaataatgaagaagggtgttagatgaattcgagtataatatatctttcccacaaacgtgtgctaagatacatagttcaaaccataatataatgaagaatcagaatgactaatatataaattatagccaactaccatcagataacatttattttgattagacaatcttactataccatcgaagtggtattcat

SEQ ID NO: 12442 - DNA, 402 bp, Glycine max
tgcatgaccaagtttcttatgccataatcaatgattttctttgatagacaacaaatgcgataccttttgatctgatatttcacccaacttgatcttataacagttacctttccttatagcagaaaatagtagagactcatccttgttctggactacacactcattctacttaaaggaaacatcatatccactgtcacataattggctaatgcttagtagattgtgtttaagaccttcaacaaataatgcattatcaatagagggataaggatgtgtacctatcttacccactcttattattttcccttttttattccctttgaaagtgacaattccaccatgatagcgagcaggcattagaacatacacctttctcatgtcatgtgccatgagcaaccactc

SEQ ID NO: 12443 - DNA, 332 bp, Glycine max
ttttaggacatgctggattttataggcgattcataaaatacttttcaaaaattgccaaaccactcagtaatttactgaacaaggatgttgtgtttgcatttaatgaagactgcttggaagcttttaatgttctttagaccaggctagtatctacccctgtgattatagcaccacattggggacaagagtttgaattgatttgtgatgctagtgactatgtcgtatgtgctatacttaggcagagaaaaggcagagttttccgtgccatctattatgccagcgaagtcttgaatgatgcacaaatcaattatgctaccatctagaaagaaatg

SEQ ID NO: 12444 - DNA, 398 bp, Glycine max
tgccttgccccttgatatatttgagggactcatggtcgctatgaatgaaaaattccttgggataaaggtagtgttgccatgttttcaaagcccgtactaagtcatacaactacttatcataagttgaatagttaagtgtaggaccacttaacttttcactaaaataagcaattggatggcctgcttgcatcaacacagccccaatcccaacatttgaagcatcacactcaatttcaaaagatttttgaaaatttggcaacgcaagtatggaggcattagttagcttttgcttaagcatattgaaagcttcttcttgtttctctccccatttgaaaccaacatttttcttgagcacttcattgagaggtgctgccaatgtgctaaaatccttcacaaat

SEQ ID NO: 12445 - DNA, 354 bp, Glycine max
agcttcaaccaagatgggatggtccatttcaagtacttgaaaggataaatgacaatgcgcacaagattgaattgcccgatgagtataatgtgagtactacatttaatgtgtctgacttaacgctttttgatgtagatggagaagtcgatttgaggacaaatccttttgaagagggagagagtgatgaggacaaggcaaggaataagggcaaggaatctttataagaacttggaggacctatggcaagggctagaacaaagaaggccaaggaagctcttcaacaagtattaaccatgctatttgaatttagacccatgttacaagtggagaagcttcggattgttaattgcacca

SEQ ID NO: 12446 - DNA, 395 bp, Glycine max
tgccatgaattgtttcatgtgtactattatagaggctggcataatcctgtcataaaacacaaccataaactaaaataagcatatgtgatcagtgtcaaaataaaatgcaaccatttacaaaaccaatcaagaaaataagaatagattattacagctaaccaatcaacaagcctttcaggtagccatgcttgagattgcttgtccacataaaatatttcaattaactcccacgcagctttcaaagatgtaggctcttcacctctctatattatgtgtaatgtgttaaaaagcaagtgattaacttctcggtatcataattcccacaaagcagatctcagctcagctaaacacgggtaaacaatttagaacctaaaacagtaccttagcaattacat

SEQ ID NO: 12447 - DNA, 371 bp, Glycine max
tcaacattcaacttcgagcgtctcgttatattatacgactcaattagacatccgagtaaaaagttattgtcgtttgaatttgctcagagcttcaacattcaatttcgagcgtctcaatatatgacgggactcaatcagacatccgagtaaaaagatattgtcgtatgaattggctcagagcttctacattcaattttgagcgtctcgatatatgacgggactcaatcaggcatccgtgtaaaaagatattgtcgtttgaattggctgagagcttcaacattcaatgtcgagcgtctcgatatgttacgggactcaatcacacattcgagttaaaagttattgtcgttgaattggctcagactttaacattc

SEQ ID NO: 12448 - DNA, 397 bp, Glycine max
ttcaacatcagggttggggcagcagggacatgaaggtatccattctattccaattctctccttttgtctttttattagtattttttttaaattgaactaacattctatgctcttaagtttggcttcttttcatacttgtatataaatgtaaggtgtccctttcatacccccttttgtgttgcttggacatgcttgtgagttttttgttttccttttctctttttgataatttgattggacatgcttgtgagttttttgttttccttttctctttttgataatttgattgatgtgtgagcaatgatggttaggaggggagaagaagtgtctgaattctgagctatggcatgcatgcacgggccccttggtgtccctaccaactgcagggactcatgtg

SEQ ID NO: 12449 - DNA, 259 bp, Glycine max
agcttttggaaggatcaataagtgccttatgaatcctcccgtgcttatgccaccagtacctggaaggcctctcattttgtacatgacaatcttggacgagtcaatggggtgtatgctggggcaacatgacgaatccggaaagaaagagcgcgttgtttactacctaagtaagaagttcacgacctgtgaaatgaattactccttgctcgaaagaacgtgttgtgctttagtatgggcatcccatcgcctaaggcagtac

SEQ ID NO: 12450 - DNA, 395 bp, Glycine max
tgaaggcaaactggatgcgttggtcaacttggtaacccagctggccttgaatcagaaatctgtacctgtcgcaagggtttgtggcttgtgctcctctgctgaccaccatacagacctttgcccttccatgcagcaacctagagcaattgagcagcctgaagcttatgctgcaaatatttacaatagacctcctcaacctcagcagcaaaatcaaccacagcagagcaattatgacctttccagcaacagatacaaccctggatggaggaatcaccctaacctcagatggtccaaccctcagcaacaacaacaacagcctgctccttccttccaaaatgctgctggcccaagcagaccatacattcctccaccaatccaacaacagcaacaacccc

SEQ ID NO: 12451 - DNA, 371 bp, Glycine max
  unsure (1)..(371): unsure at all n locations
agctttggagtnttttgttacaattcgncttcttctttggtccagtcttcttctggcttcaattcatcagtgggctttccttctgtgtccagcatcttgggatgttcccagcctttgatgacagctttccaggttctgctatccagtgatttgaggaaggccaccatccttgctttccagtattcatagttggttccatctaggattggtggtctgttcactggtcctccttctttctccatgttcatcagaatttatctccctagatctcactctgtgatttcgagtgttggctctgataccaattgaaattctgataccaggggacagatgtcgtaccggatgtcacgacatcatgcttcagaacatgc

SEQ ID NO: 12452 - DNA, 278 bp, Glycine max
agctttcgtgaaattgaattggtcataacccttcacaccgatgtccgattcaggcgcataatatatcgagaagctcgaaattgaacaacggaagctctcgagaaattaaaattttcataactttccactcggatgtccgattcaagcacatcacatatggagacgctcgaaattgaagcacggaagctcttgagaaattgaaattgtcataacttttcactcggatgtccgattcaggcacatcatatattgagatgctcgaaattgaacaacggaag

SEQ ID NO: 12453 - DNA, 392 bp, Glycine max
tcagttcactacttcaagtagtgcatgatatgcttccagaggaaaacatgttgccaaaacattactatcaggtgaagaagatactgtgttcgatgggtatagagtatcagaagattcatgcatgtcctaatgattggatactatacatacatgagtttgaagaaaggcacaaatgccctaggtgtgggctatcgaggtacaaagtgaaggatgacgacaagtgtaacagtgacgaaaactcaaagaaatggccccccggcaaaaggtgttgtggtatcttccgatcatgccaaggtttaagcgtatgttttctaatggagatgactcaaaagaccttacatggcatgcagatgggagaaacggtgatggaatgctccaccatttggctgatt

SEQ ID NO: 12454 - DNA, 402 bp, Glycine max
tgccaacccatggaagctcctaatatctcccacactttttggggcgggccattcttggatggccttgattttctcagggtccacttggagcccatttctaccaactacaaaccctaagaaaactatattatctacacaaaaagtacacttctctatatttgcttagagggtgtttttcctaaggactgaaagaacttgcctgagatgtcctaagtgatcatctaggctcctactgtacactaaaatatcatcaaaataaacaactacaaatctacctatgaaatcccttaagacatgatgcataagcctcataaaggtgcttggtgcattagtgagcccaaaaggcatcactagccattcatacaaaccaaacttggtcttgaaagcggttttccactcatc

SEQ ID NO: 12455 - DNA, 394 bp, Glycine max
tcaagaataatggccttagcaaacttcttattcccaaatggaaattcaataaataggcctcctatttttaatggagagggttaccactactggaaaacccgaatgcaaattttcattaaggcaatagacttaaacatttgggaatccatataagttagaccttatgtacccaccatggtggctagaaatgcaacaatagagaaacctatagaatagtcgactgaagatgaaagaagattagtgcagtacaatttaaaggctaaaaacatcattacttctgccctatgaatggatgaatattttatggtttcaaattgtatgagtgctaaggatatgtgggacactctacaaattacacatgagggaacaactgatgttaaacgatctatgataa

SEQ ID NO: 12456 - DNA, 394 bp, Glycine max
tcttggggttggctggctattataggaaattcattgagggattttccaaattggcattgcccctaactaagttgactcgtaagaacgagaagtttgtctggaatgagaagtgtgatcaaagtttccaagagttgaagaggcggttgacgacagctccgatgttaattttacccgaccctaagagaccatttgaagtgtattgcgatgcaagtgggcaaggcctgtggtgtgtgttgatgcaagagggaagagtggtggcttatgcttcatgtcaattacgtcctcatgaagttaactacccgacccatgacttggaactagcagcggtggtctttgccttaaagattaggaggcattatttgtacggtactcgttttgaagttttcagtgatca

SEQ ID NO: 12457 - DNA, 395 bp, Glycine max
taaacattcaatttcgagcgtttcgttatattactagactcaatcagacatccgagtaaaaagttattgtcgtatgaattggcttaaagcttaaacattcaactttgaccgtctcgatataatacgggactcaatcagacatccgagtaaaaagttattgtcgtttgagttggctcagaggttcaacattcaatttcgagcgtgccgatatattacgtcactgaatcagacatccgagtaaaacgttattgttgtttgaattggcctatagcttcaacattcaatttcgagcgtgtcgatatattacgagactcaatcggacatccgagtaaaaagttattgtcgttagaattggctcaaaggttaaacatacaatttcgagcgtttcgttatat

SEQ ID NO: 12458 - DNA, 363 bp, Glycine max
agctttgagccaattctatctactataactttttactcggatgtccgattgagtctagtaatatatcgacacgctcgaaattgaatgttgaagctctaagcctattcaaacaacaataacgttttactcggatgtccgattcagtgacgtaatatatcgggatgctcgaaattgaatgttgaacctctgagccaactcaaacgacaataatgttttactcggatgtctgattgagtcccgaaatatattgagacgctcgaaattgaatgttgaagctctgagccattcaaacgacaataactttttacttcgatgtgtgattgagtcccgaatataattagacgctagaaattgaatgttgaa

SEQ ID NO: 12459 - DNA, 369 bp, Glycine max
tgtcatacttgttccagaaaggagaatatatgtttttgttaatgtttgcgccatgtcaaagtgccacaaggatactcttcaaatgttaagagccttgtgcagttcgaatttctaaaatggcgatacaagacattttacctaacaaagtcaagcatgccataactcgcttgtgctttttcttcaatgccatatgtagcaaagtcattgatcctctcaaatcgtatgagctggaaaacaagactgctattatcttgtgtcagatggagatgtattttcctctttcatttttttgtcatcatggctcacttaattgttcattctatgagggaaataaatgttatggtcccgtttatttgtggtggatgtacc

SEQ ID NO: 12460 - DNA, 367 bp, Glycine max
agcttagaactcctcacttacaagttgctttaaggattttgagacatttgaagggatctccaggcttaggcctattctattatgttgataatgacttgaagatccaagtcttctttgattcagattgggcgatatgtccagttagcagaaaatcaatcactggttattgtatttttcttggaaaatccttgatctcttggaaagctaagaaacaaaccacaatttctaggagttctactgaagttgtgtatagagttcttgcttctcttgcttgtgaattatagtggctgaagtacctttgtgatgatcttcatcttcctattcttgttcctttttgtactttttctgatagtgagtctgcaattta

SEQ ID NO: 12461 - DNA, 388 bp, Glycine max
tggaggaagaaggagatgaatgaagggagatgaagagaagagcacgaaattttgtgcttaaaaaagctcggaaatctgaagtttaattttcaaatgatcaaagttgaaaaaatgcacacacatagtctctatttatagcctaagtgtcacacaaaattggagggaaatttgaatttctattcaaatttcacttgaatttgaaattgaatttgtggagccaaattttggagacaaaatttcactaattatgattagtgaattttagatatggttcagcccactaatccaagatcaagtccaagattctccactaagtgtgcttatgtgtcgtgaggcatgtaaaacatgaaggacatgcacaaagtgtgactatatgatgtggcaatgg

SEQ ID NO: 12462 - DNA, 371 bp, Glycine max
ttgaggattttcaaacgacaataactttttactcggatgtctgattgagtcccctaatatatcgagacgctctaaattgaatgttgaagctctcagcaaattcaaacgacaataactttttacttgaatgtctgattgagtcccgtaatatatcgagacgctcgaaattgaatgttgaagctctcagcaaattcaaacgacaataacttttttactcagatgtctgattgagtcccgaaatatatcgagacgatcgaaattgaattctgaagttctgagctaattcaaacgacaataactttttactcgaatgtctaattgagtaccctaatatatcgagacgctctaaattgaatgttgaagctctcagc

SEQ ID NO: 12463 - DNA, 275 bp, Glycine max
agcttcaactttcaatttctagcgtctcgatatattacaggactcaatcagacatccgagtaaaaagttatcgtcgtttgaatttggtcagagcttcaacattcaatttacagcgtctcgatatattacgggactcaatcagacatccgagtaaaaatttattctcgtttcaatttgctctgaggttcagaattgaatttcgagcgtctagatatattacgggactcaatcaaacgtcttagtaaaaagttattatcgtttgaattagctcagaa

SEQ ID NO: 12464 - DNA, 313 bp, Glycine max
agcttatgctgcaaacatttaatatagacctcctcaacctcagcagcaaaatcaaccacagcagaacaattatgacctctccagcaacagatacaaccctagatggaggaatcaccctaatctcagatggtttagccctcaacaacaacaacaacagcctactccttccttccaaaatgctgctggcccaagcagaccatacattcctccaccaatccaacaatagcagcagccccagaaacagcaaacagttgaggctcctccgcaaccttccctcgaagaacttgtgaggcaaatgactatacagaacatg

SEQ ID NO: 12465 - DNA, 387 bp, Glycine max
tgtatcaaattcaaacgacaataagttttttctcggatgtccaatagagtcccgtaatatatcgagacgctccaaattgaaattggaagctcgtatcaaattcaaacgacattaacttttgacttggatgtccgattgactcccgtaatatatcgtgacgctccaaattgaaaacagaagctctaagacaattcaaacgacaataactttttattcggatgttcgattgagtcccgtaatatatcgagatgctccatattgaaaacggaagctcgtatcaaaagcaaaccacaataactttttactcggatgtccgattgagtcccataatatatcgagacgctcgaaattgaaaacggatgctcgtagcaaattgaaaccgcaata

SEQ ID NO: 12466 - DNA, 382 bp, Glycine max
tcttatccaaggcacattcttggtggtgaagctccttcttccttagcttattccctagtggatggcgcctgctctctcctcttctcctttgtcttctgttgcatctccatggtggaaaatcatcattgaaagacctcattgaagctcaaagatccagcctccatagaagctccagaagcaagcttccattaggaatgatggttcttctctcaatcaatcagcctaaaaatattgatgaagaattgagtgaagattctaaggtgattgctatggaagaggaactaagtcagttcattaataacaaggttggaatctagttcctcctcctcagaatcagacagtgattggaaccaagtggatgttcaaaaacaagcttaatgaa

SEQ ID NO: 12467 - DNA, 372 bp, Glycine max
tataagagcatgtagaagcaaatgacttttatgttttgatgatgatcatgatgatttgatgcaaatgatgcaaatgcgcttttcaagtttaaattcaagacaatgattcaagaatacaagacacaacatcaagatgatcactattattttaggaagggaattcctaattgatatagcaaaaggtttggccaagtaatttaagttaaaaatgtttttcaagagatttactctctggtaatcgattaccagaggatgtaatcgattaccagtggccaaaaatggtttacaatagctattaaaaatttaaattcaaattttagattgtgtgatcgattacataatattggttatcgattaccagcagttaataaa

SEQ ID NO: 12468 - DNA, 178 bp, Glycine max
agcttctatagaaggttctttcctaatttctctaaaattgcctcacctttcaatgagctggtgaagaagaatgtggcatttacctaggttgaaagacaagagcaagcctttgctttgctcaaagaaaatcttactaagggacctgttctaactcttcctagattttctaaaacttttg

SEQ ID NO: 12469 - DNA, 364 bp, Glycine max
tttacgtaaaaaccaaactgatcgctggaatgaggattgccaagaggcttttggaaggatcaagaagtgtcttatgaatccccctgtgcttatgccaccagtacctggaaggcctctcatcttgtacatgacaatcttagacgagtcaatggggtgtatgctggggcaacatgacgaatccggaaagaaagagcgcgctgtttactacctaagtaagaagttcacgacctgtgaaatgaattactccttgctcgaaagaacgtgttgtgctttagtatgggcatcccatcgcctaaggcagtacatgctgagccatactacctggttgatatccaagatggacccggttaagtacatctttgaa

SEQ ID NO: 12470 - DNA, 389 bp, Glycine max
tgctaacccatggaagctcctaatatctctcacactttttggggtgggccattcttggatggccttgattttctcagggtccacttggaccccatttctaccaactacaaaacctaagaaaactatattatctacacaaaaggtacacttctctatatttgcatagagggtgtttttcctaaggactgaaagaacttgtctgagatgtcctaagtgaaaatctaggctcctactatacactaaaatatcatcaaaataaacaactacaaatctacctatgaaatcccttaagacatgatgcataagcctcataaaggtgcttggtgcattagtgagcccaaaaggcatcactagccattcatacaaaccaaacttggtcttgaaagcag

SEQ ID NO: 12471 - DNA, 194 bp, Glycine max
agcttgtaatcgattacactcatactgtaatcgattaccagaggagtttttcagaaaacattctcaacagtcacatctttttatctgattcttaagtggccatcaaaggcttatatatatgtgactagagacacgaattgaacaagagttttgaagaacaaaaaggtcttatcctcttaacaagcaaaatgttt

SEQ ID NO: 12472 - DNA, 230 bp, Glycine max
agcttgtaattgattacacacatactgtaatcgattaccagagaagattttcagaaaatattctcaacagtcacatcttttcattttgttcttaaatggccatcaaaggcttatatatatgtgacatgagacacgaatttgctaagtttttttcagaacaaaaaggtcttatcctcttaacaagcaaaattgttttatcctcttacaaattccttggccaaaacactgtg

SEQ ID NO: 12473 - DNA, 265 bp, Glycine max
  unsure (1)..(265): unsure at all n locations
agcttcttcataaatgtgtcatttgtgcgcaatacacaatgctcggtacaccacaacaaaatggtgtatcagaaaggcgtaatagaactttaatggacatggttaggagtatgttaatcaatttgactatacccgtatctttgtggatgtatgctttgaaaactgccatttatttgttgaataggattcctagtaaggcagttccaaagacacttttgaatgtgtgacaataggacactcatataaggcactcnctgtttggggt

SEQ ID NO: 12474 - DNA, 266 bp, Glycine max
  unsure (1)..(266): unsure at all n locations
agcttccatcaactggtatcagatcttcaatgaagaacctcaagatttgaggtcaaatcctttccaaggtggagggaatgatgcaatcctaccccacaaggtcattggatagaagactccaagtagattgggtcagagatccaagggaaggccctagggttctcatgagccttagggtagattttgagacccatagctaagtatgaagccttctttgtttngaaaanatcanatntgtttttnctttttttggggctcgtgttttg

SEQ ID NO: 12475 - DNA, 399 bp, Glycine max
tgaaggtaaaatagatgccttggttaacctggtaacccaactggccatgaatcaaaaatttgcacctgtcgccagactctatggtttatgctcctctgtcgaccaccgcacagacctttgcccttctgtgcaacaatctgaagcaattgaacagcctgaagcttatgctgcaaacatctacaacagacctcctcaaccttagcagcaaaatcagccacaacagaacaattatgacctcttcaccaacaggtacaatcccgggtggaggaatcatcccaaccatagatggtcgaatcctttacaacagcagcaacaacaaccttattttcaaaatgttgctggcccaagcagaccatacgttcctccaccaatccagcagcaacatcagcaacagcacca

SEQ ID NO: 12476 - DNA, 371 bp, Glycine max
agcttgtcaacagagttcatcaagttaatatctctattcctttaggatgcttgttgttccactaaaattctgattatgcgtatgaaaaaaaaatttattggaagaatcaaaacttattttggttatttctattcccctagatctagtcttatgattttttattatggacatagtttcttttcgaaaaaaataatatatttaatttttatgtattattaatttagtcaccttaaaaagttaatatgatttaatcaattaaatactataaatctataatagctttgatttttaagaaaataatcatgcaaattaacaaatttattttatatgataatttgtaattaaatattaataatataaaatcccattga

SEQ ID NO: 12477 - DNA, 194 bp, Glycine max
agcttttgagaaactcaaatggtcattacttttcactcggaggtccgattcaggcgcatcacatgtcgagacgctcgaaattgaaaaatggaagctcttgagcaattcaaatggtcataaattttcactcgtacgtccaatacaggcgcataatatatcgagaggctcgaaattgaacaacggaagctctcgag

SEQ ID NO: 12478 - DNA, 387 bp, Glycine max
tgccgccacggagttttccgactattctcttgtgtggtggaagtgattatgcaagttgaagtggacgtttccattgggaaatacaatgataaggtactttgtgatgttgttcctatggaggccagtcacttacttttggggagaccatggcaatttgataaaagagccaatcatgacggttacaccaacaagatctctttcattacttttggtgttgcataaaaaatgtacaatgtaagtcggctaggtttttttgtgcgagctcaaccgacattttgtttcggccgaaactggcatgttcccatttattttggccaggataacattatcccacctcggcagaaaaatatttgctattccacttcatgcatattttattcacggaat

SEQ ID NO: 12479 - DNA, 203 bp, Glycine max
agcttgaaattgatctatgtatgctctcgacaaattcgattggtcataacttttcacacggatgtctaattttgggacctaatatatcgagatgctcgaaattgaacaacggaacctatcgagaaattcaaatgttcaaaacgtttcacacggatttccgattttgggacataatataccgagatgctcgaaattgaacaacg

SEQ ID NO: 12480 - DNA, 366 bp, Glycine max
agcttgtaatcgattacactagtcttgtaattgattacctaaggagattttcagaaaattatttccaagagtcacatctgttcaaatggtttttacatggccatcaaaggtctatttatatgtgactaggaacacaaatttgctgagagtttttttaaagaacaaaaaggtattattctctcaaaaagaaaaatcttcttatcctcttaaaaattccatggccaatacacttgcaattcaataaggaattttttgagtgctcaattgttcaatctatctctttcaagagagatttcttcttctcttcatcttacttctaaaaagggattaagagaccgagggtctcttattgtaaagaaatctgaa

SEQ ID NO: 12481 - DNA, 309 bp, Glycine max
agctagcagggttaaagtctcacgattgtcacgtgctcatgcaacaattgttagttgtggctatacgagacatcttgccaaacaaagtcaggttagccataactcgcttgtgctttttcttccatgctatatgtagcaaagtcattgatcctatgaagtttgatgagctggaaaatgaggccgcaattatactgtgccagttagagatgtattttccccctactttctttgacatcatgattcacttgattgtgcatctggtcagagaaatcaaatgttgtggtcttgtttatctacggtggatgtacc

SEQ ID NO: 12482 - DNA, 449 bp, Glycine max
  unsure (1)..(449): unsure at all n locations
cttgatggtgttgagaagaaatcacnngtttgtcatcatcaataagggggagaatgtgaatgtncgtatacatgattntgatgatgtcaaagaaggatctaacaaggctgcttcaaatgatnagcatttgcttcaagaatgattcaaggttgcttcaacaaacaaagccttgtttnaagattcactaaagaccaagccttgccttanaacaaagtgctttcgagacaagcaaggctctggtaatcgattaccaggaagtgtaaacgattaccagaagacagggttgagaaatagctattgaaaaatgttttngaattgaattttcaacacgtaatcgattaccatatgtctgtaatcgattaccagcaacggaactttggaaattcaaattcaaaagtcataacccttcaaanataattgtgaatcgatacacaaacattgaatcgata

SEQ ID NO: 12483 - DNA, 418 bp, Glycine max
agcttccaagaatcaagatcaagactcaagattcaagaatcaagagaagaattaatcaagataagtatgaaaaagttttttcaaaaactgagtagcacatggatttttctcaaaacatgtttaccaaagagtttttactctctggtaagcgattaccagattgttgtaatcgattaccagtagcaaaatgtttttgaaaaagttttcaactgaatttacaacgttccaattgatttcaaaaagctataatcgattacaatgttttggtaatcgattaccaatgtgcttgaacgttgaaattcaaattcaaatgtgaagagtcacattctttcacaagaaaagctttgtgtaatcgattacactgatttggtaatcgattaccagtgatagtttctgaacaaatcataagatgtcactc

SEQ ID NO: 12484 - DNA, 387 bp, Glycine max
gctttgatgaacattcggagaggttaatgtaacaacgagatgatgcgctccatgagaggttggatcaaatggagaatacagaccatatgaattgctcaagagcttccattgttcaatttcgagcgtctagatatataatgcgccttaatccgacctacgagttaaaagttatgaccatttgaaatgctcaagagcttccattgttcaatttccagcgtcacgatatattatgcacctgaatcggacctgcgagtgacaacttatgaccatttgaattgctcaagagcttacattgttcaattttgagcgtcacgatatattatgcacctgaatctgacctgcgagcgacaacttatgaccatttgaattgctcaagagcttccattg

SEQ ID NO: 12485 - DNA, 454 bp, Glycine max
  unsure (1)..(454): unsure at all n locations
agctngcaaaccaaatgctcaccatttctatatgagaagccttcaggttgtttcatataaacctcttcctctaaatcaccattaagaaaggttgttttcacatccatttgttgcaactcaaggtcaaaatgagcaactaatgctaagataatacaaagagaatctttcttaaatataggagaaaaagtctctgtgtagtcgattccttttttttttagtaaatcccttagcaacgagtctttccttgtatctctcaatgttgcctaatgaatcccttttagtcttaaatgtaacatcccatttttcgtgaattaaattaaaaaggttttagagttctagaaaaaaaaatgatgaggcttttgttattaaataaataagaagaaataacattattaatataatggttcgaaggaaaataaaaatgatatttgattattcatttgatagaaaataa

SEQ ID NO: 12486 - DNA, 339 bp, Glycine max
gcttcaacattcaatttcgagcgtctcgatatatgacaggactcaatctgacatccgagtaaaaagttattgccgtttgaattggctcagagcttcaacattcaatttcgagcgtctcgatatatgacaggactcaatcagacatccgagtaaaaagttattggtcgttgaatttgctcagagcttcaacattcaatttcgagcgtgtcgatatattacgggcctcaatcagacatccgagtaaaaagttattgtcgtttgaattggctcagagcttccacattcaatttcgagcgtctcgatatattacgggactcaatcagacatccgagtaaaaag

SEQ ID NO: 12487 - DNA, 414 bp, Glycine max
  unsure (1)..(414): unsure at all n locations
agctcgctctaaatntacattgatgtttgtatttatgtgaggaggttgtacgccatttttgttttaagagtagtgtcccactggtaaaactaactttccaaatttttgccttcgcaggaaatggccccgaggaagcttgcctcaaagaggtccaggaaggacaaggcagccgaaggaactagttccgctccggagtatgacagtcaccgctttaggagcgctgtacaccagcagcgcttcgaggccatcaagggatggtcgtttctccgggagcgacgcgtccagctcagggacgacgagtatactgatttccaggaggaaatagctctacggagttttaaaagattggctaagattntgttaaaacataagcacttagacaatgaaggaaagctggagttgctgcacatgatg

SEQ ID NO: 12488 - DNA, 439 bp, Glycine max
cgcaagcttcaacattcaatttgagcgtctcgttttattacgggactcaatcagacatccgagtaaaaatttattgtcgtttggattggctcagagattcaacattcaatttcgagcgtctcaatatattacgggactcattcagacttccgagtaaaaagttattgtcgtttgaattagcttagagcttcaacaatcaatttcgagcgtctcgttatatcacgggactcaatcagacatccgagtaaaaagttattgtcgtttgaattggctcagagcttcaacattcaatttcgagcgtctcgatatatgacaggactcaatcagacatccgagaaaaaagttattgtcgtttgaatttgctcagaggttcaacattcaatttcgagcgtctcgatatattacaggactcaatcagacatccgagtaaaaagatatt

SEQ ID NO: 12489 - DNA, 452 bp, Glycine max
  unsure (1)..(452): unsure at all n locations
tacgtgaactataaaactaagcttaagctagaggagacggaccattccaagtgttggagaagattnacgacaatgcctacaagattgacttgcctaggtagtataatgtaagtgccactttcaangtgtctgacctctctcttcccgatgnagatggaggagccttggatttgaggaaaaatccttttcaagaaggagggagtgagtaggacacaactaaggacaaggaccatgaagcacttgaagcgcccatgaccagaggcagacttaaacaggcccaacacatattagagacaaggctggccatttgtatagctgccattgatgatggttaaaggcccaagtggagaaagatgaaggcccagaggcagagccactaccaagactattaattgttgctgaaggcccanactaatttataagcccaagttaaatatatttttagttataat

SEQ ID NO: 12490 - DNA, 452 bp, Glycine max
  unsure (1)..(452): unsure at all n locations
agcttatgctgcanatatttacaatagaccttctcaacctcagcagcaaaatcaaccacagcagagcaattatgacctttccagcaacagatacaaccctggatggaggaatcaccctaacctcagatggcccagccctcagcaacaacaacagcagcctgctccttccttccaaaatgctgctggcccaagcagaccatacattcctccaccaatccaacaacagcaacaaccccagaaacagccaacagttgaggcccctccataacctttcctcgaagaacttgtgaggcaaatgactatgcagaacatgcagtttcagcaagagaccaaagcctccatttagagcttaaccaatcagatgggacaattagctacctaattgaatcaacaacagtcccagaattctgacaagctgccttctcaagctggtctaaaatccaaaaatgtca

SEQ ID NO: 12491 - DNA, 200 bp, Glycine max
agcttacacacaagaccatactccctctgcgtctcaaacccaggaggttgctccatataaatatcctcctcaagatcaccatggaggaagacatttttaatatcaagctgatggaggggccagtgatgtatggcagccatagcaagaaacagacgaacaatagtgattttggctacaggagaaaaagtatcacaataatc

SEQ ID NO: 12492 - DNA, 411 bp, Glycine max
  unsure (1)..(411): unsure at all n locations
agcttcacattctagacaaggtcaagttcattgcgtctgctacaaagtctacaaccaacagaataatgaacaagttctaagtaacagaaacaagtgcatgatgtatagtgttaaacaaatagagacattgacaccgagtctaacctgcatcttctttggtgaaacacaagggaggtgtaattctgaagacatttccatagtaaccacccttaccaataagtactcctagttctatagtaatttagaatgaccggttagtaataatatagaagaaaactatagctaggatcaaaatatgtgtctagactagagggatatggattttacctttcattnggtccattacatgcaatgtttcattttttgctggagttttaagttcacgatcagtgacaagttcaactcctagca

SEQ ID NO: 12493 - DNA, 387 bp, Glycine max
  unsure (1)..(387): unsure at all n locations
ttatccatgacttcctatggtggtcagcttgtgcttgactcttcttctccttgaagtgacanctccaatcatctttcttccttctccattccgntaccattgacctccaccacacacccgcctccatcgatgaccaagatccaagggctacaagctccacatggagctacatcaaatcttctaagtgcttgacttgctcttgtgcaagactcttcatgttattttggttttctctttctatcatttgctttttggcatcatcaaaatctacaacattacatataaccacaatcactagcaccgttaccaccacctccatcatcattgccaccaccatcgtaaccaacatcaccactactactgacattggtaccaccaccataacca

SEQ ID NO: 12494 - DNA, 370 bp, Glycine max
caatgtggaaaacaaagtaagatcgcgagatcagatagaggtggggagtactatggtagatacacagaggatggacacacaccaggttcatttgcgagatttcttcatgaacatgggattgttgcccaatacactatgcctggttctccggatcagaatggtgtggcagaacgaagaaatcgaaccttattagacatggtgagaagcatgaggagtaatgtaaagcttcctcacattttgtggattgatgctcttaagacggctgcgtatatattaaaccgagttccaaccaaggctgtctcaaagacaccttttgaattattcaagggatggaaaccaagtttgcgacatatacgcgtttggggatgcc

SEQ ID NO: 12495 - DNA, 471 bp, Glycine max
  unsure (1)..(471): unsure at all n locations
gacccgggatacttagagtcacctgccgcatgcaagcttgttcttaactcatcttctccttgaagtggcatctccaaccatctttcttccttctccattccactgtcattgatcttcaagaagcaaaagactccattgatgaagaagatccaaggcctacaagctccatatggagctatgtcaattactaaataaaacttattaaaaacatattcggttcagaacaaggccgtcaaagtttacaaaagaaattttgttaaatcaatgagatgaaataaaataaaataacaacatgcaattaaaagaaaaattcatcctcaatgttgcatcctatcagagcattgtgtcctaacatcctctagcacgaggttctttaaagtcatctacctagtcatctgctcccatgaacacaagattcgagatcatcacaagatccanacacaaataacacacagggagtgaattatcaca

SEQ ID NO: 12496 - DNA, 453 bp, Glycine max
  unsure (1)..(453): unsure at all n locations
agcttccgcggatgaatttgtctagagtaaattcttcattntatttatcatgtcgtggggatcgagggaaaaacgctcagaaactaatggcccactaccactaggaaatgaagtacatgctttatcagcattaatatattgttggtgttcattacaaaaaactaaataataaaagggaaattaattntaatcatatctcaaccaaaagagaatcaaataggaatttaggagataatataataaaggtgttttaggtcaaatgctttagatttctataaaataattttttatatattcttaaataaaagatatttctgaaatattaaataaatctgaatccaatataatatttatttaaaaaatgttctatgttgattattttatttacttttaagatttctaactcgtcacaactcataaatcctaataataaaattaagactgaaatataat

SEQ ID NO: 12497 - DNA, 458 bp, Glycine max
  unsure (1)..(458): unsure at all n locations
ttaagtcacctgangctgcagctaagctccttcaactgcacaaagctcttaatatttgaagagtatccttgtggaacctttactcgacgaagacactgacaaaaacttatcttctccttcttggacaaagtatggcaggttgggggcaagtaaattttcttcccatcagaccttggatgcaactgtgatcgtatacccatatcagctagatcttgacgggtattcaagccatccttcgtcttgccttgaatgttaaggagcgtcctaatcacactgtcacaaacatttttctccacatgcataacatcaatacaatgtctaatgtcaagatcacaccagtatggaagatcaaagaanatggacctcttcttccatatgcaactctgacttttatccttcttttgggtcttcctaaatacagtattcaggtgctgaacctgctgatatacctactcact

SEQ ID NO: 12498 - DNA, 448 bp, Glycine max
  unsure (1)..(448): unsure at all n locations
tggaagaactaaacttgagaaattgcaatcctatgaggttgttgatggataacaaatcancaattgatttagctaagcatcctgtggcacntggcaggagtaaacatattgaaaccacatttcatttcctacgtgatcaagtgcataaggagaaacttgaattggattttttgaggtctgaagatcaagttgcagacataatgatgcaatcctaccccgcaaggcattggatagaaaaactccaagtagattgggccagagatgcaagagaaggccctaggcttcttatgagccttagggtagatttcgggcccataggctaagtacgaacccgcttatctttgtaaatattagattaaggtttcattatttttgggccttgtatttagggctccataatgtangtagcggaccctagaaatatangatttttcagcccttgtatttt

SEQ ID NO: 12499 - DNA, 447 bp, Glycine max
  unsure (1)..(447): unsure at all n locations
agctttgtagtcctctntgatcaaaggttcatatattataattctcaggccataatagggatgatagaaatagatctaaaccaaatagtctccctaatttatattgcccctaattacacaatgaatcttaatgatttcatacaaaacataaacctagaagtccaggcaatagggtttggaagaaactttgagggacataacttacacttggatattaccttcattggcagaataagtgatcaaatatcccctagatacatgataaacactaatccattagtgacaaccttatcatctgatggaatccaatttttgccacccgaaatctttgattcctctagaaaccaaaacaatcaatggcaaaaacatatagatgctggatcctctaggatggcaataaccattcgtggatcagctataataacaaacagaagagatagtctttta

SEQ ID NO: 12500 - DNA, 411 bp, Glycine max
  unsure (1)..(411): unsure at all n locations
agctntgtagcagatgccactctactctaaattttngaaagatatgttaacaaggaagcataaatatattgatcaggaaaacatcatagtggaaggaaattgcagtgctgtgatccaaaagatccttccacccaagcataaagatcctggaagtgtaactattccttgttcaattggagaagtcaatgttggaaaagctcttattgacctgngagccagcatcaatttgatgccactctccatgtgcagaagattgggagagttggaaataatgcccactcgaatgactttacaattagctgaccgctccattactaggccatatggagtaattgaagatgtgttggtcagagtaaaacattttatcttcccggcagactntgtggtaatggatatctctaaagatactga

SEQ ID NO: 12501 - DNA, 400 bp, Glycine max
  unsure (1)..(400): unsure at all n locations
agcttcaacattcaattntgagcgtctcgatatatgacgagactacatcatacatccgagtaaaaagttatagtcgtttgaatttgctcagagcttcaacattcaatttcgagcatctcgctatattacgggactcaatcagacatccgagtaaaaagtttgttgtttgaattggctgagagcctcaacattcaatttcgagcgtctcgatatattaagggactcaatcagacatccgagtaaaaagttatggtcgtttgaatttgctcagagcatctacattgaattgcgagcgtctcgatatattacgggactcaatcagacatccgagtaaatagttattgtcgtcggagtatgctcagaggttcaacattcaatttcgagcgtctcgatatattac

SEQ ID NO: 12502 - DNA, 345 bp, Glycine max
  unsure (1)..(345): unsure at all n locations
ntcactcggaggccncattcaggcgcataatatatcgagacgctcgaaantgncaacggaagctatcgagaaattcaaatggtctatacttctaactcggaggtcctatagaggtgcataatatatctagacgctcacaattttacaatggaagctctntggctntacaaatggtcataacttttcactcgagcgtccgattaaggcgcataatatatcgagacgctcaaaagtgaacaatggaagctcttgagcaattcaaatggtcataactngtcactcggaggtccgattcaggcgcataatatatcgtgaccgctgaaattgaacaatggaagctcttga

SEQ ID NO: 12503 - DNA, 443 bp, Glycine max
  unsure (1)..(443): unsure at all n locations
tcagctgcttctcaactcnntgcttctcaatgccccaccaagaaaaccatgattatgncgggccaagacatttatagtagccaagatgaggttactacttcacctttctatagtgacagtgaagaagcaaaagggaaagaatntagtgaagaaatctacccccaagaagaagggaaccttttaatggtcagaaggcttctaggaggccaatctagtgacttgaactaatctcaaagagngaatatttttcacacaaggtgtaaaattttttataacatgtgctctctcattgtagatggtggttcatgttgcaattgttgtacnacaagattagtctctaagttaagccttgctatcactccccatccaaagccttacaaacctcaatggctcaatgaacaaggagaaatgatagtcaatcaacaagtgaaagtgtcattctc

SEQ ID NO: 12504 - DNA, 417 bp, Glycine max
agcttataatatattgatatgctcgaaattatacattgtaagctctcgagaaattcaaatggtcataacttttcacacggatgtccgattcgggcaaatcacatatcgagacgctcataactaaacaacggaagctatagagaaattctaatggtcaaaacttttcacacggatgtccgattcaggcgaattacatatcgagacgctcaaaattgaacaacagaagctctcgagaaattcaaatggtcataacatttaactcgaatgtccaatttaggcgcatcacatatagtgacactcgaaattgaacaacggaagctctcgtgaaattcaaatggtcataacttttcacactgaggtccgaatcaggcttataatatatcgatatgcctcgaaataaacatcggaaactctcgc

SEQ ID NO: 12505 - DNA, 454 bp, Glycine max
  unsure (1)..(454): unsure at all n locations
agctntaagtaaaaaggaagcatgaaccatgatagcttaagaatcccgaatctaatgtccatgctcantttttaagactccaccaaaacatgaaacacttggatttcccaacggactgccatttttaaggcttgcttttcaaagttcaaattaataaaatggtaaatagtcacttttatatctgaatgtgtagtttactaacaaatgtgtccctganagatgaaaatacaaaatttagttcccaaaatggtaaaaagtgtgaaaaatatatctgactcttaacttccgtccatcaccattaataaaatagtatacgtgacacaaatgaatgaatttatcactgaaatgattgtcaacgtgattatctctactttntgtcttcccactctctangaatatgaatgagtaaatagtcacttttgtccatgaatatgtaattcgctaacaaatgtgt

SEQ ID NO: 12506 - DNA, 393 bp, Glycine max
gacactatagaatctaagcttgacaggaattacttgtatggttggatgtttaattctggttgttcctggtgcggagatgatggtacagcgggtgaaccagaagcggaagtttcttttggtgaggtagccatggaaaagcagagcgtttggaatgatttcgtaaatctcagaaaactattgggaaatgctggtgaaaacacgaatgccaagcagatataaatttgaatgaagaatgtagaggggcgtgtgaagcaacggtcgaatttgctttgtggtgaacgtgctattaatgttaagtgattcgtttgggcacgttcagattgctgtagttgctataattcctctagcaaacaaatgcccagcttgcccctcagttttccaaactgatttgca

SEQ ID NO: 12507 - DNA, 356 bp, Glycine max
ctgcagctcttggatgctacttttatactttcagatcataatgcatcctccaaacaaggagaaaatggcattcatcattgcagatgccaacttttgctataggaacatgccatttgacctcaaaaacataggcgcgacatatcaacgactaatagaccgagtcttcaaagaacagatcagacgaaaaattgaggtatatgtggacgacatggttgtcaagtctcaaagcataccctaacatctggtggacctggaagaagtatttgggaactatgcaaatacgacatgtgcctcaaccctgaaatatacttttggggtaggtggcgacaagttcctcggcttcatgatcacacatc

SEQ ID NO: 12508 - DNA, 384 bp, Glycine max
  unsure (1)..(384): unsure at all n locations
tatacggcctangatgtggttttgtgactgttttcaatttaaacacaagtcttttacttgccacattggtacaactccctccatcaatgatcaccatgcaaactttgccattgatcaaacatctagtgtggaaaatgttttctctttgactttcctccatagacttcaattgatgaccaagtaaccgcctaatcatcaacaattctccctccagtgttttctccacttcctcctcatcatcctcactctcttctcccttttcaacttcagactcattaatgtactctccatctctaagaatcatggctttcttgttagggcactcatatgcataatgtcccaagccttggcaccaaaagcacttcacatcctggctcttttttt

SEQ ID NO: 12509 - DNA, 216 bp, Glycine max
cttgtattatacgtagatgatattctgcttgcgactaatgataagggtatactatatgaggtgaaacaatttctctcaaagaactttgatatgaaggatatgggagaggcatcttatgtcataggcataaagatccatatagaaagatctcgatgcattttacgctcgtctcaagaaacctatatcaacaaagtcttagagagaattaatatgaaa

SEQ ID NO: 12510 - DNA, 375 bp, Glycine max
  unsure (1)..(375): unsure at all n locations
ataactcggatgtccgantctggcgcacaattgatcgagacacttgatattgaataacagaagctctcgagaaattcgaatggtcctaacttttcacacggatgtccgattcgggcgcataatatgtcgagacgctcgaaattgaacaacggaagctctcgagaaattccaatggacataacttttcactcggaggaccgattcaggcgcataatatatcgagacgctcgaaattgaacaacggaagctcccgagaaattcaaatggtcataacttttaactcagaggtccgattcaggcgcataatatatcgagacgctcgaaattgaacatcgaaagctctctagaaattcaaatggacataacttttcactt

SEQ ID NO: 12511 - DNA, 482 bp, Glycine max
  unsure (1)..(482): unsure at all n locations
gatccttgagtcacctgcggcatgcaagcttcccaccaatggtatttaaaattttatgatgtcatttcttcattcagctntgaagagaatatcatggatcactgtatataccagaaggtcagtgggagtaagatttgtttccttgtattatacgtagatgatattctgcttgcgactaatgataagggtatactatatgaggtgaaacaatttctctcaaagaactttgatatgaaggatatgggagaggcatcttatgtcataggcataaagatccatagagaaagatctcgaggcattttaggcttgtctcaagaaacctatatcaacaaagttttagagagatttaatatgaaagattgtttaccaagtgtagctcccattgtgaagggtgacaaacttgctntgagtcaatgccccaaaaatgattntgagcgggaaaacatgaaaaatattccatatgcttcagcagttggaagcct

SEQ ID NO: 12512 - DNA, 368 bp, Glycine max
  unsure (1)..(368): unsure at all n locations
ttctttcctagtgtgcaatttaaagaaaatgataatgatcaacagagccttttacacttaatctttattcaatttttatgaaggtcaatcgatacagtaaattggtataccacagccatcagagaactagtttcagaaattctctaaaagctggtgctttaattagatagatgctgccaaacggtgttttattgcccaaatgaaaaattctttattactagtaaagtagaactgatatatcatttctgaatttgttatggcagcttcatacttttccagaaggaaaagtgtatcaagaagatgtgcctataangcggttgaaatggggaactgctagcctaattgttcgagcacctataactccaatt

SEQ ID NO: 12513 - DNA, 344 bp, Glycine max
gcgcttcaacatgatgactgacaagtatggcataaaccctggtatcaatcattattcttgtatggctgatcatcttggtcgtaaaggacatctcaaagaagctttagaaattattaaaagtatgccttctgaacctgattctggaatacggagtgcattgctctctgcttgcaaacttcatggtaagatggagatgggcaagcatgtgtctgaacagctatataaactggagccccaagtggcacgttccatacgcggagatggctaacatatatgcatcagctgaaatgtgggaaggcattgcagctattataagaaatatgatatatcttcaagtcatgaaa

SEQ ID NO: 12514 - DNA, 437 bp, Glycine max
  unsure (1)..(437): unsure at all n locations
agcttggatttccttttagtagggaanctantctttctaagatggagccaaacccagtcaccctcattaagaactagctcttttcttcctctattgcctttagttgaatacacctttgtttggttctctattttgttcttaaccctctcatgcaacttctttacaaattttgacctagattccccttctttatgtataaaagaagtgtccagtgggaggggaatgaggtctaacagtgttaggggattgaacccatagacaacctcaaaaggggactgcttggtggttctatgaacccccctgttgtaggcaaattctacatgaggaagatactcatcccaagacttatggttgcctttcagaagagcccttaanagggtggataaaaacctattcactacctctgtttgcccatcagtttgtggatgacaagtggt

SEQ ID NO: 12515 - DNA, 447 bp, Glycine max
agcttctatagaaggtttgttcctaatttctctacaattgcatcacctctcaatgagctggtgaagaagaatgtggcatttaactggggtgaaaaacaagagcaagcatttgatttgctcaaacaaaagcttactaaggcacctgttctagctcttcctgacttttctaaaacttttgagctagaatgtgatgcctctggagtggtagttggagctgtattgttacaaggtgggcaccctattgcttattttagtgaaaaacttcatagtgccaccctcaactaccccacctatgataaagagctttatgccttaataagagccctacaaacttgggaacattaccttgtttccaaggaatttgtcattcatagtgatcatcaatcacttaagtacattagagggcaaagcaagttaaacaagaggcatgcaaaatgggtagagtac

SEQ ID NO: 12516 - DNA, 397 bp, Glycine max
aactcaagcttcatcgacaagcctatcgatgctcttggtagtgtataagcatttttggggcaagccttgttgaggtcggtgtagtctacgcacatcctacatttcttagttgctttcttcaccacgatgacgttggttagccaagttttgtggtccacttctctaatgaatttaacaaccaaaagtttctcggtttccacctcaattgttttcctcctttcgtctctcagtttgcgcttcctctgagctatgggtttatccttagggaagattgccaacttatggaaaatgaagtcagggtcgatgcctgacatgtcagaagcactccattcaaacaagtcggcattgtcaaagagcgcttgagttatctccttttgcacttcgtctcccatctctt

SEQ ID NO: 12517 - DNA, 440 bp, Glycine max
  unsure (1)..(440): unsure at all n locations
agcttaatagctcgtatactgatcataatantatagcttataacacactcgagcagggactagtcaacacacttactgaacatacacttactacaatgcataaagtataaaaaataaatacacttgaataagcttgatctcacaattcttaacagcctcacgaacaacatggaaatcactagaatatgctatgtctttccatgctaaacaggattttcagcaatgacaattgcttatttactgtcacaataaatctcagtagcgtccatcttctccactcccaaatcaaacataattttcttcaaccaaatggcttagttagttgctgcagctgctgctacatattcatcttcagcagtagatngagatacaatgtcctgcttatttgagttccaagagaacatgtgtgagcctaacgaaataacatattcagtagtgct

SEQ ID NO: 12518 - DNA, 437 bp, Glycine max
agcttaatagctcgtatactgatcataatctcaaagcttaaaacacactcgagcaagtactagtcaacacacttactgaacatacacttactacaatgcataaagtataaaaaataaatacacttgaataagcttgatctcacaattcttaacagcctcacgaacaacatggaaatcacttgaatatgctttgtctttccatgctaaacaggattttcagcaatgacaattgcttatttactgtcacaataaatctcagtagcgtccatcttctccactcccaaatcaaacataattttcttcaaccaaatggcttagtttgttgctgcagctgctgctacatattcagcttcagcagtagattgagttacaatgtcctgcttatttgagttccaagagaacatgtgtgagcctaaggaaaaaacatattcagtagt

SEQ ID NO: 12519 - DNA, 411 bp, Glycine max
agcttaggaatcaatagcagtttggtgtttttagtttttatgtataataatttcactggtaccctcccaccaaatctttgttttggaaagcacctggtcaggctgaatatgggtggcaatcaatttattggcagcatacctcctgatgtaggaaggtgtacaactcttacaaggttgagacttgaagataataatttaactggggcacttcctgattttgaaactaatccaaacctctcttacatgagcatcaacaacaacaatatcagtggagcaattccatcaagtttgggaaactgcacaaatctctctcttttagatttgtccatgaacagcttgacgggtcttgtaccttcagagctaggaaaccttgtgaatcttcagactttggatctttctcacaataacttg

SEQ ID NO: 12520 - DNA, 423 bp, Glycine max
agctataatatattattacactcgaattatatcatcagaagctctcgagaaattcaaatggtcataacttttcacccggatgtccgattatggcgaatcacatatcgagacgctcaaaattgaacaacggaagctcttgagaaattctaatggtcataacttttaactcggatgtccgattcaggcgcatcacatatagaggcgctcgaaaaggaacaacggaagctctcgagaaattcaaatggtcataactttccacactgaggtccgattaaggattataatatatcaagacgctcgaaattaaacatcgaaagctctcgagaaattcaattggtcatcacttttcacacggatgtccgattcgggcgcataatatgtcgacacgctcgaaattgaacaacggaagctctcgagaaattc

SEQ ID NO: 12521 - DNA, 431 bp, Glycine max
  unsure (1)..(431): unsure at all n locations
agcttatttctcattttgttcttttactttaaatttgttaatntgtcgttaaagtgaatttcgtaatagtcgcacgacgtttgatttcaataaatctccttttacatgttttttaaatcttttaatcaatatctattttataaaatcacaatcgtccatttcatgtttagtgcaatttgtgtgaatttactttaataacaaataacatcactatttttggactgaaaaacaaacacacaaacaccttctcataattcactaggtcaggggtaaagatttttagatatcaaaagaatacaggcttatagatggaattgcttggagccaaatatatatatatatatatattattggaaatttctctataattaaggttggttcacattcaagtaaacatgcaagttcaaatacatgagaaattgaagagtaca

SEQ ID NO: 12522 - DNA, 454 bp, Glycine max
  unsure (1)..(454): unsure at all n locations
agctntcttcaatcgtcaatacgggtgttatgtttgagaaatcttcaatgcctagtatatattgtattctttccatgtttcaattggatgaagctcgtctctttctcacggataggacatgcatgatgtcctttgacactatatccactcaaattctcatatgctggaaagtcattaatggtacaaatgatcaattgtcttccattggggagaatcagccagatgtcagagcaatccatcacttttttctgccatatgcatcatgttcattagcaaacaatcgcttaaaccttggaattattgaaagatactagcacacctttgctggacgatcattggttgtggttgcatcatcactacatttgtcatccttcattntgtaccacgataccccacatgtatggaacttgcacantttcggcaactaatttctatacaatatgcaatcattatg

SEQ ID NO: 12523 - DNA, 435 bp, Glycine max
  unsure (1)..(435): unsure at all n locations
agcttcatgatgttgaatcaatattgattcttgagttttgatgataacaaagatgatgacaaaaagcccaagagaatgagttcaagattgaatcaagaacacttcaagaatcaagagagaatgagtttcaagatttaagttgaagattcaagaatcaagaaaagactcaatcaagataagtactaaaaagtttttcaaaacattgagtagcacatgaatttttcacaaaaccttttaccaaagagtttttactctctggtaatcgattaccagtagcaaaaattgttttcaaaaagctttcaactgaatttacaatgttccaattgatttcaaaatggtgtaatcgaatacaatgatttggtaatcgattaccagtgtggttgaacgttgaaattcaaattcaaatgtgaagagtcacatcctttcacanaaatg

SEQ ID NO: 12524 - DNA, 376 bp, Glycine max
  unsure (1)..(376): unsure at all n locations
agcttgaaactgaacaacggcgctctcagaattttatggcttataanncattagatgtccgatgcggggaaataatatatcgagacgcacgaaattgaacaacggaagctctcgagaaattcgaatggtcataacatttcactcggatgttcgatccggggacataatttatcgagacgctcgaaattgaacaaccgaagctctcgacaaattagaatggtcgtaacttttcacgcgaatgttcgattcggggacataactcatctagacgctcgaaattgaacaactgaagctctcgagaaatttgaatggtcataagttttcacacggatgtccgattcgggaacataatatatcaagacaatcgaaattgaac

SEQ ID NO: 12525 - DNA, 383 bp, Glycine max
  unsure (1)..(383): unsure at all n locations
tctttccatgcctcaatcggatgaagctcgtctctttctcacggataggacatgcatgatgtcctttgacactatatccactcaaatactcatatgctggaaagtcattaatggtacaaatgatcaattgtcttccatcggggagaatcagccagatgtcagagcaatccatcacttntttctgccatatgcatcatgntcattagcaaacaatcgcttaaaccttggaattattgaaagatactagcacaccnttgctggacgatcattggttgtgggtgcatcatcactacatttgtcacccttcattttgtaccacgataccccacatgtagggaactcgcacatttccgcaaactaattnctatacaatatgcgatcat

SEQ ID NO: 12526 - DNA, 369 bp, Glycine max
  unsure (1)..(369): unsure at all n locations
tttacattctggaatcgtttatcctatctctgacagccaatggatgagtcctgtccaggtagtcccgaagaaaaccggtctcaccgtgataaaaaaatgagaaggatgagttgattcctactcgggtgcagaacagttggagagtatgcatcgactataggaggctgaaccaggttaccaaaaaggaccattttccactgccattaattggccagatgcttgaacgcctggtaggtaaatctcactactgtttccttgatggtttttctggttatatgcaaatcactattgctcctgagaatcangaaaagaccacattcacctgccccttcggcacttttgcctataggaggatgcctttcggcctat

SEQ ID NO: 12527 - DNA, 379 bp, Glycine max
  unsure (1)..(379): unsure at all n locations
tttagaaaatgtcaatgcctattgtatactatttttcttccatgtttcaattgtacatggcttgtgtcttcttcatatatagagcatgcatgatggcccttaacactatatccactcaaattctcgtatgctggaaagtcattaatggtacgaaatagcattgcacgcaacttaaatgtcttattttgataccatcaaacacagtaacccccttgtcccacaactttgtcaagtcttcaatcaagggactgagataaatatcaatgtcctttcctagttgtcttgggcttgatatcatcatagataacatcatgcatttttgcttcatgcacaaccaaggagacaagttttaaattactagcanaatangccatgaact

SEQ ID NO: 12528 - DNA, 414 bp, Glycine max
  unsure (1)..(414): unsure at all n locations
agcttctggttggtattgattcttggttttaccctttaagaccttcatgtaccactcaactggatacatccactgtaaaaaaatgggattacataactgaatctccctcaccaaatgcacaattaagtgaaccataatgtcaaaaaatggtggaggaaaatacatctccaattgacaaaggacaatggcagtctcattctccaaatcatccaattgtcgagggtcaatggctttgttagagatagcattaaaaacaaagtacaaacgatttattgcaaccctaactttgtcaggcaagataccgcgaatcgctacatgcaatagttattgcattaacacatgagaatcatgagacttcaagccaaccaattntagatcattaatggatacaaggctcttgatatttgaagagta

SEQ ID NO: 12529 - DNA, 367 bp, Glycine max
  unsure (1)..(367): unsure at all n locations
ttacgtctatggacttagattgtttgccttttctttcattntagaggcacccatgtgatttggatatcaatccctttaaactttgaaatgaccactttttcatttattttaattatgtttatttttggtatacgttttgatgcattggatacatgcctcgaaatacaaggctaaaaccctatactactagaatggccaaaatacaaggcccaaacgaaggaaaaacctattctaatatttacaaagataagcgggctcatacttagcccatgggctcgaaatctaccctaaggctcatgagaaccctagggccttcccttgaatctctggcccaatctacttggagtcttctatccaatgcccttgc

SEQ ID NO: 12530 - DNA, 405 bp, Glycine max
  unsure (1)..(405): unsure at all n locations
agcttagcagattatcagcatttttgatanttaaatttccttgttgcggctcagtccaataccacttcaactcattttcaaacacagcccagttaaaatgcttcacaacgaagttaacaaagtcctcattgtcaatgttcattctactgatgcatgttccaattgggaaatcattctgtgtttgtataacttttaccgaggtgttagcatagctgccagagtccagtccagagaatttcaggataacatcacgtttactaatctgcagtgcagcaagtacgtataaattaaaatatatataaaaataatgcaaatcatctcatattctatcaatgaagaatggatcatgtaatattaagataaggcacagaagtctgaaacatacttagcttcatgcaacattta

SEQ ID NO: 12531 - DNA, 443 bp, Glycine max
  unsure (1)..(443): unsure at all n locations
agcttcaagaaaaagatggctcttagcaatanttcttatttccagaagggaattctatcaatagacctccaatctttaatggagagggttaccactactggaaaacccgaatgcaaatttttattgaggcaatagatctaaatatctgggaagccatagaaatagggccttatatacccaccatagtagaaagagtttcaatagatggtagttcatcaagtgaaagcataaccatagaaaaacctagagatagatggtctgaagaggatagaaaacgagtacaatacaacttataagccaaaaacataataacatctgccctgngaatggatgaatatttcanggtatcaaattgtaagagtgctaaggagatgtgggacactcttcgattaacacatgaaggaactacagatgttaaaagatctagaatatatgcactaact

SEQ ID NO: 12532 - DNA, 388 bp, Glycine max
tggtggctaattcatggcattaatgctccaatacttcaaaatattgcccttaagctacttgcgcaaccttgttcatcttcttgttgtgaaaggaattggagtacatattcatttatccattctttaaagagaaacaagatggcaccacatagagttgaagatttagtatttgttcatagcaacctacgacttctctcaaggaatactccacaatatcatcaagaggaaactaaaatgtgggatgtagctggagatgattttgggtcacttgatgattgtggtattcttgaaattgttagtttgtctttagatgaaccagagttagagggtgtctttttcaatgatgattgctagtttgtggaattcttgaagacttgaagttgctaat

SEQ ID NO: 12533 - DNA, 441 bp, Glycine max
  unsure (1)..(441): unsure at all n locations
agcttgtgcattcaatatcctgataaggttgttccatatgttctcaagactggactaatacatttgcattattgggaatagtaaatttgagaatgccatgctagatctaggagatcagttagtgtcatgcctctgtccattttcaattctttatcccttggacctttgcaatctacagatgtggtgattcatttggcagatagaagtgttgcttaccccgcaggtttcatagaggatgtgctggttcgggttggtgaacttatttttcctgttggattttatgttcttaatatggaaaagggagttttcccatggttcaattccaattattttaggtaggccatntatgaaaacagcccgaaccaagatagatgttatgctagccattgctatagaaattgtgatattgttgtcatttaacattttgatgcatgaacatcc

SEQ ID NO: 12534 - DNA, 439 bp, Glycine max
  unsure (1)..(439): unsure at all n locations
agcttgtcccacaagcctctcctacanttggttcatgaaaggcaaaagaaagtggtctttcctcatggcttctttgagcttgtggtaatcgatgcatattctccagccagtgaaagtccttgttgggattaggtcattcttttcatcctgaatgattttcgtgccccctttctttggtaccacctggattgggcttacccaagtactatcagaaatggggtagataatccaagcctctagaagcttgagcacctcttccttcattgatgggttaaggcttctcttgggctgtctgactggtttgtaatcttccgccatcattatgttgtgcatatagtagacagggttgattcttttgagatctgatatgtgccaccttattgctcactgtcaatgtacatccccttcttggtgaagatgtccttcatgaatttggcgt

SEQ ID NO: 12535 - DNA, 363 bp, Glycine max
taaatgtttgtaatcaaatatgttttgctgtggtatatgaaggttgttacctgcggtaatgtgcctcttgagtcatctttccagaaagttcccagatgtgtatatacgtcaacaagtttatatgagtatcgaggatggaactcaaaagctgccaatcctacacaccgtcggcttacttggggccttagactgctggaagtaagttactgactattttttctgggttagttattatggaatttaatactttactctgacatcctttgtacaattttacttctattattgcccccaagagcgtggcagtgaaggacatgcttcttctgattaaatttcaagttgaatttattgttctgaattaat

SEQ ID NO: 12536 - DNA, 396 bp, Glycine max
  unsure (1)..(396): unsure at all n locations
tcaaggaacaaagaatttcttattgtttgaccttctttgatgacacanaagaaatgtgtttgttgttggggtctttgggtaaagtgaaagatgcaaaagaagtggtgacaacacctcttctcaaaaaccctttgcaaccttctttttactatctttctcttgaagctatctctgttggggacactcgattgtccattgagaagtccacttttgaagtgngggatgatgggaatggtggtgtgatcatagactctggcaccacaatcacctacgttcaacaaaaggcctatgaggcactcaaaanagagttcatttctcataccanacttgctttgacaaaactagctcaacaggggtggatctatgtttctccttgccatcanggtcaacacaagt

SEQ ID NO: 12537 - DNA, 509 bp, Glycine max
  unsure (1)..(509): unsure at all n locations
gatactgatttgaaattatgattctcataaactaggagattgggaaacaaaaacttcctcatcaatatatccatttagggaaacactctttacatccatttggtacaacttaaaattcattattcaagcataagcaagaagtaaccttacaacctctaatctagctaccggtgcatatgtctcatcaaagtctataccatcttgtgggttataacctttggctacaaggtgagccttgaaaacctattttcctagttataacactattttcatcaagcttgttcttaaaaacctatttagttcctatgatgttcaagttattagtacttgttatcaattcccatacatcattccttttaaattgatntaactcatcatgcatagacataatccanaactcatcttttaatgcatcatcaaaaattaagggttcaacttaagacacaaaagccatatgttcacaaaacaaacttaaagagtgtctagtagatactctcttctcaatatca

SEQ ID NO: 12538 - DNA, 475 bp, Glycine max
agcttcgagattttcctcttgcaattatgtatccttaacatgtgcgagaagtttctgttatatcttgagagacttgcgtgggatattaaagataagtcatttggtacagtgtcaatacacgtttcaggaaagaattgttcatgatcttcaacattgttagtcctttccttgttgtaggaaactaattcctttccctagactaaacacaacattcttcttttataatgaatataacataatattctattattgacttatattgtgttaaagatggaaggatctcaagagtaagtctttattatagtaactttcagggaaaactcatacgagttactcaatttcatataatatttcacattgttttataatggaacatcatattttgtactctaaacaatcaattaacttttactctactaagagactatggtctcaatagatccacatatattatataatatttattatattctat

SEQ ID NO: 12539 - DNA, 401 bp, Glycine max
  unsure (1)..(401): unsure at all n locations
gtcacctgcggtcatgcacgctntgngatgcttgtccaaaaggcaaacatgtcatagtctctnttaaattaaaaaggtgtaagtttctacatctaaacctttggaacttttacacttggacttgcttggcccctctagaactatgagtttgagagttgactattatgctcttgtcattgttgatgattactcaagatttacgtggactttttttcttgctttaaaaagtgttgcttttaaagctttcaagaaacttgcaaaagttattcaaaatgaaaaagatttgacaattaagaccttgagaagtgatcatagaggtgaattccacaatgaagattttaaaactttttgtgaagaanatgggatttcacgtgattnttctgctactagaacttcacaac

SEQ ID NO: 12540 - DNA, 386 bp, Glycine max
  unsure (1)..(386): unsure at all n locations
agcttcttagttcttatgatgcagatgggttttatctacctcatgcactcctctaatgactatggcatcatttctggcgctaaactgctgggagttggaagccatcttctcaattaaatttctggcttcagcaggagtcatgtctccaagggctccaccactggcagcatctatcatacttctctccatattactgagtccttcataaaaatattggagaagaagctgttctgaaatctgatggtgggggcaactggcacatagtttcttaaatctctcccagtactcatacaggctctctccactgagttgtctaatacctgagatatccttcctgatggctgtggtcctggaagcannggaaaattnttctaagaatactctct

SEQ ID NO: 12541 - DNA, 351 bp, Glycine max
  unsure (1)..(351): unsure at all n locations
agctagccacaagaatatctaggatgctttgcttcattgaatgaaagcagtgagagcagtgagtgtgtggtggaacatcaacatggtgctagttttcataatgaggtggaaacagttaatgagtccaagaagagcaaggggcatgagtgcccaatttgcctaaaggtttttccatgtggccaagccttgggtggccataagagatctcatatggttggtgggtctaagagtagaagctttcaaacaattgtgcttcangaaccagtggcagaaattagggacttccttgatcttaatcttcttgctgctactaaggaagaaagcaatagccatgctgactctaacagtaac

SEQ ID NO: 12542 - DNA, 196 bp, Glycine max
  unsure (1)..(196): unsure at all n locations
tatgacacagtctcatggtcggtcctggacattatgcatgatagacagcgctcctgtcataaatggacaaagcggatctcaccttgtcttcactcagcaaccatctctatccttattaatggcagccctacaaaggagtttaccccatctagaggcttgaggcaaggggatcccctancccctctactctttaaca

SEQ ID NO: 12543 - DNA, 397 bp, Glycine max
  unsure (1)..(397): unsure at all n locations
acgcggacaagcatcgcagggatgttttatttgttcctgnggactgngttctggttcgtcttcgcccttaccgacagtcctccgccaaaggggatccctcgaccaatgtgaaattggctcgccgctattatggcccatttcaggtcacggctaagataggaccagtagcatatcgtgtgaactttccggcaggtgtacgcattcacccggtgtttcactgctccaacctcaaaccttttcggggcgagcccggatccactcctgcaattcctttaccacccaatttccatgagaatcagccgcttatatttccccttgccattctgggatctcgtcgcgcaacagctgagcctcacaacccttggcaggttttggtacaatggcaggggctctcacc

SEQ ID NO: 12544 - DNA, 330 bp, Glycine max
  unsure (1)..(330): unsure at all n locations
tatcttttgtgtgggatacncaatgtgagcatagtttccagaccctttttgaaagnataacgaccgctccagtgctagttttgcctaacccgagagaaccctttgaggtgtattgtgatgcatcanagatgggtttatgcggagtgttgatgcaaaatgaccaagtggtggcctatgcttctagacaacttaagactcatgagaaggaatatcccacccatgatctaaagttggttgctgagtttttgccttaagaattgaagacatatctgtttggctctaagttcgaagtgtttagtgatcataagagccttaaatacttgtttagtc

SEQ ID NO: 12545 - DNA, 425 bp, Glycine max
  unsure (1)..(425): unsure at all n locations
agcttattggagttatcatcacagaatgctntttatgcaatcctaccccgcaagggcattggatagaagactccaagtagattgtgccagagatccaagggaaggccctagggttctcatgagccttanggtagatttcgagcccatgggctaagtatgagcccgcttatctttgtaaatattaggataggtttttcctttgtttgggccttgtattttggccattctagtagtataaggttttagccttgtatttcgaggcattatgagtagtctttgtagtagagaattttttgtattttcatgtattttgtcatgggggtgagcttagctattatagggggtgtgtagctaagctctaccttctcatctcaaggaggtgagcttagctattagagaggtgtgtgtagttaagctctagcttc

SEQ ID NO: 12546 - DNA, 507 bp, Glycine max
  unsure (1)..(507): unsure at all n locations
atcctctgagtcacctgccgcatgcaagctngctcgtctttctgatatntatcatgcatattnttctgatgatgaccgattgtcaattagggatcaacttgaaacttatgtgcttcaagtgagaagaaatgcttctttttccacttgtgaagatgttcaaagtttggctatgaagatggttcaaactgagaaacatttggtatttccattggtttataaacttattgagctagctttgatattgtcggtgtcgacagcatccgttgaaagagctctttcagcaatgaagattatcaagtctaaattgcgcaataagatcaacgatgtgtggttcaatgacttgatggtatgttacaccgagcgggagatattcaagtcacttgatgatattgatattattcgaacatttaccgcanagaagtctcgganaggacacttgcctcgtaattttatttaacccgctatggtaagaaatatgttatctctttattttaaactatatttttg

SEQ ID NO: 12547 - DNA, 432 bp, Glycine max
  unsure (1)..(432): unsure at all n locations
tctataatattgcatctacatgcgatgattcttagtattgtccaaggtatataattttgttagctcaaaataacctttatcaaactcatataaccataaatgtgactgccaagtaaatttaagcaatggtttaattagatgtattttgattaaccgtaaacaaatacatgttaaaagtcgcgttttatgcactattaaaacatattntgtaaagtatgcgtctgatgtggtagataataaaaaanaataaagtagtgtctatcaattattatttttaaaaaaatactttcttgagtctcttttatttaattatattgttaatttaagaataaatacagtgacagttaanaaaccatccctattcgtaaaattgaccttttgaacttgtaacttaacattgttgtgaactccaatggatgaaaatatataata

SEQ ID NO: 12548 - DNA, 510 bp, Glycine max
  unsure (1)..(510): unsure at all n locations
gcatgtcgaacgttannaaattgaatgtttgggtttaagttntcaattataaaaaaaatgcttgaacctttattgtttacgcttgcatttctccttactgagttctctttcttcttgagtgtgagcttctgcttgtgcttgctttgtgctccttggttcaaatttggtgcttccttccttcaagtgtgtgcccttatccttcctttctagtgagtgtttataaaataaataaaatgtatatattctgttaataaatattataagtttaagttacttagtattaacaaatattttaagttagttagtatgtaaatagtacgttagttactattaacaaaaattctaaatttaagttagttagtatcggtaggtattgtgttgatatttcttacgtattaatagatatatcaatgttagattagttactataaaaatattatttggttggttagaatgacaatttattgagttatcgtatgtattgtcagacattatatgtgtgatatatat

SEQ ID NO: 12549 - DNA, 397 bp, Glycine max
  unsure (1)..(397): unsure at all n locations
tggactgatccacttgttgcccaagtttcatagtcttgcaggtgaagaccctcataaacatctgaaagaattccatattgtctactccaccatgaaaccttcagatgtccacgaagatcacatctttctaaaggcctttcctcattctttagagggagtggcaaaggactggctatattaccttgctccaaggtccatcacaagctgggatgacctcaagagagtattcttaganaaaattttccctgcttccaagaccacggccatcagaaaggatatntcaggcattaggcaactcagtggagagagcctatatgaatactggggagagattaanaaactatgcgccagttgccctcacccccnnnatttgagtaacttctctctatattttatg

SEQ ID NO: 12550 - DNA, 297 bp, Glycine max
  unsure (1)..(297): unsure at all n locations
gcttcaccaccaaaagagtgtcttggataagtatcttacagaggaagcttattgaagganaagaatgagaaagatagagtgatgcaatcctaccccctaagggcattggatagaagactccaagaagattgggccagagatgcnagagaaggccntacgggtctcatgagccttaaggtagatttcatgcccatgacatgggctaagtatgaactcacttatctttggatattagattaagggatcattattattggcccttgcattcagggctccataatatatgtagggtaccct

SEQ ID NO: 12551 - DNA, 333 bp, Glycine max
cttggatatgatggcacacataatattatatgtcatatattctgcgtatcaggtgtgctcttaatgtagaattttaggctactaagctttcaccttatcaattattataattataactgcgtaaccctttctttcgaacttttggcaatgtcaacctgtgctggtagagcaagatcacgacaaaacagagaatcggaaatcatgaaaacgtaatgcacgaactcaggttaatccaaaccctgatccagttggcactgtcgagccttcaacgacaagtactacttcctaatatagcactcaagactaatatgtatctggagttccaacatattg

SEQ ID NO: 12552 - DNA, 322 bp, Glycine max
  unsure (1)..(322): unsure at all n locations
agcttcagaatactttttcgagcgtctcaatatattactggactcagtcagacatccgagcaaaacgttattgtcgtttggattaactcagagcttcagaattcaatttcgatcgtctcgatatattacgggtctcaatcagacatctgaggaaataagttattgtcgtttgaatttgctgagagcttcaacattcaatttcgagcgtctcgatgtattacgggacttaatcagacatccgagttaaaagttattgttgtttgaatttgctgagagcttcaacattcaatttcgagcgtctcgatattntacgggactcaat

SEQ ID NO: 12553 - DNA, 406 bp, Glycine max
  unsure (1)..(406): unsure at all n locations
agctntntagcaattcatatggtcataacgtttcactcggatgtcggattcaagcgcataatatatcgagacgctcgaaattgaataatggaagctattgagcaattccaatggtcataacttttaactcggaagtccgattgaggcacataatatattgagacgctcgaaattgaacaacggaagctctcgagaaattcaaatggtcataacttttaactcggaggtcggattgagacgcataatatatcgagacgctcgaaattgaacaatggaagctcttgagcaattccaatggtcataactnttaactcggaggtccgattcaggcgcataatatctcgagacgttcgaaattgaacaatggaagctcttgagcaattcaaatggtcataacttttcactc

SEQ ID NO: 12554 - DNA, 315 bp, Glycine max
  unsure (1)..(315): unsure at all n locations
ctaccttcaatggtgcaatcatgatgactntgatgaagtcccattggtgtagtggtgtctatatattctgaacaaaactcaatagcttcctcagcaacgtatctttcaacaatgctagcctcttgtcgatatatcaattttttgtatatcctttcaagaccttcatgtaacgttcaactggatacatcaagcgtaaaaacacaggcccacacaaccgaatctcacgtacaagatgaacaattaagtgaaccatgatgtcaaaaaacgatggaggaaaatacatttctaattcacacaggataatggctgcctcat

SEQ ID NO: 12555 - DNA, 421 bp, Glycine max
  unsure (1)..(421): unsure at all n locations
agcttaagatatctctntatggacttaaacattctccgatgcaatggtatggtagacttagaaacttccttcttgaacaaaaatttgagagaggaaaagttgataaaacacatttcattaaaaagttctctcataacattntactcatgtaagtttatatggatgacatcatttttggttctactaatcgatctctttgtgaagattttgtacacaagatgcaggaggagtttgaaatgccaataatggggggggggattaaattactttcttggtctctatgtgaagaaaattgaccatggaacatttctctatcaaacatagtattgcaaagaacttctcaagaagnttaagatggacaaaagcaaggaggatgaaactcctatggctactaattgctaccttagtgcagatgaaaatg

SEQ ID NO: 12556 - DNA, 317 bp, Glycine max
  unsure (1)..(317): unsure at all n locations
atggtcataacttttcacgtgaatgtccttttcgggcgcataanatgncgagaagcgcgaaattgaacaacagaagctcttgagaaattcatatgggcataagctttcacacggatgtccgactcaggcttataatatatcgacacgctcgaaattgaacatccgaatctctcgcgaaatttatatggtcataacttttcacactgatgtccaattcgcgcgcataatatgtcgagaggctcgagattgaacaacggaagctctcgagaaattcacatggtcataacttttcacatggatgttccaatcgggcgcat

SEQ ID NO: 12557 - DNA, 297 bp, Glycine max
  unsure (1)..(297): unsure at all n locations
agttggaagccatcttctcaatcaaattctttatccttagcacgagagacatatcaccaagggctccaccactggcagcatcaatcatactcctctccatgttgctaagtccctcatagaaatattgaagaaggagttgctcataaatctggtggtgagggcaacttgcacacaatttcttgaatctttcccattactcatgcaagctctctccactaagttgtctgatgcctgaaatgtctnttctgatggcagtggtcctagtagcaaggaagaatttctccaagaacaccctct

SEQ ID NO: 12558 - DNA, 115 bp, Glycine max
tagacataactattcacacggatgtccgattcgggcgcataatatgtcgagaggctcgaaattgaacaacggatgctcttgataaattcaactggtataacttttcacacggata

SEQ ID NO: 12559 - DNA, 358 bp, Glycine max
tgtagggttaaagtctcacgattgtcacgtgttgatgcatcaattgttagtcgtggctatacgagacctcttgccaaacaaagtcaggttagccataactcgcctgtgctttttcttccatgccatatgtagcaaagtcattgatcctgtcaagtttgatgagctggaaaataaggccgcaattatactgtgccagttggagatgtattttccccctgccttccttgacatcatcattcacttgattgtgcatctcatcagagaaatcaaatgttgtggtcctgtttatttgtgatatatgtactcggtagagcgatacatgaagatcttaaaaaggtatacgaagaatctatatagt

SEQ ID NO: 12560 - DNA, 361 bp, Glycine max
tcacttaaggtaagggggatttttccacttcttgatccttaacctttttgtctagcaaaatttatgtataaaacaagtttaaggtcttttgtaggattaaagttactttggatatgttggatcaagtggcctctgaataattaagaaggggggttgaattaattattactgaacctttactaattaaaaatgtacccttcttaggcttttactataatgttaagaaagtaaataacagaaatggaaacttaaccaaaagtaaaagcaataattaaagtgcacaacggaaaataaagagtgtagggaagaagaagacaaacacaagagttttatactggttcggcaacaacccgtgcctaca

SEQ ID NO: 12561 - DNA, 372 bp, Glycine max
agcttctggtgggacatcttgacttgctttccaatctgacattcaccacagattctgccttcttctattttcagattgggaatgcctctaacagcacctttgtcaatgattttcttcatgcctcttaagtgcagatgtccaaatctttgatgccatattttgacttcatcttctttggaggatagacatgtggaggagtaactggtttcttgaggtgtccataggtaacagttgtcctttgatctgctgcccttcattagaacttcactcttctcatttgtcaccaagcattctgactttgtgaagtttacattgaatccttcatcacacaactgactgatgctgatcaagtttgcagtcagttccttcacc

SEQ ID NO: 12562 - DNA, 391 bp, Glycine max
agcttgctaacccatggaatctcctaatatctcccacactttttggggtgggccattcttggatggccttgattttctcagggtccacttggaccccatttctaccaactacaaaccctaagaaaactatattatctacacaaaaagtacatttctctatatttacatagagggtgtttttcctaaggactgaaagaacttgcctgagatgtcctaagtgatcatctaggcttctactgtacactaaaatatcatcaaaataaacaactacaaatctacctatgaaatcccttaagacatgatgcataagccttataaaggtgcttggtgcattagtgagcccaaaaggcatcactagccattcatacaaaccaaacttggtcttgaaagg

SEQ ID NO: 12563 - DNA, 384 bp, Glycine max
agcttctagatgagttatgtttgttattcggacatcctgtgaaaagtgatgaccatttgaatttctcgagtgcttccgttgtttaatttcaagcgtctcgatatttatgtcctcaaatcaaacatcggagcgaaatgttatgaccattcgaatttgtcgagagcttccgtttttcaatttcgagcgtctagatgagttatgtcaccgaatcagacatctgagtgaaacgttatgaccattcgaatgtgtcgagagcttccgttgctcaattttcagcgtttagatgagttatgtcaccgaatcggacatctcggtaaaaagttatgaccattcggctttgtcgagagcttccgttgctcattttcgaccgtcttgatatattat

SEQ ID NO: 12564 - DNA, 366 bp, Glycine max
ttcagtaactttcttattttatgtcttttatgcacgataccacattgcctgatcaggctttatgaaggttatatgtcctctaagactgaaaaaagcaggctgcccaaagcaacagaagagacaagttagactagaaactcggatgaaaatccattaaaatttgcaggagttgcaataacatgtctaatgaatgtttatatcaaacaaccacatggaactgtattagcaatgtccaacattcaggaaaattaataaccaaatacctttccatctcccaatgatgggtttgagattatgtcagaaagatgaatacgatcagtgtacactgatctaatcccattgttagatattggacttgaaccagag

SEQ ID NO: 12565 - DNA, 381 bp, Glycine max
agcttcagcctttgatgatgtattaccgaaaagagaaagagagggttgatgagattcgaaggctcaagaagaaaagagaagagcttctttttgctttacaagaggctgagagaagatatgatctggctagagctgcagacctgcgatatggagcaattcaagaggtggaaactgcaatacaacaacttgaagggagcactgaagagaatctgatgttgactgaaactgttggaccggagcaaatagctgaggttgtgagccgctggaccggtataccagttacaaggcttggccaaaatgaaaaagaaagattgattggacttggtgacagattgcacagcagagttgtaggacaagaccaagctggtaatgctgttgctg

SEQ ID NO: 12566 - DNA, 352 bp, Glycine max
agcttctcgatatatttttttgtctgaatcagacatctgagtgaaatttatgaccatttgaatttctcgagagcaattgttgcccaatttcgtgcgtctggatatattattcccctgaatcggacatctgagtgaaaagttatgaccatttgaatttctcgagagcttccgtttatcaatttcgagcatctatatatattatttcccggaatctgacattcgtgtgaaaagttatgaccatttaaatttcttgagagcttccattgttcaatgtcaagcgttctgatatgttatgcgcctaaatcggacatccgagtgaaaagtcaggacaatttgaatttctagagagctt

SEQ ID NO: 12567 - DNA, 382 bp, Glycine max
agcttctggtacacttgagtatcagaccaaacaaaataacctcctggacgcaaaactcgattcaattccaaaagcaacatgccacctggaaaagagtttcacatttctaagtaactatggttaacacaaagctaagccattatgaagattcaatatgaattgaaaaatccaaattcgagagaagtgttagtaagaccaaccatctagatgccaaggtactctacaacgtgcacaatgtacaagatcaaagacactgctgggaaatggtagcctttgagaacccatgacagcagatatggcaggaatccctctttcaagagcaaattgcacttgtgcttcatgttcatctttaggtgcaaaagacattgcaataacatctctt

SEQ ID NO: 12568 - DNA, 372 bp, Glycine max
  unsure (1)..(372): unsure at all n locations
tatagtcattacttgttgagaaccataatctaaagnngtttgttcctttgatatagtaaataatttgttttgtggccttgagatgagtagtggttggagtctccatgtattgactgatgagtcgagtaccatatagaatgtctggtcttgtggacgtcaaatatcacaaactacccaccaaactcttgaaatttgtagcacccatcttttttgcttcgtcaaactttgataacttcattttgcactccaccggtattccaattggcttgcatagttttgctatgaaatgaagattcaatcttccttttgctttacctcaataccaagatagtatgacattagtccaatatcggtcatcttgaactccttgac

SEQ ID NO: 12569 - DNA, 377 bp, Glycine max
tcaagcttgctcacccatggaagctcctaatatcttccacactttttggggtgggccattcttggatggccttgattttctcatggtccacttggaccccatttctaccaactacaaaacctaagaaaactatattatctacacaaaaggtacacttctctatatttgcatagagggtgtttttcctaaggactgaaagaacttgtctgacatgtcctaagtgatcatctaggctcctactatacactaaaatatcatcaaaataaacaactacaaatctacctatgaaatcccttaagacatgatgcataagcctcataaaagtgcttggtgcatcactgagcccaaaaggcatcactagccattcatacaaacca

SEQ ID NO: 12570 - DNA, 357 bp, Glycine max
tgcctcaaagaggtccaggaaggacaattttgccgaattatactagttccgctccggagtatgacaatcaccgctttaggagcgctgtacaccagcagcgcttcgaggccatcaagggatggtcgtttctccgggagcgacgcgtccagctcagggacgacgagtatactgatttccaggaggaaatagtgaaattctgatacagaggtcagatgtcgtaccagatgtcacgacatcacgcttcagaacatggagattatatttgactgtatgaacatattaaacaagtaaataacacaagagaattgttaacccagttcggtgcaacgtcacctacatctgggggctaccaagcca

SEQ ID NO: 12571 - DNA, 284 bp, Glycine max
agctttcgtgaaattgttatgtcataacccttcacacggatgtgcgatttaggcgcataatatatcgagacgctcgaaattgaacagcggaagctctcgagaaattaaaatggtcataagttatcacacggaggtccgatacaggaacatcacatatcgagatgctcgaaattgaacaaccgaagctttcgtgaaattgaaatggtcataacccttcacacggatgtccgattcaggcgcataatatattatagaactcttgaactgaaccgaggacttttttt

SEQ ID NO: 12572 - DNA, 350 bp, Glycine max
tatgctgcatacatctacaattgaccactttaacctcagcagcaaaatcagccacaacaaaataattatgacctctccagcaacaggtacaatcctaggtggaggaatcatcccaaccttagatggtcgaatccttcacaacagtagtagcaacaacaacagccttattttcaaaatgctgctggccgaagcaaaccatacgttcctccaccaatccagcagcaacaatagtaacaaccccagaaacaacaaacagttgaggctcctcggcaaccttcccttgaagaacttgtgaggcaaatgactatgcaaaacatgcagtttcaacaagagaccagagcctccattca

SEQ ID NO: 12573 - DNA, 346 bp, Glycine max
tgcactgcccttagtggacaatcttccttaaaacgttgaagccaccattgatgtcccttatgatgtcgttcagtatctcaaaaaagcctacgatgatttggaagaacccttgacctgttttctcaaatcttccaaagttgattggcatttctatgacccatatatgttacagttaccaaaaaggttcaaagagaaaaccaaatggtgtggaatagtaagccccggttgggcaccatagttgaaggtattgagccacaaggcagttggtggggttttgactcactctggttggacctctgtggtggaggttgtttagaatgaaaaacctctattttgttaatgtttc

SEQ ID NO: 12574 - DNA, 387 bp, Glycine max
  unsure (1)..(387): unsure at all n locations
agcttgaagactacagngagtaaaattctcatcttttgggacaataaaattgttatcagtctttcaaaaaatccgaaattgcattctggagaaaaatatatagaaattaaacatcattgtataagaaatcatgttcaaaatgggagagtggacttgcagtttgtgcccactgattatcagctttttgacatctttacaaaacgattaactgaggaaaggttgattttgttaagaagtcaacttggaatgatctttattaatgatttatttaatctctatatgtcatccattgttgcatccaaggatatatcgtccactagacttaaacacacactcataacattcaataaatggacaacatatcatgcattaattntttttttttat

SEQ ID NO: 12575 - DNA, 373 bp, Glycine max
  unsure (1)..(373): unsure at all n locations
agcttgtaagccttggatcttcttcatcaatggagtcctttgcttcttgaagatgaatgtcagcataatgaagaaggaagaaagatgattggagatgcctcttcaaggagaagatgagtcaaaaagaaactcaccaccatagaaagccatggataagagtttgaaggtaggagaagatgtgtggagggagagggagagaaggagcatgaaattttgtgcctcaaatgagatctgaactttgaagtgtaattctaaaatgatcaaatttgaacaaatgcacacacatggcctttatttatagcttaagtgtcacacaaaattggagggaaatttgaatttctattcaaatttcacttgaatntgaaattgaatt

SEQ ID NO: 12576 - DNA, 384 bp, Glycine max
agcttagatcaaaagataattactttgaaattattatatatacagcaacagctaccaggtctcaacattgcatggcaccaggcaggttcagcatacaaaatatgctgcaaacaccctgatctccacatgaattgaatgttagaacacatatagttgtgtaggagtccagggaactaagcaattctattctagttatctctatccttgtgttgttcattatcttcaaacaagtcctctggggggtcgtagatgatcatacctgggaaaatctctaagaagtcgtcgtcttttattttctctcttaattctggatagggaatgagcccttttaatatcacgcgaaaaggcaatgaaaggggaggctcaagagactgtctcatttct

SEQ ID NO: 12577 - DNA, 374 bp, Glycine max
gaatcctcaagcttgccatcgattacacatatactataatcttttaccagatcagattttcagaaaatattctcaacagtcacatctttttatttggttcttgaatggctatcaaaggcctatatatatgtgacttgagacacgaatttgctaagagtttttcagaacaaaaaggtcttatcctcttaaaaagcaaaatcgttttatcctcttaaaaattccttggccaaaacacttgtgattcaataaggaattatttgagtgctcaaattgttcaatctatctctttcaagagagattacttcttctcttcttctttattctgaaaaaggattaagagaccgagggtttcttgttgtaaagaaatctgaaca

SEQ ID NO: 12578 - DNA, 356 bp, Glycine max
agggctcaattttcttaatcagtttgtataatagcttcacctttttggcatgttttgggaggaacttggacatggatgctagcctgccattcaacttataaacttcttggatgtaatttgggttgcgcatctctagtatggcagtgcatttgtcggggttggcttcaatcccccgatgtgtgatcatgaagtcagggaacttgtctttgcctaccccaaaagtacatttccctgggttgaagcacatgtcatatttgtggagttctccaaagacttcttccaggaccgccacatgttgtggtatgctctgagacttgacaaccaagtcatacacatataccttgacgttatgtcca

SEQ ID NO: 12579 - DNA, 359 bp, Glycine max
  unsure (1)..(359): unsure at all n locations
tgcatttctctcccatggttgatataaattctatgatggnatcaaagctcttgctttgaagagccctgctgcgctacttatattcttcctctcgattatcatatccttcattcttacatcatgagtgaacaacaacaagatcaatcacttaatgtacacagtccttattacctttatctgggagaaaatccagcgatagctttggtttcttcggttcttgattcatccaattataattcatggagtcgatctatgcttattgcattaagtgcaaagaacaaatctgagtttgtcgatggttttattcaaagacctgcatcagatcatgcacttcatgcagcttggaagaggtgcaataa

SEQ ID NO: 12580 - DNA, 355 bp, Glycine max
tcaacattcaatttcgagcgtctcgattatttctggactcaatcagacatccgagtaaaaagttattgtcgtttgagttggctcagaggttcaacattcaatttcgagcgtcccgatatattacggcactgaatcggacatccgagtaaaaagttattgtcgtttgaattggctcagagcttcaacattcaatttcgagcgtatccatatattacgggactcaatcagacatccgagtaaaaagttattgtcgtttgaattggctcacaggttcaacattcaatttcgagcgtctcgatatattacgggactcaatcggacatccgagtaaaaagttattgtcgtttgaattggc

SEQ ID NO: 12581 - DNA, 378 bp, Glycine max
  unsure (1)..(378): unsure at all n locations
agctttgagccaattctaacgataataactttttactcggatgtccgattgagtctcgtaatatatcgacacgctcgaaattgaatgttgaagctctaggcctattcaaacaacaataacgttttactcggatgtccgattcagtgacgtaatatatcgggacgctcgaaattgaatgttgaacctctgagccaactcaaacgacaataactttttactcggatgtctgattgagtcccgtattatatcgagacggtcaaagttgaatgttgaagctttaagccaattcatacgacaataactttttactcggatgtctgattgagtctcgtaatataacgaaacgctcgaaatngaatgttgaagctttgagccaat

SEQ ID NO: 12582 - DNA, 352 bp, Glycine max
tttcactcggagatctgattcaggcgcataatatatcgagacgcttgaaaatgaacaacggaagctctcgagaaattccaatggtcattacctttaactcggaggtctgatttaggcgcataatatatcaagacgctcgaaattgaacaacggaagctctctagaaattcaaatggtcataacttttcactccgaggttcgattcaagtgcatgatatatccagacgctcgaaattgaacaatagaagctctcgagaaattcaaatggccataacctttaactcggaggtccgatttaggcgcataatatatcgagacgctcgaaatttaacaatggaagctcttgggcaat

SEQ ID NO: 12583 - DNA, 355 bp, Glycine max
tccttaagaagattcctattgaagctagttcttagctacacatacctctctaatagctaagctcacctccttgagatgagaagctagagcttagctacacaccccctataatagctaagctcacccccatgacaaaaaacatgaaaataaaaaaaaagtccttattacaaagacaactctaaatgccccgaaatacaaggctaaaaccctatactactagaatggccaaaatacaaggcctagacgaaggaaaaacctattctaatatttacaaagataagcgggctcatacttagcccatgggctcgaaatctaccctaaggctcatgagaaccctagggccttttcttggatc

SEQ ID NO: 12584 - DNA, 361 bp, Glycine max
tccctcatcatgaaatttttctttcttgtaacatcataagtgagaacaccattccacaactttttcagatcatcaatcaaaggttgtaaataaacatcaataccaattgttggattaaatgggttaggtacgacacaactcacaaacatataagttttagtcatacatatttctagaggaagattgtatggggtaacaatgattggccaataagaataaggtgaagacgatgcttaaatatatgggttaaatacatttgtgcataaaccaagtcgcacattttgcgtatcaatagaaaaatctggatgtacccgttcaaagtgcttccagacttcatagttagagggatgacttaacatgc

SEQ ID NO: 12585 - DNA, 378 bp, Glycine max
agcttctcgatatgttatgtgtctgaatcggacatgcgagtgaaaaattatgaccattttaatttcccgagagcttccgttgttcaatttctagcatctcgatacgctatgtgcctgaatcggacatgcgagtgaaaacttatgaccatttgaatttctcgagagcttccgttgttaaatttctagcgtctcgatacgctatgcgcctacatcgaacatgcgagtgaaaagttaataccattttaatttctcgagagattccgttagtcaatttcgagcgtctcgatatgttatgcgcctgaatcggacatgcgcataaaaagttatgactattttaatttctcgggagcatctgttgttcaatttctagcggttcga

SEQ ID NO: 12586 - DNA, 386 bp, Glycine max
agcttcaagaattatggccttattttactacttgtctcccgagggaaattctataaatagacctctcatctttagtggagtgggttaccactactggaaaacccgcatgcaaatctttatagaggcaataaatttaatatctgggaagccatagaacaaggaccttatgttccctctataatagccggaagtgcaacaatagaaaaacctagagcagattggactgaggaagaaagaagattagcacaatataatttaaaggccaaaaatattattacatctgccttacgaatagatgaatactttagggtttcaaattgtaaaagtgctaaggatatgtgggatactctacaagtaacacatgaaggcacaacatatgttaaaag

SEQ ID NO: 12587 - DNA, 384 bp, Glycine max
agcttatagaatagtgtaccaaactatcgctgctccggccaagctatcttggaaaaagtgtattaatagcttctcatccttagagtgcgcgcccatcttgtgacaatacatcttgagatggtttttgggacaaacggtccctttatacttgtcgaagtctggcaccttggattttgggggaataacaacatccggtactaagcaaagatccatcatgtccgtgaacggatagtcaccaaagccttcaacagccctcaatctcttctcgaggagatcgagtttccttctttcttcggccgctgggggtggtccttccgcggacaaaaatattggctgtgctgtgaggttgtgttgaggcaatgtgtcgagtgtccgcccctctac

SEQ ID NO: 12588 - DNA, 352 bp, Glycine max
tatttatttgttgctttagttatatgttgattcttaactcacaaggctttcatttcttcatgtgctcttgaaactgagttctatttatggtggtaatcttaacaggcgacaatcaggcagccagtattcaagaacatgatgaaagccctgtattttcagtttactgttggagttctgccattatatctggtaacctttgcaggatactgggcttatggatcttcaacagctacctatttgaggagtgatgtcgatggtccagtttgggctaaggctatggccaataatgcagcctttcttcaatcagacattgcattgcatgtagtaacttctaaacttcaatttagagcta

SEQ ID NO: 12589 - DNA, 252 bp, Glycine max
taacgataactcgcctgtgctttttcttccatgctatatgtagcaaagtcattgatccagtcatgtttgatgagttggaaaatgaggctgtaattatactgtgctagttggagatgtattttccccctgctttctttgacatcataattcacttgattgtgcatctggtcagagaaatcaaatgttgtggtcctgtttatctacgatggatgtacccggttgagcgatacatgaagatattaaaagggtata

SEQ ID NO: 12590 - DNA, 381 bp, Glycine max
agcttgtacccaccagtactatgatagcccagcataatcatttgttcaccctttttgtccagttttcttcttaattgatttggaacatgcttgaagcacaagcatccaaacacccttaggtgcttgagacaaggcttacttccactccaagtttcttcaggtgtcacattctctagcctctttgttgaacatctgttgagcagataggctgctgttgacactgcctcaccccaaaactcctttggcaagtgaaaattccttagcatacacctggtcatgttgactatggttctattgagtatctcaaatacaccattgtggtgtggtgcatatggaggtgtgatcttatgaatattaccctcatcctcatagaatttcttg

SEQ ID NO: 12591 - DNA, 388 bp, Glycine max
agctttgagcttacccttattcatcttgcttaagttgaacacaacatgactgaagatgtttgttggacaagtggtctcaataacttaagaggggggtgaattaagtttcaaaattttcccactaacaaattttaacccccttttaaatgatatatgataggctcagaatgcaaaagaagaagaagtaatcaatttaataatgttcttttaactgtgcaaggcaaagtaaactgcaataaaataaccgagataagggaagagagaaatgcaaactcaatttatactggttcgaccacttcccatgcctacatccagttctcaagcaactcacttacgattttccactatctctataaatcctttacagtctttgaacacactgaagtgt

SEQ ID NO: 12592 - DNA, 413 bp, Glycine max
  unsure (1)..(413): unsure at all n locations
gatcctntnagtcacctgccgcatgcaagctttggaagcaatcttttattgttgcttccctcatcattcctgtcaagccttcaacaaccaagtcaaacaatagagggccaaaggatccctttgtctcaaacctctttgaggcttaaattcagaggttgagcttccattcactagaatagatatagaggctgatgtgaggcaccccttaatccatccaatccatctgtcatggaacctcattcttctcatcatatgaaaaaggaattgccaagacactaaatcatatgctttttcgaaatccactttaaacaccaagcaggacctcttagacctcctagcctcctcaagtacctcattagcaaccaaaacaccatggagcaactgtctatccttcacaaaggttgtctgccttt

SEQ ID NO: 12593 - DNA, 379 bp, Glycine max
agcttgtagggttaaattcttatgattgtcacgtgctcatgcaacaattgttggtcgtggctatatgagacatcttgccaaacaaagtcaggttagcgataactcgcctatgctttttcttccatgctatatgtagaaagtcattgatcctgtcaagtttgatgagttggaaaatgaggccgcaattatactgtgccagatggagatgtattttccccctgctttctttgacatcatgattcacttgattgtgcatctggtcaaagaagtcaaatgttgtggtcctgtttatctacggtggatgtacccgattgagcgatacatgaagatcttaaaagggtatacaaagaatctatatcgtccagaagcatctattgtt

SEQ ID NO: 12594 - DNA, 350 bp, Glycine max
ttgacaagacattacacactgctgtcttctacaacaagataaaatagggaaatctactctaaagatacatctaataatacccataattataacactccccctcaagctggagcatataaattatatgcaccaagcttggaacatataaactgaattctaggcccccttaaggatttagtcaaaatatctgctggctgatcattggaattaatgaattcagtgacaatctctttagacagtagcttctcccgaataaagtgacagtcaatctctgtgtgcttggttctctcatggaagactggatttgaagcaatatgaagagcagcctgattatcacaatacagcttcat

SEQ ID NO: 12595 - DNA, 361 bp, Glycine max
  unsure (1)..(361): unsure at all n locations
ttagtgcccttaattntgaagcaatatttgacattccttgaaattctgatactggggacagatgtcgtaccggatgtcacgacatcacgcttcaaaacatgcagattgtatttgactgtatgaacagattaaacaagtaaataacacacgagaattgttaacccagttcggtgcaacgtcacctacatctgggggctaccaagccagggaggaaatccactaaaatagtgttagttcgaagatctaacagccactgtttacaaccttctcacctaaccactacccgtgcaacctctacctaagagccactcttagatatgagaacccctctcactccctctcaaacactctcccgtgttta

SEQ ID NO: 12596 - DNA, 389 bp, Glycine max
agctttggccaaaccccagcagcttttgtttccttagagacttgccttagcaccttgtctttgagactgaggataattacactgtgtgccttttgcagtagtgctttcttatccccatcagccatcatcttttcaagtttggcttctccatcaagtgcttccaccaggccctgctgaacaagaagagctctcatcttcaatcgccataacccaaaatcattttgccctgtgaatttttcaacctcatacttggccgagtccatttcttgaatcgaactcaaaaatcgctccacgctcaccgcaccaatttgttgtgccaagatcagattttagttcacaaaagaatgagtttcttgtatgaacaagaataagcaaaatgcagaaaagaa

SEQ ID NO: 12597 - DNA, 357 bp, Glycine max
tactgaagctaatagactgtcatcctcattaatgaatatcctttcatccaattcactcttgttgcgaatcatgtaatcataatctttttctaacatacttagactagaaggtagagacgattcttccatcaggtctttaaaataggtcaaaccatctacaaacaaagggataataaacatcagttagagagatcaagtattcctgatgcataaataataataacacaatgaaaatgaacctttatcgatattctctaggttttcggtttcacattcagatgccaagcaaggctgcttcttcaatatatctgctattacattattggctttctccatggttttcctcaactcatcttc

SEQ ID NO: 12598 - DNA, 357 bp, Glycine max
tcacaagagtttatatggctggaaacatttcccgatgcagtggtacaagaagtttaatgattttatgagcaactcaggattcaacagatgtgacatggaccattactgctatgttaagaaatatactaatagttatgttatccttgtcgtgtatgttgatgacatgttgattgcaggatctagtatggcagaaattaatatgttgaagtagcagttggcagaaaactttgaaatgaaggatcttggtccagctaaacaaatcctaggtatgagaattcttagaaacagatcagaaggaattttgaagctgtctcaggagaaatatatactcaagttgcttgacaggttttaccttga

SEQ ID NO: 12599 - DNA, 348 bp, Glycine max
tttaatggaagtcctgatcttgaaactgttcggacttcgttaactggtgagcaggtcttccagcgggttgaacaccttaatattgtatttggaaagacccagaagaaggataaaagtaagagttgcatatggaagaagaggtccattttctttgatcttgcgtactggtctgatctaaatgttagacattgtattgatgttatgcatgtagagaaaaatgtatgtgacagtgtcattgggacactccttaatattcagggcaagacgaaagatggtctaaatacccgtcaagatctatctgacatgggtatacgatcgcagttgcatccaaggtctgatggtaaaaaa

SEQ ID NO: 12600 - DNA, 410 bp, Glycine max
  unsure (1)..(410): unsure at all n locations
ttagaaaatccctcaatggaatttctataatagccagccaacctcaagatacgttgaacttctgttggagttgtcggttgttgccactccataaccgactccactttaatcggatccaccgcaaccccatctttagaaatcacatgttccaagaactgcactttttctaaccaaaattcacattttgacaagttggtgaacaatttcctatccctcaggatatgcaacacaattctcaagtccttctcatgctcctgcttattcctctgatacactaggatatcatcaatgaacacaaccatgaactgatctaagtaatcatgggatatacggttcatatagtccatgaagatagccggagcattagtcactccatatggcatgactanatactcataatgcccataccg

SEQ ID NO: 12601 - DNA, 313 bp, Glycine max
  unsure (1)..(313): unsure at all n locations
ttcaaaatcttttgaaattgaatgtgatgcttcaacatgtgggattggagctgtattgttacaagaaggtcatccaattggcttatttagtgaanaattaagtggtcctacccttaactattctacttatgataaggagttgtatgccttagttagagcgttgaacacatggcaacactatctttatcccaaggagcttgtgatccatagtgaccatgagtccctaanatacttacaaggacaaggtaagctaaataaaaggcatgccaaatgggtggaatttctcgagcaatntccttatgttattaaacat

SEQ ID NO: 12602 - DNA, 381 bp, Glycine max
tgtcagtcttgttgttcatacttcacttagagcttcagctattgaagattggtacctaaatagcggctgttccatacacatgacaggagttaaagaattcctggtgaacattgagccctgctccactagctatgtgacatttggagatggctctaaaggaaagatcattggaatgggaaagctagttcatgatggacttcctagtctgaacaaagtactgctggtgaagggactgactgcaaacttgatcagcatcagtcagctgtgtgatgaaggattcaatgtaaacttcacaaagtcagaatgcttggtgacatatgagaagagtgaagttctaatgaagggcagcagatcaaaggacaactggtacctatggacacc

SEQ ID NO: 12603 - DNA, 501 bp, Glycine max
agcttgcaatttaatgttcctgtcacaccgaatatattatattgcatgtatgtataatgaaactttagagagaaagcagggggatataaaatgaatatgccactttattataaagctttctcataatgtcacaggcaaagattacttcagcaattaactaagtcaaaaactctttcttttctgttttggttgaagaagaaaaaagtcagttaatgataaaataccatgctgcattatgatcatcagagtctggacacagcggtggctcattctttgaacgttgctcgtaacactcattagaagttggcttcttgatacagctacacctactccatttacttgatccttgctgatcgacacaacttcccaccacatggcttttgtagtgtcttcatggctgccaataaattcataacacatcaggattaaaaacctacattaaaagcacaagagtgccatatataagtctagctataattacccttcctatttaacatcttc

SEQ ID NO: 12604 - DNA, 327 bp, Glycine max
cctgtctcaaaagtctatggagtatgctcctctgccgaccaccacacagatcttttcccttctctgcaacaacctggagcaattgagcatcttgaagctcatgctgcaaacattgaccacagacctcctctagctcagcttcagaataaaccacggcagagcaattatgacctctacagcaacagatgcaagaccggatggatgaatcaccctaatctcacatggtctagccctcaacagcaacaacagcagcctgctccttcctttcagaatgatgctggcctaagcaagccatacattcctacaccaatccgacaacagcaacag

SEQ ID NO: 12605 - DNA, 520 bp, Glycine max
gctttgaatgctctattcaatggagctgagaagattatcttattactgatcaacacatgcacagaggccaaagatgcatgggagatcctgaaaaccactcatgaaggaacctctatagtgaagatgtccagattgcaactattggctacacaattcgaaaatctgaagatgaacgaggaagaatgtattcatgacttccacatgaacattctcgaaatttccaatgcttgcactgccttgggagagaggataacagatgaaaagctggtgagaaagatcctcaaatccttgcctaagagatttgacatgaaagtcactgcaatagaggaagcccaagacatttgcaacatgagagtggatgaactcattggttcccttccaacctttgagctaggactcttcgatggggctgaaaagaagagcaagaacttggcgttcgtgtccaatgatgaaagagaagaagatgagtttgacctggatactgatgaaaggctgaccaaggcatttgtgctcctttgga

SEQ ID NO: 12606 - DNA, 436 bp, Glycine max
  unsure (1)..(436): unsure at all n locations
tacttattntacttagttggaattgattctttgtgatccttaatggtttgatgagtctttcaatatagtttgataataatgtgaaattggtttatcattgtggatggtatgattgatttttgtttgctacaacaaagagataatgtagttgacgagttgaatactcgtagtatatatttgtcgtttgctacaacaaagagataatgtagcctatggttcaaatactcatagtatatatttctcgtttgctacaacaaatagataatgtagcctgagtcaaatactcacaatatattatttgtttgctacaatgaatagataatgtatcatatgagtcaaatactcatagtatatatattntccatttgctgcaatgaagagataacanagtctatgagtccaatactcataatatataccatttnnttctctacat

SEQ ID NO: 12607 - DNA, 393 bp, Glycine max
  unsure (1)..(393): unsure at all n locations
tctatagaaggtccgttcctaatttctctacaatggcatctcctctcaatgagctggtgaagaagaatatggcatttacctgnggtgaaaaacaagagcaagcctttgctnttctcaaagaaaagcttactaagggcacctattctagctcttcctgaatttctaaaacttttgagctagaatgtgatgcctctggtgtgggagttggagctgtattgttacaaggtgggcaccctattgcttattttagtgaaaaacttcatagtgccaccctcaactaccccacctatgataaagagctntatgccttaataagagccctccaaacttgngaacattaccttgtttccaaggaatntgtcattcatagtgatcatcaatcacttaagtaca

SEQ ID NO: 12608 - DNA, 399 bp, Glycine max
  unsure (1)..(399): unsure at all n locations
accatttntcatagtaaaacactggtnatgtgtctactattattgtgataatntctttctccatcattggaggtgccacttgagctgccaggtctctccacctttgggcgtattctttgaaagattcatgcccctttttgcacatgttctgtagttgcatcctatccggagccatatcataattgtactgatactgcctaacgaaggcaatcattatgtccttccaagaatggactcgggaaggttccaagttggtgtaccaggtaacagctaccccagtaagactntcttggaaaaaatgtatcagcagttcctcatcttttgcgtatgcccncatcttccgacaatacatctttagatggttcttggggcaagtagtcccattgacttgtcaagtct

SEQ ID NO: 12609 - DNA, 459 bp, Glycine max
gagtctatggtctatgttcttctacagatctctgttcttctttgcagcaatctggagtcaatgagcaacttgatgcttatgttgtaaacatttataatagatctcctcaacaacaaaaccaacaacaacagaataattatgatctttcaagcaacagatacaatccaggttggaggaatcatccaaatttgagatgggcaagtcctccacaacaacattagcctgtccctcctttccagaatgctgctggtccaaggaagccatatgttcctcctccaatacagcagcaacaacaacaacagtcataacaaagacaacaagtaattgaggctcctcctcaaccttctttagaagaagtagtgaggcatatgaccatccagaatatgcaatttcagcaagagacaagagcctccattcagagtctgaccaatcagatggggcaaatggctactcagttga

SEQ ID NO: 12610 - DNA, 366 bp, Glycine max
  unsure (1)..(366): unsure at all n locations
ctctacaatggccccacctctcaatgagctggtgaagaagaatgtggcatttacttgnggtgaaagacaagagcaagccttttctttgctcaaagaanagcttactaagtcacttgttctagctcttccagacttttctaaaacttttgagctagaatgtgatgcctctggagtgggagttggagctgtattgttacaaggtgggcacactattgcttattttagtgaaaaacttcatggtgccaccctcaactaccccacctatgataaagagctttatgccttaataagagccctccaaacttgggaacattaccttgtttccaaggaatttgtcattcatagtgatcatgaatcgcttaagta

SEQ ID NO: 12611 - DNA, 459 bp, Glycine max
cctttctttttcttggcattttcttcatgttgatttagtctcatgagttccattttgtgttcctgaaactttccaaacaaagttgcaagagacatgtgcataagatctcttgattctataattgtcattacctttggttgccattccctgcttaaacatcttataactttgttaataaaatcttcattgggaaatatctttcctaatgatgcaagatgatttactatatgtgtgaatttcttttgcatatcctgtatagtttcattttgattcattctaaacaatttatattcatgggttagggtatttattctagatctttttacatatgttgttccttcatgggttacttgtaaggtatcccacatttcttttgcattcttgcaggttgatactctaaaatattcatccctgcctaatgcagatgaattatatttttggctttaagttatattgacc

SEQ ID NO: 12612 - DNA, 212 bp, Glycine max
aagagctttcgttgttcagtttcgagcgtctcgacataagatgcgcccgaatcggacatccgggtgaagagatatgagcatattaatatctccagagtatccgatgtataacttccagcgtatcgatataatataagcttgaatcggacctccgtgtgaaaagatatgaccattagaatatctcgagagctttcgttgtagaatttccagcg

SEQ ID NO: 12613 - DNA, 476 bp, Glycine max
aaaacatctctctgccgaagttgctgccatgcatcagtgtacagtcgtccaaaaaatccctgagatcaccgttcgtcgtagacacaatctgcatacgacgatcacgtcgtaccgactatggctatccgcttcatcacctataatgaatatcttttacatcatcaactatataaattattacaaattgtccaaactaactattcatagtggatgaattatatctaaaatgtataaggcataatctacgcagagatgcatcctgacttttaattattgataattgctgtaacaagatattcatatgcaagttgaaactaacaatattaacaattatagattgaaagagataaacagcacgttaaagcagcatctctatatctatctatatatatatatagatggcatatgacctctctatatatctatatatatataaatcccaagcgtgcgttcggagcctgacttaatatatgggg

SEQ ID NO: 12614 - DNA, 454 bp, Glycine max
  unsure (1)..(454): unsure at all n locations
cctctcaagcattngatccatgaagggaataggaaagtnggtatttgttgttgccttgttgaggaggcagtaatcgatatacattctccaactggtcatggtccttacaggaattagctcattcttgtcattctttatcactattattctacccttgttggggactacttgcatggggattacccatgaactttcaaaaatggcatatatcattccagctccaagaagcttcagtacttcttttcgaacttcctctttcatcaccaggctgagtcttctttgtgggtgtgctactggtttgaagtcctcatcattgtgcatgcaaataaatggacatattcctttgagggtgaagaattgtcatcctaaggcttgtctgtgcttctttagtacctccactagtctcntttcttcctctttgtgcaatgtgctactaatgatggctaagttctca

SEQ ID NO: 12615 - DNA, 441 bp, Glycine max
agcttataatatattattacgctcgaaattaaacatcttaagctctcgagaaattcaaatggtcataacttttcacccggatgtccgattatggcgaatcacatatctagacgctcaaaattgaacaacggaagctcttgagaaattctaatggtcataacttttaactcggatgtccgattcaggcgcatcacatattgaggcgctcgaaaatgaacaacggaagctctcgagaaattcaaatggtcataacttttcacactgaggtccgattcaggattataatatatcaagacgctcgaaattaaaaatcggaagctctcgagaaattcaattggtcatcacttttcacacggatgtccgatttgggtgcataatatgtcgacacgctcgaaattgaacaacggaagctctcgaaaaatcaaatggtcataacttttg

SEQ ID NO: 12616 - DNA, 355 bp, Glycine max
  unsure (1)..(355): unsure at all n locations
actcttagtggtgactttgtgcgtatgtttatggaggagtccgagtcaatttctgattattcttttcgagtattggccgtatgcaatcatcttataagatatggtgaagatgttgatgacgtgaaggtcattgaataaatacttctaactttatattcatagtttgacttcattgntaccaacattgaagagaacaaggattttatgaccatgactattgagcaactcatgggtgccttacgagcatactaagataaactaaagagaataatttaacaagatgaggctacggagcaactactacaactcaacgtaaaggaagcagacttatcatattacaagagccaaagatgac

SEQ ID NO: 12617 - DNA, 342 bp, Glycine max
  unsure (1)..(342): unsure at all n locations
agattcaaaggatgtaaaagattgtgatcaatgtatttaaaatgcaagttaagttcttgcctttatagactcttcaagtctggtcaagagaaccattagaagagttataacctttagaaaacctttggaagagttacatcttttgattcttattcanaacttatcattggtaatcgattaccaaatcattgtaatcgattagacaaagcatttttgtaaaaggatgtgactcttcacatttgaatttgaatttcaacgttcaaacacactggtaatcgattaccaatatattgtaatcgattacaccattttgaaattgaatggaacattgtaaattcagtt

SEQ ID NO: 12618 - DNA, 438 bp, Glycine max
  unsure (1)..(438): unsure at all n locations
ctccccgttaatgggtgccttntcgtctttggtattgtgatgtcatacggattaacatgatccgtattactcattcagatcaacttgatccgtatgagtcataaggatctagttgatccgtatgacttatacggatcaagttgatccgtatgacctttgttaattcaaaaaaataataaataggtatttgtgtttagaaaatgttttaaatacgagtttattcgtagttttgtataaaaaacagattgtttgtgtttaaaaaaaatatgtatgatgcatggtgtatgaaatagtataaatttaatagtaatattgaattttgagttgttgtgttatttatctcatggaaatagcatatttattaatatgagtcgtattattatgaattggtctaatatgatcatatatgctttagaatattataatgatgtttattca

SEQ ID NO: 12619 - DNA, 507 bp, Glycine max
tttcttgaagagggcaggaacccatgcacaaagatagagatcctcacaccattaaacccattgttcgatattgggttgaagaattggctaaactggcttcttttgtacttttcacaagtattggagatctttctacctttcaagaggctatgaatagccaggagaaagacaaatggattggtgctatggtggaggagatagagtctttacagaagaatcaggcatggcagctagttgagcttcctacgagcaagagagtcatagggtgcaaatgggtagacaagaagaaacctctagtatcagaaaaagaaaggaaaaagttaaaggcttgcctagtagcaaagggatatgcatagtagaagaggttgattatgatgatattttcctccctaatcatgagagacacttctatcatggcgatgttagcctttggagccagtcatgacattcacttggagcatatggatgtgaagacaccctttttcaccatgatctaggggaacaaat

SEQ ID NO: 12620 - DNA, 375 bp, Glycine max
  unsure (1)..(375): unsure at all n locations
tcagcttcacatcagaccacttccagggtgctggaactacttcatatggacttgatggngcctatgcaagttgaaagccttggaggaaagaggtatgcctatgttgttgtggatgatttctccagatttacctgngtcaactttatcagagagaaatcagatacctttgaagtattcaaggagttgagtctaagacttcaaagagaaaaagactgtgtcatcaagagaatcaggagtgaccatggcagagagtntgaaaacagcaagtttactgaattttgcacatctgaaggcatcactcatgagttctctgcagccattacaccacaacaaaatggcatagttgaaaggaanaacaggactttgcaagaagct

SEQ ID NO: 12621 - DNA, 251 bp, Glycine max
ttccacatatttccttgtcggatggggtcaatttgtcgcccttgttttatgaccagaggagggaggagatgaagttcccctccgcggcgacgccccgcaccgtcatttcccggctggaggaggtggccaacgccgggaagttctacgtcaggagtagccagaccactgtgaggctttagggtcaggaacgtgggaggacagggaagctggccattgccgccgatatctactccgtgacgccctcgtttatg

SEQ ID NO: 12622 - DNA, 398 bp, Glycine max
  unsure (1)..(398): unsure at all n locations
tcaacattcaatttcgagcgtctatatatattacaggactcaatcaaacatccgagtaaaatgttactgtcgcttaaatttgcttagctctccagctttaaatttcgagcgtctcgatatatgacgggactatatcagacatccgagtaaaaagttattgtcatttgaatttgcttagagattcaacattcatcttcgagtgtctcgttatattacgggactcaattatacattcgagtaaaaagttattgtcgttcgaattttctcagagcttcaacaatcaatttcgagcgtctcgatatattacgggactcaatcaggcatccgagtanataagtattgtcgtttgaattggctcagagcttcaacattcaatttcgagcgtctcgctatattac

SEQ ID NO: 12623 - DNA, 469 bp, Glycine max
gctttgagcaaattcaaacaacaataactttttactcagatgtctgattgcgtcccgtaatatatcgagacgctcgaaattgaatgttgaagctctgagccaattcacacgacaataactttttactcggatgattgattgagtcccgtaatataacaagacgctcaaaattgaatgttgaagctatgagccaattcaaatgacaataactttttactcggatgtctgattgagtcccgaaatatatcgagacgctcgaaattgaatgttgaacctctgagccaattcaaacgacaataactttttactcggatgtctgattgagtcccgtaatatatcgagacgctcgagattgaatgttgaagctttatgcaaattcaaacgaccataactttttactcggatgtttgattgagtcccggtatatatcaagacgcttcgaaatgaatgttgaacctatgagcccatt

SEQ ID NO: 12624 - DNA, 287 bp, Glycine max
  unsure (1)..(287): unsure at all n locations
agatggaccatttcaagtgctnganagaatcaatgacaatgcttacaaagttgagctgcccggtgagtataatgttagttccaccttcaatgtctctgatttatctctttntgatgcagatggagaatccgatttgaggacaaatccttctcaagagggagagaatgatgaggacatgaccaagagcaagggcaatgatccacttgaaggacttggaggacctattgatgaggacatgccaagagcaagggcaaggatccacttgaaggacttggaggacctatgac

SEQ ID NO: 12625 - DNA, 305 bp, Glycine max
caacatagttgacacggaagggatatctcctctatatataagcataacatcatatgcaaaagccaaatgagatagttgaatacctgcacagttgggattgaaattaaaattggcatcatccttgaggctgctcatatctctggaaaagtgctccaaacagagcacaaacagattaagggagagaggaatcccttgtctaagaccccgctatcctttgaagtgaccataaatgaatccattgactgccacactataggaagtggaagaaacacattccatgatcaaagtacagaactgggctggga

SEQ ID NO: 12626 - DNA, 375 bp, Glycine max
  unsure (1)..(375): unsure at all n locations
acgacaattacttttaacttggatgtttgattgagttccgtaatatatcgagacgctcgatattgaatgttgatggtcgttgcaaattgagacgacaataactctttactctgatgtctgattgagtcccgtaatatatcgagacgctcgaaattgaatcttgatgctctgagcaaattcaaacgacaataactttttactcggatgtctgattgagtcctgtcatatatcgagacgctcgaaatntaatacgaaagctatgagcatattcaaacgacaataattatttactcggatgtctgattgaatctcgtaatatatcgacacgctcgatattgaatgttgatgctctggtcgatntcaaacgacaataat

SEQ ID NO: 12627 - DNA, 546 bp, Glycine max
  unsure (1)..(546): unsure at all n locations
ctgcaagcttatactttcaatatgagttctcccatcgtgtttgtgacaatggtttgagagttagactagaatatgatattggtaaaatttttcattttttattgaagaagaaaatatattatatatgcatcgtagtactcccgaaaaagatgtaattttaggacaagagttagtcatatcacaaaataccaaatttagactatgacaatcacgtggagtataaaatgatcgataattaaagtctaaaattcttttttgcacaccttgatgttatcctttcatatttgattcattatcataaccctgtcctcttaagtaattaatatcaagtgaaatattatttatttcattcataatagcttcaaaaaggcctttntccggttgtatcatctacctttaaaaattataaaaaaaatttcaaaaacttgtatttgaattgaagaaacatctacatatcataatacaaaagtcatttgttctcgatgacttatatcacgaggacaaccaagtatgattgaaaatattgtgcattattgatatttttat

SEQ ID NO: 12628 - DNA, 426 bp, Glycine max
acttttcagatgaaagtcccattcagccgcataatatatctagacgcttgaaattgaacgccggaagatgatgagaaatttaaatggtcataacttatcacgcggatgtctgattcaggccaataatatatcgagatgctcgaaattgaacaatggagctctcgagaaattcaaatggtcataacttttcaattggatgtccgaattaggcgcatcacatatcgagactctcgaaatcgaacaacgaaagctctcgagaaattcaaatgggcataagttttcacacggaagttcgattcaggcgcataatatatctagacgttagatattgatcaccggaagctcttgagaaattcaaatggtcataacttttcactcgcatgttcgattcaggtgcataatatatcgagacgctctaaattgaac

SEQ ID NO: 12629 - DNA, 293 bp, Glycine max
cgcatcacatatcgagacgctctaaattgaaaaccggaagctctcgcaaaattcacatggtcataagctgtcacacggaagtctgattcatgcgcataatatatcgagacgcttgtaattgaaaaaagaatgcgctcgagaaagtcaaatggtcgtaacttgtcaaacagatgtccgatacgtgcgcataatatttcgagacgctggaaattgaacatcgtatgctctcgagatagtcaaatggtcataacttatcacacggaagtccgattctggcgcataacatatcgaga

SEQ ID NO: 12630 - DNA, 428 bp, Glycine max
tgctgcatgctagctttgatgcagcatatggagaggctaatgatataacgttatgatgcgctgcatgacacgctcgctcaatatggctaatcgccatccttatgaggaagaactgacgacaacacgtaatggatcgtgttcctagacaaaacctgattgatcgttttaaacttctcattcctccatttaaaggaaagaatgatcctgaagcctacttggagtgggagattaaaatatagcatgttttctcatgctacgactatgaggacgaccaaagagtgaagcttgccgccacggaggcttcctactatgctcttgtgtggtggaacatgcttctaaatgcgacatccagaaacgaccagccactgggtgatacatggaccgagatgatatacatcatgatgaagcggtatgtgccagctacttac

SEQ ID NO: 12631 - DNA, 460 bp, Glycine max
  unsure (1)..(460): unsure at all n locations
atgtgttgtttcttattgattgatgtgtgtatgaagttcaactagtagtaggtactttatttctcacatcaaggaagcattgttaattcaacgagtacacaagctgtgtactcataattaagttgtcagttttcacaactgtaattcttttattattggttatggcgactagaagtctctacacactataggtcagggccatggctcaaaggttaggctatagctcagaagagcactactttctatgaatctagattatttaattntaaagggtaaaataaagatattatagagtatatctgtttgataattntattaatacaaactaattaattaaaaaatataagattaattcgtttgtctgacaatattatagttgataactgtattacaacatgataatgtataatatacatggtattacatctaatatcattttctatcattgacatatagtatt

SEQ ID NO: 12632 - DNA, 437 bp, Glycine max
ctcaagcctctctgtggtattaactcatgcgaagggctgcccttgacaaatactgagattaatactattttaggcatccctccattcattgaatccccttggagtggaaacccatcctccgcagccagtcaagcacatagtcccatgatactgaatcatatgccttctcgtatccactttaaagacaatgcacagcttctgccctctcctatcttcctcgaccacctcatttgcaattaccgcgctatgcaacaaatgccttcctttaatgaatgcaaattgccttttgtctatgaagaacggcatgaccttcttccatctgttggctagtagctttgccaagggatttaatcaaataactacgtccggatatttagaaaccttttcacctgttgctgtgaaacctgccccaatcaaataatagtgactattgctct

SEQ ID NO: 12633 - DNA, 438 bp, Glycine max
  unsure (1)..(438): unsure at all n locations
tcgtggcttctttgagaagctctgtcaagatgcttctttgagaatctagatccttatctatccacacccctcttttagctgaattaacctcctctaaaataattacggatgagaataacgcaacatataatcaaacatcagacataattactaataatatatagatatatatatatcagggttgtacaactctcccacccttttagaaatntcgtactcaaaatttaccttactcaaacaaggatgggtgagcttctcgcatctgactatctaattaccacgtggcatcttctcctgatgcacctcctcagatcaccttgaccaacgaaatctctttccctcttaagtgtntnggtcgcctatccttgatcctcaaaggcaatgtttcatatgtcagaatctccttcacttgaccatcatcaattaatcacatgggat

SEQ ID NO: 12634 - DNA, 551 bp, Glycine max
tgccagcttcaaccacaatgttgaatagaaacggtgcttatgggtccccttgcctcaggcctctctgtggtatgaactcatgcgaggggctgccattgacaaatactgagatataagcagattttaggcatccctccattcatcgaatccacttggagtggaaacccatcctccgcaccaagtaaagcacaaagtcccatgatactgaatcatatgccttctcgtaatccactttaaagacaatgcacagcttctgccctctcctagcttcctcgaccacctcatttgcaattaccgcgctatgcaacaaatgccttccttcaatgaatgcagattgccttttgtctatgatgaacggcatgaccttcttcaatctgttggctagtagcttttgcaacggatttaatccaataactagtcaggattattcagaaacctttccacctgttgctgtgaaacctgtcacaatcaaaataatgttgactattgctcttgctcatcactggtctattcaataaattgtgtgaacaatgctctccttaatgggcatt

SEQ ID NO: 12635 - DNA, 425 bp, Glycine max
tcagctttctagaaactgaacaaaggaagttctctagatatttgaatggtcataacttttcacacagatgtccgattcggggacataatatatcaagacgctcgaagttcaacagtggaagctctcaagcaaatcgaatagtcataacttttcacaatgatgttcgattttgggacataatatatcgagatgttcgaaattgaaaaacggaagatttcgagaaattaaaatggtcataacttttaacacggatgtccgattgggggagataatatatcgagacgctcgccattgaacaaccaaagctctcgacaaattcaaatgggtagtaattttcacacatatgtccgattcggagacataactcattcagacgctcaatattgacaatgggaactattgagaaatttgaatggtcatacctt

SEQ ID NO: 12636 - DNA, 523 bp, Glycine max
agcttaacaaaaggcatgtgaagtgggtggaattcctatagcaattcccttatgttatcaaacataaaaagggaaaaggtaatattgtagccgatgctctttctcggcgtcatgcattactttctatgcttgaaacaaaattgattggtcttgaatgtttgaaaagcatgtatgaaaatgatgaaacttttggagaaatttttaaaaattgtgaaaaattttcagaaaatggtttctttagacatgaaggctttcttttcaaagaaaacaaattgtgtgtgcctaaatgttctactagaaatttgcttgtttgtgaagcacatgaaggaggtttaatggggcattttggggtccaaaagactctataaacattacaagaacatttttattggcctcatatgaaagaggatgtgcagaaattttgtgaacattgcattgtatgtagaaaggcaaagtctaagggaaagcctcatggattgtatactccattgcccaattcccgagtattcttggattgatttat

SEQ ID NO: 12637 - DNA, 373 bp, Glycine max
  unsure (1)..(373): unsure at all n locations
tgctcaccaacactagataagaatccctcatgttgtttcatgtaaacctcttcttctagatcaccattcaggaacaccattttcacatccatttgatgcaactcaagatcaaaatgagctactaatgccgaaattactcgaagagagtctttcttatatacaggggaaaggtctctctgtaattgattccttctcttttagtgaatcctttagcaacaagatntgccttatgtctctcaatgttgccttctaagtctttctttgttntgaagacccatctacatccgatggcttttacaccaacaggcaactcaacgagatcccaaacttggttagatgccatagaatccatctcatccctcatagcattata

SEQ ID NO: 12638 - DNA, 380 bp, Glycine max
  unsure (1)..(380): unsure at all n locations
agcttgtgcattcaatatcctgatgaggatgttccatatgttctcaagactggactaatacatttgctgcccaagtttcatggtcttgcaggtgaagatcctcataatcatcttaaggagttccatcttgtctgttccaccatgaagtccgctgatgtccaggaagatcatatctttctaatggctattcctcattctctggagggagtggcgaaagattggctgtattaccttgctcccaggtccattactagctgggatgaccttaagagggtgttgttggagaaattcttccctgcatctaggaccactgccatcaaaaaagacatttcaggcattangcaacttagtggaaagagcttgtatgagtactgggaaag

SEQ ID NO: 12639 - DNA, 353 bp, Glycine max
  unsure (1)..(353): unsure at all n locations
gttatagacagganatcatatattgaatatatcatcaggcttcatatcttccaaagaaaccctttccatgctaattccaagcagaaaattgaatcattcctaacctgtanactaggaaaactatcatcagcctcacccggtcttgaaacatccagtcccctgaccaatcatcanaggagtcagtaaagagtttcaaactttcaatacctcggaaaacaaatatgcaaggacaggtgtatagaaattcctacttccattgaattcggttcttgagtttcttttctataagtccaatcccttcaagaacatntgttatatcatatatcctcctcttttgcacctgcagataccaa

SEQ ID NO: 12640 - DNA, 418 bp, Glycine max
agcttatgctgcaaacatctacaatagtttcttctcatcctcagtttcaaaatcagccacaaaagaacaactatgacctctctagaaataggtacaatcccgggtggaggaatcatcccaaccttagatggtcaaatcattcacaacagcaacagcaacaacaacaacagcaacaaccccagaaacaacaaatagttgaggcttctccgcaaccttcccttgaagaacttgtgaggcaaatgactatgcaaaacatgcagtttcaacaagagaccagagcctccattcaaagcttaactaatcaaatgggacaattggctacacagttaaatcaacagcagccccagaattctgacagattaccttctcaatctgtctagaatcccaaaaatgggagttccattacattgagatcggg

SEQ ID NO: 12641 - DNA, 391 bp, Glycine max
agctcggaatgcatgatttgctcgattatgggaagagaaatcatccgtgtgaaatcaccaaaggaacctgacgagcgtatcacgttatggtttcatgaggatgtgcttgatgtattattaaaagaaagtgtcagacctacaattatttattttggatgtgctatactaaatgccatactttcattttacattattgtcaatatgatttcacagggaacaaaagctgttgagggattgactttgatgcttccacggagtaatacaaaatgtttgagtactacatctttcaagaagatgaagaaactcatgttacttcaatttgctggtgttgaacttgctggagattttaagaatctttcaagagatttgagatggctatattgggatggat

SEQ ID NO: 12642 - DNA, 412 bp, Glycine max
  unsure (1)..(412): unsure at all n locations
agcttctatagaagggtcgtacctaatttctctacaattgtctcacctcncaatgagctggtgaggaataatgaggcatttacttggggtgaaagacaagagcaagcctttgctttactcaaagaaaagcttactaaggcacctgttctagctcttcctggactttctaaaacttttgagctagaatgtgatgcctctagagtgagaattggagctgtattgttacatggttggcaccctattgcttattttagtgaaaaacttcatggtgccaccctcaactacactacctatgataaagagttttatgccttaataagagccctccaaacttgggaaaattaacttgtttccaaggaatttgtcattcatagtgatcatgaatcaacttaagtacattagagggcaaaac

SEQ ID NO: 12643 - DNA, 417 bp, Glycine max
agcttattcttcttcattatgcgacggtattcatgttcttctacggcgtggacacccacacctcattctctgatatcgggccactgacatgggctgcggcgggtccaaggtggaggacttccccgcggtggttctgtgtagagagcgaaaggcgttcctcaaagccgcatcagagcaacgctacgctctcgccgctgcacacgtggcgtatttccattcgctgagtgaaatcggcgacgcccttcacaagttcgccgaacaagacctcaccaccaccaccggttcctcctctccggttctcacattaccctcggaaaccaaaagcatcaacaataacaaactctcatcctcttccccttctatagcatctaatgaaaaaaaactatgaaaaacaaaacgaatggcttaattcactgg

SEQ ID NO: 12644 - DNA, 354 bp, Glycine max
tcattgggcgttgttgattggtttacaagcctcgtttaatatttgctcctcacagatcgtaacactttaaagttcaatctccccattgtccatatcatacgctaacaaagcaagaatatatgaaagaagatgaggtcttcaatcatatttctttgcattctggtgtatctgaacgagggagctgcggaatagtcagctgacgacgttcttgagaaatacgatctcccagttgggcttcttccaaaaggtgccacagggtatgaattaaacgaaaagaacgggcacttcacagcgtatttgaatggaacatgctactgcagcatagagtcgtatgagctacagtacgagtccacc

SEQ ID NO: 12645 - DNA, 382 bp, Glycine max
agcttcgcccaaaaccatgttcatttatcttctaggagagccatgttgtagaacacctcaatcccatgcaaacgacaataatcaattttgttcttaatagcctttaacaagtaatgatccccaacgggattttcgcacggtttcggcgacgacccagttacgaaaaacacgcggggcttgttgggtcgaaggaaattcgagaaattgggattctcgcgaagccagcgagatctctgttcgtcccagatcgatattttggggccgagacgatacgcctcgtgtgggttaactttctcgcggttctcgtcttctgtttcgcctaccaagatggtgttgatgtctaacgcgttgtaattggtggtggaagtggaactttcaaacg

SEQ ID NO: 12646 - DNA, 422 bp, Glycine max
  unsure (1)..(422): unsure at all n locations
tcaagctataatgagaagaccacaggcatattntttttttcttatgccaaatttatagatgctggtgtaagcaagagtatttcacctgcacagaagagtactcatctacaacagctagcatatgtgaggagttttcctagtggggagagaaactgttacagaataaatgtaacaagtggtactaagtatttgatcagagctactttcttttatggaaactatgatggtctcaatcagcccccacaatttgatcttcatcttggagctaatatatgggacacagtgaacttccccaatgcttcactcagtgaaatcagtgagatcattcacactccatcactagattacatacaaccatgtctggttaacacaggcaaagggactccattcatttcagctatagaattgaggactntgaacaa

SEQ ID NO: 12647 - DNA, 425 bp, Glycine max
gcttgtaatcgattacacacatactgtaatcgtattcctttatgttattttcagaaaatattctcaattgtcacatcttttcatttggttcttgaatggctatcaaaggcctatatatatgtgacttgagacacgaatttgccaagattttttcagaacaaaaaggtcttatcctcttaaaaagcaaaatcgttttatcctcttacaaattccttggccaaaacacttgtgattcaataaggaattatttgagtgctcaaattgttcaatctatctctttcaagagagatttcttcttcttttcttctttattctgaaaagggattaagagaccgagggtctcttgttgtgaaagaattataaacacaaaggaaggattgtccttgtgtgtttagaacttgtaaaaggaatttacaagatagtgg

SEQ ID NO: 12648 - DNA, 400 bp, Glycine max
agcttccttaagaagatttctaaagaatctagagcttagctacacatacgtctctaatagctaagctcacctccttgagatgagaagctacaacttagctacacatcccctataatagctaagctcacccgcatgacaaaatacatgcaaatacaaaaaaaatccctactacaaagactactcagaattcctcaaaatacaaggctaaaaccctatactactagaatggccaaaatacaaggcctaaacgatggaaaaacctattctaatatttacaaagataagcaggctcatacttagcccatgggctcgaaatctaccctaaggctcatgagaaccctagggccttcccttggatttatggcccaatctacttggagtcttctattcaatgcccttg

SEQ ID NO: 12649 - DNA, 392 bp, Glycine max
  unsure (1)..(392): unsure at all n locations
ctgcagcttgcttatcatnttatttcctttctaggctttttcgacgactcaccacctgcttcaaaagatgctacaaaccggaagaagcactagtgctatagttatcattgtattaattgtgcttgtgctcttttctttgttctcctttgtactttttaagctgtggctgaagaaaaaaagggaggagcaatatgctcgtctttaatgctaatgtttttggctttgtgttttccagcttccaggggataaaatattaggtctggcaaaaatttcttgggtattggaatcccaggagatgccaaggacttcttcaatcaagtcgagtcattaggttttctagagagcaatatgaaagtgctttactaaaaacaatcttattatagattgcagct

SEQ ID NO: 12650 - DNA, 415 bp, Glycine max
tagtaaagctaggcactaacaatctccctctttgtgttaattttgtctaaaacatacttagacacttcctgagcaggtacgagcagttatgcaagtgggatcagcaactttcattatcagagtaatcaagcacagcggaaattctgcaagttgcaagtcgtttccaggatgtcaagacatctcacatgacatcagctttctgcttctgctccccctgtctccatgctcttactgcagcatcttctatcagctactagtcttttccaggatgtcaagacatctcatgtgacatcagctttcccttgtctccatgctcttactgcagcatcttctatcagctactagtagcttacatcagtcatcatcagcagcagcagtctccccctcaaaatcatgtacatacaactccccctca

SEQ ID NO: 12651 - DNA, 438 bp, Glycine max
  unsure (1)..(438): unsure at all n locations
tactcaagcttgcnatcgattacacacatactataatcgattaccttatgagtttgttttaaaacattctcaacagtcacatctttttatctgtttcttaaatagccatcaaaggcatatatatatgtgacttgagatacgaatttgacaagagttttgaagaacaaaaaggtcttatcctcttaacaagcaaaattgttttatcctcttacaaattccatggccaaaacacttgtgattcaataaggaattatttgagtgctcaaattgttcaatctatctctttcaagagagattacttcttctcttcttctttattttgaaaagggattaagagaccgagggtctcttgttgtgaaaggattctaaacacaaaggaaggattgtccttgtgtgtttagaacttgttaaaggaatctacaagatagtggaactctc

SEQ ID NO: 12652 - DNA, 427 bp, Glycine max
  unsure (1)..(427): unsure at all n locations
taaggtcagaatgaactttgagcttggaacgtagtttgaattttcgatccttggntaatggttttttgaagatgtcagcaatttgatccacagaagatacatgacagatttggagcaatttggattcaacaagctcatgaatgaaatggaaatccaaagcaatatgtttggacctagtgtgtataacaggattcttggtcagaaaaatggcgctgacattatcacataacaataatggaggacgtctaagaggaacacaaagatcttgaagcagttgtttgatccacaacagctcagcagcagtgtatgcgagtgaacaatacttagcttcggtgctagatcttgcaacaactcgttgttttcgagaagtccagctgataagattggatccatganagatggcataaccatactaagacctgctatc

SEQ ID NO: 12653 - DNA, 408 bp, Glycine max
  unsure (1)..(408): unsure at all n locations
agcttaaactaatttcaactaaatcatttatagaggttttaaatttcatattatagtcataccgagccaaatcggactgtatgatttttaagtttgattcaaatggcatgtaatgaaaaaactaaactaaatcgcatcagaatattttttgtaaaattattttatantaatttgtgtgatgaagaagagggaaaaaatgaaatcatttaattaatgtaataatgagtttaaaaaactattttacaaagacttaaatatgtttttggtctctgatatatactcaatttttgtgtttaatccctaataaatttttccttcgaatcggatccctaatattttaaaagttttgtctaaggcccctgccattaactatgattcattaactgcttacgtggtcgttaacttgac

SEQ ID NO: 12654 - DNA, 298 bp, Glycine max
agacagaagtaaccttaagtagtgatttattagaatgaattatgagagtttccagatccactccaggattttttttaacatccagatttcacttttagtgaggaacttattcccatgcagaacactctttcagctattatgctcctatgctaaaaaaaacgtgaaaggaactgcctacctgagatagaatgattggaccaccatgagactgaaatagcttttcattcttcatcatctggactattttctgagtgaaaccttgctttgcggctaaagtaaaaacagtaaaaataagtgt

SEQ ID NO: 12655 - DNA, 424 bp, Glycine max
  unsure (1)..(424): unsure at all n locations
agaaactcagcttttaaaatcactttgaaaccatgctttgtgtttttttattnggcttcgctatgacttcattagcaatcatcacaccatggagaatatgccttcctttgagaaaggcagtttgcctttcatcaataatgtgaggcaaaacaagagccaacctattagcaaggactttagacactattttataagcacaccctataagagagatgggtctataatcattaagagattgtgggttaatgatcttggggataagggctatgaaggatgcattgcttcctttggggaatctgccatttatgaagaactcatccatgaacctgataaaatcaggttttagaatttccaaaaactgtttaataaagttgaagtttaacccatccgggccagggcttttatctccaccacaagcccaaac

SEQ ID NO: 12656 - DNA, 342 bp, Glycine max
agcttttccggagcccattatattgcgttttcgttcatgtgtctccaccttcgagtttggagctatgcgtagtgattgcttagtgcaattctccattctcaacctttttcggagccccatgaattgcgttttcgttcatgtgtcctccaccctcgagttcggagctatgcgtagtgattgcttagtgcaattctccattctcaaacttttttggagccccatgaattgtgttttcgttcatgtgtcctccaccttcgagtttggagctatgcgtagtgattgctttgggcaattctccattctcaacctttttcggagcccatgaattgcggtttcgttcat

SEQ ID NO: 12657 - DNA, 397 bp, Glycine max
agcttgaaggtgtgtagcccaccatcttttatagtagaatactggtaatgtgtttactatcattgtcatcattttttttcgtcattgaggtgccacttgagctgccaggtctctccacctttgggcgtattctttggaaagatctgtgccctctttttgcacatgttctgtagttgcatcctatccgaagccattatattgacacaacctaacgaaggcaaccattaggtccttccaagaatggactcgggaaggttcctagttagtgtaccaggcaacagctaccccaataagactttcttggaaggaatgtatcagcaattcctcatttcttatgtatgcccccatcttccgacaatacatctttagatggttcttggggcaagtagtccccttg

SEQ ID NO: 12658 - DNA, 408 bp, Glycine max
agcttccctttcttcggccaatgctggttttgtttggcagtgatttccttggcaatttgatgctcagaaacagcaatatctatcactccatcagtaggtctgcccagatatttgttgatcacagcaggggagaatctaacacactttcctctgacaaatactttttgatactcatcactctttctgtttgttatgtcagagggaatgttgacaatgaattccctgactaggccttcataacagtctcccaatttggtgactgtcttcagtagtccagcagcctcgatgaggtccatgatttccttgcaatccaaggcatttcttcccatttctctttctaaagcaagccttcgttgatatacaaatttccacctttcaacattgccaatggagtggaaagagatgttg

SEQ ID NO: 12659 - DNA, 408 bp, Glycine max
agctttcgaggtgaggacacccgaatgtttttcacatgccatctttacgaagctttgatgcaaaagaaaattaaaacctatatagatgaacaacttgaaaagggagatcaaatcgcactagcactcaccaaagccatcgaagattcttgtatatctattgtcatcttctcagataactatgcttcctcaaagtggtgcttgggtgaactcttcaagatcttggaatgcaagaaagaaaaaggacagattgtgataccagtgttttacaatatagatccatcccatgtgaggaagcaaattgggagctataagcaagcctttgcaaaacttgagggagagcctgaatgcaacaaatggaaagatgctcttactgaagcagcaaatttagttgggttggactctaaaaat

SEQ ID NO: 12660 - DNA, 396 bp, Glycine max
  unsure (1)..(396): unsure at all n locations
tctaaactgtgtacaagaacgaagctctgtaccatatgctttacagnggccacagatatcttaagaagggggggttgaactaacatattgcaaactgtttgccctaattaaaaaaaatctatgtgactttttactcttgttatgaaatcccttaatgacaatcttcctaaatattaatccaaatgaagcatcttgaatatgaatatacagctttgataagtaaaggagattactggaagatgaatacgctaacatcagttttatacttggtcggccacacccttgtgcctacgtacagtacccaagcaacccgcttgagagatccactatcttcgcaaatcctttcacaagttctaaacacacctagacaatccttcccttgtgtctatagatcct

SEQ ID NO: 12661 - DNA, 405 bp, Glycine max
agcttgtgaggatcggtgtttgtctttatgtcaaactctctcacggagtgatttgttggagagcaagctgtttatcaaactaaccaactacatgataatatttcaaagattcagacccctgtgataacagaactagatataaacactaattttaatctatatatgatctataaaaaaagggaataccatctgctagttagacatctgaatatcttattaattatgtactatttttcaatgtttataaatttagaaaattacggtcaattgttagtattcaacactttttcaagttttatgaatattaaacttctaaccattttcttaaataatatttaatgcatttttaatttatcaaacaattagttcaatcaaatattttttttgttgactcacgttaaaaag

SEQ ID NO: 12662 - DNA, 366 bp, Glycine max
  unsure (1)..(366): unsure at all n locations
gagcttcnggaaggaatatttcggtgtgtttgcaattttgcaatccggcatcccaaatctctggagagtttcaccagcatatttcctttgatgcatgacaatcccatattcagtccacaagaattctaacccaaggaaatatgacaatttccctaagttagtcatttcaaattcactcatcatgagtgaagtgaaattatcaatctctgttgtatgattaccagtcactagtaaatcatcaacgtataggcacaccattaacaccttgttatcctccttcaacatgacataaactccatgttctaccacacaccttttgaagccaagttgagcaagatatgcatcaattctcctattccatgctct

SEQ ID NO: 12663 - DNA, 410 bp, Glycine max
tcgatggagaacaaccttaggatgcagtatttacatgcacagagaagaaaaaagtgcaagcaaaataggtcacgtctaatataatttaaattgtaagttcaacatcggttttcaataaaaaaaaaaaaaaaaaccaatgttaacaacttgatgttaacgttaacatcgattttattaaacaaaccgatgttaacgaactaaggttaacatcggttttctgaaaacccgatgttaactaattaatgttaacatcggtttttccaaaaccgatgttaaagtcacttcattaacatcggttttcttcaaacatgatgttaacgtatacacattattcacaattatgccaccgcgttatcttaacatcggttttttaaaaaaccgatgttaataaagtctcattatttatcatt

SEQ ID NO: 12664 - DNA, 407 bp, Glycine max
agcttcttatttgatccagagaggagtgcatacattttattttactcaagtcacgcccactaaactctggcacaatagacttggtcattgccatcttgaaagaatgctaaacatgaaaaaaagggaaatatgcaaaagaaaatttgaagaagtttcaaatggaggaatgcaaatctgttagcacaccaatgaatcaaaaggagaagttcagtaaggaagaacgtgttgataacaattatgaaggatattatgggaacttgattggatgtctaatgtatctcattacaacaaggccaaacattatattttctcaaaagaacaaaactggaatttttgttgacaatcaagtagtcattgctattgcaaacaatctcgtgtgtcatgggaagactaaacatattaacatc

SEQ ID NO: 12665 - DNA, 423 bp, Glycine max
tggttatctccttcttcactacatcaagaatcacctggttgtgtcttctctgtggctgtcttactggtttagctccatcctctaaatttattcgatgcatacatgtggatgggctagtaccaggaatgtccgccagggtccaacctatagccttcttatgcttcttgagaacagacaacaacttctcctcttgctcatcactaagggaggcagatataatcattggaaaacttttgctatcatccaagtaagcgtattttaaatttgatggcagaggcttcaattctggtgtggttggctgggtagtggtagaaggagatggtttctcagcctgtacctcataaagaaagtcagaggtatgtgtacttcctgaaacatggttagtcctatctgactctataaaatcaatctcaagaggcaaaa

SEQ ID NO: 12666 - DNA, 367 bp, Glycine max
actcgggcaagtgtggccatgtactccgctttacttgccgaaagagcaacaactgattgttgatttgctttccaactgattgttgtaccaaacaaagtaaacacatattctattaaagacttccttgtgtctacatttcctgcaaaatctgcatctacatatcctgtgactgctgcctcgtgtgctgtcttcttgtaccttaaactagctttcaaagatccatttaaataccttagtgtccacttcacagcttcccagtgtgcactgccaggatctaccatgaatctgcttataatacttacaacatgagccaagtcatgtttactgcaaaccatttcatactctattgttccaacaccactggcat

SEQ ID NO: 12667 - DNA, 410 bp, Glycine max
  unsure (1)..(410): unsure at all n locations
tactcaagcttggttcccaacgctctgtacaagctctgttttatttacagttttatcnaagatctttggcagatactatgctatatggcacaccatgtaactagacaacctcacttatatacaaggtggtgaacttctccaaggaaaatctgatattaacgggaatgaagcgagtagacttagtcaatctgtcaacaataacccagatagaatctaaacctctacgggttctaggttgtcttaccacaaaatccatggaaatactgtcccacttgcactggggtatctctaacggttgtaacttcccttaaggtctctgatgttatatattatccttctgacagactacgcatgcatacacacactcactaacctctctcttcatgttgggccaccaaaacatcatcttt

SEQ ID NO: 12668 - DNA, 423 bp, Glycine max
  unsure (1)..(423): unsure at all n locations
tgtttcttgcaattccaagacacaagagagcttcctttatgtggcatgtaattngcaacctgcacaatcagaatctctatatcttgactcatccactgatttacctttctcatctaagtcaaggtaggttgaagttgtcgttggagtatatggttctttgcattttttatgccaaatttcttaattagttctatagagtatttggtttgacataggaaggttccatgtttcatctactggacttggagtccaaggaagaaatttaactcacccatcatagacatctcaaattccttctacatacaactagaaaattccttacacaaaatttcattactagcaccaaatataatatcatcaacatatatttgaacaattaacaactcactatttactttcttaataaacaatgttttgtcaact

SEQ ID NO: 12669 - DNA, 422 bp, Glycine max
gcttctgttttcaaattcgagattctcaatattttacgttgactttatcggacatctgagttaaaagttattgtcgtttgattttgctgagagcttctgttatcaattacgagcgtctcaatatattacgagacttaatcggacatctgagtaaaaatttattgtcgtttgattatgctcagagcttctattctaaatttcaagcgtctcaatatattacgggacacaatcggacatccgagtaaaaggttatggtcgtttgaatttgcagagagcttttgttttaaatttcgagcgtctcgatatattacgagactcaatcggacatccgagtaaaaatttattgtcgatagaaatttcttagagcttccgttatcaattatgagcatctcgatatattacaagattcattcgttgatccg

SEQ ID NO: 12670 - DNA, 402 bp, Glycine max
  unsure (1)..(402): unsure at all n locations
agctntgatgcaacatttgttgaggtttttgaaatatcgagatgatgcgctccatgagaggttggatcaaatggagaatagagatcataatgaagaagaaaggaggagaagagggaatgatggtgttcctagacaaaaccaaattgatggtattaaactcaacattcctccatttaaaggaaagaatgatccggaggcctacttggagtgggagatgaaaatagagcatgttttctcatgcaacaactatgaggaggaccagaaggtgaagcttgccgccacggagttttccgactatgctcttgtgtggtggaacaagctacaaaaggagagagcaagaaatgaagagccaatggttgatacatggacggagatgaaaaagatcatgaggaagcggtatgt

SEQ ID NO: 12671 - DNA, 419 bp, Glycine max
tgtatgagtactgggaaagattcaagaaattgtgttctgtctgtcctcaccaccagatttctgagcaactcattcttcaatatttctatgagggacttaacaacatggagaggagtatgattgatgctgctagtggtggagctcttggtgatatgacccctgctgaagctaggaatttgattgagaagatggcttccaactcccaacaattcagtgcaagaaatgatgctattgtccttagaggagtccatgaggtggccacggattcatcttcatctactgaaaataaaaagcttgaaggaaaacttgatgccttggtcaacctagtaactcagcttcccataaataagaaatctgcacctgttgcaagagtctatggtctatgttcttctgcagatcaccatacagatctctgtcct

SEQ ID NO: 12672 - DNA, 390 bp, Glycine max
  unsure (1)..(390): unsure at all n locations
agcttgtgaagcgtngcaatgtagtnattatagtacagngcagggcctgtctctttgtcatagccagcaagaaggatgttcacagagtatgggttctatagaaaaaagaaaattaatggttgaggcttcaaatgaatcattaaccaactattgtatggtctaaggcactgtttggataatatgaattgatctcataaagctaaataggagaagtaagatgaataagagcataaattgattttagcttcttaatttgttttcctataagtgagagccaaaggacatgatatatgagagttagggtttagaagagataccttgcggagagcagtggcaagttcgccacgtgtgaaattggcggcggcggcggtggtgagagggatgccgtta

SEQ ID NO: 12673 - DNA, 424 bp, Glycine max
  unsure (1)..(424): unsure at all n locations
tatatggcaacttactgaatgggacaattccttcttggtgtttatctttgncatctttggtggatttagatctatcaggaaaccaattatcaggccatattagtgcaatctcatcatattccatggagagattgtctttatcccacaacaagttacaaggcaatattccagaatcaatttttagccttctaaaccttacttacttagatctatcatcaaacaatctaagtggatctgtcaaatttcatcgtttctccaagcttgaaaatttgggaagacttcacctttcacagaatgatcagttatcactaaatttcaaatccaatgtaaattatagtttttcccatttattcagtttggacttatcttctacgggtttaactgaatttccaaaattattgggaaaagtcccaagtttggaatc

SEQ ID NO: 12674 - DNA, 415 bp, Glycine max
agcttaagctccttaaacacaggctgaatgtgtggattatagataacacagcagatgtatgttctcaagtaaagcaacttcagcagaatctgaatgacttggaaaattcaatgtcatctcagccttcggagcagcaagctaaacagctgaagaaagtccaatctgagctttgggaaaaagctaatcttcatgaatctatcatgagacaaaagtccagaagtaaatggattaaagagggtgatagaaatagctcgtatttccataagctaatcaattacagcagaaggagaaatgctttaaggggtctgatgattgatggagcttgggttgaagacccttccttggttaaggctgaggttttgcagcactttcagaacagattccaagaacctcatgctcatagacctaatctaga

SEQ ID NO: 12675 - DNA, 433 bp, Glycine max
agagatcacctgagtgcatgcgcgctcctacctacaggagacggaccatttttgtgttgtagaatatcaacgaccaggcctacaagattgacttgcctagtgagtataatgtaagtgccactttcaatgtgtctggtctatctctttttgatgcagatggaggagccttggatttgaggacaaatccttttcaagaaggagggagtgatgaggacatttgataaaatttggtgagagtttctctctgggttccttgttgaaccaattatcagacttatcaaggtaatccttgtggcgtctacccagacttatcttccttcattggaagtggcgtctacccggacttatcttccttcaccggaagtggcgtctacccagacttatcttccttcactggaagtggcgtctaccctgacttatcttccttcactgg

SEQ ID NO: 12676 - DNA, 417 bp, Glycine max
  unsure (1)..(417): unsure at all n locations
gtgcttccacacaagcaactngnatnntttttatcttcgtaaagcacgaagcaaagttaaaagttccattcaaatatctaaaaatgcatttaacagtagataactaaacttcccttggtgccttttagaatctggcacaaaggtatacactgaacataatgtcaggtctggacgcaatgagatatgaaagagatctcatcattcctctgtatgtcttttcatccacctgctttgattcttcgtccagtccaagtatactggttggatgtatggggtctttattgggcttgcatcgtccatcttgaacttcttcaaaagttccttcacgtacttggtttgatgtatgtatatgccttcatctattttcttgatctgaagtccaaggaagaacttcaattcttccatcatactcatctc

SEQ ID NO: 12677 - DNA, 404 bp, Glycine max
  unsure (1)..(404): unsure at all n locations
agctntaagacagnnngttatatcgtttttgtatattcaacaagaacatcctatttcttgacattgacaccttagtgattaggttgtttctcccatctctgatggaaagacttgaatctttcatgtgaatatcatagctttttttgagtaattgtcctaaactcaaaatattgttcttcatatttgggacgtagtaaacatttgatatgaattcatgtcctccatctttcaaacgaattaagatcttacctttgccttttacatgagtcttagaattatcaccaaatgagacattgccacttattgattcgtcaagatccacgaacatgcttcttttttcgcacatatggttgcttgcaccagtgtcaaggtaccatgtgttttcttggctaccttcattgcct

SEQ ID NO: 12678 - DNA, 413 bp, Glycine max
  unsure (1)..(413): unsure at all n locations
ttgagccaattcaaacgacaatatctntttatttgtatatctgattgtgtcccgtaatataacgagacgctcgaaattgaatgttgaagctcttagcaaattcaaacgtcaataagtatttactcggatgtctgattttgtcccgtcatatatcgagacactcgaaattgaatgttgaagctctgagccaattcagacgacaataactttttactcggatgtctgattgagtcccgtaatatatcgagacgctcgaaattgaatgttgaacctctgagcaaattccgacgacaataactatttactcggatgtctgattgagtcccgtaatatatcgagacgctcgcaattgaatgtcgaagctctgagcaaattcaaacgacaataactttgtactcggatgtctgattgag

SEQ ID NO: 12679 - DNA, 394 bp, Glycine max
  unsure (1)..(394): unsure at all n locations
agctttgatatatattcanattaagatatttttatattcggatgtccgattgagtgccgtaatatatcgagacgctcccaattgaaaacagaagctctgagcaaattcaaatgacaataacttttgactcggatgtccgattgagttccgtaatatatcgagacgcacaaaattgagaacagaagctctaagcaaattcaaacgaagataactttatattcggatgtccgattgagtccggtaatatatcgagacgctacaaatcgaaaacagaagctctgagcaaattcaatcgacaataactttttactcgtatgtccgattgagtcccgtaatatatcgagacgctcgaatttgaaaacggaagctcgtatcaaaagtcaaccgcaataac

SEQ ID NO: 12680 - DNA, 409 bp, Glycine max
agcttccctaagggcagtaatgcatctctttctggctttaatacctaaatcacacaacccccagacgtttaatgactatagatccatctccctcattggttgtatgtaaaaagtaatagccaaattattggcatacagacttagcaaagtgatggttgaccttattgatgaaaggcaatcggcttttataaaggatagacacatccttcatggagctttgattctcaatgaggtagtagaggaagctaaaaggtgtaagaagccaacattggttttcaaagtggactttgaaaaggcctatgactcggtttcatggtcatttctggagtatatgctggataggatgggtttttgccttaaatggagaaattggatcaatgcttgtatgcaatcagccactgtatcagtc

SEQ ID NO: 12681 - DNA, 372 bp, Glycine max
  unsure (1)..(372): unsure at all n locations
agctngagaatgcaagaacttatgtgcttttgccacgccaacggcgattttgcagcgccgttgccaacttaaactgttgacaatttcgcttaacttctccccctcctcgtgctcgtacaccaagtaccctctcttcccacacctacacgtcgcaataaggttaatgatattcgggtgacgaacctttctaatttttactgtctcttcccacatactcattggaagtgaattcaagtcgctgatttccttcaccacgaactgcatgtcgttttccatgcacttcccttcgtaccaaacccagtttgttcctttcgacacaacttttccttctttaaccgttttcaaaacatcgtctacattgatcaaccttgc

SEQ ID NO: 12682 - DNA, 420 bp, Glycine max
agaccctgaggcacctgccgctgcgactagccccgacaggtggtgatttattgttttggagaggatcgataactatgcctatatgttggacctcccagaagagtatggagtcaacaccacttttaacatttctgatataattccttttgtacgtggagctgatattgaggaggatgaactaactgacttgaggtcaaatcctcttcaaggggaaggggatgatgcaatcctccctaggaagggaccagtcactatagccatgagcaagaggctccaacaggattgggctagagctgctgaagaacgccctatggttctcatgaacctcacggtagatttctgagcccatgggccaaggttgggtccaattatctttgtacatattagactaggatgtcattatatctgatccttgtattt

SEQ ID NO: 12683 - DNA, 415 bp, Glycine max
tcacctgccacacagttaaggcattatattttccttatatcatctctgacatatttattaagcagttgtcagattaaattatttttaaggatatatggtatatttttccttcaaacaaaggattagtatatttacttgtaagtgtttttttgtgttttaacattttataataaaagtaatattttctgttaaaacattcttttccccccatcggatcctttagtagaaatattttagccactgttttagtaatgaaacccctcttacgatttaataacaaatcaaatatatattattatatccaaaattaaatataaaattgttatatatttgtcataactttgattgttttaattcagattgctttaattcatgttttcattttcactaatttaaacacataacttcatatcag

SEQ ID NO: 12684 - DNA, 402 bp, Glycine max
agcttatagtatcatttatgtttgcattaacaaaatattttgcgcacacagttatatgatcgtacctctatatcacaacaaccacagactatcccgtttccctgtttgtaacctccaagtaatttctgaaacacacattaatcatggaaaagaataaaaatcaagtgcaaatcaacccataagcaccaaatgacaaaaaatatttaaagaaaatattaagacacctgtcctttgacatagtaagccaactcagcaccatctggtagcccatttggcataaaaagcaacctgtgtaaatcattgtccctgataaaagcaaaaaatcaaattcaaactacagtagctaagctattgcaattcacatagagaagctagaggaatggaacaggcatccccaaaaac

SEQ ID NO: 12685 - DNA, 429 bp, Glycine max
  unsure (1)..(429): unsure at all n locations
ttcttctagccacgggagtnataaatattatccttgaatgtatgcaaatcttaatcatgtgagtaatatcaactaatcaagaatntagctaagcaaaatgatgacacaaaagggcaaatatgaaagtaaaggggtagtaagacagagcattaccacttttatttgtgaccaacacaagaacatctccatgaagtgatccccttttggaggcctcgtgaatggctctgaagttggatcctccaccagacacgaatactgctagctttttccttcccaccgtgacctgagccgttacctcatggccctcctttggttctgcagcactactactactactactactactactactactactacaccatatcctcctccaagaactagaacacacttctntgtgcacaatgctgataggatggacagctctgc

SEQ ID NO: 12686 - DNA, 422 bp, Glycine max
  unsure (1)..(422): unsure at all n locations
atggatgtatccatgcttattgatttcttttctgtgtatgtgacagggggggaaaaggagtgatgggcgaacacctgacggaatacgtccaattaactcgagatgtggcctattacctatagcacatggaagtactctttttacaagaggcgagacacaggtctgagccaactntatatgttttccagtttatgctcttgatgatatctgatggtgtctatatatgcttatgcaagtcacattatctcttttctgtgttcgtagctttattacaacggagatcgaatgatcaaacacaaacgaggaacacaactaataatgctgactccttggaccttaacacacttcttattaaagtctccattgtagtcacctggatatatctaaaactagtgttggagtcagattttgatactcacgta

SEQ ID NO: 12687 - DNA, 444 bp, Glycine max
  unsure (1)..(444): unsure at all n locations
gccttgatatgagtagtggttagagtctcgatgtattggctgatgagtactccagtagcatatataatgtttggtcttgtgtgtcaaatatcataaactacccaccacactcttgaaatctatagcatccagttttcttgcttcgtcgaactttgataacttcattntgcactccatcagtgttccaattggcttgcatctatccatcttgaatntattaagcatcttctttgcgtagctntgcagtgaaatgaagatntcatcttctttctgctctacctcaatggcaagatagtatgacattnttccgatatcggtcatctcaaactccttcatcatttctttcttanactctgaataattgtatgccataagtatatttgngattaaatcatataagaattgtaatnttcctctctatntcttctttttggtgaataatat

SEQ ID NO: 12688 - DNA, 400 bp, Glycine max
  unsure (1)..(400): unsure at all n locations
attctaccctctgatcccttaacatacttaatgctttccctaattntttntacagcaggaccgactactttcaacccctcttgaacactaaggtttaaaatgtgagcacaacatcagatatgaaaaaattcaccaccacttactaaaccattagtatgcaaaagtctttccttcaaatagtcttgcattttatcattggaagaagcatcatctagaattaatgaaaatattttctgctcaatccaccattcttccaaaaaaaaccatatataactttagccatctcacgccccgagtgtggaggaggaaaatgagaaanattaaccattttaccattcaacttccaatttgcatcaacataatgcgcagntaatgaaatataacctcagaagtacaagat

SEQ ID NO: 12689 - DNA, 359 bp, Glycine max
  unsure (1)..(359): unsure at all n locations
atgctagacganatatagatgggaatagaggtaacaatggcggtaatgacggaccgaggcagaaccgggttgagggagtaaagctcaatgttcctcccttcaaaggtagaagtgatccagatgcctacctggactgggaaatgaagactgagcacgtatttgcctgcaatgactacactgatgcgcagaaagtcaagctagcagcagctgaattctccgactatgcccttgtttggtggcataaataccanagagaaatgttgagagaggaacggcgagaggtagatacatggactgagatgannagggtgatgagaaaaaggtatgtgcccactagctataacaaaaccatgcgacag

SEQ ID NO: 12690 - DNA, 422 bp, Glycine max
  unsure (1)..(422): unsure at all n locations
ctactggagagaatgtataatatatatcgatcccaacttgttgagtatatcctgtggcaatcaatcgagctttgtatctatctatagagccatccattntgtatttcaccttatacactcatctacatccaatatagtgcttatcaggtggtaatggaacaagtgtccaaatggaatatgcttcaagagcttggatttcctcattcattgctcgacgccattcangataagaagcaacttgatgataaaattgagattcatagacaactganatgtgattaatgaaagctctgtaaagggggctaagaggcaacaaggagcaataatgttggatgggatatgcagcctgagaatgtgaaatgacataatcagacaagtataagggaggcttagagtggcgtgtactccttcttaaagtaaca

SEQ ID NO: 12691 - DNA, 322 bp, Glycine max
  unsure (1)..(322): unsure at all n locations
ttgactcattctctccttgaagtgacgtctccaatcacctttcctccttctccattctgctgccattgatcttcaagaagcaaaggatttcattgatgaagaagatccaaggcctacaagctctacatggagctacatcatgtggtatcaagagcatcttcatctaagtgatgttcttttgcttcctctatcttttgtttggtcaattcactntaattccttgttcttcatcatattctccatgtatctcctccattatcttgtggtttggttctggttatagtagattcaaaatataaatcgataaatcttagatctatac

SEQ ID NO: 12692 - DNA, 484 bp, Glycine max
  unsure (1)..(484): unsure at all n locations
gctcttgaactggctctgtaaacatatcagccggattgtgcagagtgctgatgttatgaactntgattcttttttctgaccgaatgaagtgatatctaacatctatatgcttggttctatcaagatgaacctgatccttggccaagcatataacactaaggctgtcacaatagatgttagcaaattcttgattaattccgagatcatttatcagacctcttagccaaattccttcttttgcaacttcagtaagagccatatattcagcctcagtagttgagagggaaacagaaggttgaagtgttgccttccaactcaccaagcaaccactaagggtgtaagcataccctgttaatgaccttctcttgaccaaatcagcagcaaaatctacatcagaatagccagtgaggcagcaatctgggtgagatccatagatcaaacctacatctgtagtccctttaagatatctgannaatctcttcac

SEQ ID NO: 12693 - DNA, 437 bp, Glycine max
  unsure (1)..(437): unsure at all n locations
tgaacttagagaatgttcaaagtggaaaggtatttgtcgaacaatttgttaccagatattctcttgaatcttcattatatagcctttttattcatatatttgttgtgagtgagagttaattcaatcaaaaccttatgagtcttcattaaatgcatgaagacttctattatgattcctgatgcaatcctccctangaagggattaatcaccagagccatgaataagaggctccaagaggattgggctagagctgctgaagaaggccctanggttctcatgaatcttangatagatttctgagcccatgggccatggttgggtcaacttatctttgtacatattagattangatttcattatntttgggccttgtatttagggctccataatatangtagggtattcctataaattangaattttcagcccttgtattt

SEQ ID NO: 12694 - DNA, 388 bp, Glycine max
  unsure (1)..(388): unsure at all n locations
gcttgtcaatcttttgagcaaagacaacctctaatgcgtaattggatgcatcacacataaactcaaatggggctgtccaatcacgtgcctgaatgatatgggtggtagtcaccgcacgcttgaggtaagcaaaagcctctntgcatcggtcatcaaaatcaaactccacctgcttttgcagcatattggatagtggaaaggctattatgctaaaatccttgataaagctcctataaaaccctgcatgacctagaaaataacgaacctctcacatgcaacaggggtaacggaatcgtgaaataacatctaattaagcacgggctacctctatgcacctattcaaaatgatatgccctaaaactataccttcgtctaccatgaagtgaca

SEQ ID NO: 12695 - DNA, 274 bp, Glycine max
  unsure (1)..(274): unsure at all n locations
gctgtcaatcttttgagcaaagacaacaccttatgcgtaagtggatgcatcacacataaactcaaatggggctgtccaatcacgcgcctgaatgatacgggtggtagtcaccgcacgcttgaggtaagcaaaagcctctttgcatcggtcatcaaaatcaaactccacctgcttntgcagcagattggatagtggaaaggctattacgcttaaatccttgataaagctcctatgaaaccctgcatgaccaagaaaataacgaacctctcacatg

SEQ ID NO: 12696 - DNA, 414 bp, Glycine max
  unsure (1)..(414): unsure at all n locations
gaactttgaagttaattctaaatgatcaaagtgaaaaaatgcacacacatggcctctatttatagcctaagtgtcacacaaaattggagggaaatttgaatttctattcaaatttcacttgaatttgaaattgaatttgtggaaccaaattttggagccaaaatttcactaattatgattagtgaattntagctatggttcaatccactaatccaagatcaagtccaagattctccactacgtgtgcttaggtgtcatgagccatgtaaagcatgaaggacatgcacaaagtgtgactatatgatgtgacagtggggtgtagcaagcaaatgctcacctncccctctaaaaaattaatggatttggattctcccaattcaattaaatttatttcccaacatacacatgacatat

SEQ ID NO: 12697 - DNA, 461 bp, Glycine max
  unsure (1)..(461): unsure at all n locations
acattggaaagttagtttacaagaaatataacaatcattacaaacaagggccaaacaacacttctcatggcacgagtgtcaacatgcactntataaaataatcatattgnggtcgtgctattttatgacacatacgtatttgcacacataaaaattttgtgtgaaacattntacaacacctatccatgtacatatttttttgacaaaccttttcaatgctacatcctatatatatacacacattnntttggaaggcttcttttgttacctactcacaaatacacatattttgaanaacacttttacgctacccatccaacactttgtaaggcacttcatgctatatatattcatattatgcaaggcattntcatgctatatgtattcatatnttgcaagggcatttattcaacattntgcaagcatttccatgctatatatatattcacatatatacatac

SEQ ID NO: 12698 - DNA, 377 bp, Glycine max
  unsure (1)..(377): unsure at all n locations
ctcagctntccatgaataagaaatctacacctgttgcaagagtctgtggtctatgttctcctacagatcaccatacagatctctatccttctttgcagcaatctggaatcaataagcaacctgaagcttatgctgcaaacatttataatagacatcctcagcagcaaaacaaacaatagtagaataattatgacctttcaagcaatagatacaatccaagttggaggaatcatccaaatctgagatggacaagtcctccacaacaacaagagcctgtccctccttttcagaatgctactagtccaaccaagccatatgttcctcctccaatacagcaacagcaacaacaacagtcacaacaaagacaacaagcaact

SEQ ID NO: 12699 - DNA, 490 bp, Glycine max
  unsure (1)..(490): unsure at all n locations
gataattgttgtaactatggctgtggtctttgtctattgatgaagatatttattggagcatttaatacatgtcactaacttgtcaactaatatgataaaacaaattgcttatctttctatttttgcactttcatatcttgtgtaagaggacatataaactgttacgaaccaaattattttaactttttcttcatctttcatcatcttctccatattgtatagagaataaaacattcattctctatacaacaacatatcaaattctcaaagaattaaatatgtataaatgttgagactcaacaatcataaactntctttgttaattctctctaatgcacgttaagacactaaatttatatcttaacattnttntacttacatcaaaatgttgatgggtcttaatttatgttatgactcaatactntatactacttannacatanagaaacacatacacatattaacattttatagttaaatagctcattat

SEQ ID NO: 12700 - DNA, 462 bp, Glycine max
  unsure (1)..(462): unsure at all n locations
actatgatgttcttgaactacctttagatccaacggtttctcagatgaagaatcacagagaaaggaagactaataaggctaaggctaaaaattgccttttctctactgtgtcaaaaattatttttacaagaattatgaatttcaagtctgccaaacagatttgggattatctcagatcagaatatcaaggctgtgaaagaaccaaaggcatgcaagtactcaacttgggcagagaattcgagatgcagagcatgaaagagactgaaacaattaaaggctacgctgaccggctgttangcatagcanatagagtgaggcttcttgggaaggactntcctgatgaaagaatagtgcanaaaatcctggtcactatacccgagaagtatgaatcanagatatcagcattggaggagtctaaagacctttcaaccatcaccttgggagaacctcataatgctctac

SEQ ID NO: 12701 - DNA, 477 bp, Glycine max
  unsure (1)..(477): unsure at all n locations
ctcttgcctcactcaccgccttagacatcttagaactgatacatatgagcatttgtggtccttttccaacacctttttggaatgagtaacaatattttatctcgttcatagatgactactttagatacggttacctttatttgatacatgagaagtctcaatccctagacgtttttaagagtttcaaggctgaagttgaacttcaacttgaaaagaaaattaaggctgtcaaatctgaccatggtggtgagtactatggtagatatgatggatcaggagaacaacgtccatgaccttttgcgctntttctcanagagtgtagaattgttccgcaatacactatgccagganaacctagcatgaatggtgttgcagaacgatgaaaccgaactcttaaggatatggtgagaagtatgaatagtcattcttctttgccatagtcacttttgggagaagccttanataccgcagcttaca

SEQ ID NO: 12702 - DNA, 421 bp, Glycine max
  unsure (1)..(421): unsure at all n locations
ggagacacatgaacagcgctaggcaacgactttcatggcgctccgaacaaaggtggagtatggaggattgccttgagggtccgcacttaggcaatcatgaaactaagctccaaactcgaaagtggaggacacatgaacaaccctaagcaataatattcatgtggctccgaanaaggatgagaatggaggattgccttgagggtcctctcttatgcaatcatggaacacagctccaaactcgaaaacggaggacacatgaatgaaaccgcaattcattcacgtggctccggaacaggatgagaatggaggatngccttgagggtcctctcttangcaatcatggaacacagctccaatcatggaacacagctccatactcganaacggaggacacatgaatgacaacgcaattcattcacgt

SEQ ID NO: 12703 - DNA, 318 bp, Glycine max
  unsure (1)..(318): unsure at all n locations
gacagcctcatgcacaacaagccggttcggcgactntttacgttccagaatcgcggtcgagaagtccttcttccccgatntcctgcgtttccaaacaaaaactccaacatcaaacaaacctcacagtccaacaagctccatagtatagtgagcaaagaaaaagaanagaacaaaaagaattgtgattcctgaaatgaaatcaacgaaggtgcagagagttgactcacgggtccgatgattcgccttgctgtgacatccttgctggaattgaagaagatgatgatcaaagtgaagaattcagaaagttcagaacctaag

SEQ ID NO: 12704 - DNA, 441 bp, Glycine max
  unsure (1)..(441): unsure at all n locations
cttcttctgattgtaatggtgntttgtgcattcactatggccacttctcgccatgcaactataccatcctctgcatcactcacattacaacaaactgaagcaaatgctttgttgaagtggaaaacaagccttgacaaccaaagtcaggctntgctatcttcatggngtggcaatactccttgcaattggcttggaattgcttgtgaccacaccaaatccgtctccagcataaatcttacacacgttggattaagcggtatgcttcaaactctcaattnttcatcacttccaaacatcctcactctagatatgagtaataactccttgaaaggaagtattcctccncaaattanggtgttgcaaaactcactcatcttgatttaagtgacaatcacttctctggacaaattcatctgaaataactcagtggtcagcttcgtg

SEQ ID NO: 12705 - DNA, 458 bp, Glycine max
  unsure (1)..(458): unsure at all n locations
gagcgatctcgaggattcntagcccagaggttgttgcatagacattgtctctgtttatagtccatttaaaaaggcattattaatatccaaatggcacagaggccacctatttgtgggagccaaggtgaggataacctggatggtttctggtttgaccacagtagaaaacatcttagtaaaatcaaagtccaaaaatttgatgaaaaactttggcttcgaggcatgccttgtagtgataaacaaaaccattagcattttcttttattcaataaacccacttgcaacctatagcttgtatatgaggaaatggtacacgcgcccaagttttcttgtgcagcanagaattatactcatgtgttacatggcagcatgccattgaggatcccgcaaggcaagtntgncactcttgggacatgaataaagaatatacgagagatgcgacagggaatgatacccta

SEQ ID NO: 12706 - DNA, 403 bp, Glycine max
  unsure (1)..(403): unsure at all n locations
cataagcacttagactatgaaggaaagctggagttgctgcacatgatgtccaacgttatgtcaaagaataagatcgggctgcacaatgcacaaggcaagataaagtgtcaaatgaagaattgaagctgcaggattcacgatgtcggatataatgtccaggacatcctgcctgaaaatactggaattgctaaaagcattgaagctgcaggatccacgatgtcggatacaatgtccaggacatcctgcccgaaaatactggagttgctaacagcattgaagttgcaggatccacgatgtcggatacgatgtccaggacatcttgcccganaatactggacatataaatctgttatatctgtaacagattattgtgcagttagcaagagattagatgatctatctt

SEQ ID NO: 12707 - DNA, 433 bp, Glycine max
atcttcgaactgtcatcgcttcattctcgtggcgatagattatttcaccaaatgggtcgaagcggcttcttataccaatgtcacgaggaatgtggtggtcagattcataaagaaggaactgatttgtcgatacggactccctaggaagatcattactaacaatggcactaatctaaacaacaaaatgatgcaggaaatgtgcagggatttcaagatccagcatcataactccaccccctatcggccaaagatgaacggagctgtagaggcagcaaataaaaatattaagaagattattcagaagatgacagtgtcatacaaagattggcatgagatgctgccttttgccctgcatggatatcgaacctcggtacgaacttctactggggcaacgctgtattccttggtttatgggatggaagtggtactctta

SEQ ID NO: 12708 - DNA, 461 bp, Glycine max
  unsure (1)..(461): unsure at all n locations
tcatgaagtgtataatatggatcactntcaattctatatanaagattaatattaattgtgttctaaattaatatacacaatttataaagcaagaatttctctttgtttatcttcttaattatatattttataattttctgttttttctttaaatagacatttatagtagcattagtataaaatttctctctcaactttctcaaactactattatgttactttatctatatatttatattcttaatcaccaatctcttatatcccattntttttatcacaatgtgtgaaatgaactttgataaaaataaataaatatcaataattaanaaattatataaaaatataaattatctactttgatttcaaaatatantttatatattanaaaacgtttatntatcataaatattaattatataacaacaaacatttattacatgtcattcacaagttaaactact

SEQ ID NO: 12709 - DNA, 450 bp, Glycine max
  unsure (1)..(450): unsure at all n locations
cactatacaagatntcttntgcctcctagcctcctcatcaacctcactagcaatcaagactccatgtagcagctgtcgacccttaacaaatgctgactgtctttcatcaacaagatgatccagaaccttacttagcctattagataggattntggcaataatcttgtaaacacatcctatgagagatataggtctgaagtgactaatagtttgaggatccttgatcttaggaataagagcaatgaatgaagaattgaggcccttanganaagcagcattcacatgaaattctgctagaaatcttaagaaatcacgtttcagctctttccanaactgcttgataaatctaanattcagcccatcaggccctgngctnttgtcattgccacaagcncacacagcagaatatatctcctcctctntanatggctccaccatcanatccctctg

SEQ ID NO: 12710 - DNA, 501 bp, Glycine max
  unsure (1)..(501): unsure at all n locations
aagcttatgaacactaatgtanaaatagaaagcttttttgaaacacgtaattaatatantttttgtattacaattntatgtatattcgatctctttgttatcttctgggtgtnttatcttcctttgggtattgtctgtaagtctctaacgtgctgtttaacttgaatgcatagatctaaacatgctgacgtaactttgagaacacaaatacgaattagttaaaaaattacatattcgtttctagttaaaattattttttatgtatgcgttgaaatgactcgttatactcatttctgtttaaaaaaatatttattttgaacanaataactaaaaatatttaatataaattaaactttaaataatctttgtcacatgaaaagagatgtttcgataaattatttatgccattaatattntagaatatataaatattataattctatatgagattaatacatgaatatttacgaaaaatatctatgtagactaaatatatattta

SEQ ID NO: 12711 - DNA, 513 bp, Glycine max
  unsure (1)..(513): unsure at all n locations
ctatcatactcagcttcccattcaatgtcaagcgtctcgatatattatgggactcaatcagacatccgagtaanaagttattgtcgtttgaattggctcggagcttcaacattcaatttcgagggtctcgatatattacgggactcaatccgacatccgagaaaaaaattattgtcgtttgaattggctcagaggttcaacattcaattttgagcgtctcgatatgttacgggactcaatcagacatccgagtaaaaagctattgtcatttgaatttgctcagagattcaacattcaatttcgagggtctcgatatattacgggactcaatcagacatccgagtaaatagttattgtcgtttgaattggctcagaggttcaacattcaatttcgagcgtctcgatatattacgggactcaatcagacatccgagtaaaaagttattgtcgttngaattggctcagagcatcaacattcaatttcgagcgtctcgatatattacgggactcaat

SEQ ID NO: 12712 - DNA, 388 bp, Glycine max
  unsure (1)..(388): unsure at all n locations
gatccttaagcacctgctgctgcagctttactcggatgtctgattgcgtcccgtatcatatcgagacgctcgaaattgaatgttaatgctctgagctaattcaaacgacaataactttntactcggatgtctgattgagtcccgtaacatatcgagacgctcgaaattgaatgttgaagctctgagctaattcaaacgacaataactttttactcggatgcctgattgagtcccgtaacatatcgagacgctcgaaattgaatgtngaagctctcagccaattaaaacgacaataactttntactcggatgtctgattgagtctcgaaatataaccagacactcgaaattgaatgttgaacctctgagccaattcatacgacaataac

SEQ ID NO: 12713 - DNA, 513 bp, Glycine max
  unsure (1)..(513): unsure at all n locations
cttccttataataggctgccatacaatcctgcttttagagctcacccctactagaattccaagataagagaagggaaattccagttgactacagttaagagaaagagttgcatccctacaccagccttcagatttacccaggcacccgaattggctnttattgtaatttatcttaagaccagaaaccaactcanagcatctcagaatacatcttanaactctaacattatcattagtggcaaccccaaagaacaaggtatcatcttcatattgtagtatattaacttcctctttntgccttcccacttgatagctgttgaagagattcttagctacagctgacctcatcaacccagtaaggccttccactactatattgaagagcanaggtgcaaggggatcaccttgtcttanacctctcttanggacaaattccttagaaggacttccattaattnaaatggatattgttgctgtagacatacacaaccatttatccatnntctccatctt

SEQ ID NO: 12714 - DNA, 440 bp, Glycine max
ttgatgccatctaggacctgatcgagatccactattcatcattagtttctagagagaactattccggttgagtggatccaaactccggatgaacacctcttaccaccctcagacagagatcctcaatcgtaccctagaataatacttgcgtgctttcgttcatgacagaccatctcaatggttcaagtttttatcaatagcggagtgatcatacaacaccgcaacccattcgggcactcggttttccccgtttaaggtcattttcggcaagcccccaccttctatcccacaatacttgcaaggttcttctctggtggatgcagtggacaatcttccatcaactctcgaggccattcatgccactctgcagtgcagattacttatagtgcaggcagccatgaacgccaccattgacagtcaccgtcgcgatgtccaattct

SEQ ID NO: 12715 - DNA, 452 bp, Glycine max
  unsure (1)..(452): unsure at all n locations
aggatcatcgatgcgagggattagtcgcaagtntgagaatatgatttaagagactttcaggtgaaagagaggagaaatataaagaatatacgcgaatgttttgaaagattcttctatcaagaagagaatttcaatttctcactttttagaaggaaattgaaattccacattnttagttgtttaaaattatgttttaaaattccaaaatttaaattcttcataacaaaacatccaaacaatgaattgtagattatagaaatttaaattctctgataaataactttccacaattaaaattctttatccaaaggtactctaaggcttactataaaccttcctatgtatgtngaactcactaggcttgtntaccacacttttagaagttcaatattcacttaggatcaaaatttcatacaacaattcaatcaccaatactaatattcacaatagac

SEQ ID NO: 12716 - DNA, 446 bp, Glycine max
  unsure (1)..(446): unsure at all n locations
ctgagtagccatctgttctgtccgatntgtcagactctgaatggaggctcttgtctcttgctgaaattgcatattctggatggtcattttcctcattaactcctctaaggaaggttgagaagagttctcagctgcttgttgtctatgttgttgctactgctgctgctgcattgcaggaggaacatatggcctgcttggaccagtagcattctggaagggagggacaggctgttgttgctgttgttgttgttgtagaggatttgcccatctcaaatttggatgattcctccaacctggattgtatctgttgcttgaaagatcattaattattctgctgttgtgttttgctgctgaggnggtctattataaatgtttgcagcatangcttcangttgctcattgactccagattgctgcanagaaggatagagatctgtatggtgatc

SEQ ID NO: 12717 - DNA, 257 bp, Glycine max
gatcacccacctcgaatttcacgtcttttcttcttttgtcctgaatactcttctgcctactctgaataggtcttattctctcttggattaacttgaccttcttaagtggttgttgtaccactttacgtcctaaagtgatgttgtcttcaggttctagccaacacaagaatgttctacatcttctatcatacaaggcttaataaggagccattcccatggtagaatgaaaactattgttatagctaaactctatcaat

SEQ ID NO: 12718 - DNA, 378 bp, Glycine max
  unsure (1)..(378): unsure at all n locations
tgagattaacaatggaagcactcgagatattcanatggtcataacttatcacacggaggtctgattcaggcgcataatatatcgagacgctcgaaattgaacaacgaatgctctcgagaaattcaattggtcataacttgtcacacggaagtccaattctggcgcatcacatatcgagacgctgtaaattgaacaccggaagctctcgagaaattcatatggtcataacttatcacacagaggtttgatataggcgcataatatatcgagacgctcgaaattgaacaacgaatgctctcgagaaattcanatggtcataacttatcacacggaggtctgattcatgcgcataatatatcgagacgctcgaaattgaac

SEQ ID NO: 12719 - DNA, 440 bp, Glycine max
  unsure (1)..(440): unsure at all n locations
gcttcgcgatattatttgcgccttaatcggtcttncattnngaaagttatgaccatttgaatttctcgagagctttcgttgttcattttcaagcttctcgatatagtatgcgcctgaatcggacttccacttgaaaagttatgaccatttgaatttctcgagagcttccgttgctcaatttcgagcgtctcaatatattatgcgcctgaatcggactttcgtgtgtcaagttatgactatttgaatttcttgagagctttcgttgttcaatttcgagcgtctcggtatattatgcgctggaattggacttccatatgancaagtttgaccatttgaatntctcgagagcttccgtgaccgttccaggtttaaataagaagaatcaccggacgacgccgatcgaacatttcctaatagacatcgtccaaatattatcgggg

SEQ ID NO: 12720 - DNA, 495 bp, Glycine max
  unsure (1)..(495): unsure at all n locations
agagagagaaaagatacatgtgaagtctaattaaatagaatctagcaagcaacagataattccaaacacaaaattcaacaaaatgataactattggagtttccagtggtggcaggcgaaaaagaagttaattagtgacgagaatactacgatccatctattccttaccaagtcgagcaagccggttgacccaacgagggattgactttccggtcaatttgagacaaacatcgttacagaaatggttgcaattcttggaaatgagatggtaggtattgccagaataatcttgagctagcttctccatgaatgctcgaacatccttggcacccagatctgttgttccgatgaanattgactntctgaaggtgaacccagggcagtgtttcggttgaacttgganaatccccgttgtgtcgtgctcgttcgcaccanatccatattccagcccatgaactanagaagaaaagaaaaatttaatttaataattatcaac

SEQ ID NO: 12721 - DNA, 433 bp, Glycine max
  unsure (1)..(433): unsure at all n locations
atcttgtgtcacgtcctcttcanagctataccctatgtgttaataactcaagaaatagttcatcaaatgcataagaagaagaaagggaacaaagggtttgtcatgttcaaaattgattntgaaaaagcttatgataaagtagattgaaaatgtctgagaatcacctttagtgattntggactcccccaaaagattattgacattatcatgaattgcaccttctccacgactttgtctatgaaatggaatggagaanagcttaatatttttaagccttagaggtgtcttagatagggggaccccgtgtttccttatttgtttgttctttgcatggaanagctgtcattgcttattcaatgaaagtgcangagaaaagttggttgcccattataatttttcaccatggtcctagtatttctcatcttttctatgt

SEQ ID NO: 12722 - DNA, 499 bp, Glycine max
  unsure (1)..(499): unsure at all n locations
tcctcgaagccatctcctgcgatgacaacattggaaagttattttacaagaaatataccaatcattacaaacaagagccaaacaacacttcatatggcgcgagtgtcaacatgcactttataaaataatcatattgnggccgtgctattttataacacatatgcatttgcacacataanaatttggtgaaaggcattttacgacacacatccatgtacatattttttgacaaaccttttcatgctacatcctatatatatacacacatttttntttggaaggcttcttttgctacctactcacaaatacatcacaaatacatatgntttgaaaaacacttttacgctacccatccaaacactntgtaaggcacttcatgctatatatattcatattatgcaaggcatnttcatgcgatatatattcatattntgcaagggcatttattcaacatntcgcaaggcgtntcatgctacatatntacatacatacatattat

SEQ ID NO: 12723 - DNA, 466 bp, Glycine max
  unsure (1)..(466): unsure at all n locations
tctatagaaggttcgttcctaatttctctacaattgcatcacctctcaatgagctggtgaagaagaatgtggaatttacctgnggtgaanaacaagagcaagcctttgctntgctcaaagaanagcttactaaggcacctgttctagctcttcctgacttttctaaaacttttgagctagaatgtgatgcctctggagtgggagttggagctgtattgttacaaggtgggcaccctattgcttattttagtgaanaacttcatagtgccaccctcaactaccccacctatgataaagagctttatgccttaataagagccctccatacttgtgaacattaccttgtttccaaggaatttgtcattcatagtgatcatcaatcacttaagtacattagagggcaaagcacgttanacaagaggcatgcaaaatgggtagagtacctagagccatntccatatgttat

SEQ ID NO: 12724 - DNA, 410 bp, Glycine max
  unsure (1)..(410): unsure at all n locations
ctgaaggagaactngatgccttggtcaacctagtaactcagctttccatgaatcaganatctacacccgttgcaagagtatgtggtctatgttcttctgcagatcaccatacagatctttgtccttcttttgtccttctttgcagcaatctggagtcaatgagcaacctgaagcttatgttgcaaacatttataatagacctccttagcagcaaaaccaacaacagcagaataattatgacctttcaagcaatagatacaatccaggttggaggaatcatccaaatctgagatggataagtcctccataacaacaacagcttgtccctcctttccagaatgatgttggtccaagcaagccatatattcctcctccaatgcagcaacagcagcagcaacaacagtcacaac

SEQ ID NO: 12725 - DNA, 435 bp, Glycine max
taatcttacctccttgagataataagctagagcttagctacacacaccccactaatagttaagctcacctccatgctcaaatacatgaaaataccaaaaagtctctactatatagactactcacaatgcccttaaatacaaggctaaaaccctatactactagaatggccaaaatacaaggcccaaaagaaggaagacctattctaatatttacaaagacaagtggacccaaccttgacccatgggctcacaaatctaccctgaggttcatgagaatcctatggccttcttcaacagctctatcccaatcctcttggagcctcctacttatggctctagtgattggtcccttcctaaggaggattgcatcatcctcttccccttgaagaggatttgacctcaaatctgttggtgtctcctcctcatcatcagctc

SEQ ID NO: 12726 - DNA, 370 bp, Glycine max
tcttatccaaggcacattcttggtggtgattctccttcttccatggcttattccctagtggatggcacctcctctcacatcttctcctttgtcttccgttgcatctccatggtggaaaatcaccattgaaggacctcactgaagctcaaagatccagcctccatagaagctccaaaagcaaacttcattcaagtggtatcacgagcctaccccccaagggcattggatagaagactccaagaagattatgccagagatgcaagagaaggccctaaggttctcatgagccttacggtagatttggggcccatgggctaagtatgagcccacttatctttgtacatattagattaagatttcattatttttg

SEQ ID NO: 12727 - DNA, 261 bp, Glycine max
  unsure (1)..(261): unsure at all n locations
atgccttggtttacctggtaacccaactggccatgaataaaaaatctgtacttgtcgccagactctgtggtttatgctcctctgccgaccaccacacgaacctttgcccttctatgcaacaatctgaagcaaatgaacagcctgaagcttatgctgcaaacatctacaacagacctcctcaacctcaacagcaaaatcagccgcaacanaacaattatgacctctccggctacaggtacaatctcgggtggaggaatcatc

SEQ ID NO: 12728 - DNA, 369 bp, Glycine max
agctatactatgcagagaatatccaataattataccttcatctgacttagcatcaaattttcctaagttatcttttccattattcaatacaaaaacatttacaaccaaagatatgaagatgtgagatgtttggttttctgccattgaacaattcatatggagttttctttaaaatgggtcttattaaagccttatttaaaatgtagcatgtagtgttaacggcttcagcccaaaagtattttggaagaggagtatcatttaataaagttctagcaatctcttccaaagatctatttttccttttaacaacaccattttgttgaggggttcttggtgcagaaaagttatgctcaatctcatgcttatcac

SEQ ID NO: 12729 - DNA, 359 bp, Glycine max
ttgttctattgaattgatgttatgtttgttaatttggtatccatgataattgagctatgcaatcttatttgttgctccttttttttggttcattggcatatggcacattgttgttgctcatacttttctgtctctaaatgccattgatgttgtttgcagacccccgtgagtcagagactttccggccattagacatgcatcatgggatggaagttcgccttggtctatctaagggaccagtgtacccaagtattatataattaaatttgactgttattctagtaccagaaaacagtattttgtgatcgaagcttcttgttattcattaaaatggaagtgtccgaggattctccatatgt

SEQ ID NO: 12730 - DNA, 302 bp, Glycine max
tctcgatatattatgcgcctgaatcggacttccgtttgaaaagttattaccatttgaatttctcgagagctttggtttttcaatttcgagcgtctcgatatattaagcacctgaatgggactgcggggggacaggtatgaccctttgaatttctcagaagctcccgtggttcattttccacttttcgtattatatggcccctgattcgaacttccgggggaaaggttatgaccattggaatttctcgagagcttccgatgttcgatttcgagcgtctcgatatattatgcgcctgaatcgga

SEQ ID NO: 12731 - DNA, 323 bp, Glycine max
agcttctcgaatattatgcgcctgattcagacttccgttacaaaagttatgaccatatgaatttctcgagagccttcgttgttcaatttcgagcgtcttgatatagtatgcgcctgaatcggacttccgtgtgataagttatgaccatttgaatttgtcgagagcttccgattttcaatttagagcttctcgatatattatgaacctgaatcggacttccgtgtgacaagttatgaccatttgaatacctagatagcattcgttgttcaatttcgagcgtgtggatatattatgcgcctgaatcagactttcgtgtgacaagt

SEQ ID NO: 12732 - DNA, 381 bp, Glycine max
agcttccctttctttggccaatgctgtacttgtttggcagtgatttccttggcaatttgatgctcaaaaacagcaatatctatcactccatcagtaggtctgcccagatacttgttaatcacagcaggggagaatttaacacactttcctctgacaaacaccttttgatactcatcactttttctgttacatatgtcagagggaatgttgacaatgaattccctgactaagccttcatagcaatctcccaacttgctgacagtcttcagcagtccagcagccttgatgaggtccatgatctccttgcaatccaaggcatctcttcccagttctctctcaaccgcaagtctgcgttgatacacatatttccacttttcaaca

SEQ ID NO: 12733 - DNA, 421 bp, Glycine max
  unsure (1)..(421): unsure at all n locations
ttaagtcacctgcngcatgcagcacatgttaagaactagttgttgtattttctctttatcattcattctggggttaagaaatggaagggatttaagaagcatcaaccttttgcttctgggaatttgatgtgctctgaaatcccatcaatattagtgtaatactttatagttagccatttttttctttttaaatttaaatgaaagcgtgattgacttggtactggtttttgatggtgagctgacatttaatgtgcttggcatcatgcagatatattgtatgattcatggtctccggcgatgacagctagttctatctgcatcaatattctctcaatgctttcacgctcaaccacaaagggtgtgaaattttttaccatgaatcatgcattttcctaatacttttgcgctatgatgggatact

SEQ ID NO: 12734 - DNA, 362 bp, Glycine max
tgcacgaaattgatcaaaacctgaatcccagtcctctaatgtgtcatctctcaatagattatccgatgattcgctgcggatatgagcattccaagatgttatatggggttgatttgcacctttactgtggttcttctcttgacgcggtaagaaccgggcaatttcacctgctaaactcttcatagaatccacaacatcctggatgggtaattcaccgagcttttccaaccagatttcacaggtggcatatattggaggaccatacattcttaggagtggacgttggggtctctttttcttgcctggcttttgtttaagagaaacacatttgtgcagccatccatttatggcctccagataga

SEQ ID NO: 12735 - DNA, 344 bp, Glycine max
tatagaccatattgagataaaagagtgccaccttatgtgctgtgtaatggttagggagggcacccaagtgggctcccttggtaaagcgatatactactaccaggatggcaatatatccctatgaagaagggaggccagtaatgaaatccagtgatagatcttgccacagagaagttgtaatgggcaatggttagagtaagcccgcaagtctcttagtctcatattttacttgttggcaagtggtgcacaggcatatgaattgtttgacattcgcacgcatattggcccagtagaatttcttatgcactcgatgaagggttcttggcaaagttaaatgactacca

SEQ ID NO: 12736 - DNA, 396 bp, Glycine max
  unsure (1)..(396): unsure at all n locations
cagcttgntaaatggtacaagctttttttattaattatataagatattcttattcaaaagtttgttgaatatctgtgtcatgcgcttaattagcgcttgatatttcaaaggtaaggaaagcattaaaaggcttctatagattgaaaatatttgaatttaatttcttaaaatttcaaaacgaatcgtatatgttgcaagaaaaaattgattaaatctattgtataattgaacgagcacgtcaaatacttaaaaactgttaaataaaatctaaaacgtgctagtcacactcactaacatgaaaaaatatatcctgatcttgagacattcactaaacagaaatttaaaatatatgattctctataatatacttaatcagtatgtacatttttttaatat

SEQ ID NO: 12737 - DNA, 366 bp, Glycine max
tcttatccaaggcaattcttggtggtgattctccttcttccttggcttattccctagtggatggtgcctcccctctcttcttctcctttgccttcaactgcatctccatggtccatagaagcttcacaagaaagcttccatcactaccggggaaggggagtatgctgatgaaatcttctcataaccacaaatgagattttggatgttagcgtttcgtttctaaatgaccatttagaggaaacactgggttcaacaaaaatagaagaaaatcactcaaagtgtattaatctcacacgggtaagtgtttcatcctaattccgaaccatagatatgccatgacttgatcttgcaaatcatttcctatca

SEQ ID NO: 12738 - DNA, 398 bp, Glycine max
ctcgagagctagcgttgttcaattacgagtgcctgtatattgatgcgcctgaatcggacattcgagtgaaaagttatgaccatttgaatttctcgagagcctcctatgtttaatttcgagcgtctcgatatattatacgcctgaatcgaacctcagtgtcaaaagttatgaccatttgaatttctttagagcatccgatgctcattttcgagcgtctctatatgtgatgaaccttaatcggacctccgtgtgaaaagttatgaccatttgaatttctcgagagcttccgttgttcaatttcgagcgtctcgacatattatgcgcccgaatcggacatccgtgggaaaagctatgaccattcgaatttctcgagagcttccgttgttcaatttcgagcg

SEQ ID NO: 12739 - DNA, 362 bp, Glycine max
tgtaacacattacagctcaaattgcggattgatggtgatcagaatcagaatctgcctgatcccaaagatatcaaatgcttggaaaggataggcagtgtaaatgttgaagctgattccatctacgaactttacaaggatcccagccctataatggaacctggttctgtttggaaagacattgttctttcaccttcaaggtataataatgatcagaaggaattgaaggaattcattcagaaaatagaaacatccatcagaaaacggtaaccattgatattgctgcatgatattttcctcccaaagccaagttttggagtatctaacaaagtttgagttaccaagttttgtatctgctattccct

SEQ ID NO: 12740 - DNA, 365 bp, Glycine max
tataacaagaatattttggcctttttcacagcttgatggtcgcgtcaaaactttgcaccctaacatacatgggggtatcctggctcgaagggaccaaaaacatcatatcgaagccctcagtactcatgggattggtaagttatgttattagctgttattacaagtacgttgtgctagaaatttgttgtgttacattagagttgtgatcattcagtttgtgagattgtatttttttgcttttgcttaaagttttccttttcaggtacttttgatgttgtggtggtgaacctgtacccattttacgataaagtcacatcagctgggggcattgaatttgaggatggaattgaaaatgttgacattgg

SEQ ID NO: 12741 - DNA, 365 bp, Glycine max
tgaaattgaacaacggaagctctcgagaataaaaaatggtcataacttatcacacggacgtgcgattcaggcgcataaaatatcgagacgctcgaaattgaacaacgaatgctcttgagaaattcaaatggtcataacttgtcacacggatgtccgattcagctacataatatatccagacggtcgaaattgaacatcggaagctctcgacaaattccaatggtcataacttttcacaaggaagcccgattctagcgcatcacgtatcgagatgctctgaattgaaaaccggaagctctcaagaaattcaaatggtcataacttgtcacacggaagtccgattcagacgcataatatatcaagat

SEQ ID NO: 12742 - DNA, 282 bp, Glycine max
ataacttatgacacagaagtccgattcacgcgcctaatatattcgagacgctcgaaattgaacaacgaaagctctcgagaaaatcaagtggtcataacttttcaaacggaagtccgattcaggtgcataatatatcgagacgctcgagattgaacaacggaagctctcgagaaattcaaatggtcataacttatcacatggaagtccgattaaggcgcataatatatcgagacgctcgaaattgaacaacggacgctctcaagaaattccaatgggcataac

SEQ ID NO: 12743 - DNA, 367 bp, Glycine max
tcttggcaatcctcattccagcgatcagtctagtttttgcgtaagagcttgaacaatggctcacaaatggcggtgagctgcgatatgaatctggcaatataattcaagcgtcccaggaaacctcggacttgcctctctgtacggggttctggcatctcaaggatagccttcaccttttcggggtctacctctatccctttctggcttacaatgaaaccaagtaatttccctgatttgaccccaaaggtacacttagcggggttcaaccttaattgatatttcttaagcctttcgaacaacttccgcaggttgacaaggtgttcttcctcggatttagatttagcaattatgtcgtccacgtagacct

SEQ ID NO: 12744 - DNA, 271 bp, Glycine max
attaacaacttccgtttgcccatcggtttgtgggtgacaagtggttgaaaataacaatttaatggccaacttgctccacaaagtcctacaaaaatggcttatgaacttagagtccctatcactaacaatgctccttggcaaaccatggagtctcacaatctccttgaaaaacagatcagtctcatgggaagcataatcaacttttttacttgggataaaatgagccattatataaaacctatcaacaaccactaaaatggaatctctacca

SEQ ID NO: 12745 - DNA, 402 bp, Glycine max
tacattcaatttcgagcttttctatatattacgggactcaatcggacatccgagtaaaaagttattgtagtttgaatttgctcaaggcttcggtattccatttcgagcgtctcgatatattacgggactcaatcggacatcagagtaaaaagttattgttgtttgaatttgctcagagcttctgtattccatttcgagcatctcgatatattacgggactcaatcagacatccgagtaaaaagttattgtagtttcaatttgctcagggcttcggtattccatttcgagcgtctcgatgtattacgggactcaatcagacatccgagtaaaaagttattgtcgattgaatttgctcagagcttctacattcaatttcgagcttttcgatatattacgggact

SEQ ID NO: 12746 - DNA, 361 bp, Glycine max
tcgcacttgataatggagacacatgaactgcgcttagcaatgacattcatggtgctccgaataaaggtggagtatggaggattgccttgagggtcctctcttatgcaatcatggaacacagctccaaactcgaaagtggaggacacatgaacaaccctaagcaataacattcatgtggctctggaacaggatgagaatggaggattgccttgagggtcctctcttatgcaatcatggaacacagctccaaactcgaaagtggaggacacatgaacagccctaagcaataacattcatgtggctccggaaccggatgagaatggaggattgccttcaaggtcctctcttatgcaatcatgga

SEQ ID NO: 12747 - DNA, 373 bp, Glycine max
  unsure (1)..(373): unsure at all n locations
atgttcataaattgtgtaaaaagttgtatgaaaaagttattgaaatgcacgttaaagtcttgcttttatagactcttcatgtctggtcaagaaaaccattggaagagttacatcttctgatttttattcaaaacttgtcactggtaatcgattaccaaaaccatgtaatcgattacacaaagcattttatgaaaggatgtgactcttcacaattgattttgaatttcaacgttcagatacactggtaattgattaccaatatcttgtcatcgattacaccattttgaaatcaattggaacgttgtaaattcagttaanagcttttgaaatcaaactttgccactggtaatagaatacaggaaactggtaatcg

SEQ ID NO: 12748 - DNA, 359 bp, Glycine max
tggcagtaatttgaattctgatatgttctctctcctttgatacagatgagtgaaaggaattcaggatgggaggatttgatttttattccaccaggaaaaagtcgctctcaacacatacaagaacttaatgaatgattcccagggtgcgaatttaagctaaccatgatttcatgtggttttcttgagcaaattggatgttactgttgtgacaatttagtcggctggtgagatgctaggacctctgtcttcaaatagttgtgctcttccttctgaggcgaatactgcactaagattctcagtggatataaggtaaatgtgtatgtgagaggacgtaaacgctaacatacatttcaattaag

SEQ ID NO: 12749 - DNA, 358 bp, Glycine max
tgagaatggagaattgcactaatcaatctctacgcatagctccaaactcgaaggtggaggacacatgaacgaaaacacaattcatggggctccgaaaaaggggttgagaatggagaattacactaagcaatcactacgcatagctccaaactcgaaggtggaggacacatgaaagataacgcaattcatggggctccgaaaagattgagaatggagaattgcactacgcaatcactacgcatagctccaaacgcgaaggtggaggacacatgaatgaaaacgcaattcatggggctccgaaaagattgagaatggagaattgcactaagcaatcactacgcatagctccaaactcaaa

SEQ ID NO: 12750 - DNA, 360 bp, Glycine max
tcaattggagtcttgtcttttacaaacttagttggacatctgttgagtatgtaaacagcagtgtagactgcttcagcccagaatgtgttaggtagtcccttctccttgagcatctctagccatctccataactatgtgattctttctctcggacactccattttgttgaggagaatatacgactgtaagttgtcgcttaatgccttcatccttacaaaatctttcaaactcgcgagaggtgtactctttgtcgcgatcacttcttaatacttttatccgttttccactttgattttcaggaagggccttgaactttttgaatactccaaagacttctgatttttcttttagaaaatatac

SEQ ID NO: 12751 - DNA, 408 bp, Glycine max
agcttcccccttgttcattattttttttaacaaaaacataattgtgttgtgtattttactcaaggaaaatatgttctattgtgttgaaattttaagatttttaattaattatgcacattatctttatattaatcaaattaattgagatataatttattttttaaaattaaaattaaatacattagatctaaggtaccatttataagattaattaccttaattattacatgaattgtctgtattaatagtaatcaaattattttttttgacaaaataatacaattaattatgatactcattattttcataattaatttgagtataattaagaatgataattttcgccatcattaattcaaacataaattacacaaggtgacgtgtgagggtgacgttatttaattaaaa

SEQ ID NO: 12752 - DNA, 367 bp, Glycine max
tagatggagaagaagacagagagaaggagaagacttctcgaaggagacgaaacatacctaggtattgtggcgaaggagaagaagcagagacttgtgacgatgctcgagtgcgacgaagacgatgctcgagcttagacaaaacgatggtcagatggagaacagacagcttcaaggtacatggagaacaaagagagcaagaaagcttagatggagaagaagacatcgagaaggagaagacaacgcaaaggagacgaaacatacctaggtatggtggcgaaggagaagaagcagagacttgtgacgatgctcgagtgcgacaaacacgatgctcatatgcagatagggaccttgaaggtagacggagatt

SEQ ID NO: 12753 - DNA, 398 bp, Glycine max
gcttggatttccttttactatgtaatctatccttcctaagatggatccaaacccagtcaccgtcattaagaactagcttttttcttcctctattgcctttagttgaatacacctttgtttggttctctatttggttcttaaccctctcatgcaaattctttacaacctatgacctaaattgcccttctttatgtataaaagaagggtccagtgggaggggaatgaggtctaacggtgttaggggattgaacccatagacaacctcaaaaggggattgcttggtggttctatgaacccccctgttgtaggcaaattctacatgaggaagatactcatcctcagacttatggttacctttcagaagagcccttaaagggtggataaagacctattcacta

SEQ ID NO: 12754 - DNA, 326 bp, Glycine max
  unsure (1)..(326): unsure at all n locations
gcaagcttggatntccttttactatggaatctatccttcctaagatggatccacacccagtcaccgtcattaagaactagcttttttcttcctctattgcctttaggtgaatacacctttgtttggttctctatttggttcttaaccctctcatgcaaattctttacaacctatgacctagattgcccttctttatgtataaaagaagggtccagtgggaggggaatgaggtctaacggtgttaggggattgaacccatatacaacctcaaaaggggattgcttggtggttctatgaacccccctgttgtatgcaaattctacatg

SEQ ID NO: 12755 - DNA, 398 bp, Glycine max
agcttccctttcttcggccaatgctttacttgtttggcagtgatttccttggcaatttgatgctcagaaacatcaatatctatcactccatcagtaggtctgcccaaatatttgttgatcacagcaggggagaatctaacacactttcctctgacaaacactctttgataatcatcactttttctgtttgatatgtcagagggaatgttgacaatgaattccctgactaagccttcatagcaatctcccaacttgctgacagtcttcagcagtcctgcagccttgatgaggtccatgatctccttgcaatccaaggcatctcttcccagttctctttcaaccgcaagtctgcgttgatacacatatttccacttttcaacattgccaatggagtggaa

SEQ ID NO: 12756 - DNA, 334 bp, Glycine max
tatttttcaatttcgagcgtctcaatatgttaatttcccgaatcaaacatcagtgtgaaaagttatgaccatttcaatttttctagagctatcgttgttcaaattcgagcgtctagatatgttatgcacttaaatcggacatccgagtgaaaagttatgaccatttgaatttctcaagagcttctgttgttgaatttcgagcatctcgatatattatgtccccgaatcggacattcgagagaaaagttgtgacaatttgaatttctatagagctgtcgaggttcaataccaagtgtctcgatatattatgcgcctgaatatgacatccgagtga

SEQ ID NO: 12757 - DNA, 349 bp, Glycine max
gatgtgttggatcgagtggcctcataataattaagaaagggggggggatagaattaattattcctaaaaccttaccaattaaaaattactcttttaaggcttttacttatgttgttaagagaatatggagtagaagagaaacttaacagaaagtaaaagcggaaattaaatgcacagtggaaagtaaaagagtagggaagaaggaaacaaacacacaaggatttttatactagttcagcacaaacccgtgcctacctccagtccccaagcgacctgcggtccttgagatttctttcaaccttgtaaaaattcttttacaagcaaagatccacaaggtatgtacccttcc

SEQ ID NO: 12758 - DNA, 368 bp, Glycine max
taacaaatggacctgggtgttgcccagtttcatcatatcttccgtaatacttatcacctctataatatctaataattttcacatttatgtctaattgccattttacttcattgtagtaaatttctaaggcatccattgcctaagaaatctcgggcaataagtagacataaccgtaacgtgaataatcatcaataatggtgataaggtatcattcctttccgaaagaactaacatcaaaaggtccacaaatatcagtatgtacaatttcaagaagctgagtgcttcttgtagctcttttctttgtatgtttttgcttgttttcccttatacaacccacacaaatatttagatccataaaatctagataa

SEQ ID NO: 12759 - DNA, 403 bp, Glycine max
  unsure (1)..(403): unsure at all n locations
gtacacctacattcgtatacacgacaaactttntctgtatacacacgcattaaaaactctttctctttatatcaacacggtctataataaaactctattcctgttcaaagatttctttttcgattttcaacatacaactcgtggtttatacaaaaaacttctttatatacactcattgctcacacacaagaatttcttttcacgcattatttacacacacacaaaatctttccatacactttatatatagacacgacatttgttcacaacgcctctttcttttttttttttctttttttttcggcgttatcatgatttttgttcgttttattnttaggacaatgttcctaaaggaaaactctacaaggttccggaatttcaacaaacattatcaacaataacg

SEQ ID NO: 12760 - DNA, 365 bp, Glycine max
agcttcaacatcagaccacttccattgtgctggaactactccacatggatttgatggggcctatgcacgttgaaagccttggaggaaagaggtatgcctatgttgttgtggatgatttctccagatttacctgcgtcaactttttcagagagaaatcagaaacctttgaagtattcaaagagttgagtctaagacttcaaagagaaaaagactgtgtcatcaagagaatcaggagtgaccatggcagagaatttgaaaacagcaggttcactgaattctgcacatctgaaggcatcactcatgagttctctgcagccattacaccacaacagaatgggatagttgagaggaaaaacaggactttg

SEQ ID NO: 12761 - DNA, 423 bp, Glycine max
  unsure (1)..(423): unsure at all n locations
tgaaattgaacaacggaagctctcgagaaattcgaatggtcatatacttatcacacggaagtccgattcaggcgcataatatatctagacactcgaaattgaacaacggaagctctcgagatattcaaatggtcataacttatcacacggatgtccgattcaggcgcataatatatcgagacgctcgaaattgaacaacggaagctctcgagaaattcaaatggtcataacttatcacacggaagtccgattcaggcgcataatatatcgagaagctcgaaattgaacaacggaagctctcgataaatncaaatggtcataacttgtcacacggaagttcgattcaggcgcataatatatcgagacgctcgaaattgaacaacggaagccctcgagaaattcaaatggtcataacttgttaca

SEQ ID NO: 12762 - DNA, 580 bp, Glycine max
  unsure (1)..(580): unsure at all n locations
tagtaaagctaagcactaacaatctccccctttggcaaattttgtctaaaacatacttagacacttcctgagcaggtacgagcagttatgcaagtgggatcagcaacttccattatcagagtaatcaagcacagcggaatctgtagtctagacaagttgcaagtcgtttccaggatgtcaagacatctcacatgacatctgctttctgcttctgctccccctgtctccatgcttactgcagcatcttctatcagctactagtcttctccaggatgtcaagacgtctcctgtgacatcagctatctgctccccctgtctccatgctcttactgcagcatcttctagtagcttccatcagtcatcatcagcagcagcagtctccccctcaaaatcgtatacatacaactccccctcaaaatcatgaatcatgcatacatcgtatcctactgccatacatcatacatagtatcctactactcanaatcatgcataatagcaagcataatactattactccccctttttagacagaaattgacaaaagtagaatgcatgcaagcattaatgtgcaaatattaca

SEQ ID NO: 12763 - DNA, 435 bp, Glycine max
tcgatgcgccgtcgagcaccctcgacgccacgtcggtggttgccggcagcggcagcctcccctgcacctgcaaaaacaccctgaactcgtcgctcttcctgatcaccggatgcgtcgccagccgccgcaggtacttctccagcgccattctcctctgctccacgaactcctgcttctgcatcacctggctctccaccacgctcttgtccggccgcggcgggatgaaaaacccgcggtacgcctctgcgagccgatcagagagcgtcaccacgtcacggaaccgccgccggaccgcgaaatcagcgccggaggcgccgaattcctgaatgttcgtctcgtggtgaccaagtatgtcacgtaactgttgctaccaggaacaatagaattcgatgattcttgctccttgacagggttcgaaacggttatctttagata

SEQ ID NO: 12764 - DNA, 618 bp, Glycine max
tctgatttagcttattgaaacaaataaataaaaaaagcttatatgtttgttatgagctagtttcataagctcaaataaaccttgtacgatttttattttacaaacctgccctaatgctataaatgatttatggcatgtatgcactgaaaaaatattgtgcttggattcttcatataagttctttatacttctaaattttctttaagctttaatttctgttttttccccctaagcattttgattctgtatttctatatcatttgcaatataaggtgtacataaacttacacatatctaggagtgaaggttatttacttgttagattgggcttttaccaaccatgcctacttatgttaagttataactgatcatgattgagcaagggtgcatgagttgtaagcttcctgatattatctttgattcctacaaataacaatataataattgatcatgatttgaaactattgtttatttagtggtctacttctcccacgatggtagacatttcttaatgggtatgtaatacaatgagtttttgtctataagttggccgaatacacaatcatagtgtcttattgacatgctctgattttctgtgcatacctatgttctcatcct

SEQ ID NO: 12765 - DNA, 614 bp, Glycine max
  unsure (1)..(614): unsure at all n locations
tgtggtgcatgtgttgttgttgttgtttgtcaagttgaccttgatgaagtgaatgctctagcagagctaatgacatggaagacagttgtagcggacattccttatggaggagcaaagggtggtattggctgcaacccaaaggagctcagcgtcagtgagttaggaagtctcacttgtgttttcttccaaaagattgatgatcttattggcatttagagagatgttcatgcccctgacatgggaactaatgcacaagttctaatttaattatattccatttccttacataattntttgtttggggcaatttcttatgtaaaccaacatctagaacttttatttattattctatcattttcatttgtttactatttcactgacaaaggcttgcattcttgatgagtattcaaagtgctttatagtttatattatcaataattttaatttaaaactattaatattacttttntttgtagaagttggtatatttacaaaattcatttgttgccaaattgtgttgattaacataaaattttattttaaaaatatgaaattttatacattgttgtcatgaaaatgaaatttttggttaaaaatataagaaaaaatatttt

SEQ ID NO: 12766 - DNA, 521 bp, Glycine max
aacgacaataacttttttctatgatgtccgattgaatcgggtaatatatcaggacgctcaaaattgagacttgaacctctaagaaaattgaaacgataataactttatacacggatttccgacagattgccgtaatatatcgagacgcattaaattgaaaaaagaagctcgtaggaaattcgaacgacaatatgtttttactcatatgtccgattgagtcccgtaataaaaaaagacgctcgaaattgagagcagaagctctgagcaatttcaaacgacaataactttatactcgaatgtcctcttgagacccgtaatatatcgagatgctccaaattgaaaatggaagctcgtagcaaatttaaacgacaataaatatatacatggatgtccgattgagtcccgtcgtatatcgagacgcttcacattgagaacggaaggtcgtatacaattcaaacgacgattactatttactgggatgttcgactgagtctcgtagtatatcgacatgcttcatattg

SEQ ID NO: 12767 - DNA, 545 bp, Glycine max
gtctcacgattgtcacgtgctcatgcaacaattgttagtcgtggctatacgagacatcttgccaaacaaagtcaggttcacgataactcgcctgtgctttttcttccatgctatatgtagcaaagtgattgatccagtaatgtttgatgagttggaaaatgaggccgcaattatactatgccagttggagatgtattttcccctgctttctttgacatcatgattcacttgattgtgcatctggtcagagaaatcaaatgctgtggtcctgtttatctacggtggatgtacccggttgagcgatacatgaagatcttaaaagggtatacaaagaatctatatagtccggaagcatctattgttgagaggtacattgcagaagaagccattgaattttgttcagaatacttagagaaggctaaagttgttgggcttcctgagtgtcggcatgatgacagagtgggtggtaagggttcaagaggactgcatgtgatcactccaagtgtagaagatttgttacaagctcacttgtatgtcttgacaac

SEQ ID NO: 12768 - DNA, 558 bp, Glycine max
ctcagcttcacatcagaccacttccagggtgctggaactacttcacatggatttgatggggcctatgcaggttgaaagccttggaggaaagaggtatgcctatgttgttgtggatgatttctccagatttacctgggtcaactttatcagagagaaatcagaaacctttgaagtattcaaagagttgagtctaagacttcaaagagaaaaggactgtgtcatcaagagaatcatgagtgaccatggcagagagtttgaaaacagcaggttcactgaattctgcacatctgaaggcatcactcatgagttctctgcagccattacaccacaacagaatggcatagttgaaaggaaaaacaggactttgcaagaggctgctagggtcatgcttcatgccaaagaacttccctataatctctgggctgaagccatgaacacagcatgctacatccacaacagagtcacacttagaagagggactcctaccactctgtatgaaatcttgaaagggaggaagccaactgtcaagcacttccacatctttggaagtccatgtta

SEQ ID NO: 12769 - DNA, 534 bp, Glycine max
  unsure (1)..(534): unsure at all n locations
ttgagccaattcaaacgacaataactttttactccgatgtctgattgagtcccttcatatatcgagacgctcgaaattgaatgttgaagctctgagccaattcaaacgacaataactttttactcggatgtctgattgagtcccgtaatatatcgagaccctcaaaattgaatgttgaagctctgagccaattcaaacgacaataacgttttactcggatgtctgattgagttccgcaatatatcgagaccctcgaaattgaatgttgaatctccgagccaattcaaacgacaataactttttactcggatgtctgattgagtcccgtaatatatcgagacgctcgaaattgaatgttgaacctctgagccaattcaaacgacaataactatttactcggatgtctgattgagtcccgtaatatatcgagaccctcgaaattgaatgttgaatctctgagccaattcanacgacaataactttttactcggatgtctgattgagtcccgtaatatatcgagacgctcgaaattg

SEQ ID NO: 12770 - DNA, 516 bp, Glycine max
tcctcgtggcttctttgagaagctttctcaagaggcttctttgataatctacatccttatctatccacccctctattaactaaattaacttccttaaaaataattacggatgaaaataacgcaacaaataatcaaacatctaacataattactaataatatatagatatatatatcagggtgttacactacctgcaatttggagccctaaatacaagaaccaaaagtaatgaaaccttaatctaatatgtacaaagataaatgggctcatacttagcccatgagctcgaaatctaccctaaggctcatgagaatccaagtgccttctcttgcatctctagcccaatctactaggagtcttctatccaatgcccttgcagggtagaattgcatcattccctccgccttgaaaaggatttgacctcaaatccagaggttcttgaaactcttggcttttttcctcaacacctagatgaagatgctcttgatactacatgatgtaaactccattggagct

SEQ ID NO: 12771 - DNA, 634 bp, Glycine max
  unsure (1)..(634): unsure at all n locations
tgatttatatttaatttccacttgtgtaataggtacatttttaatgttcatattatcatagttttgcattttttgttatttaatttattttattttattaaaaggcatggttagagaagatccatcaataaaagtttctttgattcaagaaaggataaacagtggatttggctataaggtttcgtacaaaaaagcatgatgacgaagcaaaaagctatttcaattgaatatggagattgggaagagtcatatgccaaactttcattgtggctaaaacacatgcaaaataattcttctggaccctattttcaaatattgcatgatgattttattgttgggaatcgggtgagtcgtgaacaccgtcaatttcataanagtatttgggcattcggtcaatgtaaaaagacttttaattattgtaagtcaatcatacaagttgacgacacacatttatacgggaaatatcgtgggacccagttaatggccacatcacaagatagaaatggtggtgttcttcctctagcattcgtcgtagtcgaaggtgaaacgttaacagcgtggtcatgggttttgacacatttacatgaacacgtgacagataanaatggtatttatctcatatttgatcgtcatg

SEQ ID NO: 12772 - DNA, 699 bp, Glycine max
  unsure (1)..(699): unsure at all n locations
taggatcagcataaaaaatgggtagggtcgctgcagtgcagaaatatgaaaaatttcgtttggtatatatatattaaaaatgattaatattaatcgatagatttaaaaaaaattaaatatatatcttaaaaattataatttgacatcctaaaatatttcaaatttataattactatatcattattaattattacatccataactatcatcatcatgatggtcaaccgtctttattatcgtgtctatatatatattgaaaaaaagtaaataaaatgaaatgagataatatttattttgttatttgattattttaaaaataaatagaaaatgttgttttatttaaatttaaaaatatgagataaaatagggataattaaataatatcatttactagttatttgtgttatgcctttttccaaataataaattcaaaaatttattctatcttaatantaaaattaaaaccaatatgataattntattaattatccctttatttttttgtttcgttcattattaaatattccaaatattaaatataaaaacttaaagaagataattaaccacaaaaatgacatttgtataaatacatgggacgccaaaaaaataataatacatgatttgctctaaaaagaaaaaataaatacattaatatcaactctaattactaaatctgaatatattattgtattagtaatt

SEQ ID NO: 12773 - DNA, 554 bp, Glycine max
tgttatgaagatgaaaaacctatctcttactagatgtcagtctatttgtagagttgtatccataaactcaatgtcacaatcacctttgtgaatatgatccctaatgaaatgatgcttaatatttatacgctctgtcctagaatgcatgataggattcttagtgatactaatgacactagtgttattacatcttaaaagaatatgttctaaatgcaattataaagtcagatagttatttgttaatacacaagatttgtgcacaacaacttcacacaacaatgtactcatccttatctgtaaacaaggcaacacatgcttgattcttactattccatgaaaccaggccattacctatcaagtggcaaatactactagtggttttcctatctagtgtaaatctggaaaaggttgaatctgagtattcaagtagaaagatctcagcaccttttatggtaccatctaccaacatctacattgccttttaggattttattatccttctttatataaagaagtaagacttcctacgactggattgttagtgtgcacacatg

SEQ ID NO: 12774 - DNA, 499 bp, Glycine max
tgttcagaaacgtgcatttgtgtgcaatacacaattcccggttctctacatcaaaatggtgtatcagaaaggtgtaatagaactttaacagatatggttaagagtatgttcatcaattagactttacccgtatctttgtggatgtatgccttgaaaactgccatgtatttgttaaacagggttcctagcaaggtagttccaaagagaccttttgaactgtggacaaataggatacctagtataaggcacctgcatgtttagggttgccaggcagaaataatgatttataatccgcacgaaagaaaattggatgcaagaacaatcagtgaatatttcattggttatccagaaaagttaaaagggtatatgttttattgttctaatcatagtatgagaattgtcacaactggaaatgcaaggttcattagaaatgatgaaatcagtgggagtacagttccacgagaaatggaattaaagaagttagagtgtaagtcctttt

SEQ ID NO: 12775 - DNA, 658 bp, Glycine max
  unsure (1)..(658): unsure at all n locations
tgttcttcactcatcttctccttgaagtggcatctccaatcacctttcctccttctctattctactatcattgatcttcaagaagaaaaggactccattgatgaagaagtttcaaggcgtacaagctccacatggggctacatcagacagcgtcgactgcgtcacgtcaccagaaaccaccaagtcctcggcagcatccaggtggaacctcccattcgtcggcgagaacgagtgtgctagcatccccaagctcccgtcgaacggctccccctggctgtggtcaccactgaagaacccgatcctaatgtcggtgcttgtttataaataagtgcaacaagattttctttcattgtgtctctcttgtgtgccttttccatctgcaacaaagcttgttctatatccatttggtttgattaggttttctctttttctgaaacttggttttcttcttcattggtttattctttttcattttcgcatatggatcatgtgatgagaaaaaatttgcaacaatatgattggattcgttccatgattcatagtatttaagtctctgatgattaactctccttttntagaattaattttgagtccttttgggtttctaaatatcatttttttcctagtgttgatagagtgacaaccagagagacatgat

SEQ ID NO: 12776 - DNA, 477 bp, Glycine max
tggacttggtattacctctgtagccatttggagccacagcctccatgtcttttaactaaagccaatgagtgtttgtgaactctcagcaaaatcttggccaagtttattgacagcaattcagcactgcaacccattccactcaggttgacactctttacgttgctccggaatccgaacttgttaatgatcattgatgtaatggatggtgtaggacaaaataggctacagtttgacacaaggatatcaatgcttttaggatgcactttgtgttttgaaaggaggtctttgacaattctgaatagaaccgattcaacttctgcctgtgcacgcttcatggaatcatccggagggagctcatgaactgattctggcacacaagcctccacgccaataccggatctttccaatactttcaattcaaagcctatgagttcatggtcaaaattgcacaattcaaagtgttctacaatatgagag

SEQ ID NO: 12777 - DNA, 618 bp, Glycine max
  unsure (1)..(618): unsure at all n locations
ttttcccaanagcttgatgtaaaaatgtacttattgagttcttatttatcaaacttacggtagggtaaggccacttggaatgtgattgccaccaagctttatgaacagaagttgtgtcaccaggaagtttcccagctcttctcttgcgcaagatttcctctcttatatctacaattttctccttataaccctgtatgataaaaattaaaaaagtaaaaagaggtcaatcatatgggaaaagatttgagaaggggaaatgaacaaccatcaacaattcaacatcccttacctgtttcagttcatgctttaattcttgtcttactcgctccatgagggacctctcgctctctgtaggaacaagagggccaaaccccatgccatctgccccatcgaaactactatcaaagagattggcgtcactatctacttggtcatcttcatcatcagacattgttgcccctgtaccttctccaggtgaaactcctgtntatcatgctgcatgtgagaacatttatatggttacttgctgtggctaattgaaccaagagtttgaagattttcttcaacactagaactatcatcatttatctgttgcanagtgcaatcttgtgggttagt

SEQ ID NO: 12778 - DNA, 728 bp, Glycine max
tcagaagcaagcttccatcataatatgccaccttgtgctgtgaagacacacaaccaaatcattgttgcttgcatggcaatacataacttccttcaaagaaatgacgagagtgacagagaatttgattcacttgatgaagataacgaatatatagatactgatgaggatgaaaataaagttgggcctagtactacaacatgaaagaaccggatgctcaaagtactctacaattggaacgctttagagaatctctaaagaatatgtttccaacacgtatttaatttctatatttgttaataatacaagtttgcatgtttatggtatggatacatttgaataattttatattggaagacattattgatcatattattactaggttaatgatattttatattatgctataaattataattacatagacaataattaaattataaactaaaatgtatgtgataacattactaaaacaataggataattacatgtttaatatgaaaatttattatgtagaaagacatataattatattgttatgagatacatttattttatttttgtagcagaattaattcttaatcaaaatttcttaaaatatatacaatattttaacttaatgatgaagtacatattttataatgaaatagaagagaaagacattttattattttaataatatgtattattaacgaacttataatatttaaaatggtgaggattagtataat

SEQ ID NO: 12779 - DNA, 502 bp, Glycine max
tgaaattgaacaacggaagctctccagaaactcaaatggtgataacttatcacacggaggtccgattgaggcacataatacatcgagacgctcgaaattgaacaacgaatgctctcgggaaattcaaatggtcataacttttcaaacggaagtccgacttaggcgcataatatatcgagaaggttggatttgaaccacgaatgctctcgagaaattcaaatggtcataacatttcacacagaagtccgatttaggcgcataatatatcgagaaggttgaaattgaaccacgaatgctctcgagaaattcaaattgtcataacttgtcacacggaagtccgattcaggcgcatactatatctagacgatcgaaattgaacagcgaatgctctcgagaaattcatatggtcataacttgtcacacgaaagtctgatttaggcgcataatacatcgagacgctcgaaattgaacaacgagtgctctcgagaaattcaaatggtca

SEQ ID NO: 12780 - DNA, 582 bp, Glycine max
tgcacacaatttcttgaatctttcccaatactcatacaatctctcttctctcagttgcctgatgcctaaaatgtcttttctgatggtagtggtcctagatgcagggaaaaatttctccaagaacaccctcctaaggtcatcccagctgaaaatggacttgggagcaaggtagtagagtcaatattttgccactccctccagataatgaggaaaagcctttagaaagatatgatcttcttggacatcagggggcttcatggtggaacaaaaaatatggaactccttaagatgcttatgaggatcttcacctgcaagaccatgaaacttgggcagcaaatgtattagtccagtcttgagaacatatgaaacaccctcatcaggatatttaatgcacaagctttcataagtgaaattaggtgcagccatctccctaaaagtcctctcatgacgaggaggttgagccatgttctcggtatgaatattagtattggaatgctcaaaattagaatattcacaatcactctcaacagaatgcttatatgcacagaatgaccaggatgcatattatgctctacttatcta

SEQ ID NO: 12781 - DNA, 652 bp, Glycine max
  unsure (1)..(652): unsure at all n locations
taaaattcattatggatgcatatgctaagagcattctaatggcttctaatatatcaactggagcatatgtttcctcataatctataccttcttcttgattatatccttttgcaactaatctatccttatttctaatgattattccatgttcatctaacttatttctaaatacccattttgttcctatgatgggataatttttaggtttctctacaagttcccacacattgtttctttcaaattgattcagttcttcttgcatggcaataatccagttatcatctactatggcttcttttatatttttaggtgcaatcatagatacaaaagccatattattgcataaatctttaagagaatgtctagttgttaccccttttgagatatcaccaataatgttgtcaaggggatgatctttngaagctttccattcttatggaagttcatcattggatttgacttcttctggaggatcttcattgcttcctttaccttttcctttagaatcttgaccatgaatatacaatctgttctaaagattctgcaatatcatctatcatattctttctttgaaaagatagcattaaattcatcaaacgttacatgaatggattcctacatattcatagatcctttattatatatcctatat

SEQ ID NO: 12782 - DNA, 573 bp, Glycine max
  unsure (1)..(573): unsure at all n locations
ctaagcttcataaatcactagtaaaatttaaagatgatatgaagttcaacttattttctcaatccccaccttcccccttttttgttttgctcatgttcttatttacgtttaatgtttttgtagactgtgtgatgcaatcctccctaggaagggaccagtcactagaaccatgagcaagaggctccaagaagattgggctagagctgctaaagaaggccctagggttctcatgaaccttatggtagatttcagaggccatgggccaaggttgggtccaattatctttgtacatattagattaggatgtcattatatttggtccttgtatttanggctccatattgtaggtagggtaccctataaatataggatttttcagcccttgtattttatggcacctagactagtttttgtattagtggtagttttgtaatttcacatgcactaagtgaatatttgatgtgtgtgggtggaataaatttaattgaattgcagaagcccaactcattaaatttagaggtgagggtgagcatgtgcttactacaccccattgtctcatcatatagtcacact

SEQ ID NO: 12783 - DNA, 501 bp, Glycine max
  unsure (1)..(501): unsure at all n locations
ntgaaggcatctacctcttgaagaggcagaggtaagggcatatggattattggtagaggtagaggacggggagatcaaacactattagaaaatacactttcaacatcggttatttggggccttctacatcggttgtaaaaccgatgttgaaagcatcgatgttgaatgtattgttgttaacatcggttttaaaaactgatgttaacataaaaatattaacatcagttttataaataaccgatgttataaagaaagaagtacaacaaaataagtgtatgcgtgagggacgttggcatcagttttctgtaaaaaccgatgtgaatatgttatattaacatcagtttttagaggaaaccgatgtgaacgttcatcattcatgcacctatnnttgctatagtaattatgtataacattggttatttataaataaccgatgttattgcatacagtttaacaatcggtattttataaatattcgatgttaacctatgtacattaaca

SEQ ID NO: 12784 - DNA, 415 bp, Glycine max
  unsure (1)..(415): unsure at all n locations
agtttccaagtgccaattcgncttcttctttatttcagtctttttctggcttcaatncatcagagggctttccttctgtgtccagcatcttgggatgttcccagcctttgatgacagctttccaggttctgctatccagtgatttgaggaaggccaccatccttgctttccagtattcatagttggttccatccagaataggtggtatgttcactggtcctccttctttctccatgttcatcagaatttatctccctagatctcactcagtgatttcgagtgcccgctctgataccaattgaaattctgatactggggacagatgtcgtacaggatgtcacgacatcacgcttcagaacatgcagattgtatttgacagtgtgcacagtttaagcgagtaaataacacaagagaa

SEQ ID NO: 12785 - DNA, 456 bp, Glycine max
aactcaagcttgtagaccttctcttcttcaccctttcgaacatatttcggtggttgttccacatacacgtcctctgtcaattctccgtgaagaaatgcgcttttgacatctagttgatacacattccatcccttttgtgctgcttgagctaaaaccatccggattgtgtcccaccttgctaccggggcaaacacttcgttgtagtcaatcccttgttgctgagcatagcctttagctactagtcgggctttgagcttatcaacttcaccattctcatttaacttggttctaaaaaccatttcactccaatcttcttagcacctttgggcaaagttgtaagctgccaggtttcattctttttgattgcttcaatctccaaatccattgcctttctccatttctcatctctttcagcttcttcaaatgagcttggatcttcatgagaggtaaacattg

SEQ ID NO: 12786 - DNA, 413 bp, Glycine max
agcttcatatttattaagaggcccattaacattctctttaactctgaaaactcacttgcacccaattgtttttctatttgatggaagaggatccagatcccaggtctagttttgaggtaatgctaaatattcttgttgcatggcttccttctacttaggataagctaaagcctattttacaccttttggttcacaatgagtaagtatagaaggatgaagtctaggttgatagttaccagactttgacctagtctgcataggatgagcattcactattctaggtggtgaagtagtttcaaaattttgaggactggtttttgcagtaggtgcagagtgaacaatggtttgaacatggctagaagaagaaggtggatcaatagaaacataactggacaagggtagtgaggaacaat

SEQ ID NO: 12787 - DNA, 325 bp, Glycine max
acacaccccctataatagctaagctcaccccatgacaaacaacatgaaaatacaaaaaaaaaaagtccttactaccaaaactactcaatagaatggccaaaatacaatgcctaaacgaaggataaacctattctaatatttacaaagataatcgggctcatacttagcccatgggctcgaaatctaccctaaggctcatgagaaccctcgggcctttccttggatctctagcccaatctacttggagtcttctacccaatgctcttgcggggtatgattggcatcagtcagtttctaaaaacgctattatatcaaaaatcgtctt

SEQ ID NO: 12788 - DNA, 435 bp, Glycine max
  unsure (1)..(435): unsure at all n locations
ntggagtttccaagtgccaattcgtcttcttcttttttccagtcttcttctggcttcaattcttcagtgggctttccttctgtgtccagcatcttgggatgttcccagcctttgatgacagctttccaggttctgctatccagtgatttgaggaaggccaccattcttgctttccaatattcatagttgcttccatcgagaattggtggtctgttcactggtccgccttctttctccatgttcatcagaatttatctccctagatctcactctgtgatttcgagtgttggctctgataccaattgaaattctgataccaggggacagatgtcgtacaggatgtcacgacatcacgcttcagaacatgcagattatatgtgtccgtatgaacagattaaacaagtaaataacacaagagaattgttacccagttcg

SEQ ID NO: 12789 - DNA, 430 bp, Glycine max
actcagcttgagcaattcaacgacatactttttactcgtagtctgatttttcatgtaatatatcgagatgctagaaattgaatgttgaagctccgagcaaattcaaacgacaataacttttcactcggttgtttgactgagtcccgtaatatatcgagacgctccaaatggaataccgaagctctgagcaaattcaaacgacaataactttttacttggatgtctgattgagtcccgtaatatatcgagagggtcggacttgaatgccgaagctctgagcaaattcaaacgacaacaactttttactaggatgtccgattgagtatcgtaatatatctaaacgctcaaaattgaatgttgaagctatgagcaaattcaaacgacaatcacttttttactcggatgtctgattgagtctcgtaatatgtgg

SEQ ID NO: 12790 - DNA, 382 bp, Glycine max
  unsure (1)..(382): unsure at all n locations
tgccgccacggaattntccgactctgctctagngatgtggaacaagctacaaaaggagagagcaaganatgaagagccaatggttgatacatggacggagatgaaaaagatcatgaggaagcggtatgtgccggctagttactcaagggacttgaaattcaagctccaaaaactaacccaaggcaacaagggggttgaggagtatttcaaggaaatggatgtgctcatgattcaagcaaatattgaagaagatgaggaggtaactatggctcgatttcttaatggtttgactaatgatatccgtgatattgttgagctgcangagtttgttgaaatggatgatttgcttcacaaagcaatccaagtggagcaacaattaaaa

SEQ ID NO: 12791 - DNA, 384 bp, Glycine max
aaaaccccttgaactacttcaaaaccccttgaactacttcacatagacttatttggtccctctagaactatgagtttgggtggtaattactatgacttagttatagtagatgattactcaaagttcacatggactttgttgttgaaaaccaaaaatgaagcttttgatgcttttcgcacacttgccaatattattgaaaatgaaaatggtctcaacattgtttcacttggaagtgatcatggaggtgaatttcaaaataagtcttttgaatagtgttgtgaagaacatggaattcaccacaattgtttttgccccaagaacacctcatcagaatggtgttgtggagaggaaaaatagatccctctgagaaagaacaataactct

SEQ ID NO: 12792 - DNA, 410 bp, Glycine max
agctcacgattatttattgtataattttcttacactctcaatttattaaagatgatcatatataataaatttagtaaattttataataattattttaaaaatcattcatgattatgagttatcaaccatcacataaaggaacttgacaccacactttaactcaaagtcttaagattcatgtttatgaatcttctcctcgtgctcaactctttttcacttctacgactccacctcacacttgtactagatttggatcttttaattaagatttcagtttaaatttgtgttgataaaaaaatataattaagagaaaagattctattaaagctcaccaactagattttctaataaattagttatcaataaagttggtgattatatacttcctattaatgttatagtgacaaaaa

SEQ ID NO: 12793 - DNA, 429 bp, Glycine max
agcttcatatggacatcgcttcattttggtcgccattgtttacttcaccaaatgggttgaagcggcttcatacgccagtgtgactaggagtgtggtggttaggttcatcaagaaaaagataatttgctggtatggtttgcctaggaagattatcactgataatgccaccaatctgaacaataaaatgatgaaggaaatgtgtgaggatttcaagatccaacaccataattctatgccttgcaggcccaagatgaatggggcagttgaggctgctaataagaacatcaagaaaatagttcagaagatgatcgtgtcatacaaggattggcacaagatgctcccttttgcactacatggttattgaacctcgatacgcacatcaactggggcaaccccgttctctttggtgtatggaatagaggttgtgct

SEQ ID NO: 12794 - DNA, 409 bp, Glycine max
  unsure (1)..(409): unsure at all n locations
agctngccaacctatgtaagctccttatatctcccacactgtttgttgtgggccattcttggatggccttgattttctcagggtccacttggaccccatttctaccaactacaaaccctaagaaaactatattatctacacaaaaaagtacacttctctatatttgcatagagggtgtttttcctaaagactgaaagaacttgcctaagatgtcctaagtgatcatctaggctcctactgtacactaaaatatcatcaaaataaacaactacaaatctacctatgaaatcccttaagacatgatgcataagcctcataaaggtgcttggtgcattagtgagcccgaaaggcatcactagccattcatacaaaccaaacttggtcttgaaagcgggtttncactcatcac

SEQ ID NO: 12795 - DNA, 257 bp, Glycine max
  unsure (1)..(257): unsure at all n locations
acactttngtgcgagaaaccgagacgctcgaaattgaacaacggaagctctcgagacataaaatggtcataactgttaaaacggaactccgattcacgggcataatatatcgagacgctcgaaaccgaacaacagaagctctcaagaaatgccaatggacataacatgtcacacggaggtccgataccagtggatagtatatcgagaaggtcgaaattgaacaacggaagctctcgagaaattcaaatgggaataac

SEQ ID NO: 12796 - DNA, 429 bp, Glycine max
ctattagtaagacttcattcttgaattcatttgttccttgcttataacttcttgaaagtctctttactgctatttgttgcccatcaggtaatatcccctgaaattaaaccattattcatgtgaaaaacaaaaatatgaaaataacttttctcacatttactcaccttgtaaacttctccaaatccacctttgccaatacagttctcattggagaagttgttagtcgccgcttcaattacagccaaatcaaattgcaatggctctaaaatggcgctttcatgaccaactagaacaaatatggttagtttgttaaaccaagttttcaaagttttgaggataacaaatacgagtttaaagtacatattttttacatacaattttctttgagaatggtcctaaaactctctcttgcttgtctccttattaaat

SEQ ID NO: 12797 - DNA, 364 bp, Glycine max
gtgcagttcactaaaggagactgggtcctcgttaagcttcgtccatgtcgccagtcaacggcttcaggtggtcaatactccaagttagcaaaaaggttctacgacccatttcaaattgttcaaaggatcggacctgtagcatataaacttgacttaccttcaacctcaagaatccaccctgtcttccattggtccttactcaggccttatcactcttcactgaccacaacagaaacacccattcccttgcccaatgcggatgaagataaccaacccctcctcacccctctcacgatattggataaaagtggcacagttcaagggatgacaagcagttacctcgtttggccaatgggatgttctc

SEQ ID NO: 12798 - DNA, 424 bp, Glycine max
agcttatagttattggagggagaattttcaatccaaaatcaattgtacctttttgtaacgaagaattctttttgcagcttttagatgaggagaggtaggagcctccgtaaagcgacacacaactcccaccgcatatagaatatcgggccttgtattggttagataccttaaactccccacaagactcttgaagatcgtggagtctaccttctctccttcatcaaaatttgataacttcaagccaccttccataggtgtgttcacgggattgcaatcaagcatattaaatttcttcaacacttcttttgtgtagctttcttgtgagacaaagataccattcttcgttttcttcacttccattcccaagtaatatgacatgagtctcgtatctgtcatatcaaattcacgagacatggactccttg

SEQ ID NO: 12799 - DNA, 404 bp, Glycine max
  unsure (1)..(404): unsure at all n locations
agcttccacatacttgttacccattttactattntcagctaacagatcataactacctccaaggccaagatagaccaaattggagagattcccaatctgagatggaatcttccccatgaatccagaagagaggtcgaggtgagtcaaggaggtcattgcacaaagaaaagaaggaattgccataccttcaaaataattgtcgctcaagtcaagatatcgaagcttagagagattcccgatctgagagggtactgttccgtcgtcaacaacagaactcaggtcaagatacaccaaatttgagagatttccaatctgaggaggaatcttcccatggaatccactatcagagaggttgaggtgagtcaaggaagtcattgtcccaaggaaagaaggaattgacatac

SEQ ID NO: 12800 - DNA, 396 bp, Glycine max
  unsure (1)..(396): unsure at all n locations
tgccgccacggagttntccgactatgctctngtgatgtggaacttgctacaaaaggagagagcaagaaatgaagagccaatggttgatacatggacggagatgaaaaagatcatgaggaagcggtatgtgccggctagttactcaagggacttgaaattcaagctccaaaaactaacccaaggcaacaagggggttgaggagtatttcaaggaaatggatgtgctcatgattcaagcaaatattgaagaagatgaggaggtaactatggctcgatttcttaatggtttgactaatgatatccgtgatattgttgagctgcaggagtttgttgaaatggatgatttgcttcacaaagcaatccaagtggagcaacaattaaaaaggaagggagtggc

SEQ ID NO: 12801 - DNA, 401 bp, Glycine max
agctcttgagaatatccttaataattgtgacattatccatttatggttccccaaagaagatagtatcatcagcaaattgtagtatgttgactgggatctttttctttcccaccataaaattgtggtagtagtttttggaaaatactgccctcatcatgcctgtcaagccttcagcaactaggtcaaacaaaaagggagccaatggatccccttgtctcaagcctatttgaggtttaaattcagaagtaggacttccattcactagtatagatattgatgctaatgaaagacaccccttaatccagccaatccacttttcattaaaccccattcttctcatcatgtaaaagaggaaatgccaagacacagagtcatgctttttcaaaatcaactttgaacac

SEQ ID NO: 12802 - DNA, 341 bp, Glycine max
gtgagccaattcaaactataataactttttacttttatatccgagagagtcccgcaatataacgagacgctcgaaattgaatgttgaagctccgagccaattcaaacgacaataactttttactcggatgtctgattgagtcccgtgatatatcgagacgctcgacattgaatgtgtgaatctctgagcaaatgcaaacgacaataactttttactgggatgtctgattgagtcccataacatatcgagacgctcgaaattgaatgttgaacctctgagccgattcaaacgacaataaatttttactcggatgtctgattgagtcccgtaatatatcgaga

SEQ ID NO: 12803 - DNA, 444 bp, Glycine max
  unsure (1)..(444): unsure at all n locations
ctcaagcttggtgcatatgaattatatgttgcagcttaaaggattatgttagattatagattattataccctattgtactaggctaatgttcttcttttatttttctgtatctactatgttctgagttttctgtagaaagctttctttgcaagctaaggttgatatatataagagaagctcattgtccagaaaacactaaagcatttcatccaaaaatatatctcattattttctactaaaatcattatcataatttagatttattaaatttataatagcattcacatatatcatgtaaaaagatttatagttaaaggtagttttttatgatgaatagctattgtaatactatccttcaaaaaagctattataaatctataatactatatctattattggggggaaacagctntcggtgattgtattacaatatgtcaatattc

SEQ ID NO: 12804 - DNA, 430 bp, Glycine max
ctcagcttaaatgcagctccttgctgtacagtgctttgtggcacttttttgcctaagaggaactataaggcggagaaaatctcgtgttcgatgggcatggatcattcgaagactcctgctagctcgagtgaccggatactgcacacacataaactggaagaactgccctcatgccctaggtgtggggtatcacggtacatacacaaggatgatgatgagtgctgaagagaagaagactcatagaagggccccctacctacggtgatgcggactcattcacttgtgccaatgtttatacgtctctatgcttatggatacgatgctatagacatcttacatggcatgcacatgagagcaactgcgatggaatggtcctgcatccggatgatcgctcctagaggacaaggatatatcatttgtattcgaattt

SEQ ID NO: 12805 - DNA, 397 bp, Glycine max
agcttgaatcggacatccgtgtgattatttatgaccattttattttctcaagagctttctttgtgcaatttcgagcttctcgatatgtgatatgcctgaatcggacatccgtgtgaaaagatataccagttgaatttctcaagagcttccgttgttcaattttgagcgccttaatatgtgattggcctgaatcggacatccgtgtgaaaagttatgaccatttgatattttcaagaccttccgttggtcaatttcgagcctctcgactttttatgcgaccgaatccgacattcgtgtgaaaagttatggccatttgaatttctcgagagattccgatgttaaatttctagcgtgtcgatatattataagcacgaatcggacattcgtgtgaaaagtt

SEQ ID NO: 12806 - DNA, 385 bp, Glycine max
acggatgcccgaaagttagaaatatattatacgctccaaattgagcaaccggagctctatagaaaagtcaacggatcgtaactatgtcacacaggaagtcctattcttggacataactcatcgaggacgctcgataattgcacaacacgggcctcatcatgcatgcgaatgctcctaacattacgctaagattagcgagggcgggacgtaacatatcgagacgctctatattgagcaacgaaagctatcgacgactttgaatggccataacttatcacacggatgttggaagacgggacataactcatccagacgctctataatgaacaaccgaaactctctagaagttcgagatgacatgacaatacacacagatgtgctattt

SEQ ID NO: 12807 - DNA, 418 bp, Glycine max
  unsure (1)..(418): unsure at all n locations
agcttcaacatctttatcccttccagtttgctggaactacttttcatggacttgatggggcctatgcaagttgaaagccttggaggaaagaggtatgcctatgttgttgtggatgatttctccagatttacctgtgtcaactttatcagagagaaatcagacacctttgaagtattcaaagagttgagtctaagacttcaaagagaaaaagactgtgtcatcaatagaattaggagtgaccatggcagagagtttgaaaacagcaagtttactgaattctgcacatctgaaggcatcactcatgagttctctgcagccatcacaccacaacaaaatggcatagttgaaaggaanaacatgactttgcaagaagctgctagggtcatgcttcatgccaaagaacttccctataatatct

SEQ ID NO: 12808 - DNA, 437 bp, Glycine max
  unsure (1)..(437): unsure at all n locations
nttatgtttagacactggggngaattttctaatatatatacattagtgagataagaaaaaaagagaaagagaaaaagtaatttttttaattatctagatcccactcttcatttaatgaatcttaagattaaattgataaaattttcaagaatgtatgtatagtgttgtaggtaggcgggtaccatagttggagactctccccgcatgccaaagttgacaaaagaaaataccccccttttcatgaacagcgctcacaataggtttccaagcttccagctgttctcttgtccagatgccaggtgtattagggtatctttggccaacgtacaaaacggccacacgtataatgaaacaaaatactaaagcattagtacaagataatctttgtgtggacaaaatcagatccaatttctagacgtgttcagattaattacccc

SEQ ID NO: 12809 - DNA, 394 bp, Glycine max
agcttacccttttgggaggatttttaggttctggagaggatcaataacaatgcctatacgttggaccttccagaagagtatggagtcaacaccacttttaacatttctgatttaactccttttgcaggtggagctgatattgaggaggaggaactaatagatttgaggtcaaatcctcttcaaagggaaggggatgatgcaatcctccctatgaagggaccaatcactagaaccatgagccttacggtagatttctgagcccatgggccaaggttgggtccaattatctttgtacatattagactaggatgtcattatatttggtccttgtatttagggctccatattgtaagtagggtaccctagaaatataggatttttcagcccttgtatt

SEQ ID NO: 12810 - DNA, 402 bp, Glycine max
  unsure (1)..(402): unsure at all n locations
agctcncagtgttttatatagggctttatgtcttcatacttttctctctagcacaggcttttctgtttatcttggtgatactcctgtctcatggcgttctaagaaataacccattgtttctcgtagttcatctgaagctgaatatcgtgctctcgccaccacaacttgtgagcttcaatggctcacttatctcctcaatgatctgcatgtttctgctaaacaaccagctctcctctattgagataatcagtccgctttgcaaatcgcagccaatcaagtattccatgaacgtacatagcacatagatattgattgccatctagttagagagaaagttcaatctggtctgattaattacttcctgttgctgctccacaatagcttgcccacatctttacgaag

SEQ ID NO: 12811 - DNA, 454 bp, Glycine max
  unsure (1)..(454): unsure at all n locations
ctcagcttaggaggaacctgacagggatgctagcctaccattgtagcttcatgacttcttgaatgggaggagggttgcgtatctccagtatgatagtgcatttttcgggattggctccaatcccccgacgtgtgatcattaagctgaggaacttgctgccacctaccacaaaagtacatttttcagggttgaggcccatgttgtatttgcatagttccctgaatacttcctctaggtccaccacatgttggggtatgctttgagacttgacaactatgtcgtccacacatactttgacgtttcatttgatctgttgtttaaagactcggtccattagtcgttggtatgtcgcgcctgcatttttgaggtcgaatggcatgaccttgtagcaaaagttagcatcttcagtgatgaatgtcngtttctcctggtctggagaatgcattctgatctg

SEQ ID NO: 12812 - DNA, 427 bp, Glycine max
agcttgtaatcgattacacaagtatttttatcgattactatatgagattttcaaataataatttccaagagtcacatctgttcaaattgttttttgaatgaccatcaaaggtctatttatatatgacttggaacacgaatttgcttagagtttttctgaacaaaaagtcttatcttctcaaaaacaaaattgtcttatcctctaaaacattccttggccaaaacacttgcaattcaataaggaattatttgagtgcttcattgtacaatctatctctttcaagagagatttcttcttctcttcttcatacttctgaaaagggattaagagaccgaagatctcttgttgtaaagaaatctgaacacaaaggaagggttgtccttgtgtgtttcagaagttgtaaaggatttgcaagatagtggtactc

SEQ ID NO: 12813 - DNA, 461 bp, Glycine max
  unsure (1)..(461): unsure at all n locations
actctataatactcacagcttgtttaccccatgttngaattgcttacaatagagcttgttatagcactcactaattgttctccttttgaagttgtttatggttttaacccactaactcctcttgatcttttgcctatgcctaatgtttctgtttttaagcataaagaaggtcaagcaaaggcagactatgtgaagaagcttcatgagagagtcaaagatcaaattgagaggaaaaataaaagctatgctaaacaagccaacaaagggagaaagaaggttgtcttcgaacccggagattgggtttgggtgcacatgagaaaagaaaggtttccggaacaaaggaaatcaaagcttcaaccaaggggagatggaccatttcaagtgcttgaaagaatcaatgacaatgcttacaaagttgagctgcccggtgagtataatgttagttccaccttcaatgtctc

SEQ ID NO: 12814 - DNA, 451 bp, Glycine max
  unsure (1)..(451): unsure at all n locations
tgagctcggcttgagttgaatacgtaaagcttgagttgacatatgtttttnttaaggctctgctcgacttacataaaagtctgacttacgagcctatttaaaagcttgcttaaagacgtcttttattaattaattattttaaaacctagtgaaatactaactaaaaaaagaaacttataaaatttcgtataaataatgtacaaatctaaaaataattgataaacaaaattatattgaattcaagtcgttaaagcacaaagtatataaaaaaaataaaaatagcataatattaaaaaatgtatggattagagatgatttacactaatatagccaaacaaaaattattattagttaaattaacaatttttaatccaatttttttaatatataattatattatatattnttaaaaaaaatatatccacaataatttcatcttagtctactcaag

SEQ ID NO: 12815 - DNA, 410 bp, Glycine max
  unsure (1)..(410): unsure at all n locations
tgctgattacttcaacattcccggtgtcttcagtgtgtatntactgcaaaactctccctcaaacggtccaggatacataggcacctcagtgttgcaaacttctctccatgattttattgaggttattttccagaacaacgaaaacaccatgcaatcttggcatcttgatggttatgatttttgggtcattgggtatgccagcttcctttatttataaacttttgtttctattatcaatatttttattagtagaagcaatttagaattagcttaagaaagttctaaagatgttcattgacccttgcagtcatggtttcggccagtggacagatgctagcagaaaaacatataatctagtggatgccctgactagacacactgcacaggtaacttaacatgaaagttcccta

SEQ ID NO: 12816 - DNA, 403 bp, Glycine max
gatccttaagcacctgcagcatgcaagctttaaatttaaacgacatactttttactcggatttctgattgagtcccgtaatatatcgacaagctcgaaatagaatcttgatgctctgagcaaattcaaacgacaataactttttactcggatgtctgattgagtcctgtaatatatcgagacgctcgaaattgaatacggaagctctgagcaaattcaaacgacaataactttttactcggatgtctgattgagtcccgtaatatatcgacacgctcgaaatagaatcttgatgctctgagcaaattcaaacgacaataactttttactcggatgtctgattgagtcctgtaatatatcgagacgctcaaaattgaataccgaagctctgagcagattcaaac

SEQ ID NO: 12817 - DNA, 339 bp, Glycine max
  unsure (1)..(339): unsure at all n locations
agcttcgataaataatttcgagcgtttctatatattacgggactcagtcagacaaccaagtgaaaagntattgtcgcttgaatatgctcagagcttcgatattccatttcgagcgtctcgatatattacgagactcactcagaccaccgagtgaaaagttattgtcgtttgaatttgctcagagcttccgcattcgagtgcaagcgtctcgatatattacgggactaaatcagacatctgagtaaaaagttattgacgcttgaatttgctcaaagcatcggtattccattttgagcgtctcgatatattacgggactcgatcagacgtctcgagaaaaa

SEQ ID NO: 12818 - DNA, 432 bp, Glycine max
  unsure (1)..(432): unsure at all n locations
ntagttcactgcttcaagtagtgtacgatatgttttttatgaaatttcattgcctaagagttactatcaggcgaagaagatattgtgttcaatgggtatggagtatcagaagattcatgcttgctcgaatgattgcatactgtacagacataaatttgaagaaatgtccaaatgccctatgtgtggggtatcacggtacatagtcaaggatgatgatgagtgtagtagtgatgaaaactcaaagaagggccccctagcgaaggtgttgtggtatctttcaattgttccaaggtttaagcgtctttttgctaatggaaacgatgctaaagacatcttacatggcatgcaaatgagagcaactgcgatggaatggtccgtcatccggatgattgctcctagtggaaaaggatagatcatctgttttcgaatttc

SEQ ID NO: 12819 - DNA, 284 bp, Glycine max
  unsure (1)..(284): unsure at all n locations
agcttcaactacgacctcattagctatcattacaccatggaggatatgtctgcctttgagaaaagtagtttgcctttcatcaattaagtgaggcagcacaagagccagcctattagccaggactttggacattattttgtagacacaccctatgagagagatgggtctatagtcattaagagattgggggctattggttttggggatgagggctatgaaggatgcattacttcctttggggaatctgccattaatgaagaattcatcanagaatctgataaaat

SEQ ID NO: 12820 - DNA, 495 bp, Glycine max
  unsure (1)..(495): unsure at all n locations
cctatgttggtgatatgctaagatggacgtgtggacttgactaccactctaataaagagtacaacagatgttgtgtttgatgatttacgttttctctctttcttttatgttcatatgcaatgttcatttttttctcttatttcgctatattctatctcctatttctatatatttgggatgggtgtatttgactatctcaagttcaaattgagatgagagataacaatttatctaatatctgtgtcttttttatacctgtatataataatcacattnttatactataattaaataataagataaatcgtataaactctagcacaatagatatgcagacgcgataactattactaaaaatacatatagaatttattaatcttgggtaatagttaaaaaacatcaaaagagtgtagtggagatggtgaacttttaanaagttaatagcaaaagagctgtgagttgaaatttaaaattaataaataaccattttaaata

SEQ ID NO: 12821 - DNA, 436 bp, Glycine max
  unsure (1)..(436): unsure at all n locations
agacacattcctctgctttcatttactggaagttcaaaggtacttcatctctctcttattttgattaaacattgtaatctttatttttatgtgtttacaacgtacattacattttcatgatagtatttttatgttacaacctctactagttagctaacaagtgtaatatattataatattgttgaattcattgttttgttggttccattggtatttattctaaatacctattcttattctataacatatatggtagtagctgtaacataaaaattagttagaataattattatagcttttcttcttaattcatattataattgtgcgggggacttactttcntttaatacatattatactatgttatattatcatagtgtgataaattatgttaatacaactggttacgtatcttttgtaatggataagtcatgga

SEQ ID NO: 12822 - DNA, 177 bp, Glycine max
gagttatatttgattgtgtaatagaacttgcatgctacgattaaacaaccagttgtcaagaacatgatgaaagccttgtactttcagtttaccgctggagatctaccattgtaccttgttgcctttacaggatactgggcttatgggtcttccacagaagtgtatttgctgaatagt

SEQ ID NO: 12823 - DNA, 425 bp, Glycine max
  unsure (1)..(425): unsure at all n locations
gatccttaagtcacctgcngcatgcaagcttcgataatcaatttcgagcgtcttgatatattactagactcagtcagacatccgagtaaaatgttattgtcngtttgaattgctaagagcttcgataatcaatttcgaccgtctccatatattacgggactcagtcagacaaccgagtgaaaagttattgtcgtttgaatttgctaagagcttcgataatcaatttcgaccgtctccatatattacgggactcagtcagacaaccgagtgaaaagttattgtcgtttgaatttgctaagagcttcgataatcaatttcgaccgtctccatatattacgggactcagtcagacatccgagtaaaatgttattgtcgtttgaatttgctaagagcttctataatcaatttcgagcgtctccatatat

SEQ ID NO: 12824 - DNA, 285 bp, Glycine max
atcgtctcgatgtattacgtgactcaatcagacatctgagtgagaacgttattgtcgtttgaatttgctgagagcttcaacattcaatttctagcatctcgatatatttcgggactcaatcagacatccgagtaaaaagttattgtcgtttgaattttctgagagcttcaacattcaatttcgagcgtctcgatgtattatgggactctatcagacatctgagtaaaaaagttattgtcgtttgaaatcgccaaagcttcaacattcaatttcgagcgtcttgat

SEQ ID NO: 12825 - DNA, 422 bp, Glycine max
tcacctgccgcatgcaagcttctacaaaggtgtgttcctaatttctatgagtaaagctagtgaagaagaatgtggcattcacttgtggtgaaagacaagggcaagcctttgctttactcaaagaatagctcaccaaggcacctgttctagctcttccagacttttctaaaacttttgagcttgaatgtgatgcctctggagtgggagttggagctatattgttacaaggttggcaccctattgcttattttacttgaggaataaactcaagcccaagaggtgtggcaatgctaacaagtgtctttttacaaaggagaaaatatggaggttgtctaagaggggaaatttctttaataattgtctttatttcaaaatgtcttcccttcttagctaacctcttggaggagacacttacctcctta

SEQ ID NO: 12826 - DNA, 339 bp, Glycine max
  unsure (1)..(339): unsure at all n locations
gacaatatctntttactcgtatgtctgattgagtcccgtcatataacgagacgctcgaaattgaatgttgaagctctgagccaattcatgcgacaatatctttttactcggatgtctgattgaagcccgtaatatatcgagacgctcgaaattgaatgttgaagctctgagccaattcaaacgacaataactttnntactcgatgtctgattgaatcctgtcatatatcgagacgctcgaaattgaatgttgaacctctgagcgaattcaaacgacaataactntttactcagatgtctgatatagtctcgtaatatatcgagacgctcgaaattgatg

SEQ ID NO: 12827 - DNA, 389 bp, Glycine max
  unsure (1)..(389): unsure at all n locations
atgtaatactatatttatctgatgtaggctattattgataaataatattggattaatgaagctcaatattcttagaaagataatgaagtgtaaccatacttacctttgaagtgagtgaagttctaccatatgaaaaataagattaattataattaggtatcaagacttaagaacctttatatttaggaattttgtacatttattaaagtttatcacactaatgattatgtgaaaaatcatcataaaatcaaagaattctgaagatcttgatataataaaaaaagtataataacttgaagaacgtatttattgtattgcactacacaataaatgttactatactgtagtagtgtatatattatagtngtataagatactgattttttata

SEQ ID NO: 12828 - DNA, 370 bp, Glycine max
  unsure (1)..(370): unsure at all n locations
ngcttaagataatggtacgganataccatatcccgtggtaccttccaagaaagataaggaccgccatctggcgagattcctagacattttcaggaaactggaaataactatgccctttggagaagctttgcagcagatgccactctactcaatgtttttgaaagatatgttgacaaggaagcacaaatacattcactatgagaatatcattgtggaaggcaactgcagtgttgtgatatagaagatccttccaccaaaacacaaggaccctggaagtatgactattccttgttcaatangtgaagtcacagtgggaaaggctctcattgactntgtagccaatatcaacttgatgccactctccatgtgt

SEQ ID NO: 12829 - DNA, 411 bp, Glycine max
  unsure (1)..(411): unsure at all n locations
tactaagctatttagtcctatttgattcttaattacacactagaatttcctctcctgtagaaacaaaccctntgagttgattcatataaacttcttcttctaagtcaccattcagaanaggcggtctttagatccatttggtgaagctccaaatcaaatgagccactaaagccaacacaagccacaaagagtccttcttagaaacagaagagatagtctctttgtagttgatgcaatcctatcccgcaagggcattggatagaagaactccagtagattgngccagagatgtaagagaaggccctanggttctcatgagccttangatagatttcggacccatgggctaagtatgtgcccacttatctttatacatatntgattaagatttcattanttttgggccttata

SEQ ID NO: 12830 - DNA, 454 bp, Glycine max
  unsure (1)..(454): unsure at all n locations
agcttggcattcccattggtggaaggaccttataagactntataatcagtctgatttccacagtatccagtagaatatggtatggaaggttggttgtggcgacaaaatcaaattttggcaagattcttgactgagtgagggctgtaagcatttcaaaaaaagattcttggcaatatggaaggaacgttagtttattaataatattcaaagaaagattctcatagtataacccgtgcagaccaaccctggatgggattcagttntcttctcttggccaagggcagaacgaaagccttgttgctagattctctgaagtggaaattaagtctgcagtttgcgcttgtagtggagataaaagcactggcccgtatggtttgaacttcaacttttatcaagtagtttgggaaattctaaaacctgatttcatcacgttcttcgatgagttcttcattaa

SEQ ID NO: 12831 - DNA, 298 bp, Glycine max
tcatttatcctatcttctacagccaatgggtgagttccgtgcaggtagtcccttaaacaatcggcctcaccgtgatagaaaatgagaatgaggagcttattcctactccggtgcagaacagttggagagtctgcattgactatacgaagttgaaccaagttaccaaaaacgaccattcttcactgtcattcattgaccagatgcttgaacacctgtcaggcaaatcttactattgtatacttgatggtttttctgggtatatgcaaaacactattgctcttgacgatcatgaaaagac

SEQ ID NO: 12832 - DNA, 288 bp, Glycine max
catgcaagcttgtgttgcacaagttggtggtattcatacaaagatgggtttgagcttatatgtcattacttagtggaattctacttttatgatgcttgagagtgcccttgtatatcgatgtgctttttgtagtcttgaatttgatgataggagctattcaagttgtcttattaatgatgaatggaagagaggacaaaaaatgtgtgaatttttgcgtcccttttttcaaatcacagagttgatatctggttcctcttacccaacgtctaatttgtaatttatgcaagt

SEQ ID NO: 12833 - DNA, 414 bp, Glycine max
  unsure (1)..(414): unsure at all n locations
atgacgaggttgagtcgccgctgtggctgcctcactggcttagcttcatcctctaaaagtatcctatgcatgcaggtagatgggctaatactaggaatgtctgctaaagtccatctaatggctttcttgtgcttcttgagaactatcaacaacttctcgtcttgcttagcagcaagggaggcagagatgatcactgngaaattttccttgtcctccaagtaagcatatttgagggttctggtaagggcttcaactctagtgtgggtggtggctaaacagtgggaggaaccatggtaggagaagaaaaaggttcctcagcctatacctcataaagcaagtcagaagtatatgtacctcctgcaacatggntagtgcattctgactctacaaaatcaacatcaagaggtacaacat

SEQ ID NO: 12834 - DNA, 463 bp, Glycine max
  unsure (1)..(463): unsure at all n locations
agcttgttcttgactcatcttctccttgaagtggcatctccaatcatctttcttccttctccgttccgctgccattgatcttcaagtagcaaaggactccattgatgaagaagattgaaggcctacaagctccacatggagctacgtcattgatgcctatagatagtctcctccaagtccccatgtagaaaagcagttctgacatgctccaactccatatcatgtcgattcataattgccatcaaactccacaatttcgtaggtgccttgatgttatagttgaagataggcatctattaatcccatanattgtggcacttatagcttcaccccagaaactctttggtagtcctacacccaaacgcatacacctcacacgctctagaatgatcctattcatcctctcagctagaccattttgtcgaggagtctatgccacaatcctatgccttttgataccatg

SEQ ID NO: 12835 - DNA, 278 bp, Glycine max
ttctcctcctcgaagctcttctctagatactgaacctggctcgcagatatacgtcgctgcttctctggttgatgaaagtactcgtccatgcactcatccccattgtcgtgcatgtcaaacgcgcggaagaaggagccgttacaccccttccctccttctgcttcaaaactcatcatggatctcgaacctgaaccagattataacaaaaacaccatccattagtcataggtcaaaaacaaaaattggtgatagagaggttatattaggttctttttttt

SEQ ID NO: 12836 - DNA, 422 bp, Glycine max
  unsure (1)..(422): unsure at all n locations
cacctgccgcatgcaagctnggccaaaccaaaatcagcaactttaggacataagtttctgtccaagagaatatttcccggtttaatgtcgtagtggattattctctgttggcactcttcatgtaagtaagcaatgcctctcgcagtaccaactgcgatctcatgaagcttttcgaatgataaggttgtgttttcgtgaaacaggtacttctcgagtgcaccattcaccatgtactcgtaaaccagtgctctcaagtgtctttcgaagcaaaacccatatagacgaactagattaaaatgatggacttttccaatggtacccacttctgccataaactgctcatcaattctcttgtcagaactcccacgtagaactttcacggctacgatggttccgtngctgaaacttcctttataaacaac

SEQ ID NO: 12837 - DNA, 377 bp, Glycine max
  unsure (1)..(377): unsure at all n locations
cgccgccacggagttntccgactatgctcttgtgtggtggaacaagctacaaaaggagagagcaaganatgaagagccaatggttgatacatggacggagatgaaaaagatcatgaggaagcggtatgttccggctagttactcaagggacttgaaattcaagctccaaaaactaacccaaggcaacaagggggttgaggagtatttcaaggaaatggatgtgctcatgattcaagcaaatattgaagaagatgaggaggtaactatggctcgatttcttaatggtttgactaatgatatccgtgatattgttgagctgcaggagtttgttgaaatggatgatttgcttcacaaagcaatccaagtggagcaacaat

SEQ ID NO: 12838 - DNA, 275 bp, Glycine max
  unsure (1)..(275): unsure at all n locations
agcttgaaattgaacaacggaagctctcgagataatcgagtggtcataatatttcacacagatgtccgattcggggaaataatatatcgagacgcacgaaattgaacaacggaagctctcgagaaatttgaatggtcataacatttcactcggatgttcgatccggggacataatttatcgagacgtctcgaaatgaacaaccgaagctctcgacaaattagaatggtcgtaactttttacgcgaatgttcgantcggggacataactcatctag

SEQ ID NO: 12839 - DNA, 447 bp, Glycine max
  unsure (1)..(447): unsure at all n locations
actatgcaaagagtatccaaggaaaatttcttcatctgacttagaatcaaactttcctaagttttcttttccattgtttaatacaaaacacttgcaaccaaaaacatgaagatgcgagatatttggtttcctaccattaaacaattcatatggagttttctttaaaatgagtcttattaaatccctatccatgatataacatatagtattaacgacttcatcccaaaaatattttggaagaggagtatcatataataaggttctagcaatttcttccaaagacctatttttcctttcaacaactccattntgttgaggggttctaggtgcagaaaagttatgttcaatgccatgtttttcacanaataaatcaaattctnntatttcanattcactcccatgatcacttctaatagatataattctgagaattttcttattttgaat

SEQ ID NO: 12840 - DNA, 512 bp, Glycine max
  unsure (1)..(512): unsure at all n locations
tgccgcatgcaagcttatccttattgttgtaggtgtggttcatgtctgtgtaaatagacaaataattcatttctagaatagttcattnttctttaaaacgtggtttataaagatcaaaacattttcaaatcttggttttggttcaaaacagatttttttttccctttcatttgttcaccaaaaaatgcacacgtttttaacttcatttaattattattgattaaaacattntcatgttttgatttgattcaacacacgtttgattntatttcttctttcatttactcaccaacaattggaacatatataatcgtattatataagaagggaaacacatttaaatttttgcattaatttttataanatatcntttattagaaatcanataacagtataaattaatatgaaatattgtacatttatgtaagaagatnnntgggttttaatttccatcaagaattctacagatatgctgttattataccagaaattcaggattaattaaacttact

SEQ ID NO: 12841 - DNA, 378 bp, Glycine max
  unsure (1)..(378): unsure at all n locations
agcttctagtccttgtggatcttcttccctcttattcttgaactacacttgtaggtttagcttgaacttcacctgtaacgtcatcaagttctggttcactcaatgtttttgtgttgatatgcatcattggcttcttgcttggatcatgtttgtccttcatccatgtgttcagctcatcaaattgcacatccctactgaaaactattcgattcgttcttggatttaagagtttgtatgaccctgtgggattatagccaacaaagatcatgtgttcactcttgtcatccaatatcttccttgtatgatcacgaatatgnttgtaacatgttgagccaaaaactctcatatgcttcacagatggtgttttccctgaccata

SEQ ID NO: 12842 - DNA, 446 bp, Glycine max
  unsure (1)..(446): unsure at all n locations
caagtgcttganagaatctatgacaatgcttacattgttgagctgcccggtgagtataatgttagttccaccttcaatgtctctgatctatctctttatgatgcagatggagaatccgatttgaggacaaatccttctcaagagggagagaatgatgaggacatgaccaagagcatgggcaaagatccacttgaaggacttggatgacctatgacaatggctagagcaaggaaagccaatgaagctcttcaacaagtgctgtccatactatttgaatacaagcccaagtttcaaggagaaaagtccaaggatgtgagttgtatcatggcccacatggaggaggactatatgacaccactttgcttcaatnttagagtggttagtttggctaaataatggcccaatccttgtaaaagtggctgaccaaaaatatagtttgtgtaatc

SEQ ID NO: 12843 - DNA, 433 bp, Glycine max
  unsure (1)..(433): unsure at all n locations
tcgcacttgataatggagacacatgaacagcgctaggcaacgacattcatggcgctccgaacaaaggtggagtatggaggattgccttgagggtccgcacttangcaatcatgaaactaagctccaaactcgaaagtggaggacacatgaacaaccctaagcaataatattcatgtggctccgaanaaggatgagaatggaggattgccttgagggtcctctcttangcaatcatggaacacagctccaaactcgaaaacggaggacacatgaatgaaaccgcaattcattcacgtggctccggaacaggatgagaatggaggattgccttgagggtcctctcttatgcaatcatggaacacagctccaatcatggaacacagctccatactcgagaacggangacacatgaatgacaacgccattcattcac

SEQ ID NO: 12844 - DNA, 462 bp, Glycine max
  unsure (1)..(462): unsure at all n locations
tggacttaccttgaatcaattcctttgatagcccctttgagcctattntcccctttctttgttttgaagttcattacaagccttaagtgaaaaaccatgatatcaccttacccttaaggaattntggagctttggaattgttctgggaataagctgggtgttagtgcttagctntactgagttttaaaagattggctaaaattttgttaaaacataagcacttatacaatgaaggaaagctggagttgctgcacatgatgtccaacgttatgtcaaggaatcagatcgggctgcacaatgcacaaggcaagataaaatgtcaaatgaagaattgaagctgcaggatccacgatgtcggatacaatgtccaggacatcctgcccganaatactggacacataaatctgttatatctttaacagaataatgtgcagttagcaacanaattatgcgatctatctt

SEQ ID NO: 12845 - DNA, 282 bp, Glycine max
tcggatatctgatcgagtcccgtaatctattgagacgctcgaaattgaattctgaagctgtgagctaattcaaacgacaataatgttttgcatggatgtctgattgagtcccgtaatacatcgagacgctcgaaattgaattctgaagctctgagctaattcatacgacaataaacttttgctcggatgtctgattgagtcccgtaatctattgagatgctcgaaattgaattttgaacctctgagctaattcaaacgacaagtaacttttactcggatgtc

SEQ ID NO: 12846 - DNA, 423 bp, Glycine max
ctgccgcatgcaagcttataattcaatttcgatcatctcgatatattacgggactcaatcagacatctgagtaaaaaagttattgtcgtttgaatttgctgagagcttcaacattcaatttcgagcgtctcgatgtattacgggactcaatcagacatccgagtaaaatgttagtcatttgaattagctctcagcttcagaattcaatttcgagcgtctcaatagattatgggactcaatcagacatccgcgcaaaaagttattgtcgtttgaatttgctgagagcttcaacattcaatttcgagcgtctcgatgtattacgggactcaatcagacatccgagtaaaatgttattgtcatttgaattatctctcagcttcagaattcaatatcgagcgtctaaatagattatgggactcaatc

SEQ ID NO: 12847 - DNA, 468 bp, Glycine max
  unsure (1)..(468): unsure at all n locations
agcctttatctatggcttcctatggtggtgatcttgttcttgactcatcttctccttgaagtagcgtctccaaccatctttcttccttttccattccactgccattgatcttcaagaagcaaagcactccattgatgaagaagatccaaggcctacaagctntacatggagctatatcatgtggtatcaagagcattttcatctangtgatgttcttttgattcctctatctttttgtttggtcaattcactataattccttgttcttcatcttcttctccatgtatctcctcaattttcttgtagtatggtgttgtttagtgtagatcaaaaaaaataaacccgataaatcttagatctacactcgctctngcatatctatggttgcaaatttatagataaactcttgaatcatgtttgtgttgatttaggtctatcatttttantataatatcttgtttgaacctt

SEQ ID NO: 12848 - DNA, 389 bp, Glycine max
tgtgttctcccttgtagaactactaactgcagtaacagttgcagcccaactattcggtagtgatgacaatagaatcatctcatcctcaaatttaatctgcactgactccaactgggcaagaatagtattaaattcattaatatgatcagttacagagataccttctctcatcttgaggttgaacaaccaacacatcaagtatactttgttggctaccgacaacttctcgtacatatctgataactccttcattaagcctacaatagtcttctcgtttacgatgttgaacgtgacattcttagctaatgtcaatctaatcatgccaagagcttgtcgattagcaagttccattcttcttgcttcatgtcgtctaacttaacccctgatat

SEQ ID NO: 12849 - DNA, 293 bp, Glycine max
tagtttaactattcacacggatgtccgattcgggcgcataatatgtcgacaggctcgaaattgaacaacaaaagctcttgagaaattaactggtaaaactgttccacggatgtccgatatcatgcgaatcacatatcgagacgctctaaattgaacaactgaagcttctgacaaattcaattggcctaacttttcacacggatgtcccatacaggctcataatatatctatacgctctaaattatacatcagaaactctcgcgacatgcaaatagtcataacttttcacactg

SEQ ID NO: 12850 - DNA, 363 bp, Glycine max
  unsure (1)..(363): unsure at all n locations
accttggtgttaanagttatgtatctttgaattgctcgagagctttcatgtttcaatttcgaacatctcgatatattatgcgcccgaatcatacattcgtgtgataaattatgaccaatagaatttctcgagagcttccgttgttcattgtcaagagcctctatattggatgcgcctgaatcggacatcttgagtaaaagttatgactatttgtattattaagagcttacgtgcccaattttgagcgtctagatatgtgattctcatgaatcggacatccgtgtgaagaggtatgactatttgaatttctcaagacctttcgttgttcaattttgagcgtctcgatatgtgattcgcccgaat

SEQ ID NO: 12851 - DNA, 365 bp, Glycine max
  unsure (1)..(365): unsure at all n locations
cgtgcctcttcacgtctggaatatgaatgtagcatatagatcctaagacccttangtgctctgctgatggctgttttccgttccaagcttcaattggagtcttgtcttttacagacttagttggacatctgttgagtatgtaaacagcaatgtggactgcttcatcccaaaatgtgttaggtagtagtctcttcttcttgagcatcgatctagccatctccataactgtgcgattctttctctcagacactccattntgttgaggagaatatgcgactgtaagttgtcgctcaatgctttcatcctcacaaaatctttcaaactcgcgagaggtgtactctttgccgcgatcacttcttagtact

SEQ ID NO: 12852 - DNA, 369 bp, Glycine max
attctcttaattgccttaagcctcaagcgtagtatcgcttgacgatgtcggcgttcacgggtgaatgtagttcctcgtcatccatgtttgtgagcacaaaggccccttcggagaaagctttctttactacgaagggcccttcatagtttggggcccactttcccctatggcttttaaggcatgagaagactttcttcagcaccaggtccccttcactgaacttgcgagggtgtaccttcttgtcgaaagtgttcttcacccgtctctggtacaaacgcccatggctcataacggctagacgcttgccttctatgagaatgagctgatcaaaatgcgcctggtcccactctgaatcctttaatctggact

SEQ ID NO: 12853 - DNA, 310 bp, Glycine max
agcttcccatagttctaattatttcttctacagtagcttgagagacctaaaaatcctcttaattctttgactgtcttaggtcttgggcactgttggattgccttaattttatcaggatctggatgcacccctttggcaaaaatcaaatgtcccacgtaattgattttggtcgtgccaaagctacattttttgtagttgagtgtcaagccgtgttcttgtagtatttgtagtgtagtgtgcagacattgaatgtgttctgaccatgtattggtatagaccaagatgtcatcaaagaaaatcaaaatgaact

SEQ ID NO: 12854 - DNA, 332 bp, Glycine max
tgccttttggctctttttttctgaacccaaatcataccacaggtttgggatcctaataacttgtgagaaaaaaatccatggggtaaattgattcaaagtaaaactcaagtaactccattttgtatcttggatctaaaacagtagcaactcctatgatcacatgaatgacactccaataagaatcaaatttgtctaacatcttttttgccattttttgaatcacttcattaggggaattgacccattcaaataaagccatcttgatctcacaaatttgaggaaaataaatgttagcagttggatattttgtgcctgaaatcatttatgtaata

SEQ ID NO: 12855 - DNA, 324 bp, Glycine max
agcttgtagcaaatgcatttctttataacttttagctcggatatccgattgagtcccgtaatacatcaagacgctcgaaattgaatacagaagctcttagcaaattaaaacgacaataactttctactcggatgtccgattgggtcacgtaatatatcgagtcgctcgaactgaatacagaaggtgagaactaattcaaacgacaatgacttttaactcggatatcccattgagtcccgtaatatatcaagatgttcgaaatggaatacagaagctgtgagaaaattcaaacgacaataactttttactcggatattcgattga

SEQ ID NO: 12856 - DNA, 403 bp, Glycine max
  unsure (1)..(403): unsure at all n locations
ntgagcaaattcaatcgacaataacttttttactctgatgtctgattgagtcccgtaatatatcgagacgctcggacttgaacgccgaagctctgagcaaattcaaacgacaataactttttactcggatgtctgattcactcccgtaatatgtcgagacgctcgaaattgaataccgaagctctgagcaaattcaaacgacaataactttttactcggatgtctgattcagtcccgtaatatatcgaaacgctcgatattgaatgttgaagctctgagcaacttcaaacgacaataactttttactcagatgtctgattgagacccgtcatatatcaagacgctcgaaattgcataccgaagctctgacaatactcaaacgacaattacattttactcggat

SEQ ID NO: 12857 - DNA, 334 bp, Glycine max
agcttcgataatcaatttcatcgtcttgatatattactagactcagtcagacatccgagtaaaatgttattgtcgtttgaatttgctaagagcttcgataatcaatttcgaccgtctccatatattacgggactcagtcagacaaccgagtgaaaagttattgtcgtttgaatttgctaagagcttcgataatcaatttcgaccgtctccatatattacgggactcagtcagacaaccgagtgaaaagttattgtcgtttgaatttgctaagagcttcgataatcaatttcgaccgtctccattatttacgggacttaatcagacatccgagta

SEQ ID NO: 12858 - DNA, 329 bp, Glycine max
agcttattaaaaatatgtatactaaaacaatatacatgtaacacctaaaagtttaaacaaaaaatattgcttcaaaacgctttaatttaatttattttagaaatacacatcactttttttaaccgttacttataaataataaaaacaactttctatactatttttttacaaaacaaaatgtgatagttggaaaatgctaaatagttgcatgaaattaaaataaatgcaaatgtagagtaattcaatttctatacataaataaaatgaaacttgcagtgtcacagagaaatatatggatacaacccataatagtgtgataataaacaaaa

SEQ ID NO: 12859 - DNA, 273 bp, Glycine max
agcttctaaatggatctcttcttgctcacttagtttcaacttcctttcctctccaacccgatcaatagagaagttgtaggtctttacagcccagtaggctttgtgctctatctctacaggaagatgacatgcctttccaaagacaacccaataaggagacattcctatgggtgctttgtaggcaatcttatgcgcccaaagagcatcatcctgcctagtgctccaatctttgctgttgggctgcaccatcttcttcctgatgattattattcg

SEQ ID NO: 12860 - DNA, 333 bp, Glycine max
agcttcttattcttatattagttttaaaaatattcaataattttcattctaatgatagaattcaacttgaatttttaacttatttttattgagtctcattttatcttttcccacacacaacaattcaaattttgacttgggaaaattatttttccaatgattaagcaaccttgcttgtagtcatttatacaagcaacttatgtaagcattttaaagaattcattaatttgttctaatagtattctcaggtcagttaactacaaacaattatgatttcttcaggacacacatattctccttgattctcttgaaattgaactcgttatgtacctt

SEQ ID NO: 12861 - DNA, 335 bp, Glycine max
  unsure (1)..(335): unsure at all n locations
ntgaaatggacattgaggtatctaaatggatctttgttaagtggattaaggtataagaagatagcacatgaggtagcaatcacaggctatgtagatgcagattttgcaggaaatgtagacacaagaaagtccttaactggatatgtgtttactttgtttggagcaacaatcagttggaaagcaaatcaacaatcagttgttgctctttcaacaactgaagcagagtacatggccctagctgaaggagtgaaagaagcaatttggctaaaaggaatggtatatgaactcggaatagcacaaccttgtgcacaattactgtgaagtcaaaggccatt

SEQ ID NO: 12862 - DNA, 372 bp, Glycine max
  unsure (1)..(372): unsure at all n locations
tggagaaggtggctntggaccagtattctttgtgttatataaaactggtatcctgaacttcttctattttcctttaaaactttctaaatatagcagaagattatttttcagggaacattgatagatgggaaagtgatagctgtgaaaaggctttcaaagaagtccaaacaagggctggatgagttaaaaaatgaggtggcactgattgccaaacttcagcaccgtaatcttgtaaagcttcttggctgctgcattgaaggagaagaaaaaatgttaatttatgaatacatgcccaacctcagcttggactgctttctttttgagtggaccccttacgatgttattctaaacatcttagataatcagcatatt

SEQ ID NO: 12863 - DNA, 328 bp, Glycine max
agcttctaaatttttatttgatgaagctctgataccacttgttggacaagtggccttagatatcttaagaagggagggggttgaattaagataccacaaactatttccccaattaaaaattttactcttctttaatgaaaatttcaatgcactcttattatgaattattgtaagataattcaaactaaacttccttaatgccaaagataaacaacaataaataaagaattttaagagaagagaaagtgcaaactcaggttttttactagttcagccacgccctgtgcctacgtctagtccccaagcaacccgcttgagatttccacta

SEQ ID NO: 12864 - DNA, 373 bp, Glycine max
tgcctacaagattgacttgcctagtgagtattatgtaagtgccactttcaatgtgtctgatctatctctttttgatgcagatggaggagccttggatttgaggacaaatccttttcaaggagggagtgatgaagacataaccaagggcaaggaccatgaagcacttgaaggtcccatgaccagaggcagacttaaacaagcccaacacatcatagagacaaggctggtcatttgtatagctgtcattgatgatgattgaaggcccaagtggagaaagatgaaagcccacacgcagaggctctaccaagactactaattgttgctgaaggcgcatactaacttgaaggcccaagctaaataagtgtttagttat

SEQ ID NO: 12865 - DNA, 328 bp, Glycine max
agctttgagccaactcttacgacaataaccttttactcgaatggctgattgagtcccgtaacatatcgagacgctcgaaattgaatgttgaagctctcatccaattcaaacgacaataactttttactcggatgtctgattgagtctcgtcatatatcgagacgcttgaaattgaatgtcgaagctcttagccaacacaaacgacaataactttttactcggatgtctaattgagtcccgtaacatatcgagacgctcgaaattgaatgttgaagctctcagccaattcaaacgacaataactttttacacggatgcctgattgagtc

SEQ ID NO: 12866 - DNA, 330 bp, Glycine max
agcttcagatatgttccttatgcttcatgtaaactcggccaaaatcgttaagggaacctcggatccctgctatatacaatactataaggaattccatgcaacctagctacttgcttgatgtacaaatccacgagtttttccgttctatacgatatatacaccggaataaaatgagcagatttggtgagtcgaactactatgacccacacagcatcatgtccacaactaggctagcgtcaactaaatacagaatccatacatatgctctcccagcttccattctggaagttacaatggctacatttttgctgatggatactggtgtacaga

SEQ ID NO: 12867 - DNA, 320 bp, Glycine max
acctgttcgaaagagtgtctgcccttcttgaagatgcccactgacgaattaactccttatcttcttcaagataatcactttttactcgttcattgaaattggcccattcatctacagtacattaatgacatacagtaaatgagtgcacatgtactaaagaagggtagaaatgtatggaagcatataaaatactcaccaggatatatctttttcaggtagaataaaattgatattccatcttcattttccttattgagttcctcatcagaatatacaacatcttctttgaaatatggtgtcagaacactgaagcaatactc

SEQ ID NO: 12868 - DNA, 360 bp, Glycine max
tcaaccacagcagaacaattatgacctctccaacaacagatacaaccctggatggaggaatcaccctaatctcagatggtctagcccttaacagcaacaacagcagcctgctccttccttccaaaatgttgttggcccaagtagaccatacattcctccaccaatccaacaacagcaacagccccagaaataaccaacagttgaggcccctccgcaaccttccctcgaagaacttgtgaggcaaatgactatgcaaaacatgcagtttcaacaagagaccatagcctccattcagagcttaactaatcagatgggacaatcggctacataattaaatcaacaacagtgccagaattctga

SEQ ID NO: 12869 - DNA, 459 bp, Glycine max
tataaaactcagcttcttacatagtccgcctttgcttgaccttcttttttcttaaaaacagaaacattaggcataggcaaaagatcaagaggagttagtggattaaaaccataaacaacttcaaaaggagaacaattagtggtgctatgaacagctctattgtaagcaaattcaacatggggtaaacaagcttcccaagtttttaagttcttcctcaaaactgtcctaagcaaagttcccaaagtcctattaacaacttccgtttgcccatcggtttgtgggtgacaagtggttgaaaataacaatttagtgcccaacttgctccacaaagtcctccaaaatttttttaggaacttagagtccctatcactaacaatgctccttggcagaccatggagtctcacaatctccttgaaaaacaaatcagccacatgggaagcatcatcaactgttttacat

SEQ ID NO: 12870 - DNA, 398 bp, Glycine max
  unsure (1)..(398): unsure at all n locations
atccaaaaaatgtgagtgccatcaccttgaggtttggcaagcaaattgaagtgcctccaccagtagtcatgatgcaagctccattggagcttgtaggcctaggatcttcttcatcaatggattcctttgcttcttggaagataaatggcagcggaatggagaaggaagagagagaggagacgccacttcaaggagaagatgagtctagaagaagctcaccaccataggaggccatggataagagcttggaggaagaaggagatgaatgaagggagagggagagaagagcacgaaattttgtgctcaaaaagagctctgaaatctgaagttaatattcaaatgatcaaagntcaaaaaaatgcacacacatgacctctatttatagcctaagtgtcaca

SEQ ID NO: 12871 - DNA, 392 bp, Glycine max
tctcgtcattatatctagcagtctttcacttgatcttgaggataagttgttgcttgttttgagaggccaaaagaagttgttgcttctcgtcattataattcttcctttgatgcatgtttggatagcctctctagagttcttgaccgatgcattgagactaaccttgttcttaactttgaaaattgtcattttatggtccatgaatgtatagtcttaggacatttggtctctaatagaggtattgaggtcaataaggccaagatcgatgttattactttttttccttacctcgcttctgtgtaggaagtactttcttttcttggacatgcatgtttttacatgagattcatccaagaatttagcaagattgccctgccattattcaagcttct

SEQ ID NO: 12872 - DNA, 327 bp, Glycine max
agcttagagaagatacattctctcaaataattcgtcaatcaactcatccactgttggaattggaaaactatccttgatagttattgcgttaagagctctataatccgtacatacccgccacgaaccatctttcttcttcacaagaattattggtgaagagaaaggacttttgctgggttgtataattccttcttgcagtatacctgccactaatttttcgatttcctctttttggctatgaggataacgatatggctttactttaactggtactgaatcttccattaatggaataaaatgatcttgtgcttgaggaggtggcaatga

SEQ ID NO: 12873 - DNA, 331 bp, Glycine max
agctttgatctaccaccttcgtctccaccatcattttagtttttctcttattttaatattagtagtactttgatttccagccgtgtatttcgctatattattatgacatttgaacaatttagtaactctttatttgcatggtgtgtttgaacaattatgaattatgttatatgactatgtgatttttctatatatttgatctagtcatgtttcttgcttcatgattagtttatatttctccatgattgttgtgtgaatgattagttgtatttgtatgtttcatacttgttacgcactttggctttttgttgatgccaaagggggagagaaa

SEQ ID NO: 12874 - DNA, 438 bp, Glycine max
  unsure (1)..(438): unsure at all n locations
gagtctccttacattaaaagatcttccttttttgttggaagaaaaccatcatcctccacttcactagaggaactatgagaactcttagatgactcactatccacctctccattctccaacataatcatggtccttttgttaggacattgggatgcaatatgacccttttccaaacaattaaagcatttaatggaactagttatattgggaaggggttgagtaggagaagtaggattacatcttgaagacttcctttcaagatgctgtgaagaagaaccctccttcttagaagtgtctttatccttccaatttgaaagggtagtcttcttgtaggtttgtttcctcttcaattgttgctccactttcatagtcctatgtantaagtcatccatgttgttgtagctttgaagctctacaacatcttgaatgtccctattc

SEQ ID NO: 12875 - DNA, 364 bp, Glycine max
ttcttgactcatcttccccttgacatgttttcttcttcacctttcctccttctccattacgctgcctttgatcttcaaaaaataaaggactccattgatgaagatacaaggcctacaagctctacatggagctaaatcatgtggtatcaaagcatcttcatctaagtgattatctttagttatctctatcttttgatcagtcaattcactttaattcctttctttatcgaataatccatgtatctcttccattgaggattgaggctgtttaaagtacataacaaaaataaaccgattaaatcttagatctacacttgttcttgcatttctatggttcaaaatttataaatccactattaaatca

SEQ ID NO: 12876 - DNA, 330 bp, Glycine max
agctttaagatacttcttttacttgcatgtagtgtgttagtgcttagctctaccgagtgtttaaaagattggctaagattttgttaaaacataagcacttagacaatgaaggaaagctggagttgctgcacatgatgtccaacgctatgtcaaggaatcagattgggctgcacaatgcacaaggcaagataaaatgtcaaatgatgaattgaagctgcaggatccacgatgtcggatacaatgtccaggacatcctgctcgaaaatactggtcacataaatctgttatatctttaacagattgtgcaggatccacgatgtcggatacaat

SEQ ID NO: 12877 - DNA, 402 bp, Glycine max
tcatgagagagtcttagatcagattgagagtttattttatagctatgctaaacaagccaactaatggagaaagaatgttgtctttgaacccggagattgtgtttgggtgcacatgacaaaagataggtttgcggatcaaaggaaatcaaagcttcaaccaaggggagatggaccatttcaagtgcttgaaagaatcaatgacaatgcttacaaagttgagctgcccgatgagtataatgttaattccaccttcaatgtctctgatttatctctttatgatgcatatggagaatccgatttgaggacaaatccttctcaagagggagagaatgatgaggacatgaccaagagcaaggtcaaggatccacttgaaggacttggaggacctatgacaagggctag

SEQ ID NO: 12878 - DNA, 420 bp, Glycine max
tttaaataggctcgtgggccaagccaggcttttatgtatgccgagccgagccgttaaaaaaagcctatgacaggtaatgagctcaagccttacgtattcaactcaagccaagctcaagcctagtaaagcttggcctggcttggctcattttcacccctagttgcgacataattcatacaaagcataagaataacaagctaaaagcctaagaataacctactttctcacggaacaaccgctccaattcgtgctggaatctcttttcatatgcatagtagtagtagtagtaataggtttttatacattgacatgggcttggacttgtcgtgacacccttacttaagtggggctccttctttcaatcttggttgcccactgtcttcacttgcttaagtgatgcttaaacgcctaaattggctt

SEQ ID NO: 12879 - DNA, 331 bp, Glycine max
agcttctattctcaatttttagtgtctcgatatattacgggactcaatcggacatccgagtaaaaacttattgtcgtttgaatttgcttagagcatatattctcaatttcgagtgtctcgatgtattacgtgactcaatcgaacatccgagtaaaatgttattgcagtttgcatttgcaacaagcttctgatttcaatttggatcgtctcgatctatgatgggactcaatcggacatccgagttaaaagttattgcggtttgcatttgctacgagcttccgctttcaactacgagcgtcttgatatattactggactcaatcgaacatcag

SEQ ID NO: 12880 - DNA, 345 bp, Glycine max
tgccgcatgccagcttgcgggattcagttttatttattttgccggagatgtcgatgatagaaaaagtactaccggacttgtattttttatgggcgattgaggttttacatggaggtctaagaagcaaggcattgtgacactttctactagtgaagccgagtatgtatgctgcaacttcttgcacatgtcatgccatttggctaagaagattgttggaggaacttcagttgttgcaaaaggaaagcacaaagatctatgctgataatagatctgcccaagagcttgccaagaatccggcgttccatgaacgaagtaagcatatagatacaaggtatcatttcatta

SEQ ID NO: 12881 - DNA, 331 bp, Glycine max
agcttcattaagatttttcctcaagaagcttcctcgtggcttctttgagaagctagatccttatctacccacacccctctattaactaaattaacctccttgaaaataattacgaataaaaataatgcaacaaataatcaaacatcaaacataattactaataatatataaatatatatatcagggtgttacaactctcccacccttttagaaatttcgtcctcgaaatttaccttactcaaacaaggatgggtgagcttatcgcatttaactttctaattcccatgtggcatcttctcctgatgcacctccccagatcaccttgaccaat

SEQ ID NO: 12882 - DNA, 465 bp, Glycine max
ttagaggcattatctttatggatctaaatttgaggtgtttagtgaccataagagccttatttacctgtttgataagaaagaacttaacatgagacagacgagatggttatagttccttaagggttacgattttgagcttagctatcacccaagttaagcctacgtattacctgataccttcaataaaaaatccctttaggtgtttgctttgatggttaaagagttagatatcttatagtgatttagagacatgagtttagcatgtgagatcacctttggtagcattaagttgggtatgttgatagtcactactgagctcttgagcgagatccaggagggttgaactctgactccattcttgttagcccacttagagtctatagctattgggagagagagtatttttatagtgggacttgatggagtcttgagattcaatgatagggtgtgtgttcctagtgtacc

SEQ ID NO: 12883 - DNA, 558 bp, Glycine max
ttagcaactctttctttttgtttagtcaaaacttctaatgctcttaatctctcctcatctaaatcaaccaactcatctgacatcattttccaataatggtcgattggaatgtccatttgcttttgtaccctggctgattgcaaatgtatttcgaccggaagtacagcatcatgtccataagtcagtcaaaatggggtagtattagttgattccttaggagaatttctacatgcccatagaacttgatctaacgttttattccaatttcttggcttttgggcaatgtgttttttaatcaagttaattacaatcttattggctgcttcgacctgaccatttgcttgcgcgtaatatggtgttgaggttaataattgaaagccagttttttgggcaaattcttgcatttttcgtccagtaaaaactgaaccttgatcagtggtaattgtttcaggaataccatacctataaataatatgattttgaatgaaactaattactgcttcctgatcaacatttggcaaagggactgcttccatccattttgtaagtaatcgatac

SEQ ID NO: 12884 - DNA, 522 bp, Glycine max
taacagcaataaaaagcatcaaagtaattcatagatttactcacattaactaccacaagcacgattgacagtgaaaaatcataagatttgatttaatgcctaattgcacacctgacatccagtagatcaactctaactcatgatgataagaaaggaaacatgcacaacaacaatttcattaccttcctctaatgaaagctgaattgatctcttctctaactcaacagcatgcttgctaagttcaactgaggacagggagcgaagcactgccaaaggatgagatatcagctatataaaatatcaagaacttcataagaaagcatttgagggattattttaaggttcctggacatactttggatatattcttcttgatctgattggtccaatttcctcaaaaacatctgcaattgttggtatcgctctttccagtgcaaattttttaatccctttggattaccaatggtagtagggccagaaaaagctgtcacataattggactcaactggtgctaacttcatg

SEQ ID NO: 12885 - DNA, 554 bp, Glycine max
tcacatggagctacatcatgtggtatcatagctcaccatcaaaacttggggtgttacaatcaccaccaccaccaccatcaatgtctctgccaccatcattgtccctgccaccaccatcattattaacaataccacctctgtcattgccaccacaaccactaccaaggtcattgcaaccaccaccacaccgccatcaccaatatcgctacctccaccaccccaccatcgacattgctaccacccccactatcgctgccaccacctaaagtgacaaattaccaagaagaggagttgaattggggttttgaaaactttttgatcctttgaaataaaaggtttatgatgatattttaaaattaaaaactattttgaactcacaatacaaattcaagttgttcaaaatgcacaaatatttgcatactggttcaccttaaccttgggctatgtccaatcctcatccttcaagaggagaatttatctaacacaaccaaattacaactataccggcaaacactaaatttcacatccttaacagttcctcactggactttaaa

SEQ ID NO: 12886 - DNA, 608 bp, Glycine max
  unsure (1)..(608): unsure at all n locations
cacagcttgatgagaaataaatgttttgcttggtacatcatctatgctacttaatgagatcattacattatttgtgtcttaataggaagtgaaggacatacattagaggaagccaaatctatcaatctatccttgagtgcattggggaagtgtattaacgcacttgcagagaatagtgcacatgtgccatttcgtgactcagcttactagattgctacgtgattcatttggaggtaagattcagtgagtataataattcatattttgtctttgttcatttatacaaagcagtaagatttggcaaaatactcttcctaactttcaggacgtgagacagatgaagtcgagcccataccggatgctctgcctaatctggaacagtaagctgcctaatgtgtctttgatgcattntagaagtctaatcggctaaaaaataaaagcaatcactccataactgatgtattttattggaaatgttaattaaatttggtttgatataaaggaaactaattaaaatggatatttgaaaaataattatttanattaaaatggatatttgaaaattaattatttaaattaaattcattttgctagtaaatctaaaatta

SEQ ID NO: 12887 - DNA, 336 bp, Glycine max
gagccaaaggatcccctcgtctcaaccctctttgacgtttgaattcagcagaaggactgccattcacaatgacagacatagaagctgaagtgaggcaacccctgatccacctaatccacctctcatgaaatcccattattctgagcatatatagaggaaaatgcccagaaacagaatcgtaagccttctcaaagtacactctgaaaaccatgccgggtctcttagatctcctaacctcctcaaccacttaattaaccaccaagactccatgtagcagttgtttcctttaataaatggtgactgcctttcattaataatctgaagcatgaactttct

SEQ ID NO: 12888 - DNA, 544 bp, Glycine max
tgttaattgcttcccttgattaagactatatcatccgcaaaaagcatgcaatatgggataatcttttgtatgtccttgataagtacatccaagactaggtgaaacaagtaaggacttaaagctgagccttgatgtaatccaatcacaattggaaagtccttatttcacctcaaggagttctcacattagtagtcaccccatcatacatgtcttgtatagcttggatataagccatgtgtacgtcttttttctccaaagtcttccacaacgtatctcttgggacacgatcataagctttttccaagtcaagagaaaccatgcgttaggatataagtagaagggaaagtcaattagcatagttagactattaataagttagttactacagttaggatattgattagttggttaagtggttagttagttagatggaggggtttgttacatataaataggggaagaaagataggaaaatgggagaacttatcattgggagattgaacattatctctttgtgaaaggagaaaatttttgtgaagggaaa

SEQ ID NO: 12889 - DNA, 493 bp, Glycine max
agctttgaaaaatgatttctatacacaagttagtcgttttatgcgactaacagtcaataattcctaattctcttctaatattaaagaagctttctttaggcaggggtttggcaaagatatcggccaattgattctttgtttcaacaaattctagtacacaatcaccctttagaacatgatctctaagaaattgatgcctaatttcaatatgttctgttctagagtgcagaataggatttttggataggttgattgcaccgtattgtcacaacggataggaatatgatcaagcattataccataatcagagagttgttgtctcatccataagatttgtgcacaacaactttcagcagaaatatattccgcttctatagttgatgaggcaacactattttgctttttgttataccaagatactagtgttgaaccaataaagaggcgagttccactagtcattatccttttgacgacacttaagcgggattctttg

SEQ ID NO: 12890 - DNA, 522 bp, Glycine max
ggagtttagagaagggagcacaaatttatgccaaaaaaggaagggtatcaagtttaataaaccaaaaccttgaggggggtcaatgtaatatactcatttttttaaccaaaatacattctcaattattttaacatttattatgatcaacatctcattatatgtagctaggatggccacggttcaaatagtgtgcaatacacttggacaattgtgttttaaacatttattattgtttataacacttgaatataaagttattttgaaaacgtacaatttaatgcgatttgtatattatgcaaaactatttatcacttacttccaaaattcatttaataagggacagttaatataatttgattcaaaattatctcatcaattttcattaattatatttttaactttgaagaaattatggttttgtttaaatattatttcttttgtttttggggattcagattttatttcttttaacgcatcaagtttttattttagtaacaattaaaaattatatttttgtaacat

SEQ ID NO: 12891 - DNA, 578 bp, Glycine max
agcttggtcttaagatatccagcttagactccagagtgtctgcaagttgaagaattcaaaactaaagcagtggtgaatttatatcaagccctagtactctcgacatattccattgctttcctcttcacagattcaatccgttcttgatcaccttgggacttctcataataaagatactttttgaataagaactgtcaatcaagacaacaaaaccctaagtcagtctgactggaaaaatacaaaacaatgtcagtaaaattggtaatatagatatgcccaaaccttcatctttttcggtgggaggctcagactaacagccctttcaaacagtgcacgaattatatctttgtctttatgttgaatttcctgtagagtacacgagagaatgttacgttcaaaataatatacaaacgcaaagaatatgagatggagaaggatatacttgatcaagataaacactccataagtctgttctctttgggtactcccgtaggattttttcaaacatggatcgccctcgatctagaaccccaactttgaattcaagaatagctgtctgagagaaaaaattaatatgc

SEQ ID NO: 12892 - DNA, 528 bp, Glycine max
  unsure (1)..(528): unsure at all n locations
agcttgtttaccccatgttgaatttgcttacaatagatctgttcatagcaccactaattgttctccttttgaagttgtttatggttttaacccactaactcctcttgatcttttgcctatgcctaatgtttctgtttttaagcataaagaaggtcaagcaaaggcggactatgtgaagaagcttcatgagagagtcaaagatcaaattgagaggaaaaataaaagctatgctaaacaagccaacaaagggagaaagaaggctgtcttcgaacccggagattgggtttgggtgcacctgagaaaagaaaggtttccggaacaaaggaaatcaaagcttcaaccaaggggagatggaccatttcaagtgcttgaaagaatcaatgacaatgcttacaaagttgagctgcccggtgagtattaatgtagttccaccttcaatgtctctgatttatctctttttgatgcagatggagaatccgatttgaggacaaatccttctcaagagggagagaatgatgangacatgtt

SEQ ID NO: 12893 - DNA, 446 bp, Glycine max
  unsure (1)..(446): unsure at all n locations
agctttgatgtttgtgttgaatgcattaaagatttatctaccaaaagcaagaaattaagtgcatatagggctacagacgtcttggaatagatacatacggacatttgtgggtcatttcatacaccttcatggaatggtcaacaatattttatatcattcatagacgattactccatatatgcatacttgtttcttatacatgaaaagtcacaatctctggatgcgttcacaacatttaaagctgaggttgaaaatctactcaccaaaacaataaagtgtgtcacatctgatcgtggtggtgaataatatggcagatatgactgttcacgtgaacaacgcccaaggccttttgctatgtacctagaggaatgtggaatcatcccatagtacaccatgtcngggtcacctatcatgaatggtgtggctgaaagacgaaacacaactct

SEQ ID NO: 12894 - DNA, 481 bp, Glycine max
tgcataacactttaactgtggggcaatctttttggatgtttatcttgaggcttgggaaatactgtccaaaatgctgagccacattgaccaatgctaatgccactttatccattacttgatactgagtttctggatcttgtgatattcaacagacgaagtatattggtcttagctcattattttcctcttggaggaggactgcacttatggcttttgcagagaccgagaagaatactatgagtctcttactagtgcttggtttcaaaagcactacaggggttgcaagcgtaactgtcaactgctgaaacatttcttcacactcatcgttccattgaaagtttttctttctaagatgattcatgattggtttggttatctcgatgatccttggtaagaatctggataatgaggttattcttctaactaacctttgagcttctttcacgtttttaagactcctcatcttcagagtggcttgaca

SEQ ID NO: 12895 - DNA, 458 bp, Glycine max
agcttcttagtctcacctgatgaattcgtggctacttcattctctcctctaatgacaatagcatcacttctggcactaaattgttgggagtttgaagccatattctcaattaaatttctggcttcagtaagggtcatgtctccaagggctccaccactggcagcatctatcatacttctctccatgttgctgagtccttcataaaaatattggagaagaaactgatctaaaatctggcgctgagggcaactggcacataactccataaatctctcccagcattcatataggctctctgcactgagtcgtctaatacctgaaatatcctttctgatggttgtggtcttggaaatacggaaatttttttctaaaaatactctcttgaggtcattccagctcgcgatggaccttggagcaaggtaatatacccagtcctttgccactccctctaaagaatg

SEQ ID NO: 12896 - DNA, 602 bp, Glycine max
  unsure (1)..(602): unsure at all n locations
agcttcatagggagccatgccgacggtagaatgaaaactattgttataagtgaactctatcaatggaagaaaactctcccagcttcccttctgctctaagatacatgctcttaaaaggtcctccaatgactgaatggttcgttcagtttggccatcagtctgaagatagtaggctgaactcagtctaagcttggttcccaacactctgttcaagctctcccaaaatctagaggtaaatctaggatctctatcagatactatgctagatggcacaccatgcagcctacaacctcacttatatacaaggtggtcaacttctccaaggaaaatctaatattaatgggaatgaagtgagcaaacttagtgaatctgtcaaccacaacccaaatagaatccaaacctctaggggttctatgtagtcctaccacaaaatccatggaaatattgtcccactttcattgggatatttctaaaagatgtaacttccctgaaggtctctgattgtctatcttagccttctgacagactangccaccaaaacatcatctttaaatcctgatacatcttggtagcactaggatggatgctcanattactcctat

SEQ ID NO: 12897 - DNA, 560 bp, Glycine max
taagctccttcaactgcacaagactcttattatttgaagagtatccttatggaaccttcacccgacaaagacactgacaaaaagttatcttctcctttttggacaaagtatggcaagctgggggtaagtaaattttcttcccatcagaccttggatgcaattgtgatcgtatccccatttcagcttgatcttgatgggtattcaagccatcttttgtcttgccttgaatgttaaggagcgtcccaatcacactgtcataaacatttttctccacatgcataacatcaatacaatgtctaacgtctagatcagaccaatacggaagatcaaagaaaatggacctcttcttccatatgcaactcttacttttatccttcttttgggtctttccaaatacagtattcaggtgttgaacccgctgatatacctgctcaccagtcaatgttatcggctcaatatcgtgctcttgacttccattaaaagcttttttcagtcgtctataaggatgattaggtgttagaaaatggcaatgcctactgtagactatttttcttccatgt

SEQ ID NO: 12898 - DNA, 555 bp, Glycine max
  unsure (1)..(555): unsure at all n locations
tcatagggagccatgccaatggtagagtgtaaactgttattataagtgaactctatgaatggaagaaaactctctcagcttcccttctgctctaagacacacgccctcaaaaggtcctccaatgactgaatggtccattcagtttggccatcagtctgaggatggtagactaaacttagtctaagcttggtccccaatgctctgttcaagctctcccaaaatctagatggcacaccatgtaacctgacaatctcacttatatacagggaggtcaacttctccaagaaaaatctgatattaatgggaatgaaatgagaagacttattcagtctatcaacaataacccagatagaatctaaacctctaggggttctaggtagtcctaccacgaaatctatggaaatattgtcccacttccactggggtatctctaagggttgtaacttccctgaaggtctctggcgttctatcttagccttttgacagactangcatgcatagacaaactcactaacctctctcttcatgttgggccaccaaaacatcatttttaac

SEQ ID NO: 12899 - DNA, 530 bp, Glycine max
  unsure (1)..(530): unsure at all n locations
agctataagataccccttttacttgcatgtagtgtgttagtgcttanctctaccgagtgtttaaaagattggctaagattttgttaaaacataagcacttatacaatgaaggaaagctggagttgctgcacatgatgttcaacgctatgtcaaagaatcagattgggctgcacaatgcacaaggcaagataaaatgtcaaatgatgaattgaagctgcaggatccacgatgtcggatacaatgtccaggacatcctgctcgaaaatactggtcacataaatctgttatatctttaacagattgtgcaggatccacgatgtcggatacaatgtccaggacatcctgcccgaaaatactggacacataaatctgttatctctctaacagattattgtgcagttagcaacagattagacgatctatctctatgaacgaattaaaagatgattaaagtttgaattacaaacttgaatagttcgttcagggattaaagattaaagataacaactacaagatcaaactttatcttt

SEQ ID NO: 12900 - DNA, 558 bp, Glycine max
tgacacttgtggcatttccatacatgaatacaacagttattctccatcgtgagccaaaaatatccatcttttagaatatttcgggccttggcatgcccattggcatgggtgacaaatgagccttcatgcacctcccttagtatctgctcaacttcacttgcatccatgcatcggagtaaaaccatatcatggtttcttttgtatagcacgtccctattcaaaaataagttagccaccaacctccgtagtgttctcttgtcattctcaaaggccccatgtgggtactctttgtccttaatatatctctggatattgaaataccaaggtttgccatcattttcctcctatatcaaacaacagtgagcaggctcactgtgacatctaatttctatgcatggcaagtccccatgaaggctcacctggaacatagatgacaaagtagcaagggtgttggccatttggttttcctatctggggatgtgatgaaatgatatatcatcaaagtgttccatcaactctctgaagcagccttgataaaggattaacttatggtctctt

SEQ ID NO: 12901 - DNA, 562 bp, Glycine max
agcttctaaactttatacaagaatgaagctttgataccacttgttagacaagtggcctcaaatatcttaagaataggggggttgaattaagatattacaaactattttcccaattaaaattctactttgattttaatgcaagttccaagttcccttaaagatgagtctctaaaagatgattcaaaataaacaatctgaacgtaaatgtaaagcaataataaataaagaagtttaagggaagagaaagtgcaaaactcagttttatactggttcagccacacccttgtgcctacgtccagtccccaagcaacccgcttgagagttccactatctggtaaaaaccctttacaagttctgaaccacaccaggacagtgattcctttgtgttcagattgctttacaacaagagaccctcggtctcttaattccttttcagaagtatgaagatgagaaaaagaaatctttcttgaaagagatagattgcataatgaagcactccaataattccttattgatttgcagtattttgccaacggatgttttacaagattagacatttttt

SEQ ID NO: 12902 - DNA, 561 bp, Glycine max
tgttcttgactcatcttccccttgaaatgacgtctccaatcacctttcctccttctccattacgctgcctttgatcttcaagaagtaaaggactccattgatgaagatacaaggcctacaagctctacatggagctaaatcatgtggtatcaaagcatcttcatctaggtgattttcttttgttttctctatcttttgttcagtcaattcactttaattcctttctttatcgtcttatccatgtatctcttccattgtggattggtgctgtttaaagtagataaaaaaaataaaccgattaaatcttagatctacacttgttcttgcatttctatggttcaaaatttataaatctactattaaatcatgtttttgtgtttattttaggttctatcatttttcagtcataatcttcttgtgttgaatcttagatctcaattttcttgcaaaatattgattagaaaagaaaacacaaaaatctaagtgtaaatcacactactttaaaaagcacattctatgtcggttgtttaccacattctatgtcggttataaaccgtcgtc

SEQ ID NO: 12903 - DNA, 565 bp, Glycine max
tcttagtttcagatgatgcagatgggtttgtagctacctcatgcactcctctaatgactatggcatcatttctggcgctaaactgctgggagttggaagccatcttctcaattaaatttctggcttcagcaggagtcatgtctccaagggttccaccactggcagcatctatcatacatctctccatattactgagtccttcataaaaatattggagaagaagctgttctgaaatctgatggtgggggcaactggcacatagtttcttaaatctctcccagtactcatacaggctctctccactgagttgtctaatacctgagatatccttcctgatggctgtggtcctggaagcagggaaatttttttctaagaatactctcttaaggtcatcccagctcgtgatggaccttggagcaaggtaatacagccagtcctttgccactccctctaatgaatgaggaaaagccttcagaaatatgtgatcctcttggacatctgggggtttcatggtgcagcagacaatgtgaaattcttttcaatgtttgtgcgggtcttcacctac

SEQ ID NO: 12904 - DNA, 621 bp, Glycine max
agcttgatgcctctttgtataaccctttttacttttgtgatctttccaatatcttctagcatcaagtcaagacaatgtgcaacacatggagtccaaaatatttttggtctcgtgacttgtaaaattttacctagaaagaccaaaatcaataaacttgtatgagtagtgtaacaattaaaagttataactataaaaaaaacttcattaagcatgattgaattctcacccgccaacacataattacttccattgtccgtcaccacttgaataacattcttttctccaatctcctcaacaaagctatccaaaagctcaaagatcttctgaccagtcttcatgtattcagaagcatccacactcctcacaaattatgttcccaacgaacaatttaccaaaaagttaatcaaagttctattcttccaatccgtccaaccaactgacataattgaacacccatatttgattcactcctcctcacgacccctcaataagcccttcgtgtattccaactcttttttaaggagtggaactctcaattcatgatagcttggaggctttaaatgaggaaccataggttcaatcgcctcaatcatcaacttgaaactttttgatttagcaaca

SEQ ID NO: 12905 - DNA, 516 bp, Glycine max
gatgatgcgctccctgagaagttggatccaatggggaatagagatcattatggagaagaaaggaggagaacaaggaatgatggtgttcctacaccaaacccaattgatgggattaaactcaacattcctccatttaaaggaaagaatgatccggaggcctacttggagtgggaaatgaaaatagagcatgtattctcatgcaacaactgaggaggacaaaaaggtgaagcttgccgccacggaattttccgactatgctcttgtgtggtggaacaagcctccaaaggagagagcatgaaatgaagagccaatggttgatacatggacggagatgaaaaagatcatgaggaagcggtatgtgccggctaattacttcagggactttgaaattcaagctccaaaaactaacccaaggcaacaagggggttgaagagtatttcaaggaaatggatgtgctcctgattcaagcaaatattgaagaatatgaggaggtaactatggctcgatttcttaatg

SEQ ID NO: 12906 - DNA, 564 bp, Glycine max
agctttgagcaaattcaaacgacaataactttttactctgatgtctgattgagtcccgtaatatatcgacacgctcgaaattgaatgcttatgctctgagcaaattcaaacgacaataactttttactcggatgtctgattgagtcccgtaatatatcgagaccctcgaaattgaatgttgatgctctgagcaaattcaaacgacaataactttttactcggatgtctgattgagtcatgtaatatatcgagacgcttgaaattgaatacggaagctctgagcaaattcaaacgacaataactttttactcggatgtctgattgaatcccataatatatcgacacgctcgaaatagaatgttgatgctctgagcaaattcaaacgaccatacacttttactcggatgtctgattgagtcctgtaatatatcgagacgcttgaaattgaatactgaagctctgagcaaattcaaacgacaataactttttactcggatgtctgattgagtcccgaatatatcgacacgctcgaaattgaatgttgatgcttttagcgaaatcaaa

SEQ ID NO: 12907 - DNA, 432 bp, Glycine max
tctataaaggtttttgtggactgcttgtcttatcataccactaataccttcacctacaatattgaatagtaggggagctatgggatccccttgtctcaaaccccttgtagggagaaattgcttaaaagggctgccattaatcaaaggtcatataaatgctgagtggaggcaagctgatatccaaaccacatatcacttgtttcaatctatttgctaataacttatctatcaccttgtacatacatccaatcaaggagattggtctgtagtcatcaaatgactgggggtggctggttttgggaattagagctatgacagaaacattactgcctatagggaagctgccatgcacatggaattcatctacaaatattctgaagtcagtgttcttcattttccagaattgtttaatgaatttgaagttgaagccat

SEQ ID NO: 12908 - DNA, 490 bp, Glycine max
agcttgattaagaggcatcctcaagaagcttccttgtggcttcattgagaagctagatccttatctacccacacccctctattaactaaattaacctccttgaaaataattactaataaaaataatgcaacaaataatcaaacatcacacataattactaataatatataaatatatatatcagggtgttacaactctcccacccttttagaaatttcgtcctcgaaatttaccttactcaaacaaggatgggtgagcttatcgcatttaactttctaattcccatgtggcatcttctcctgatgcacctccccagatcaccttgaccaatggaatctgtttccctcttacgtgttttgttcgcctatcctcgatcctcaaaggcaatgtttcatatgtcaaattctccttcacttgtacatcatccaattcaatcacatggtgttgcaacctacccttcggtggggcggtgacacaagactcacaggtg

SEQ ID NO: 12909 - DNA, 474 bp, Glycine max
atgatctatattagacctgctgcatgctaccttgttgacatgtagagatttacgtgatcttccgtgctcgcaagatctgtcatactgacttttgagtctcgccgacggtctataatacccgagtggctatccgtataaactttttgttgtctataagacgaaaagcctgatagcacgcacagactaacgtcttcttttgcgccctttgtataacggggccgacactctcccacacttttagaaatttcctgctctaaatttaccttactcgaacagggatggtggagcttatcgcattctactttctaattaccatggggcgtcttctcctgatgcaccttcccagatcacctagaccaatggaagctgtttccctcttatgagtgttgttcgcctatcctccatcctcaaaggcaatgtttcatatgtcacattctacttcacttgtacatcatccaattcaatcacatggtg

SEQ ID NO: 12910 - DNA, 413 bp, Glycine max
agcttgctgttaatcaccttgctgatctgacacttgatgaattcaaggattcacgtaatggattgaggaggacctataaaccgagcgcagcaacatttaagagaaatggatctaagtctgaaaacgtgaccgatgttcctgaagctatagactggagggtagaaggagctgttactgcactcaaagacctaggtgatcaatgtggtcagacaagtaacaccatgtaagaccttcattgtgctccatctttttcattaattccttcatctcgttttactatatgtttggataacacaaaacaatcaattatagcctaaaaaatgatggtcctgaaaaaatagaaatcattatttactagctctaccaagatagcataacttattatttctcactatggatcgtatgtgagcaca

SEQ ID NO: 12911 - DNA, 666 bp, Glycine max
agctgttgtgagaaccataagtgtgtgttgggaattataaaaaaaatctttgaatgtaaatagggtttgtatatagaccgtgtgacgtaaagagaaagagttccagtgcgtgtacagaaaacgtttgtcatgtataagaatatatatgtacaaagaaaggtttgcctcataaatgaccacaggtgtataattttgtgaatgaaacaaacaggaaaaagaaagaaagaccgcgaaggtcgacatgttatagttaagaagtataaatcattcgtaaagagcaaacgtatcttttggaaacaagggactgatgctaagagtttgttttccggaataaccgagataagaatggatgaattcattgaactaataaaagaacataatttggaaacattgggtctgtttgtgtaaattcccaatcgtagtatcagaatgccatatacaggatgcttgagtgcccacctggctgtagccatgactaatattgcacgttgttttaaatcatcattgtcacgcgtgccttgtggagtaatatgggagttcggcccgagaccgacaccttgacacccaaatttgtttttgcccagatatcaagattgggttcccacgataatagaccccattgaaacacaccttagactttttgaaccttgcctatcaaaaaatcct

SEQ ID NO: 12912 - DNA, 505 bp, Glycine max
ggacctataaatatcaactttaaccttgcaacaaaggagttgaccctgtatattaatattcctcttcaaactcttagaggggactttgaacgttgtttatggaggagtccgagtcacatctctgattatttttctcgagtttggtcgtggccatcaacttaaaagaaatggtgaatatgttgatgacgtgaaggtcatggaaaaaatacttcaaactttatatccaagttctgacttcattgttaccaacattgaagaaaacaaggatttaaagaccatgactattgaacaactcatgggctccttacatgctttccaagaaaaacaaataataattattaaacctaaggaggctacagagcaactactacaactcaacgtaaaggaagcaaactttgcaaattacaagagccaaagaggacgatgtcccggccaatatcgtggacgttggacatggacctggaggagaaggaagaagtggttacaacaaccactccaacaaatt

SEQ ID NO: 12913 - DNA, 549 bp, Glycine max
tgtagggttaaagtctctcgattgtcacgtgctcatgcaacaattgttagccgtggctatacgagacatcttgccaaacaaagtcaggttcacgataactcgcctgtgctttttcttccatgctatatgtagcaaagtgattgatccagtaatgtttgatgagttggaaaatgaggccgtaattatactctgccagttggagatgtattttccccctgctttctttgacatcatgattcacttgattgtgcatctggtcagagaaatcaaatgttgtggtcctgtttatctacggtggatgtacccggttgagcgatacatgaagatcttaaaagggtatacaaagaatctatatcgtccggaagcatctattgttgagaggtacattgcagaagaagccattaaattttgttcagaacacttaaagaaggctaaagctgttgggcttccaaagtgtcgacatgaggacagagtgggtggtaagggttcaagaggactgcaggtgatcactccaagtgtagaaaatttgtttgtatgtcttgaacaaca

SEQ ID NO: 12914 - DNA, 465 bp, Glycine max
agcttagcatcaatcacctagctgaccaaactaatgaggaatttatggcttcccataaaggatacaaaggttcacattggcaagggttgagaataacaacacaaacaccattcaagtatgaaaacgttactgatattccttgggcagtggattggaggcagaaaggtgatgctacttcaatcaaggaccaaggccaatgtggtatgtaacacaaaaaaaaaaaaaaaaaaacccatgctagtgacactactatatgttttctttgtgaacaccgccatgaaactaagcaaataggtttgtagctgttgggcattttcagcagttgctgcaacagaaggtatctaccaaataactacaggaaacctagtatccctctcaaagcaagaagtagtggattgtgatagtgtagatcatggatgggatggaggtctcaatgaacatgggttttgatttcttattaaaaat

SEQ ID NO: 12915 - DNA, 539 bp, Glycine max
gccttggttaacctgggaacccaactggccatgaatcaaaaatctgcacctgtcaccagactctgtggtttatgctcctctgccgaccaccacacagacctttgtccttctgtgcaacaatctgaagcaattgaacagcctgaagcttatgctgcaaacatctacaatagacctcctcaacctcaacaggaaaatcagtcacaacagaacaattatgacctctccagcaacaggtacaatcccgggtggaggaatgatcccaaccttagatggttgaatccttcacaacaacagcaacaacaaccttattttcagaatgctgctagcccaagcagaccatatgttcctccaccaatccagcatcaacaacaataacaacaacaaccccagaaacagcaaacaattgaggctcttccgcaatcttcccttgaaaaacttgtgaggcaaatgactatgcaaaacatgcagtttcaacaagaggctagagcctccattcagagcttaactaatcaaatgggacaattggctacacaattaaa

SEQ ID NO: 12916 - DNA, 526 bp, Glycine max
tgcaaagcggttttacggaccctttcgcattcttcaccgtataggaccagtggcatacgagctggaattaccctctacagtgcgcatccaccctgtatttcatgtttcacttctgaaaccctgcatcaaaacaccagacacgcaaatccttcctcttcctgtgacagtcgtcgtcgcaccttctggaaccaaaccccaagcaattattggtcgccgtacgatacctcaggagcacgattcaagggaagaagtcctggtacactgggagggacaaatgccagctgaagctacttgggaatctaaggctgccatcgtgcgttcctttcctgactttgatcttaagggcaagatctattttggagatatgggtaatgatactaataggccagaaattgagcatgaacctatctccaatagtgggccttccattgctgcaaacaggcccaaacgaattgtgaaacctcctgcacatcacaaaaattaagtttagtaataattataattaaatgatgtaatcttttaatat

SEQ ID NO: 12917 - DNA, 580 bp, Glycine max
  unsure (1)..(580): unsure at all n locations
agcttgattggttgtctaatgtatctcactgtacaaggccatacattgtatttgttgtaagtctcttgtctcattttatgtgttgtgcaagtgaaatgcatttaaaagtagcaaagagaatattgaggtatgtttagggcactattgattatggtgtcaaatttgagaagtgtcaagaattcaagttgtatggattctctaatagtgattgggctagatccgttgatgacatgaagagcacttcaagatactgtttcagcctaggcacaagagttttctcacgatgcacaaagaagcaagagattgtagcacaatccactgctgaggctgaattcatagcagcagtaaatcaagctttatggttgaagaagattctaagtgatttacttttgcagcagaagaacaaaactggaatttttgttgacaacgtgtgtcatgggaagactaaacatttcaacatcaagctctattttttgagaaagatgcacaaagtggagaaatgaacttaatttactgcaagtcttaagatcaactgactaacatgnttacanagccactgcctatcaacaaatttgaactc

SEQ ID NO: 12918 - DNA, 531 bp, Glycine max
tcaagctgttcaattgcttcaaattgctggacacaagggcaaaggtctgtgtggtggtcggcagaggagcataaaccacagagtctggcgacaggtgttgatttttgattcatggccagttaggttaccaggttaaccaaggcatctagtttaccttcaagcttcttagtctcagctgatgaagatgaattcgtggctacttcatgcactcctctaatgacaataacatcatttctggcactaaattgttgggagtttgaagccatcttctcaattaaatttctggcttcagcaggggtcatgtctccaagggctccaccactggcagcatctatcatacttctctccatgttactgagtccttcataaaaatattggagaagaagttgctcagaaatctggtggtgagggcaactagcacatagttttttaaatctctcccaatattcatataggctctctccactaagttggctaatgcctgaaatatcctttctgatggccgtggtcctggaatagacaatatggaat

SEQ ID NO: 12919 - DNA, 444 bp, Glycine max
agcttgtatggcacttgagaaaattcaaggtgctactataagtcaataccttcacttaagaagtcatggtgatgagttgatccaatcttacaaaaattgtacattactaatcacctatataatgagtaacaagggtgcaattttagagagattctataagtgtcttgaggcatgtaacgctgcttttgtaacaacatgtagacctttgattgggttagatggatgttttctgaaaagttattatggtggccatttgttgacaaccattgggaaagatggaaataaccaaatgattcctattgcatatgtagtagtcgaggctgaaaccatagactcatgattatggtttattgacttgttactaaaagacttggatgggattactgaaaaaaagtgggcttttatctctgaccaacaaaaagtaatatttctaaatacttgtga

SEQ ID NO: 12920 - DNA, 346 bp, Glycine max
agcttgtcaatgcattcaggaacctaacaaacaatacaagatgcatcacttccagtcctgctccaatgaataaatgtttataagtgaaacatgtatgcttattctaactcaccccatcttggagcttgtcctctacagcaggggcaccaagaagaaatacgttcttctcaatcttatctgatactgcctcaatcattatatcctgatcagcactgactacattcatggccctagagaatatactatcaaactccgtgtattcttctgcatcaaggtcacgataggccagtatcagggtactcagacccgcatcagcatactcatgcacatgctccatggctttctc

SEQ ID NO: 12921 - DNA, 523 bp, Glycine max
  unsure (1)..(523): unsure at all n locations
tttttctctgtgcacctacgttcctatacacgaaaaaacttttttctctatatacacacccattgaaaaactctttctctctataccgacatgggctatataaaatctctattccttttcaaagatctcttttccccttttcaatatacactcattgtttcatataaaaatttcttttcacacattgtttatatacaaaaatttcttttcttttctttatatacgaatatgacattttgtccacaacatctctttctttctctattcttggcggtatcacgacgtttttttcattttattttaggatgacgttcctacaacagatattatcgacaataatgagataagcactaacacaacgatccaaacaaaatgtatgcacaaaacaaatgacgatcgaaacaacaaaaacaaacgttagtccctcgagtcatagaaatgagataacatacaaatgataaatgatgaaacatgaaaagaatacgaatctggggatcccacngtcatgtggctccgcatgcca

SEQ ID NO: 12922 - DNA, 586 bp, Glycine max
agcttattaaaaacaagcatactaaaacatttttcttgtaacacctaaaagtttaaacaaaaaatattgcttcaaaacgctttaatttaatttattttagaaatacacataactttttttaaccgttacttataaataataaaaacaactctctatactatttttttacaaaacaaaatgtgatagtgggaaaatgctaaatagttgcatgaaattaaaataaatgcaaatgtagaggaattgaatatctatacataaagaaaatgaaacttgcagtgtcacagagaaatatatggatacaacccataatagtgtgataataaacaaaatacattttcatcccttctacaacaaaatacatgatgcaagctccattggagcttgtacgcctaggatcttcttcatcaatggatacctttgctttttcgaagatgaatggcagccgaatggagaatgaagagagagaggagacgccccttcaatgagaagatgagtctagaagaagctcaccaccataagaggtcatggataatagcttggaggatgaagagatcaatgaacggagagggagagaagaccacgaaat

SEQ ID NO: 12923 - DNA, 419 bp, Glycine max
agcttgttgttttttagctagacaactttttattactattttttattttctatatctctcttccatgttattcttttcttgctcgctctctttttgctcctttttttccatgagatatgggtgctacctaaacatacgtatatttttgtgaggtattttgctatatacatgcgtgtccaaggtatcttgctacctaaacatacatatatatgttttgagagatattattgctatatacatgcatatccaaggtatgttgctacctaaacatacatatatatattttgtgaagtatttttcctacatacatgcatatgcgaggtatctttctacctaaacatacatatatattgtgtgaggtatgactaccttacgagcttgtgcttgttttatttaaattcctacgatcatgagcaact

SEQ ID NO: 12924 - DNA, 516 bp, Glycine max
ttacagcagatgccactctactcctagttcttgaaggatatgctaacaaggaaacataagtatattcaccaggaaaacatcgtagtggaaggaaattgttgtgctgtgattcaaaagatccttccaccaaagcataaagaccctgggagtgtaactatttcttgttcaattggagaagtcattatgggaaaggctcttattgacctgggagccaacattaatttaatgccactctccatgtgcaaaaggttgggagagttggagatcatgcccactaaaatgactttacaactggctgaccgctccattaccagaccatatggagtaattaaagatgtgctggtcaaagtgaaacattttatcttcccgacagactttgtggtaatggatatctgtgaagatattgacattcctgtaatattgggaaagccattcatgttaactgcaagttgcatagttgatatgggtagaaagaagctggaaatgggttttgaagaacagaaaattgatttttga

SEQ ID NO: 12925 - DNA, 538 bp, Glycine max
agcttcttattcttatacaagatttaaaaatattcatatgtttctcattctcaagatagaactcaacttgaatttttaacttatttttattgagtctcattttatcttttcccacacacaacaattcaaattttgacttgggaaaattatttttccaatgattaagcaaccttgcttgtagtcatttatacaagcaacttatgtaagcattttaaagaattcattaatttgttctaatagtattctcaggtcagttaactacaaacaattatgatttcttcaggacacacatattctccttgattctcttgaaattgaactcgttatgtaccttaattttactgaatggggtgtgattctgtgtatgtttaggagaaaagaaaggataaaatgtcttcgtctgtggacatgattttgattatattgtcatcttaaattcaggggaagaaggaggccaaggttttcttttttcttttttaagggtatcatgattacggtggggactattcacaatattacttaattatgattattatct

SEQ ID NO: 12926 - DNA, 537 bp, Glycine max
ttgaaatggacattgaggtatctaaatggatctttgaaagttggattaaggtataagaagatagcacatgaggtagcaatcacaggctatgtagatgcagattttgcaggaaatgtatacacaagaaagtccttaactggatatgtgtttactttgtttggagcaacaatcagttggaaagcaaatcaacaatcagttgttgctctttcaacaactgaagcagagtacatggccctagctgaaggagtgaaggaagcaatttggctaaaaggaatggtatatgaacttggaatagcacaaccttgtgtcacaatttactgtgacagtcaaagtgccattagcaaatcaccaaatttaccatgagaggacaaagcacatagatgtgaaactacacttcatcagagatgtgattgaatctgaaaaggtaaaggtggagaatgttttaacagaagaaaaccctgttgatatgttcacaaagttcctatccagtgttaagttcaagcactgccttgacttgattaattttgaagatgccta

SEQ ID NO: 12927 - DNA, 147 bp, Glycine max
agcttgcaatctagtatcttccaagacttggctcgtacgcaagacgagcctagatccccgaatttcgacaaaggcttacaaggtgttctccctaagattctaaatgagataaggttcttcaggaaatatgcacaccatgttgccatt

SEQ ID NO: 12928 - DNA, 344 bp, Glycine max
actcggatgtcttattgagtctcgtaatatatcgacacgctcgagattgaatgttgaagctctaggcctattcaaacaacaataacgttgtactcggaagtgcgattcagtgacgtgatatatcgggacgctcgaaattgaatgttgaacctctgagccaactcaaacgacaataactttttactcggatgtctgattgagtcccgtattatatcgtgacgctcgaaattgaatgttgaacctctgagccaattcaaacgacaataactttttactcggatgtctgattgagtccctaatatatcgagacgctcgaaattgaatgttgaacctatgagccaatt

SEQ ID NO: 12929 - DNA, 407 bp, Glycine max
  unsure (1)..(407): unsure at all n locations
tctagcactggagtagatgacttgataatgtattgcttaatctcattattttaaaaattaagaaatcattttgcaattataaaatctaaggtgtctcaagttaagtagttactctaacaaatttaatattaaaatagatttgcgtataaaagtttttaagtctatgtagtattgtagaacttacaaatttaaaatatataactcatttaaacaatcatgaattgtgaatatttttgttccacgaagtcataagactgataagtgataatcatgtaaaaaaatagagtcaattaagtataaactcgtctactattactatcgctttatntatatgattaagaatcgtacccttgtcatagtttctaaaacatgtacgatatataattcgttgaagaagaatcattctc

SEQ ID NO: 12930 - DNA, 385 bp, Glycine max
  unsure (1)..(385): unsure at all n locations
agctntaagagtcttgtgtaagggccaccgcataccagcttctatcttttggngatccattgataccccatccttagagataatatgcccaagatatcctatcttagtttttccaaaagtacacttcttctgattggcaaacaaagagtgttctgatagtctggccaacacttgtctcaagtgctttaaatgaccctcctttgttttgttgtaaaccaaaatatcatcaaagaaaaccaagacataccttcgaagaanaggcttaagggtggcattcatagcacattggaaagttgctggagcatntgttaatccaaatggcattactagagaatcgtaatgcccttgatgagttctaaaagctgtttttggaatgtctgcctcg

SEQ ID NO: 12931 - DNA, 389 bp, Glycine max
  unsure (1)..(389): unsure at all n locations
gctggaactacttcacatggatntgatggngcctatgcaagttgaaagccttggaggaaagaggtatgcctatgttgttgtggatgatttctccagatttacctgggtaaactttatcagagagaaatcagaaacctttgaagtattcaaagagttgagtctaagacttcaaagagagaaagactgtgtcatcaagagaatcaggagtgaccatggcagagaatttgaaaacagcaggttcactgaattctgcacatctgaaggcatcactcatgagttctctgcagccattacaccacaacagaatgggatagttgagaggaanaacaggaccttgcaagaggctgctcgggtcatgcttcatgccanagaacttccctataatctct

SEQ ID NO: 12932 - DNA, 402 bp, Glycine max
  unsure (1)..(402): unsure at all n locations
aacattcatttcgaggctctcgatatattacgggacttaatcaagcatccaagaaaaaaattattgtcgtttgaatttgctcagagattcaacattcaatttcgagcgtctcgatatattacgggactcaatcagacatccgagtaaaaagttattgtcgtttgaattggctccgagcttcaacattcaatttcgagcgtctcgatatgttacgagactcaatcagacatccgagtaaaaagctattgtcgtttgaatttgctcacagattcaacattgaatttcgagggtctcgatatcttacgggactcaatcagacatccgagtgaatagttattggtcgttgaattggctcagagcttcaacattcnatttcgagggtctcgatatattaccggactc

SEQ ID NO: 12933 - DNA, 368 bp, Glycine max
  unsure (1)..(368): unsure at all n locations
agtttccgactatgctcttgtgtggtggatcaagctacaaaaggagagagcaaganatgaagagccaatggttgatacatggacagagatgaaaaagatcatgaggaagcggtatgtgccggctagttactcaagggacttgaaattcaagctccaaaaactaacccaaggcaacaagggggtaactatggctcgatttcttaatggatgtgctcatgattcangcaaatattgaagaagatgaggaggtaactatggctcgatttcttaatggtttgactaatgatatccgtgatattgttgagctgcangagtttgttgaaatggatgatttgcttcacaacagcatccaagtggagcaacaatta

SEQ ID NO: 12934 - DNA, 339 bp, Glycine max
  unsure (1)..(339): unsure at all n locations
atgcaagcttggctctggccatgagaaccatctcattcttaagatcatccatcttagaaaagatgttcctatcaagtaagttctcttctgcatcaaacaaatcaaatttgatcttctgatcatctacaccaatttccattttacctttccccatatccactacacaattggcggttaacatgaatggatgacccanaatcaatgggatgttagcatcctcttcaatatccatgacaacaaagtccatatggaatgtagattgccgcaccttgaccaaaacatcttcaatcacgccatagagccatgtaatataatgatctgccaactgcaatgtcattc

SEQ ID NO: 12935 - DNA, 442 bp, Glycine max
  unsure (1)..(442): unsure at all n locations
agcttctgttnntcaatttgagcatctcgatatgttacgggactccatcagtcttccgagtgaaaagttattgtcgttcgaatttgctacgagcttcggttntaaagttcgagcgtcttgctatattacgcgactcaatggaacttccgagtgaaaagttattgtcgttagaatttgctacgatcttcgattntaaatttcgagcgtctaattatgttacgagactcaatcagactctcgagtgaaaagttattgtcgttcgaatttgctacaagcttcgattntaaatntcgagcttcacgatatattacgcgactcaatcggacttccgagtgagaagtattgtcgtagaatttgctcgatcttcattttaanatcgagcgtntgatatatacggggactcatcgactttcccaaagttggaaaaatgggttattttggt

SEQ ID NO: 12936 - DNA, 304 bp, Glycine max
  unsure (1)..(304): unsure at all n locations
gtgacgtgctcatgcaacaattgttagcgcgggctatacgagacatcttgctgaaccaagacctgataatgataactcgcctgtgctttntcttgcatgctatatgtagcacagtcattgatccaaccatgtctgatgagttggaaaatgatgctgcaattatactctgccagccggagatgtattctccctatgctttctttgacatcatgattcactagattgtgcatctggtcagagaaatcaaatgctgtggtcttgtttatctacagtggatgtacccggttgagcgatacatgaagat

SEQ ID NO: 12937 - DNA, 300 bp, Glycine max
  unsure (1)..(300): unsure at all n locations
agcttcttggtgttccttttcccatcgaaattcaactgtattctttaatcatagtaaaggtgaaaccactttagttcttcctgacagattagaaatggatgttctaagaaaattcaccttacctaataatgattgaagttggttttctctacttcaattcccttntgatggataatgaaacccaagaaatcacatgcagatacaccaaaagcacattttaattgatccatctttagtctatgtggtcaagatgattatctttcgattttgattntacaacaacatcatctatataaacat

SEQ ID NO: 12938 - DNA, 399 bp, Glycine max
  unsure (1)..(399): unsure at all n locations
agctntactatgcagagaatatccaatgaaaatactcttcatctgacttagcatcaaattntcctaagttatcttttccattattcaatacaaaacatttacaaccaaagatatgaaggtgtgagatgtttggttttctgccattgaacaattcatatggagttttctttaaaatgggtcttattaaagccctatttaaaatgtagcatgcagtgttaacgacttcagcccaaaagtattttggaagaggagtatcatttaataaagttctagcaatctcttccaaagatctatttttcctttcaacaacaccatcttgttgaggggttcttggtgcagaaaaagtatgctcaatcccatgcttatcacaaaataattcaaattctttattttcaaact

SEQ ID NO: 12939 - DNA, 404 bp, Glycine max
  unsure (1)..(404): unsure at all n locations
tgctgcacaactgcaggagcaaccaataacctttctagctnttccttccgaatcaatcttgcacaactgcacagggagaaagtccgccaaaattaaagcacagaaacaatggcataaattaatccattggaaggcataaatatagaatagtcataatcaatattaaatattatccaacaaaaagtaaatgaaattctccaaaggaatgaaatcaacaaggcttactatcaatgacacttacactagcccattctccaagggtctttgcacccggaactatcagtaggctaacattgtgctntgcacaaagggccttagccagtataacttagtcaggttggtcacaatcttctgctagaacgcagttgcacatcatgcttctcaatcccttttgcaccttcatg

SEQ ID NO: 12940 - DNA, 391 bp, Glycine max
  unsure (1)..(391): unsure at all n locations
agctntaacattaattaaaagctcactgttgcaggtgcaagcacttatggtaattnttatgcatgtgactgaacttgagccaatttatatgaaataaaataaatgcattctcagggtttcgttttgctgaatgctacaggctttgcaaaacttttttgctgctttagtctattctgcaaatactagttttgattctctgctggagtcactactagcctgtgctaagccttctccacagtctggtggcattgctaaacaagctntgcattcaatagctcagtgtgttgctgttctatgccttgctgctggtgatcagaagtgttcatctactgtgaaaatgcttactgacattctcaaggatgacagcagttctaactcagtaaagtttttc

SEQ ID NO: 12941 - DNA, 401 bp, Glycine max
  unsure (1)..(401): unsure at all n locations
agcttctaaagtagtataatgaagttgactatgatgaggagttaatatctgacctccaatactagaatttgattcanaagctacagtggagatcggaatagctaacgcatcccttgcaattgcttgtagtattggctactttaactcattcaatttccaccacattaagatatcaaaatctgaacttcttggtaaaaattcctcctctaagtaatgatctaactccgttttcatagttgatgttcttgcccttttctttctttgaatgtatctatcataatcacacaatttactctnttcatcacttaaccacattggtgattanaagaactagtagaatcttgatgctctttggcttgatattccgaaaccaaatcataacacaagtttccgatcctatt

SEQ ID NO: 12942 - DNA, 330 bp, Glycine max
  unsure (1)..(330): unsure at all n locations
tcccctgaaccacagacttcanagcgcgactagcggtggaactcgacacagaccagatacccagacaaatgagaaaggtgttcactgttgctcgccacgacgataccgaacaccaccggcaacagggcgaggtaaacctccccagtctccttcttgcatgtgatcaaaaacgcaaaaatcgcggtgaagaacggcgtcgttgcgccgatggcctgcttgaaggaaacggcgaggtagcggagggaggtgttgccgcacacgacggagaagcagaagatggcgctgagagcgaagatcttgaggaactgcttcttggagtggatgtgctgg

SEQ ID NO: 12943 - DNA, 412 bp, Glycine max
agcttaagaaaaagatggcctcagcaaattccttatttccggaagtggaattctatcaatagacctccaatctttaatggagagggttaccactactggaaaacccgaatgcaaatttttatcgaggcaatagatctaaatatctgggaagccatagaaatagggccttatatacccaccacagtagaaagagtttcaatagatggtagttcatcaagtgaaagcataaccatagaaaaacctagagatagatggtctgaagaggatagaaaacgagtacaatacaacttataagccaaaaacataataacatctgccctacgaatggatgaatatttcacggtttcatattgtaagagtggctaggaaatgtgggacactcttccattaacacatgaaggaactacaaatg

SEQ ID NO: 12944 - DNA, 343 bp, Glycine max
  unsure (1)..(343): unsure at all n locations
ctttccaatctgacattcaccacagatgctgccttcttctattgtcagattggcgatgcctctaacagcacctttgtcaatgattatcttcatgcctcttaagtgcagatgtacaaatctttgatgccatattctgacttcatcttctttggaggatagacatgtggaggagtagctggcttcttgaagtgtccataagtaacagttgtcctttgatctgcttaccttcattagaacttcactcttctcatttgtcaccaagcattctgactttgtgaagcttacattgaatccttcatcacacagctgactgatgctgatcangtttgcagtcagtcccttc

SEQ ID NO: 12945 - DNA, 315 bp, Glycine max
  unsure (1)..(315): unsure at all n locations
ctgcagcttgaattgaatatggaagctctcgagatatacaaatggtcataacttttcactcggatggccgattcaagtgcataacatatcgagacgctcanaagtgaacaacagaagctctcgagaaattcaaatggtcataaagtttcacatggatatccgattctgtgctataatatatcgagacggtcgaaattgaacaacgactcgagaaattcatatggtcataacttcccactccgatgttcgatgcacgcgcataacatatcgagacactcggatttgatcactggaagctctcgagatatacaaatg

SEQ ID NO: 12946 - DNA, 374 bp, Glycine max
  unsure (1)..(374): unsure at all n locations
agcttctagatatattacgcgtctttatcggacatccgagtgnaaagttctgaccatttgaatttctcgagagctttcattgttcaatttcgagcgtctcgatatattatgtccttgaatcagacattcgtgtgaaaagttatgaccacttgaattctcgagagtgtccatcgatcaattttgagcgtctagatatattatgcgcctgaataggacatccgagtgaaaagntatgaccatttgaatttcttgagaacttccgttgttcaattttgagcgtctcgatatattatgcgccgaaatcggacttccgagtgaaatgttatggccatttgaatttctcgatagcttccgctgttcaattttgagcgtct

SEQ ID NO: 12947 - DNA, 415 bp, Glycine max
  unsure (1)..(415): unsure at all n locations
cttgtgtccaggaggatatcgtatgtttttgtaacattcatcaatagtgtgatntgtgaatccataatgtgtacaaaccttgcttcctttcctatcaaaactccctttatcaaagcttcattggctacttcctcctcctctagaagtataatttggaggaaaaccatttttcctataacatttgtccactatgtgattatccttaccacagtaggtacatgatttcgatgaaagtgagcctgttgcattgatgagactagtgtttcccatcagatcactattattgatctgcctttcttgttgaacaacatatgagaagacctttgctatgctaggtaatggatccatcatcactacattggatcagacaatgccaaaatgataatttatacctctaagaaactgcataacttgg

SEQ ID NO: 12948 - DNA, 317 bp, Glycine max
  unsure (1)..(317): unsure at all n locations
ttgtagttgtgctcgaatgtatgatctatctccgatgatatatcnacacnctaaaaagggaacaacggaagctcttaagagatgcaaatggctatcacttttcactcggatgtccgattcacgtgcatcatatatcgtgacccttgaaattgaccacagaagctctacgcaaattaaaacgggcataactattgagtctaatgtatgatcgacgcctatcatatattgtgacggtcaatataggacaactgaagctctcgagaaattcaaatcgctataacttttcacttggatgtcagaatcacgtgcatcatata

SEQ ID NO: 12949 - DNA, 354 bp, Glycine max
  unsure (1)..(354): unsure at all n locations
aactggatgcattggttaacttggtaacccagctggctntgaatcagaaatctgtacctgttgcaagggtttgtggtttgtgctcctctgttgaccaccatacagacctttgcccttccatgcagcaacctggagcaattgagcagcctgaagcttatgctgcaaatatttacaatagacctcctcaacctcagcagcaaaatcaaccacagcaaaacaattatgacctctccagcaacagatacaaccctggatggaggaatcaccctaacctcagatggtccagccctcagcaacaacaacagcagcctgctccttcctttccaaatgctgctggcccaagcagaccataca

SEQ ID NO: 12950 - DNA, 296 bp, Glycine max
  unsure (1)..(296): unsure at all n locations
ctaacccatggaagcttctaatatcttctccatattttgagacgggcgattcttggatggccttgattctcttagggtccactcggaccccacttctacctacaacanagacggagaacactatgttatctacacaaaaaggacacttctctatatctgcatatagagtgtttntcctaaggactgaaagaacttgcctgagatgacctaagtgattatgatngcagctactgtgcgctaaattatcatcaaaacaaacaactacatatctacctatgaaatcgctcacacatgat

SEQ ID NO: 12951 - DNA, 352 bp, Glycine max
  unsure (1)..(352): unsure at all n locations
tgtgtatcactatccactacaacagcaaaatacattgtcattggaagatgctgtgccaacactctctatatgaaacaacaacttgaacactttagggcaacccttgatcccattcctctaccatgtgacaacatatgtgctattaatctgtctacgaatgcggtcgtgcattcgatagctatacatatatagattagacatcattgtctaagagatcatgtatcanaaagtgattgttgcattgagtttgctgatagtgaacatcaactagccgacatctatattaaacctctttctggagataggttcttctttattataaatgatctaggtatcctagatggatcgagta

SEQ ID NO: 12952 - DNA, 442 bp, Glycine max
  unsure (1)..(442): unsure at all n locations
acttatgtgctcttatgaagtatctattttttntataaaanaaattgatacatagtcatgagttcaaacaagtgtaagatacgtgctcaatacatgtataatacattntgtctttgaactccttaaaccaaattgtggctaatttcctagaccaaatttacgctcctctatttttaaactaaagcacatttgcatttgtagtttgattgttggtatttttatctttntattatatgtgatattgacggtgatataattagattatgtagttntttttaatactttataaataaaaagctataagcttttaaaattaatctaatactaaaattagaaatactacaaaatatatttttatcaagaaaatcacagttaaaattataaaaaaaaatggtacatanatatgttatttatgtaatttacattttaaaagtaattaaca

SEQ ID NO: 12953 - DNA, 371 bp, Glycine max
tgaagcttaagaaggatcttgcttgatcgatggctcttggcgtgatcagatgacattagccaagaatgtctcgttcaacatcgtaaacgagaagactactgcagacttaataaaggcgttatcatatatgtacgagaagccatcgacatccaacaaagtatacttaatgcgtcggttgttcaacctcaagatgggagaaggtatctttgtagctgatcatattaatgagtttaatactattcttgcccaattggagtcagtgaagattaaatttgaggatgaggcgaagacattgattctattgtcatcattaccagatagttgggctgcaactgttactgcagttagtagttcaacaatggagaacacat

SEQ ID NO: 12954 - DNA, 428 bp, Glycine max
  unsure (1)..(428): unsure at all n locations
tctgttgttgatgcaaagtgtgtgttaagaaacaagctggaagaaataggtaaggatgtgaggaacaagcctacgcttgtggccaaaggttactcacaacaggaaggtatagattatactaaaacttttgctcttgttgctcatctaagggcgatactcattntactatcctttgctactcatcatggtatgatgttgtatcaaatggatgtaaactgtgtgttcctcaatggacttatcaaggaagaagtctatgtgaaacaaccccctgnngttgagagttctatctatcctcatcatgttttcaaacttaataaagctttgtgtggtttaaagcaagcttcttgagcttggtatgaaaagtaagttcgttttaattgaaatggtttatagaggaaaggaatactatgctattagaagatatggag

SEQ ID NO: 12955 - DNA, 466 bp, Glycine max
  unsure (1)..(466): unsure at all n locations
acaagattatgcttatcttaacgcagaaaatgtcatgctaatccccctgatttgagagcgaactcacgtaatctatttatgcacacgcatacatgtggaatatccaaccatttatatcaacatagaggctatccaacacattctaattgtcacacacatatacgcatttgaaaagaacatacattctcacgcccaaggcattgcgtcaaagttcacacttaattatatcctaaacatttactattacaaactacttacacacatttgaaatatatatcatacaaaatttattgtttctctcacatttatttatatgcatttggaatgctaattacatcccgcacacacctgcattcaaaaagaattccatgctatcatacatncatttaagaaaataatcattcacactctggcaggaatttcatgcnncctttatntacctatatatacataccattgaaaagca

SEQ ID NO: 12956 - DNA, 353 bp, Glycine max
  unsure (1)..(353): unsure at all n locations
tgcacgcttgagagtgaacaacggaagctctcgnattttaaaatggtcttaacttatcacacggacgtgcgattcaggcgcataaaatatctagacgctccatattgaacaacgaatgctcttgagagattcaaatggtcataacttgtcacacggatgtccgattcatctacataatatatccagacggccgaaattgaacatcggaagctctcgacaaattccaatggtcataacttttacaaggaagcccgattctagcgcatcacatattgagatgctcttaattgaaacctgaagctctcagaaatcaaatggtcatacttgtacacggagtccgattagacgcatat

SEQ ID NO: 12957 - DNA, 345 bp, Glycine max
  unsure (1)..(345): unsure at all n locations
catcaactatccatattccttaattcatttaatacatgtgaacttatttcaaggattacctaatgaagacccctatgcacacttggcaacattcattgaaatatgtaacactgttaagattgtcggtgtaccagacgaagctattaggctcagccttttctcattctcattggcaggagaagctaagaggtggatccactcattcaagggcaacagtctgaanacctgtgaagaagttgttgaaaagttcctaaagaaatacttcccagagtccaagactgcagaaaggaaagctgcaatctcttcatttcatctgtttcctgatgaatccttgagtgaagcatt

SEQ ID NO: 12958 - DNA, 344 bp, Glycine max
  unsure (1)..(344): unsure at all n locations
gacaaaagcaaggctcttgctcctacgtatcctctaatgaggaactcagacctacgtagttctagataacttgtgagacttgaaaaagtctccaccggaagatgctgacatctccggaaagggtgcagatgaccacattggcctttgctcatcaatcacacttggggtcactgaatgacgaggtgcggataaccgtaaggtgtctccgcgggctaccagctcttgggtcatggtaacaaatagcggtgcggtcgacaaaagcaaggctcttgctcctacgtatcctccaatgaggaactcanacctacgtagttctggataacttgtgagactctgaaaagtct

SEQ ID NO: 12959 - DNA, 398 bp, Glycine max
  unsure (1)..(398): unsure at all n locations
agctnggatgtctttctctttggtttgtaccttgcagtctcanaactctcctaaatatgctcctttcaattaaactctcaaaacattggttgttacatcttttaatgcgaaacagatgcaacaaaaagaaggatgctagattggggatcacgagttatgataattgatggaattgcccaaggagtcctttatcttcaccaatattccaggttccggatcattcaccgagatttaaaagctagcaacatattgttagacaccaacatgaatcctaaaatatcataatttggaatggcaagaatatttggtgagaatgaacttcaagcaagtacaaaaagaatagttggaacatagtaagtcagataaaagaatattattaatggtataagtaatcatat

SEQ ID NO: 12960 - DNA, 321 bp, Glycine max
tctcgatatgtgatgtgcctgaatcgaacattcgagttaaatgttatttcgatttgaatttcccgagagcttgcggtatttaattttgagcatcttgacacatgatgcgcatgaataggacatccgtgtgaaaagtttggaccactatatattctcgagagcttggttgatcaatttcgaacgactcgatatgttatgcgcctgaatcgtacatacgagtgaaaagtgatgaccatttgcatatatagagagctttcgttagtcaatttcaatgcgttttatatattatgcgcctgaatttgaccacgctgtgaaagttat

SEQ ID NO: 12961 - DNA, 418 bp, Glycine max
  unsure (1)..(418): unsure at all n locations
tgtgctattccaagttcattaatcatacctttaagccagattgattccttcactccttcagctagggccatgtattctgctttagttgttgaaagagcaacaactaattgttgatttgctntcaaactgattgttgtaccaaacaaagtaaacacatatcctgttaaggacttccttgtgtctacatttcctacaaaatctgcatctacatagcctgtgactgctgcctcgtgtgctgtcttcttgtaccttaaaccagctttcaaggatccatttagataccttagtgtccacttcacagcttcctagtgtgcgctgccaggatctcccatgaatctacttataatacttacagcatgagctaagtcaggtctgctgcanaccattccatacattatgcttccaacaccactggcat

SEQ ID NO: 12962 - DNA, 407 bp, Glycine max
tatactataaaagtcatattctattggattcgagggataaacctttataggattttcctagaatctctacctggtcaatcatgtctagtagcctttgagagtgacaagtggctttgacatataagggtatgacacctcaacatgaaaactctatccaaaatttctaaacatgaccttgtgaaaggattacccaagatcaagtatgagaaagatagagcgtgtaaggaatgcatcaaagaaaaacaaaccaaatctagcttttagtctaaaaatgcaataactacttcaaaagtcctagatttactacatgtagatctttctggctctaccaaaaccttaagcctatgttaaaagagatatgaatttgtgatagatgatttctttagattcacatgggttttattcct

SEQ ID NO: 12963 - DNA, 352 bp, Glycine max
  unsure (1)..(352): unsure at all n locations
cttgacttggttcattntcacccctacttttccagatacacttggatatctcctatcanatctaaggctgaaactctttatgttnttcaagcttttaaatcaatggttgaactgcaacttaatactaaaatcaaaagtgttcaatctgattggggggtgaattcagacctttctctgctctcctaacatcctatggcatctntcatagacttatctgtccccacactcatcatcaaaatggtgtggttgaaagaaaacatagacatantaattgattangccttacattattgcatcatgcctttntacccttacagttgtgaattatgcctttattactactgtctatcta

SEQ ID NO: 12964 - DNA, 429 bp, Glycine max
  unsure (1)..(429): unsure at all n locations
ntgatgcaacatttggagaggttaatgaaacaacgagatgatgctctctatgagaggttggatcaaatggagaatagagatcataatgaagaagaaaggaggagaagagggaatgatggtgttcctagacaaaaccaaattgatggtattaaactcaacattcctccatttaaaggaaagaatgatctggaggcctacttggagtgggagatgaaaatagagcatgtattctcatgcaacaactatgaggaggacaaaaaggtgaagcttgccgccacggaattttccgactatgcccttgtgtggtggaacaagctacaaaaggagagagcaagaaatgaagagccaatggttgatacatggatggagatgaaaaagatcatgaggaagcantatgtgccggctagttactcaagggacttgaaattc

SEQ ID NO: 12965 - DNA, 269 bp, Glycine max
gttcacgagcatgggtggctgctggtggaggcactcgaattcccctgctagacctcggggtgatgacactcacatgtttcagatactgcacatattgtccgaatattggaactgaacctgggtcatctgagtaaccatctgccccatctgaattggcagaccctgaatggaagctctttgctgttggtaacattgcatattctggatggtcatttgcctcactaactcttttaaagaaggttgaggatgggcattagatgctggttgtc

SEQ ID NO: 12966 - DNA, 424 bp, Glycine max
ataactcggatgtccgattcaggcgcataatatatcgagacattttgatattgaataacagaagctctcgagaaattcgaatggtcataacttttcacacggatgtccgattcgggcgcataatatgtcgagacgctcgaaattgaacaacggaagctctcgagaaattctaatggtcataacttttcactcggaggaccgattcaggcgcataatatatcgagacgctcgaaattgaaaaacggaagctctcgagaaattcaaatggtcataacttttaactcagaggtccgattcaggcgcataatatatcgagacgctcgaaattgaacatcgaaagctctctagaaattcaaatggtcataactgttcacttggaggtccgattcaggcgcataatatatcgagacgctcgatattgaac

SEQ ID NO: 12967 - DNA, 183 bp, Glycine max
  unsure (1)..(183): unsure at all n locations
cggatgttcgattgagtcacgtaatacatcgaaacgctcgaaattgaaaacagaagctctgtgcaaattcaaacgacaatacattttaactcggatgtccgaatgagtcccgtaatatatcaagacactcgaaattgagaatnaaagctctgaacaaattcaaacgacaattactttttactc

SEQ ID NO: 12968 - DNA, 389 bp, Glycine max
  unsure (1)..(389): unsure at all n locations
ntctcttttgtgcaactatctcatcctctttttcaggtgtatgatgaagcttgacaggttcaggtgcaggtgttgctactggtggaggcacttgaattttgttgctagacctcaaggtgatgacactcacatttttcggattctgcacagtttgtcagaattttggaactgagcttggttcatctgagtagccatctgccccatctgatttgtcagactctgaatggaagctcttgtctcttgctaaaattgcatattctggatggtcatttgcctcactaactcttctaaggaaggttgaggaggggcattagttgctggttgtctttgttgtgattgttgctggtgtattggaggaggaacatatggcttgcttgggctagcaacat

SEQ ID NO: 12969 - DNA, 330 bp, Glycine max
tcaccccataggtcagaacgaatattaccgtctatcaatcgttatctaataacttctatacgatgtctatatttgttctcgactactccatcttgctgacgggaattaggacctgatgattgacgacgaataccacctgattgcataaaataagccaactcatttttatagactccctctccattatcataccagactatctttattgcagtatcaaattgtctgcttatcattttgcgaaaatcttgaaaaacattacacacatcacttctgcgtttaagaaggtataatccagtgatacttgtacagactatcacaaatgtcacacac

SEQ ID NO: 12970 - DNA, 424 bp, Glycine max
  unsure (1)..(424): unsure at all n locations
ntagttgttggtgctgatgttagtatgattggaccgtttggtgtggggttctactctacatatcttattgtcgaaaaggtcattgttaccaccaagcacaatgatgatgagcaatacatttgggagtcccaagctagaggttcattgatttttacctgcttccatgtgctactcgtgccaaccatattctctatctccctctacttttccttacctctcacatgattcattataatgttatgaatcttgttatctcaattggattccttgattttcattttaatagtcgagaaactaactctgttgtattgtatagatggatattttgagtattngtgctntataataactattctttcttcattacacaactctagcatatnctggattttagcttaccagtggttgatgactctcctaaagg

SEQ ID NO: 12971 - DNA, 404 bp, Glycine max
  unsure (1)..(404): unsure at all n locations
tctccttgataaatgtctatccacttcaacatgtntattgctatcatgttgaactggattgtgtgctattgctatggctgctttattatcacaaaacagatccattgtatcttgagctgaacacatgacttcttctactaacctttttaaccagagaagctcacacactcatttagccatacctctaaactccgcttctgcactagatagagcaaccaccttctgttttttactcctccaagagacaagatttcctcccacaaatgtgaggtaacctgatgtgtgatttctatcagtaatactccctgcccaatctgcgtcagtataaccttgaatgtgctgatgcttttttttgcaaacattagtcctctccctggtgaagatttcaggacctttatatcaaa

SEQ ID NO: 12972 - DNA, 373 bp, Glycine max
  unsure (1)..(373): unsure at all n locations
gtgggtacttcacataaacttcatttatgaatccatttagaaaggcactntngacatccatctgatacagnttaatgtctttgtgtgctgcatangctaagagtattctaatagcttctagtcttgctactagtgcaaaggtctcttcataatcaatcccttggtgttgattatctccttgagcaaccagtctagctttgtttctaatcgcttctccttcttcattgagcttggttttgaacacccacttggttccaatcactgattgattcttaagaggnggaacaagattccagaactngttcttaatgaattgattagttcttcttccatagtagtcacccaagaatcttcactcagtgctttatcaata

SEQ ID NO: 12973 - DNA, 395 bp, Glycine max
actgatgccttggcacctggtactttctttcctgaaaaaaaatctacacctgttgcaagtgtctgggtcaatgttcttttgcagataccatacagatctctgtccttctttacagcaatctggagtcaatgagcaacctgaagcttatgctgcaaacatttataatagacctcctcagcagggaaaccaacaacagcagaataattatgacttttcgagcaatagatacaatccaggttggaggaatcatcaaaatctgagatggacaagtcctccacaacaacaacagcctgtccctcctttccagaatgctgctggtccaagcaagccatatgttcctcctacgatgcagcagcagtcacaacaaagaccacaagaaactgatgctcctcctc

SEQ ID NO: 12974 - DNA, 427 bp, Glycine max
  unsure (1)..(427): unsure at all n locations
ntatctgaagaactcgccaagcgcacttactgttctaagcgagttcatcttttgaggatgaacactcatcctcttgctgaactacctgtggctaagcgaggctgaatcgctaagcccaggtaacttaaccatttttttttgtgatagccacatgttagacaagtggcctcagatatcttaagaaggggggttgaattaagatatcccaaactacttccccaattaaaaatctatttatctttttattcaaattataaattcccttaacaatgaacttcttaaatattgattcaaataaaacaagttgaatatgaatataaagcaataataaataaaggagtttaagggaagagaaagtgcaaactcatatttatactggttcggccacacccttgtgcctacgtccagtccccaagcaacccgcttg

SEQ ID NO: 12975 - DNA, 424 bp, Glycine max
  unsure (1)..(424): unsure at all n locations
ggacctataaaactaagctatgctgcnacattataatagacctcctcagcagcaaaacctacaacagcataataattatgatctttcaagcaacagatacaatccaagttggaggaatcatccaaatctgagatagacaagtcctccacaacaacagcagcctgtccctcccttccaaaatgttgctggtccaagcaagccatatgttcctcctctaatgcagcaacaacaaagacaacaagcaaccaaggctcctcctcaaccttccttagaagagttaatgaggcaaatgaccatccaaaatatgcaatttcagcaagagacaagagcctccattcagagtctgacaaatcagatggggcagatgactactcagttgaaccaagctcaatcccaaaattctgacaaattgccttcacagact

SEQ ID NO: 12976 - DNA, 421 bp, Glycine max
ctagaccttgttgaagagacaaaatgatgcaatcctaccccgcatgggcattggctagaagactccaagtagattgggctagagatccaaggaaaggccctagggttctcatgagccttagggtagatttcgagcccatgggctaagtatgagcccgcttatctttgtaaatattagaataggttattccttcgtctaggccttgtattttggccattctagtagtatagggttttagccttgtatttcggggcattttgagctgtgtttgtaataaggacttttttttgttattttcatgttttttgtcatgggggtgagcttagctattatagggggtgtgtagctaagctctagcttctcatctcaaggaggtgagcttagctattatagaggtatatgtagctaagctctagcttct

SEQ ID NO: 12977 - DNA, 303 bp, Glycine max
  unsure (1)..(303): unsure at all n locations
ttaagtcacctgcngctgcagctntcactcgcatgtccgattaagcgcatattgtatcgagacgctagaaatctaacaaaggaagctctcgagaaattcaaatggtcataacttttcactcgcatgtccgattcaggcgcataacatatcgagacgctcganattgaacaacagatgttctcgagaaattcaaatggtcataacttttcactcggatgtcccattcacggcatagcgtatcgagacgctcgacattgaacaacgggatttgtcgagaaaatcaaatggtcataacttttcact

SEQ ID NO: 12978 - DNA, 412 bp, Glycine max
  unsure (1)..(412): unsure at all n locations
tcttanagaggatgaagggatacaaaaactcaaaagtagcccttttgtcaaagagctaactcaatatctctctcttaagttttagctttgatatcaataaatgaaagacaatacttgtattttcacaagttttccttgttattgcaatttttcaaaagttattctttctgttttgacatgaagcaatagttctgcctccttttgtgtctatagctttgtgtccaagatctgatgtttaggagtatgtttgtgttcctgcatttgaactcaatgtggataatctgagtgttgcagaatatctccgactcaaagaagaacttgtagatggatagtaagggttgtttgacttatctctgttatgtaaattattttctttattactattgaatgttgtatttattgcctacgatat

SEQ ID NO: 12979 - DNA, 198 bp, Glycine max
ttaatatagcgaagaattcattttgcggcgttgagatgagtagtggttggagtctccatgtatcgactaatgagtctaataccatatagaatgcctggtcttgtgcacatcaaatattgcaaactacccatcaaactcttgaaatatgtagcattcaccttttctgcttcgtcgaactttgataacttcattttgcac

SEQ ID NO: 12980 - DNA, 442 bp, Glycine max
tgctcaattgctccaggttgctgcatagaagggcaaatgtctgtatggtggtcgacagaggagcataaaccatagactcttgctataggtacagatttctgattcaaggccagctgggttaccaggttaaccaaggcatctagtttaccttcaagcttcttagtttcagctgatgaagatgaattcgtggttacttcatgcactcctctaatgacaataacatcatttctggcactaaattgttgggagttggaagccatcttctcaattaaattcctggcttcagcaggggtcatgtctccaagggctccaccactggcagcatcaatcatacttctctccatgttactgagtccttcataaaaatattggagaagaagttgctcagaaatttggtggtgagggcaactggcgcatagttttttaaatctctcccagtatt

SEQ ID NO: 12981 - DNA, 420 bp, Glycine max
  unsure (1)..(420): unsure at all n locations
tgtgaaatgtctcttaatcaagttcctgtgaaaagaattaaagcagaatggtgtgataagaatactgagattatgttgaaagtgtgcatagaagaggtgaatgctggaaataaacctcacaaccacttcactaagcttggttgggcaaatattgcagaaaagttcaataaggcaacaaatttgagatatgaatataaacaattcagaaataggtgggattctttgaaaaaggaatggcaattatgggctaagcttattgggaaggacacgggtcttggctgggatggggagaagagaaccattgcagctagtgatgaatggtgggaagccaaaattcaggtatttgttattcaacgaaaatagagtttttgtgcatttttggttttattntgcttcatctctgtatatcatcacaacttc

SEQ ID NO: 12982 - DNA, 267 bp, Glycine max
agcttgtgacccaatccaatgcctcttccttcgtgtccacggagatataccagcacacccctaccagcagcctcaatctgttgcatcgcaagtgcaagctgatttccacagtcacatctggcagatccaaatatgtctcctgtcagacactctgagtgtactctcacaagaacatcttgtccgtctccaatgtcaccctgttaaataaaaaatgtcagaaccacaaaatggtttgaagttgaccattgaaccaatcaatcgaagtaa

SEQ ID NO: 12983 - DNA, 434 bp, Glycine max
  unsure (1)..(434): unsure at all n locations
ntctgcagggaagctaagtgtgaagtatgcaatcctgcataggattggcgctgcaaactgggtacccaccaatcatacttccactgttgccacaggtttgggtaaatttctgtatgctgttggaaccaagtccaaatttaattttggaaactatatttttgaccaaactgttaagcattcagaatcttttgctgtcaaattacccattgccttcccaactgtattgtgtggcattatgttgagtcaacatcccaatattttaaacaacattgactctgtgatgaagagagaatcggctctgtccctgcattacaaactgtttgaggggacacatgtcccagacattgtctcgacatcagggaaagctgctgcttcatgtgctgtgtccaaggatgctttgattgctgaactcaaggacacatgcaaggtgctgg

SEQ ID NO: 12984 - DNA, 223 bp, Glycine max
atatctgctggctgatcattagaaccaatgaactcagtgaccatctccttggacagaagcttctctcgaatgaaatgacaatcaatctctatgtgcttagtactttcattgaaaactgggtttgaggcaatatgaagagcagcctgattatcacaatacaacttcattggcagctcttcacaagaccttcattcctgcagaaactgttaatccacatgagctc

SEQ ID NO: 12985 - DNA, 379 bp, Glycine max
tgaatcggacatccgtgtgaaaagttatgaccatttgaatttctcaagagcttccatagttcaatttcgagcttctcgacatagtatgcgcccgaatcggacatccgtgtgaaaagttatgaccatttgaatatctcgagagcttccgatgtttaatttcgagcgtatcgatatattataaacctgaatcggacctcagtgtgaaaagttatgactatttgcatttcgcgagagcttccgatgtttaatttcaagcgtatcgatatattataagcctgaatcggacatccgtgtgaaaagttatgaccatttgaatttctcaggagcttccgttgttcaattttgagcgtctcgatatatgatttgcctgaatcggaca

SEQ ID NO: 12986 - DNA, 332 bp, Glycine max
taacccacctggccttgaatcagaaatctgtatctgtcgcaaaggttagtggattgtgctcctctgctgaccaccatacagacctttgcccttccatgcatcaacctgtagcaattgagcagccttaagcttatgctgcacatatttacaataaacctcctcaacctcagcagcataatcaaccacaacagagcaattatgacgctttcggcaacagatacaaccctggatggaggaatcaccctaccctcatatggtacatccctcagcaacaacaacagcgacctgctccttccttgcaaaatgctgctggcccaagcagaccatacatt

SEQ ID NO: 12987 - DNA, 408 bp, Glycine max
  unsure (1)..(408): unsure at all n locations
agctntgagaaatatcaattgacaatttctntttactcggatgtccgatagtgtccatagtttatcgagacgctcgaaactcacaagcgaagctgtgagataaatcaatcgacaataactttgtactcggctgtccgattgtctcccgctgtatatcaagacgttcgatattcagaatagaagctttgagcaaaatctaacgacaataactctttactcggatgtccgaatgtggtccgaagtatatctgagacgctctgaactcacaacggaagctctgagaaaaattaaacgacgataaccttttactcggatgtccgattgtgtcccgtagggtatcgagacgctccaaattctaaacagaagctctgagcacaatctaatgacaataactacttactctgatgt

SEQ ID NO: 12988 - DNA, 343 bp, Glycine max
  unsure (1)..(343): unsure at all n locations
gagcaaattcaaacgacaataactttttactcgcatgtctggntgagtcccatattatattgagacgctcgaaattgaatgttgaagctctgagcaaattcatacgactataaccttttactcggatgtctgattgagtcccgtaatatatcgagacgctcgaaattgaatgtttaagctctgagcaaattgcaacgacaataactttttactcggatgtgtgattgagtccctgaatatatcgagacgctggaaattgaatgttgaagctctgagctaattctaacgacaataactttttactcagatgtctgattgagtccagtaatatatcgagacgctc

SEQ ID NO: 12989 - DNA, 348 bp, Glycine max
atgcagcttgtgggggacatgttgacatgtttttttatctgacatttatctttaaaattgcctctatctattttcagatggtgaatgcctctaacaacaccttagacaatgattatcttcatgcctcttagaagcagatgtcaaaatctgtgatgccctattctgacttcctctgctttggaggatttacatgtggaggagtgactgtgttcttgagatgaccataagtagcggctgtacttcgaactgctgcccctcattaaaactttactcttcttattagtcaccaagcattctggcttggagaaggatacattgaatccttcgtcacactactgactgatgctg

SEQ ID NO: 12990 - DNA, 198 bp, Glycine max
atttcgagtgtctcgatatattatgcgcctgaatcagacctccgaatgaaaagttatgagcatgtgaatttctcgagagctacctatgttcaatttcgtgcgtctcgagatattatgcgcctgagtctgaccttcgaatgaaaagttatgaccgtctgaatttctcgagagcttgcgatgatcaatttttagcgtctt

SEQ ID NO: 12991 - DNA, 300 bp, Glycine max
  unsure (1)..(300): unsure at all n locations
tagcttggaacatattatatcaatccgaggcctctcttaagatntagacaaaatatctgctagttgattatttgagctgacaaactctgtagctatctccttggacagctacttctctctcacaaaatgacaggcaatctctatatgctcgggtctctcatgaaacactggaatagaggcaatacggaaggctgcctgaattcacaatacaacattattggctgaacttcacagaattttagctctagaataaattgcttgatccacactaatttccacgtgactgatgccatagccctg

SEQ ID NO: 12992 - DNA, 292 bp, Glycine max
  unsure (1)..(292): unsure at all n locations
acttgtgaaagatagtcatgagggtgggctcatgggccactttgggatagacaagacgcctttcttactcaaagaaaagttctattggccccatatgaagaaagatgtccataagcattgcactacgtgtgtggcttgtttacaagccaagtctanggtgatgcctcatgggctatacacacccttacccatcccctctacaccttgggtagacattagtatggaattnttcttgggcttcctgaacccaaagaggtgagactctatctttgtggggggatagattagcaag

SEQ ID NO: 12993 - DNA, 411 bp, Glycine max
agcttggaacatatgaaatcaatccgaggccttcttatagatttagtcaaaatatctgctagttgattatttgagctgacaaactctgtagcaatctccttggacagctacttctctctcacaaaatgactgtcaatctctatatgcttggttctctcatgaaacactggattagaggcaatacggagggctgcctgattatcacaatacaacttcattggctgaacttcacagaattttaactctataataagttgcttgatccacactaattcacacgtgactgaagccatagccctgtattctgcttctgcacttgatctggcaacatgattctgcctcttgctcttccaagagacaacatttcctccaataaatacacaatattctgtagtagaacgtctatctatg

SEQ ID NO: 12994 - DNA, 395 bp, Glycine max
  unsure (1)..(395): unsure at all n locations
tccgaaacaaaacacaaaaccaagcaattcgaaacataatccatcatcaacaccaccgctaccaccatcaatatcttctcatgggtgggtggctttattggtatttgggcattttaattcacacacttcaattctcgtgttcagtcagaaccgtccatggcttgatcccacaatccccaatccaatgcagcagttcaggctgcaccctccgcaactcctacggcgcgtggggcgaccgaaaagactgttctgccctcaacgtgacatacccaacaaccgaagaacagctccgttcggcagtgtcctacgccgtcagaaacaacctcaaagtcaanggttgtaccagattctccacaccattcccaattatcatgcccacatgaaaatacaacaac

SEQ ID NO: 12995 - DNA, 472 bp, Glycine max
  unsure (1)..(472): unsure at all n locations
agcttgcatctacatgaatgactcttaagggaaaatggatttgaatgaagatcaaaatactttaaaaaagtatatataacattaaattttttaaagcactttatgaaataaccttaagcaagtaattcacatatcacattcaaaatcatgcataatcatttaaaaaaatagtcattgtatatattcaattatatcaaaataatcaacacaagtattgaagaataaagatcacagacattatctaatttttaaaaaaattcatgctttgagaaagaaaattaactcaatcaaaacatataaacacatactcacaatttcaatcaatcaagacaaacaaataaaatttttgttagtcatcatataacaagttaattgaaaggaaagtttcaaccaaattaattntaaaagagaatggtgttgatgttacctttttcatgatttaagtgcctagatcttcanagatggaagtcat

SEQ ID NO: 12996 - DNA, 359 bp, Glycine max
cttctccattccattctgcgtggaaatagacacctccggcgtaggaatgggtgcagttctatcccagaagaaccacacaatcgccttcttcagcaaacccttctgttctaagctccttcgtgcttccacttatgtcagggagcttgtcgccattaccaccgcctttaaaaagtggagacaatacttattaggcaatcctttcactattctcacagaccaccgtagcctcaaagaattaataggtcaggccattcaaacacctgaacagcaatgctacctggcacgattactaggctatgactatacaattcactatcgtgtcggaagatccaatgcagcagtcgatgccctctcacggt

SEQ ID NO: 12997 - DNA, 471 bp, Glycine max
  unsure (1)..(471): unsure at all n locations
gcttcattttggttntcaaaatcatctacaataactaagccatagtaattaccacccaaactcatagttcttgaaggaccaaataagtctatgtgaagtagttcatggggttttgaagtagaaacgttttttcctttgaaaagaatttttaacttgtttccctttttgacacgcttcacacaattttttttttcaaacttgagttttggaataccaattactaagtcctttttaactagatgattgaggtgatgcatgtttatatgtgcagctctacgatgccataaccaagaattatcaatcttacttaccaaacaactaagtttatgaaatgatgcatgttcaatattcaacatgtagatattacctatccttttaccaatgtgagcaacctcaccgaacatagcttcactaataagacaacaattcttggttgaattcaatttgaagcccttgtcacatagttgacta

SEQ ID NO: 12998 - DNA, 334 bp, Glycine max
  unsure (1)..(334): unsure at all n locations
acaagtatcatactctgcctgttccagataatttgaagcctaaagaggaatgtggattgcattaactgacaagtatttctaaaaaaagaaagaaaatagcaagattgatccatatatacatgcacagtttgtgaacttagaccatcacaatttatactcactttggttactgctcgtagaacaaagagaaaagtgaaatacaaatntctaacacgatcagggtatcttaggactcggtcatacatcaaagtaacaaagaaatgttgcatagtgaaatgaaattgtgagagcaaattgagaaagaatagataataattattaaccactgggaggg

SEQ ID NO: 12999 - DNA, 502 bp, Glycine max
  unsure (1)..(502): unsure at all n locations
tgagttcttcttcatctcttccncagacttatcctatcctatgccacccatgtaacttgttgcaccaggaacttggagcatccactacaagaagcgaaagtaaagggtaaattgatttgatcaaagctactatagattcagagtattactaagtactaacaaggtagatacatacttgagcaaccttgattgaattatgagtggcaccttccagcacacaaacaaaaaaaaaattgtagaagctgtcattatgaaatatgcacttccactgttcattntataaagtttgcttatgatatttaaatattaaagcaattatataaaatccaatactccggatctaatgcaatacctccaacaatgttctccacattataatatttagccaattcttgatacctgagacaattgtgctgatcacataactatagaacgaataagagagatctaaattctatcaaataggagaccgatatcccttcattattgaatgagttgtact

SEQ ID NO: 13000 - DNA, 457 bp, Glycine max
  unsure (1)..(457): unsure at all n locations
agcttgtagattaattggcatacgaattcatcttctactgaggtcgcgagtatccaaattcatctcctatagattntgagtataggcccagtacttaaatcttaataatatattttaaaacataatattcatatttcatctctttaaagttagaagtaatatttaaaattaatagatagagcagctatgtatgtgtgtgtttgtttcatgagattagtgtgttatttatccaacattttaatctcttcgatgtttctaaatcataattaattgtctcaactgcatggatgtacttaaaaaacatatttgcttataattataaatatcaaacaatcattatacaatatataaatagaggaattaaaacaatcttatgaaagggcctttaattaacatacttggctagaataaaaatttctcctcacatttataaaggtaaaactgtataattatcata

SEQ ID NO: 13001 - DNA, 299 bp, Glycine max
  unsure (1)..(299): unsure at all n locations
agctcgatttcttataatgaaagagaaagaatattttcttgctggccttatagtatctagttgggaccccagcagctgaagtacatgacatttctgaaggactcctctgnatgctttggcttctcatgatttagtgttgtggagagcatagcagaagcagaaagcctgttagcctgagagaatgagccaaaatgggttttgagatggtgttgaactgatcttatagcattggtccacctgcatatgccctgttctttcaaggcctccaccactccatgctctaattcctgatgaactca

SEQ ID NO: 13002 - DNA, 463 bp, Glycine max
  unsure (1)..(463): unsure at all n locations
gagaacaatgacaattgaagaatcaattcatgcttcctttgatgagtctaatgctatttctccaagaaaggatattntatatgatattacagaatctttagaacaaatgcacattcatggacaatattctaaaggaaaaggagaaggaagcaatgaagatccaccaatagaagtcaaagcaaataatgattttccaagagagtggaaaacttcaagagatcatccccttgacaacattattggtgacatctcaaaaggggtaacaactagacactctctcaaagatntatgcaataacatgngctttgtatctatgattgaacctaanaatntaaatgaggccataatagatgaaaaatggataatagctatgcaggaagaactaaaccaatttgaaagaaataatgnttgggagttagttgagaaacctganaactacccaatcatttgaacaaaatgggtg

SEQ ID NO: 13003 - DNA, 445 bp, Glycine max
agcttgaacgaatataagatacatcttcttcatctttggtgattcttgactccatctcattgaagcgcatatccacttgtaattccaaagtgtcaaacctttcaccaacaaaggtttgaagaccatcaaacctgtccaaaatctttgaagtgttgaaggaaaagggtaacaagatgaggctaaagcaatggagcattcaatcgcaatgccttatgcatgcgatatctaacaagatgtgcccaatcaatttgtagacctttatgaaaggcccacataacaatgagatcttcttcatatacctgagcaaggtttgaagatctcggaagcaagatgcgaacaattagttaatgaaggatgcgactttcaaaagccaatgaaccggcaagaaagctttcggtcatatccgcttggttggtgcaaaccaaccggtgggcatcatgtacag

SEQ ID NO: 13004 - DNA, 476 bp, Glycine max
  unsure (1)..(476): unsure at all n locations
tctctgaggtagaagttacttggaatgctacctgtcatagcattatcatactattaagctcagaaggaatttctccatgtagtttgtttccaaccaaattcaggtatgtcaagttagaaagatgactcaaagctgttgggattgatccagataaactgttattggccaaattcagaattttcaaagatttaagagatcacttagaggaaggtaagtctttttcaagcatgttgtntgatgctgcaaangtttggagctcttcacaaccttcaatctcttcaggtatgtggccattaatgctattcatttgtacatcaagagatattagatgcttcaatttaccaattccaaagggtatgcttccatttaagtggcagtatcctagagccaacacttttaattcactcatgtttcaacactacgtggaattcacctgtcgcatgttgctcctattctagaactcgcactcctcaagt

SEQ ID NO: 13005 - DNA, 439 bp, Glycine max
  unsure (1)..(439): unsure at all n locations
atgggagtnttganagcngtcttgtnagcccataaggcgtaatctatcttcacagtccaatctttccttgaggatgcaacaatcttctctagaattctctttagctctctattagacacctttgcctggccatttgtctggggatgatacggtgaagccaccttatgtttgacattataatgccccaatacctaatgtagaaatgtgaagccccatcactaattagcactctgggaacctaaagcgagaganaatgtttttcttcaggaacttgatgacaatcttggcatcattctttggtgcagccacaacttctacccatttggacacataatcaacagctaccaagatgtactcatttccatataaggatggtagagggcccacaatatcaataccccaacagtcanatacttccatttcaattatgttctacaat

SEQ ID NO: 13006 - DNA, 459 bp, Glycine max
  unsure (1)..(459): unsure at all n locations
agcttcatgcttaagtatgtatggcaaaacttctttactgttgttcaagacatacaagtgagcttgtaataaatcttctagacttggagtgatcacatgtagtcctcttgaacccttaccacccactctgtcatcatgccgagacttaagaaggccaacaggtttagccttctcaatgtattctgaacaaaattcaatggcttcttctgcaatgtacctctcaacaatagatgcttctggatgatataaattctttgtatacccttttaagatcttcatgtatcgctcaaacgggtacatccaccgcaaataaacaggaccacaacatttgatttgtgtgaccagatgcataatcaagtgaatcatgatgtcaaagaaagcagggggagaatacatctctaactggcacagtataattgcggcctcatttccaactcatcanactgacggatcaacgac

SEQ ID NO: 13007 - DNA, 382 bp, Glycine max
  unsure (1)..(382): unsure at all n locations
aagaccttacatcatttatgaaatgcatattattaccaaatatcaatatgtcatccacatacatacattaaatgacacatccactataatcaaattgtntcacatacacacatttatcactattatngagttgaaaatcatatgaaagaacaacttgatcaaactnnttgtgccattgctttggagcttgtttcanatcatataaagaattaacaagtttgcaaactttcttttccatacctggctctacaaagcctttgggctagctcatataaatgttttcttttaattcaccattaaaaanatagcttttacattcatttgatgaatntccaaattanaaatacaagcaagtgcaattaaactctaatatagtaattta

SEQ ID NO: 13008 - DNA, 418 bp, Glycine max
  unsure (1)..(418): unsure at all n locations
tattatgctcttgcanaatcctcctcatgttcatttttgggttcatttcagtgagttnntttttttttttgtgagcatcaatgtatggaatcacctctgttgtattgtttaatacatatagatgcgcttgtgagacttcgtgctgagtcattgtgataacgttgaatcctcgtgtacccttaccccccggtgtccgaccatggcgactttcgggcaggccgacgggttgagcacattcagtgtactgggagcaaaactcaatacactcttcagtaacatacctttcgacaattgaagcttcgggtcggtgtagattcttcgtatacccctttaacactttcatgtaacgttcaattggatacatccaacgttaganaacaggcccacacattatgatcttcctcactacatgaacaat

SEQ ID NO: 13009 - DNA, 491 bp, Glycine max
  unsure (1)..(491): unsure at all n locations
tcaagaattaatgggctcatcatactacttgttccncgaatgcaattcaattaataggcctcacatntttaatggagtgggttaccactgttggaaaacccacttgcaaatcttcatagaggctatagatttaaacatttgggaagccatagaaatagggccttatattcccaccatggttgctggaaatacaacaatagaaaagcctatggaagattggagtgaggaagaaagaagactagtacaatataacttataagccagaaacataattacatctgccctatgaatgaatgaatactntatggtatcaaactgtataagtgcacaggatatgtgggataccctacaagtaacacatgaaggcacaacagatgttataagatctangatatacacattaactcatgaatatgaactatttatgatgaatgcaaatgaaagtatacaagacatgcaanataggttcacacacatagttaatcatcttg

SEQ ID NO: 13010 - DNA, 368 bp, Glycine max
  unsure (1)..(368): unsure at all n locations
cgttcctaatttctctacaattgcatcacctctcaatgagctggtgaagaagaatgtggcatttacctcgggtgaaaaacaagagcaagcctttgctttgctcaaagaanagcttactaaggcacctgttctagctcttcctgacttttctaaaacttttgagctagaatgtgatgcctctggagtgggagttggagctgtattgttacaaggtgggcaccctattgcttattttagtgaaaaacttcatagtgccaccctcaactaccccacctatgataaagagctntatgccttaataagagccctccaaactttgaacattaccttgtttcaaggaattgtcattctagtgatatcaatcactt

SEQ ID NO: 13011 - DNA, 379 bp, Glycine max
  unsure (1)..(379): unsure at all n locations
atttccacacatctgagcttcatcaagtggcgtatttcccatctgtctttggtaaaaacactagctcctccttctaatagcaactttgccatgaaatataaatcttcagctgcagcaatctgaagaggaacttggaaatcataatcttttaagttaggatccatgccattggataaaagtcttttaagataatatgaatctccccttgcaactgcaatacacaaaaaactaccaacattntcaatcttcatagaggccccttatccaacaagtaaagaagcaataatagggagcgagagttgtgaacaatgtgttgcatgaccaagaccttgacggccgaacatcactgtccacgaagcgcaaacccgcgctgatcatg

SEQ ID NO: 13012 - DNA, 446 bp, Glycine max
  unsure (1)..(446): unsure at all n locations
tgcaagctttganaaattcanatggtcataactnttcacacatatgctagattaaggcgcatcgcatatagagagactcgaaaatgaacaacggaagctctcgagaaattgaaatggtcataacttttcacactgaggtccgattcaagcttataatatattgatatgctcgaaattaaacatcggaagctctcgagatattcaaatggtcataacttttcacatgaatgtccgattcgggcgcataatatgtcgagaagctcgaaattgaacaacggaagctcttgagaaattcaaatggtcataacttttcacacggatgtccgattcaggcttataatatatcgatacgctcgaaattaaacatcggaaactctcgcgaaatttatatggtcataacttttcacacggatgttcgattcgagcgcataatatgtcgagaggct

SEQ ID NO: 13013 - DNA, 466 bp, Glycine max
  unsure (1)..(466): unsure at all n locations
tgcctagagtttatttaaaaaatgtntntggatgtaacacctataanagaacattttcgaaaaaaaaatttatgatgagaagaagttcgtattgaagttgggattagaggctaagaggattgattgttgtgtggatggttgcatgttgtaatgatggagcgctaactaaatgcaagtttcgtaacaagcccaagtatcgtgcgaagactattggaacaatcattaaaaaaccagttccagtaaaggcaatgttctattttcttgtaataccaaggttgcagagaatatttgcattgatgcanattgcaagccaaaagacatgacactatgagaatagaagatattcagccatgttacgttatccctcttttggtgaagcctagagacactttgatcaggtacattgcagattntctattgatctgtggaatgtgcgacttagttatacatagatgaatttaaacat

SEQ ID NO: 13014 - DNA, 371 bp, Glycine max
  unsure (1)..(371): unsure at all n locations
gctctcgagaagttcanatcgttataacttttcactcggagatccgattcacgcgcataataacgtgacgcttgaaatagaactatgaaagctcttgagcaattcaaatggtcacaacttttcacacgaaggtcagattcacgcgcataatatatcgagacgctctgaaatgaacatcgaaagctctcaagaaattcaaatggtcataactcttaactcggaggtccgattcatgcgcttaatatatcgagacgcttgaaattgaactatggaagctcctgagccattcaaatggtcataactcttcactcggaggttcgattcacgcgcataatatattgagacgctccaaattgaacaacggaagctct

SEQ ID NO: 13015 - DNA, 418 bp, Glycine max
agctagaagaaataagggattaagctttctctattggctgaagcagattacatacctctcgaggcatgagcgtcttgggaataactctgcaagagacaacatgacaaatatctcatcaatggtgaaagagaccaacaaaagcaaacacagtggttactaattgagggtgaggtcctattcctgcctttttcccaacatctgtgtgggaaaaaagagaaaggggaattataaaaagagacaaaagtgaagagtgtttatgttacttacccaatgacatggcgaccgccatcatgaacagcttgtgatactatacccattagacctatgctttctcctccatacaccagatcgatgtggcttgagaccttaattacaacaccattcaaaaaacaatattaatcagccttgaatattaaac

SEQ ID NO: 13016 - DNA, 455 bp, Glycine max
  unsure (1)..(455): unsure at all n locations
tcaagaaaaagatggcctcagcaaattccttatttccagaaaggaattctatcaatagacctccaatctttaatggagagggttaccacgactggaaaacccgaatgcaaatttttattgaggcaatagatctaaatatttgggaagccatagaaatagggccttgtatacccaccacagtagaaagaattacaatagatggtagttcatcaagtgaaagcataactatagaaaaacctagagatacatggtctgaagaggatagaaaacgagtacaatacaacttataagccaaaaacataataacatctgccctgngaatggatgaatacttcanggtttcaaattgtaagagtgctaaggaaatgtgggacactcttcgattaacaaatgaaggaactacagatgttaaaagatctangataaatgcactaactcatgagtatgaaaatatt

SEQ ID NO: 13017 - DNA, 406 bp, Glycine max
  unsure (1)..(406): unsure at all n locations
atgcctcagcaacagcttttacttctttctctggcacagcaaagcatacagaatgctcactactagcctacataaatactgttaatgattaatgccatttcttatatatcagcgtggacaactagaaaaattgaaaaaagttataagtgcacctgagatatcatgataacattagctccaacatcttttactgcaccaaaaatagcactggcagtacctggaacaccagccattccagttctgcaaaaaagcatcaaagaanaatttattggaatctacaacttggacaattaatattggttaaagaaaaccttatattaaatagaaatcctcgtgcagcaaaaaatgccaactattcatcatgtaacacaactgcaattcatgactcacccctcgacgtttacaa

SEQ ID NO: 13018 - DNA, 331 bp, Glycine max
tagtacaatttcgagcgtctcgacatattatgcgctcgaatcggacatccgtgtgaaaagttatgaccatttgaatatctcgagtgcttacgatgtataatttcgagtgtatcaatacattataaacctgaatcggacctcagtgtgaaaagttatgaccatttgaatttcacgagagcattcgttgttcaatttcgagcgtctctatatgtgatgcgccataattgtgcatccgcgataaaagttatgaccatatgaatatctcaagagcttaccgtgatcaattttgagtgtctctatatgtgatttgcctgaatcggacatccgtgtg

SEQ ID NO: 13019 - DNA, 446 bp, Glycine max
  unsure (1)..(446): unsure at all n locations
tttttgtatttatcacaatatgcaaatgagatgatcaaagtctaacttttcccatgcgtaaattattctctaggtctgatactatntgcaaatctttatataagtttttcttcttttatgttntatgatgtgagtgtgatatggcagagcaataaggaaagcaatttgcatccacaaaacaggagatgcagcttcttgcaagtttttgaataatcccttcatgatcggttntgggatcttgcaactnttcttgtcccanattccaaacttccatgagcttacatggctctcaactgctgcctgtatcacctcttttggtatgtattcatggcagtggctgtgtctctggtcgtctctaggtactttttgtctcataaatatcgaatagtgaatataataccgatntactatagagttcaagttctgctgtgctcctcgtttatatt

SEQ ID NO: 13020 - DNA, 464 bp, Glycine max
  unsure (1)..(464): unsure at all n locations
gctaacatccncagactggccttcaacggtttctctctctatgccgtctgcgccattgacaagttacagtctaacaatactaactctgaggaatattcctctttcattccgaatcttccgcatcctatcacgttaaacgcaacaccaccgaagatattgaccgagttcatgaagccactgctggaaacagagctcanaagctacggcttaatcgtcaacgactttgcggaactcggaggagaagagtacatcgagcactatgagcaaaccacgggtcacaaggcgtggcatattgngccagcgtctcttatgtgcaaaagaagccttgaagagaaagcggagaggggacagaatagtgtggtgggagcggacgagtgcatgagatggctcaacgggaagagagtgaaatcggtggtgtacatatgctntgggagcatgtgtcatttccaggataaacaactata

SEQ ID NO: 13021 - DNA, 553 bp, Glycine max
  unsure (1)..(553): unsure at all n locations
ctaagcttacatggagctacattagtaagtgtcgaggtcacaccttcatgcacaggtaactcccccacatggtgatcaccctgagtcttaagggagttccaaaaccgagtgacatacccccaagtacaagtatttccccttatgagaaacttcaagtacttactcgcaaagtttatactatttccatgcaacatgaagtatgaaacatgggtaccatcaatgcacaaactgtggataattaaagattctaagtcatcccccttcatagatgcttaaaactctctaaccactctttcctccaccagggatatccatcatggtaactgaacccnccatgtacatacacaacatacatcatcacaatgacattntcaacatcaacaacatttcatctcaatgtcattatcaacatcaacatcatctcatctcaatgccattctgaacatcaatatcatctcatctcaatgacattatcaacaacaacatcatcatctcatatcaacataataattaataacaacatcacctcatatcatattatcataacactgac

SEQ ID NO: 13022 - DNA, 358 bp, Glycine max
  unsure (1)..(358): unsure at all n locations
tctgggggacatcttgacttgctntccaatctgacattcaccatagattctgccttcttctattttcagattgtgaatgcctctaacagcacctttgtcaatgattntctttatgcctcttaagcgcagatgtccaaatctttgatcccatattctgacttcatcttctttggaggatagacatgtggaggagtagctggtttcttggggtgtccataggtaacaattgtcctttgacctgctgcccttcattagaacttcactcttctcatttgtcaccaagcattctgactttgtgaagtttacattgaatccttcatcacacagctgactgatgctgatcaagtttgcagtcagt

SEQ ID NO: 13023 - DNA, 336 bp, Glycine max
  unsure (1)..(336): unsure at all n locations
ctaagcttaaccgatatntaagctgttntgtcacctaataaatgataatatgaatttcaaccgatcatttgtgttgtaatctcgtttaatcactgttaaagtaaaatctaaccgatcgttcacgttgtaacctcggttaaacaaaaaaaagcacaataattataaaataatcaaaatatctttaaataaaataataaaaaataatctatcagacgttnttctttggaagtttccttgaatgaattgactaataaacaaagtgaaactgaaattctgataccaatgccagatgtcgtacaggatgtcacgacatcacgcttcagaacatgcagatta

SEQ ID NO: 13024 - DNA, 422 bp, Glycine max
  unsure (1)..(422): unsure at all n locations
cttgtacctatgacctgggttgaaaaaagcactacctctatgttagagtggtgagagccaaggatnttccagggaaagatgttactggtggtgtggatccctatgttgaagagaagctnggaaactacatgggccttaccaagcancttgagaaaaagtccaatcctcactggaatcaggtttttgccttctctaaagaaaggattcaagcttttgttctggaggtagtgatcaaagacaaggatattgttgtggaagactntgcaaggagagtgatgtttgatattaatgaaatcccaaaactatatttcccttttcttatctagttntcattaacaaattcttctatatcttactaatcttagagaagaaaatatgtaggaagagcaaaattaacccctacatatgtagcagtatcacat

SEQ ID NO: 13025 - DNA, 492 bp, Glycine max
  unsure (1)..(492): unsure at all n locations
cgtactgcacagttgtgaaattccctgtggttatattggtgtctcttaatttgatcacctttgtactagatntcataattgttgtaaggtgtttggcttggttgggcaccacttgtgctaaattaagtgttattaataaatcatttgccttttaaaaaaaaattaaacttcaccaggaattgaaatcatgcaagtcggtgacaattaaagcatctaaaatatcaatggcgaaaatatttgtactcccttgttttcaaatataaggaaaaaatatattnttttaatctcaaatataaaaaataactaatttcacattatntaatattactatatctctcgaaatatcttgatntaattgatgttctagtttcaataactatnttttatcattatactaaatttcaatgaaagataaattaaanaaatattntaatttaaataatacaataattaactttnttaatactatatcattttttctatatttgaaat

SEQ ID NO: 13026 - DNA, 390 bp, Glycine max
  unsure (1)..(390): unsure at all n locations
ctattcaaaccttttccagactatccatacaaacatcaaaagaggatccatatacagtgaaatcatccataaacacctctatgcaattttctaaaaaatcactgaaaatactgatcattcaccgctggaaggtaccangggcattgcacaggccgaaaggcatcctcctataggcaaaagtgccgaaggggtgtggttttttcctgatcctgaggagcaatagtgatttgcatataaccagaanaaccatcaaggaaacaatagtgagatttacctgccaggcgtttaagcatctgttaaatgaatggcaggggaaaatgtgtccttttggtaacctggttcagcctcctatagtcgatgcagactctccaactgttctgcacccgagta

SEQ ID NO: 13027 - DNA, 320 bp, Glycine max
  unsure (1)..(320): unsure at all n locations
atgtcttattgagtcccgtcatatatcgagacgctcgaaattgaatgttgaagctctgagccaattcaaacgacaataactatttactcggatgtctgattgagtcccataatatatcgagacgctctaaattgaatgttgaagctctcagctaattcaaacgacaatagacttttactcggatgtctgattgagtcccgtaatatatcgagacactcgaaattgaatgttgaagctctgagccaattcaaacgacaataacgttttactcggatgtctgatngagtcccgtaatatatcgagacgctcgaaattgaatg

SEQ ID NO: 13028 - DNA, 386 bp, Glycine max
  unsure (1)..(386): unsure at all n locations
tgtcttgaagtctaaagccgatgaaggacatctgttaatcacataggctattgtgtttgcagcttctccccaaaaggtctttggcagtccagcacttagcggcatgcacctcactctttccaaaatggtcatattcattctttctactaatccattctgctatggtgtgtgagggactattatgtgccttttgatacctgattntctgcaaaactcattgaattgctctgaaacaaactccatgccattttcagtccttaaaactnttagttntgtaccaagttgatttccaataagagtatgtcactctctgaatttttaaaagcttctaatttgtgtttcaaacatacagccatactcttcatgagaatcatctatgatgatga

SEQ ID NO: 13029 - DNA, 447 bp, Glycine max
  unsure (1)..(447): unsure at all n locations
cttctccattccattctgcgtggaaatagtctccttcggcgtaggaatgggtgcagttctatcccagaagaaccacacaatcgccttcttcagcaaacccttctgttctaagctccttcgtgcttccacttatgtcagggagcttgtcgccattaccaccgcctttaaaaagtggagacaatacttattaggcaatcctttcactattctcacagaccaccgtagcctcaaagaattaataggtcaggccattcaaacacctgaacagcaatgctacctggcacgattactatgctatgactatacaattcactatcgtgtcggaagatccaatgcagcagtcgatgccctctcacggtagccaaaagaagccccacttggcaatatttcttctaccattcatacttncttttttttgaagaactaaacaacaactctcacaatccc

SEQ ID NO: 13030 - DNA, 338 bp, Glycine max
  unsure (1)..(338): unsure at all n locations
ttaagcaattcanatggtcataactntcactcggaggtcgtatttatgcgcataatatatcgagacgctcgaaattgaacaatggaagctcttgagcaattcaaatggtcataacttttcacatggaggttggtttatgcgcataatatatctagacgctcgaaattgaacaatggaagctcttgagcaattcaaatggtcataacttgtcactcggaggtgggattcaggcgcataatatatcgagacgctcgaaattgaacagtggaagctcttgagcaattcaaatggtcattacttttcactcggaggtccgattcaggcacataatatattga

SEQ ID NO: 13031 - DNA, 511 bp, Glycine max
  unsure (1)..(511): unsure at all n locations
tttgagcgtctggatatattacgggactcattcatacatccgagtaaaaggttattgtcgtttgaattggctcatangttgaacattcaatttcgagcgtctagatatattacgggactcaattagacatccgagtaaaaagtcattgtcctttgaattggatcagaggttcaacattcaatttcgagcgtctcgatatattacgggactcaaccagacatccgagtaaaacgttattgtcgtttgaatntgctcagaggttcaaaattcaatttcgagcgtcccgatatattacgtcacggaatcggacatccgagtagaaagttattgtcgtttgaattggctcagaggttcaacattcaatttcgagcgtctcgatatattaagggactcaatcagacatccgagtaaaaagttattgtcattcgaatatgctcaaagcttaaaccattcaattcgagcgtctcgatatattatgggactcaatcagacatccgagtanaaaagtatt

SEQ ID NO: 13032 - DNA, 447 bp, Glycine max
tgcttctacataccctgcagaaatagatggtatttcacattagccttacccctcttgcgtgcgagaggttcgttcttttcttgctcatgcaggtttttataggcactttatcaaggaattgtgcaaaatggcccttccactatccaatctgctgcaaaaggaggcggagtttgattttgatgaccgatgcaaagaggcttttgattgactcaagtgtgtggtgactaccacccctatcattcaagaacctgattggatagccccatttgagctaatgtgcgatgcatccaattacacattgggagttgcccttgctcataagattgataagctgccttgggtgatctactatgcttccagaactttggatgctgctcaagaaaattacactagcacagagaatgagctattagcgatagtttttgctcttgagaaatttcgtcatat

SEQ ID NO: 13033 - DNA, 430 bp, Glycine max
  unsure (1)..(430): unsure at all n locations
agctngtttcaaattaagatcagtataaattagtatatctcttgcgtcatgtccatacatnttacaaacttaaagtcatgaatcatatcttcgaatgcgtctgtatatatattgaaatattaagtgccattgacaaattttttataaaattctaaattgaaggtctgaattaacccatcaaaattcattccatacaagaatccatctaaatctatttactttcgaataccaaaagacattttaagagtggtcagaaatctcatttgaataccaacagatattgttgcctgaaaaaaaaatctttattgtcgtaatcgaataccacacgatttgtttatattctatataactcttgattgaataccacaagactttttaatcataaaaaagtttttaaaattccttgaaatttaatccatcccaccccctg

SEQ ID NO: 13034 - DNA, 431 bp, Glycine max
  unsure (1)..(431): unsure at all n locations
ntntagcaattcaaatggtcataacgtttcactcggatgtcggattcaagcgcataatatatcgagacgctcgaaattgaacaatggaagctcttgagcaattccaatggtcataacttttaactcggaggtccgattcaggcgcataatatctcgagacgctcgaaattgaacaatggaagctcttgagcaattcaaattgtcataacttttcactcggaggtcggattcacgcacataatatttcgagacgctcgaaattgaacaatggaagctctcgagcaattcaaatggtcataacttttcactcggaggtccgattcaggcgcataatatatcgagacgctcgaaattgaacaatggaagctctctagcaattcatatggtcataacttttcactcggatgtccgattcacgcacataatatatc

SEQ ID NO: 13035 - DNA, 377 bp, Glycine max
agcttattgtcgattgaatttgctcaaagcttctgttctgaatttcgagcatctccatatactacgggaaacaatcggacatccgagtaaaaaggttttgttgtttgaattttctaagaggttatgatttcaattttgagcgtctcgatatattacgagactcaatcaggcatccgagtaaaaagttattgtcgttagatttttcttagagcttctatttccgattatgagcgtctcgatatattacgagattcattctgacatccgagtaaaaagttattgtcgtttgattttgctcaaagcttctgttatgaatttcgagtgtctcgatatactacgggacacaatcggacatccgaataaaaagttattgacat

SEQ ID NO: 13036 - DNA, 429 bp, Glycine max
  unsure (1)..(429): unsure at all n locations
agcttatatatatatatagatatattttttacttattaaaactaaatacaattntgatatgtgttggtttatgtaattttgaaataaaaatatatagaaagataaaacttgaaaggttatatatagaaagttcataaagtcgtaaaagatgaatatataaaaatgcgtcaaaagtacatgatgaagatagggtgaacagaagttgggttaagtgaatttttgacaacggaaaccaaaataataaaataaaaaaaaaaagaaaaaagctatggaaaacttgcgtgtccccacagctatggtttgtagtctgatgcagagctgctgagataaggatcatcaaatcgaatatctttctccatactgccttcttctctgactatatggattccaattgctttaatgactgagctctctaactctaacacacct

SEQ ID NO: 13037 - DNA, 409 bp, Glycine max
  unsure (1)..(409): unsure at all n locations
tcttagtctcacctgatgaagatgaattcgtgtgttactttatgcactcctctaatgacaatggcatcatttctggcactaaattgttgggagttggaagtcattttctcaattaaatttttggcttcagcaggggtcatttctccaagggctccaccactagcaacatctatcatacttctctccatgttgctgagtccttcataaaaatattggagaagaagctgctctgaaatctggtggtgagggcaactggcacataattttttaaatctctcccagtattcatataagccctctccactgagttgtctaatacctganatatcctttctgatggtcgtggtcctggaagcanggaaattttnttccaagaatactctcttgaggtcatcctagctcatgatgg

SEQ ID NO: 13038 - DNA, 450 bp, Glycine max
cggcagcaatatagctcaatacattacatgttatttaaacccttatacctaaaacaccaccagcaacttactacaccaaatccttgcaatttttttccctatctgcctaatagcaagggtctcttacatcccacataaacctccaaaacaaacgaaacctaacaataaaaattaaaaaaaagaaaaaaaaacaaactagcctccaaatccggagagggttcttccttgtctcttgagagcataaaccacatccattgccgtaacggtctttctcctagcgtgctcagtgtaggtaacggcgtcacgaatcacgttctccagaaagatcttgagcacgccacgtgtctcctcgtagatgagaccactgatacgcttcacaccacccctgcgagccaaacgccgaatcgcaggcttggtgattccctgaatgttatcgcgcaacaccttacg

SEQ ID NO: 13039 - DNA, 390 bp, Glycine max
  unsure (1)..(390): unsure at all n locations
agcttgcaataccctgagatgtattcttttttaacaactgactcagcttagtcttcatttgtatacatttccttgggtagcttgcattctcttctaaataacagtctgctttatctgttgtcctacaagtgttgttcttggggatcatgcatgaattggcttaccacactcacagcataagcagtgtctggtctactatgggacaagtagatgaactttcccactggtgtctggtactgtgacttctctactgttggccttaatccccacttccaatcttgtggttctgctcaatgggaacattgaatgttttacacccttatttgcttgtttctntgagaagatcaaagtaaaactttctttgggtgataaaggtaccttgtttggaat

SEQ ID NO: 13040 - DNA, 379 bp, Glycine max
agcttcattcacaacatcggtttctatattatctatgtttttggacatacaacatcaatttttacctataaccaatgtcggttatcataaaacaacatcggtttataacaaaaattgatgttgttggctgactactaacatcagttttgttaaaaaccgatgttaatatacagatacaacatcggttgttctgaaaaccgatgttgatatatgaagatatataacatttctataataattattgctatacacattggttctgtgaaaaaccgatgttaacggtattactttcaacatcggttaataaatgatgttgaaagtccttaataaccgatgttaaaaccctattttttagtagtgatgtcaacgatagtcctag

SEQ ID NO: 13041 - DNA, 450 bp, Glycine max
  unsure (1)..(450): unsure at all n locations
ntacaggggagtttctcctgccaccattcaaaaattntatatttatccttttccacggagcacaatagaatgatgattttgctgaattaaagtgtgtgaaaaacattttacaatgaaattaagactttattgtaaaatatataattaaatcaatttcgttgttttgtttttttcatcttcactaatatgctggaattgtgattatatattacatcttggtttgtgaaaaaagtaaagaatagaattactattacattatataaggggactaaatataacatgtacaatagaaatacaattttgttgtacaatgtacaacaaaattatatttttattgtgcatgtttttttagcaaaaaaatatataaattnttcactaaataaaattgagattatctgttatacaatagaatcttgatttattgattactgaaaccaaaaaaaaaaaaaa

SEQ ID NO: 13042 - DNA, 390 bp, Glycine max
agcttgaaggaaaactggatgcattggtttatttggtaacccagctggccttgaatcagaaatatgtacctgtcgcaagggtttgtggtttgtgctcctctgctgaccaccatacagacctttgcccttccatgcagcaacctggagcaattgagcagcctgaagcttatgctgcaaatatttacaatagacctcctcaacctcagcagcaaaatcaaccacagcagagcaattatgacctctccagcaacagatacaaccctggatggaggaatcaccctaacctcagatggtccagcccttagcaacaacaacagcagcctgctccttcctttcaaaatgctgctggcccaaacagaccatacattcctccaccaatccaacaacagc

SEQ ID NO: 13043 - DNA, 417 bp, Glycine max
agcttccatcagcagactcacattttactatccgaaagtctcaacctgctctgataccactaatgtaacgacctgcctcatcgctacaatatcaccattctaaatcgcgatcatttcaaattttaaatgaaaaatccattaattttcttatataaaaaaatgaaagtaatttttgtcttgacatacattcaccaaacaacacacattacttttcttatataaaaaaatgaaagtaatttttgtcttgacatacattcaccaaacaacacacattacttaagtggatacgtatatattagtatagtaacttagtacacatcattcacataatggaaataaacttgttatacatataattaaatatgtgattacatctttattcaacaaagaatatgaaccactatggggagtgataac

SEQ ID NO: 13044 - DNA, 404 bp, Glycine max
  unsure (1)..(404): unsure at all n locations
tgaaagaaatctcaagaaccggtggttgcttatgtactgtatgtatgcacgggttgttgccgaaccagtataaaattcttgtgtttttcttcttcttccatacactttttaatttccgttgtgtactttacttttatgctttacttttgtttaagttacataacttagtagtaaagcctaattgaatctagtaacattaagaaggatcagttttaattagtcaaggttacttaataattaattcaacccccctattctcaattactccaaggccacttgatccaacacattgtaccctgagcaactgccagntaggtcttcttccttttcttttcttttcttaagagttgaatgaatccatgtaccctttatgggcctctctgatattatgtatggattcatct

SEQ ID NO: 13045 - DNA, 414 bp, Glycine max
  unsure (1)..(414): unsure at all n locations
agcttcgtactctggntattgttccactgtttcccaagggacctgctcgcaggatagttgaagatagcatgagaggaagtgatagcagagaagatgaaagtggtgaataggaagaagaatggttagaagatgttgataatttaatgaatgatgatgggtttgatgacattgatgatggtgatgactggagtgatgaagaagatgatgatttgccgccagattttgatgaggatgctgaacttttggagatggggcaaggaaagactattaaacaagactcgagacagaatgatgaaatggtccttcttcctgtactccctgatggtcgtccaagagaacaatggtgatcttcacaaaagaaagcatctggcttcatatttgatattgtactggctgatttgtggatgtgcttta

SEQ ID NO: 13046 - DNA, 380 bp, Glycine max
tcttatgctcacctgacgaatgcgtggctacttcatgctttcctctaatgacagtaacgtcacttctggcactacattgctgggagtttgaagccatcttctcaattaaatttctggctccagcaggggtcatgtgtcctaaggctccaccactggcagcatctatcatacttctatccatgctgctgagtccttcataaaaatattggagaaaaagctgctctgacatctggtggtgagggcaactggcacataattgattaaatctctcccaacattcatataggcgctatccactgagttgactaataccggaaatatccttatagatggtcgaggtcctggaagcagggaaaatgttgtctaagaatactgtcttg

SEQ ID NO: 13047 - DNA, 453 bp, Glycine max
  unsure (1)..(453): unsure at all n locations
cgcttgatggtgtcgagaagaaatcacatgtttgtcttcatcttaaagggggagaatgttaatgtatgtatacatgattttgatgatgtcaaagaagaatctaacaaggctgcttcaaatgataagtatttgcttcaagaataattcaagattgcttcaacaaacaaagccttgtttcaagattcactaaagaccaagccttgccttaaaacaaagtgctttcaagacatgcaaggctctggtaatcgattaccaggaagtgtaatcgattaccagaagacagggttgagaaatagctgttgaaaaatgttttgaatttgaattttcaacatgtaatcgattaccatatgtctgtaatcgattaccagcaatggaactttggaaattcaaattcaaaagtcataacctttcanattataactgtgaaattgattacacaaacattgtaatcga

SEQ ID NO: 13048 - DNA, 431 bp, Glycine max
agctaggagctgttattggcaaattactttctgatattagctcctatagaagattgataggaagactcctttatcttaccactacaaggctagatataacttttgcactgaatcaacttagtcaattcctatctgctcagattgtcatcaagcagctgctcacagagtacttcgctatatcaaaggctcacttgcatgtggccttttctacccagcatcaaacgctcacaagctcacagcctacaatgactctaacttggccagttgcattgattttagaaaatccattactggatattgtttatacattggtcttttatcttaccactacaaggctagatataacttgtgcactgaatcaacttagtcaattcctatctgctcagattgtcatcaagcagtttctcacagagtacttcgctatatcaaag

SEQ ID NO: 13049 - DNA, 438 bp, Glycine max
  unsure (1)..(438): unsure at all n locations
tcagctcgctttcaatctccccttttgatgatgcaacttctttttcaagaaacacacacacacactttttcctagtcgatcactcacataaatttccattctcccccttagtttttgaatttatgcttctcttaaaattaagttgattactcatgtgagttcttgatttaatccctatttctctccccctttggcatcaacaaaaagccaaagtgtgtaacaagtttaaagcatacaaatacaaataagcatccatacaacattcatggaaaatataaaccaaaccatgaatagatcaaatatataaaaatcacatagtcaaataacataattaatatttgttcaaacataccaagcaaataaagaaatagtanattggtcaaatatcataataatataaattatttggataagtcactaacatctagtagtcctaat

SEQ ID NO: 13050 - DNA, 438 bp, Glycine max
tatagaatatataataagagaactatgattattgttgaatctattcatgtttcctttgatgagtctaatgctattcctccaagaaaggatattctagataatattgcataatctttagaacaaatgcatatttatggacaagattctaaaggaaaagggaaaggaagcaataaagatcctccaaaagaagccaaatcaaattatgaacttccaagagaatggaaagcttcaagagatcatccccttgacaacattattggtgatatctccaaaggggtaacaactagacattatcttaaagatttatgcaataatatggcttttgtgtctatgattgaaccttaaaatttaaataaagccataatagacgatcattgcatagttgctatgcaagaagaactaaatcagtttgagagaaacaatgtgtgggaactagta

SEQ ID NO: 13051 - DNA, 400 bp, Glycine max
agcttataaagaaaaatgatggcttggttttaacccaatcacattatgttgataagctattgaagaagtttaattattttgatgtaaaacctatttctacttcttatgactcatccattaagttaaagaaaaaattgaataaaggaatttcttcacataaatattctcaaattattggttctttgttgcatttgacaaacttctctacgcctaacattgcatatgaaattggtagattaggaaggtatactaataatcatgatcattctcattggattgcattagaaagagtttttagatacttaaaacgaaccattaattatgacattcattatacatgttttcgtgcagtaattgacggggttagtgatgcaaatcgaatttcttgatctaatgaaac

SEQ ID NO: 13052 - DNA, 358 bp, Glycine max
  unsure (1)..(358): unsure at all n locations
tcaacatcagaccacttccgggtgctggaactacttcttatggattngatggagcctatgctaggtgaaagccttggaggaaagaggtatgcctatgttgttgtggatgatttctccagatttacctgtgtcaacttcatcagagagaaatcagaaacctttgaagcattcaaagaattgagtctaagacttcaaagagaaaaggactgtgtcatcaagagaatcaggagtgaccatggcagagaatttgaaaacagcaggttcactgaattctgcacatctgaaggcatcactcatgagttctctgcagccattacaccacaacagaatggcatagttgaaaggaaaaacaggactt

SEQ ID NO: 13053 - DNA, 433 bp, Glycine max
ctcaagcttgccattctccattagaaatggaacatatagcatagctgtgctacttttgctcttaaattttgatgagactctatcaggggaaaagagaaagttgcaactgttggagctgatagagatgaggatgaatacttatgagtcttcgagattgtacaaagaaaaagtgaaggcttgtcatgaccagaagctgatatagaaagattatatgccaaaccaacaggctgtgctattcaactcatgattgaagctatttgcaggcaagttaaagtctaaatggtctggaccattcaccatcaaggatgtcacgccttatggagcagtggaattatttgacccttactcagaggctctgaatataagatggatagtgaatggccagatattgaagctataccactgtgtgaacattgagaaattgatcaccatt

SEQ ID NO: 13054 - DNA, 355 bp, Glycine max
ctagagctcgcaaaagagacgccagacgaaccttattctctgatctggagctcattgctcacctcttgaaggaattatggggactcggaaaccgcagacgaagtctccaaaaagttattatagttggaacctcataaagcagacaatcatgtattgctgtcaaacttgtatgctggattaggaaaacgggatgaggtgagaaaggtacggcccagaatgaaagagaatggccttcataaagatgcacgctgctggaggattgaaataggacgaatggcttataaatatcttgctagagacggatcactttcagaatcaaaaaagattcaccagacctggacttaattggagaaaa

SEQ ID NO: 13055 - DNA, 403 bp, Glycine max
  unsure (1)..(403): unsure at all n locations
agctantcaccatgttgaaaatgtgttctattatttctctctgagacaccattgtgatgtggtgcatatgcagtagtaagctctcttctaatgccatgttctgcacaaaaaatttcaaattctttggagcaatattcatcacctcgatctgtgcgaagagtctttatagacttttctgcttcattttcaacacttgctttgaagctcttaaatgtacaaaacgcttctgatttttcctgtataaaataacccccacttgttcttgaaaaatcatcaatgaagcaaattaactatcttctacctccattagaatatgggtttattgcaccacaaatattagaatgcaccaaatccaagacatcgtttgcctctcatgacttctctttgggaaattgagatcgat

SEQ ID NO: 13056 - DNA, 431 bp, Glycine max
  unsure (1)..(431): unsure at all n locations
agcttcaatacagtgacactagtgttgcatcaaaggagctgacaaagtcttttggatgggatacatatgattctttcatgcagcatgatgttcaagaactaaatcgggttctctgtgaaaaacttgaagacaaaatgaaggtatggcaagagatttggaatgtttgttcatgattcttcttgatgagtgatcataccaaatggttgttgtatgttatttttcttcaggaaactgttgttgagggaactatacaaaagttatttgaaggacaccatatgaattacattgaatgcatcaatgtagactacaaatcaactagaaaggagtcnatttatggtacttccttatngcatttgaattcaattatatgtttagttcttctttgttatgtaattctaatttagttnttgcatatgcatgttagatcttca

SEQ ID NO: 13057 - DNA, 280 bp, Glycine max
agctagaaaacaagatgttgagagtgttttacagttatcacaagctcattttgaagtcccctctttcaaaaaatagaacatttaaaattgagattgatgtgatagaacagaagtgttttactactacagtaaacagtgaagagcggttatggcattacagatttggccatttaaattttagagatctgattaagctaaactcaagagaaatggtgttgggtttgcctcagatcaagcctcctagtgaagtatgtgatggtttgttacaatgtacgcaatc

SEQ ID NO: 13058 - DNA, 448 bp, Glycine max
  unsure (1)..(448): unsure at all n locations
tanaaccccttgttcattactaaacaagctgaaattaatcacaatcacaagcaaggtatccaaactacatgcaagagataagaatgaaaaatagaaaagggaaagaaaagatgggttgccttccagtaagcgctcttttaacgtcactagcttgacgcatcatcctattatctaggatcaaagcgtagaacagtgttcaatctttccatagctccaccatgatattccttcaacctttgtctgttcactacccatgtcctgtcaggatctttagattgaggatcacaaagctccactactccatatggtcggactttcttgatggtaaatggtctagaccactttgattttatctttccagggaacaatttaagtcttgagttgaaaagaaacacctgttgtcctggctggatgtccttcttgagncaaattttgtcatgatactttt

SEQ ID NO: 13059 - DNA, 364 bp, Glycine max
  unsure (1)..(364): unsure at all n locations
agcttagcctaagtctacatatnttcaaaatattaaganagtcgaagcttagcgcagtatggtgtgcttagctcagtctcatcagaatgacactcatgcttagcgcacagggctgttagacaaatgacctcagttatcttaagaagggggggttgaattaagatacaaagactattccctaattaaaatttcactctctctttttgggttaacaatgcacccttaacatgaattactcaaaagataattcaaaataaacttcttcaaagcaaaagataaatagcaataaataaaagaagtttaagggaagagagaaatgcaaacttgatttatactggttcagccactttccgtgactacgtcc

SEQ ID NO: 13060 - DNA, 449 bp, Glycine max
tgccgcaacatctgaattcgatgtatggaaaatccccgttcggtgtgagttggaacatggacgctagagtggcaagggcatcaaccacctgattctcctctctaggaatgtgatgaaaggatatgtcatcgaagaattctatcaactttctgatgtaggcctgataaggtatcaacttatgatccctagtctcccattctcctctcaactagtggattacacgggctgagtccccatataccttgagcaacttgatcttgaagtcaattgccgcttggttcccaagggcgcacacctcgtagttagctatgtttttggtgcagtcaaaacccaacctagctatgaaagatatatattgctcgtcgggggaaaccaaaatcgccccaagtccatggcctagtgcattagatgcgtcgtcaaaccatataatccatttgtccctatcttca

SEQ ID NO: 13061 - DNA, 369 bp, Glycine max
agcttatgctgcaaatattaacaatagatttcctcaaccttatcagcaaaatcaaccacagcagagcaattatgacctttccagcaacagatacaaccctggatggaggaatcaccctaatcttagatggtccaaccctcagcaacaacaacaacagcttgctccttcctttctaaatgctgctggcccaagcagaccatacattcctccaccaatccaacaacagcaacaaccccagaaacagccaacagttgaggcccctccacaaccttccctcgaagaacttgtgaggcaaatgactatgcagaacatgcagtttcagcaagagaccagagcctccattcagagcttaaaccaatcagatgggac

SEQ ID NO: 13062 - DNA, 279 bp, Glycine max
  unsure (1)..(279): unsure at all n locations
agctatganggttaangtttcacttattgttacgtgctcatgcaacaattgttagccgtggctatacgagacatcttgccaaacaaagtcacgttcaccataactcgcgtgtgctttttcttccatgctataagtagcaaagcgattgatccagtaatgtctgatgagatggaaaatgaggccgtaattatactgcgccagttggagatgtattttcccctgctttctatgacatcatgattcacttgaatgcgcatctggtcagagaaatcaaatgct

SEQ ID NO: 13063 - DNA, 454 bp, Glycine max
  unsure (1)..(454): unsure at all n locations
tcttagtctcacctgatgaattcgtggctacttcatgcactcctctattgacaataacatcacttctggcactaaattgctgggagtttgaagccatcttctcaattaaatatctggcttcagcaggggtcatgtctcctagggctccaccactggcagcatctatcatacttctctccatgttgctgagcccttcataaaaatattggagaaaaagctgctctgaaatctggtggtgagggcaactggcacataattttttaaatctctcccagtattcatataggctctctccactgagttgtctaatacctgaaatatcctttttgatggtcgtggtcctggaagcatggaaaatgttntttaagaatactctcttgtggtcatcccaactcgtgatggaccttatagcaaggtaatatagccagtcctttgccactccttgtaaagaatg

SEQ ID NO: 13064 - DNA, 415 bp, Glycine max
agcttcaagaataatggcctcatcaaactatttattttctgaagggaattcaataaataggcctcctattttcaatggagtgggttaccattactggaaaacccgtatgcaaatttttatagaggcaatatatttaaatgtttgggatgcaatagaagtagggccctatattcccactatggtggcaggaagtaaaaccatagaaaagcctatggaagaatggagtgaagaagaaaagagattagtgcaatacaacctaaaagccaaaagtataattacatctgccttaggaatggatgagtactttagggtatcaaattgtaaaagtgcaaaagaaatgtgggataccctacaagtaacacgtgagggcacataagatgtgaaaaggtccaggatacatacattaactcatgag

SEQ ID NO: 13065 - DNA, 384 bp, Glycine max
  unsure (1)..(384): unsure at all n locations
agctttcttggaagaaatgcatcagcagtttctcgtccctaaagtactcccccattttccagcaatacatattcaagtgatttttggggcaagtggtccccttgtatttatcaaaatctggtaccttgaactttggagggatgacaacatcagctaccaaacacaattctatcatgtcggtgaaagggtaaccaccaaaccctttgacaactattaatctctctccaatgaaatcaagtttctctcttccttccattgccggaggcggcccccctactgagaaatgcagcagttgcagagggcggtgttaaggagctcccaaggtattgggttgaggcatagcattaaatgccagtcccttancagtgaacgtgggatatgggt

SEQ ID NO: 13066 - DNA, 337 bp, Glycine max
agctaaacaaaaggcatgcgaagtgagtgtaatttctagagaaattcccttatgttatcaaacatacaaagggaaaaggtaatattgtagccgatgctctttctcggcgtcatgcattactttctatgcttgaaacaaaattgattggtcttgaaagtttgaaaagcatgtatgaaaatgatcaaacttttggagaaatttttaaaaattgtgaaattttttcagaaaatggtttctttagacatgaaggctttcttttcaaagaaaacaaattgtgtgtgcctaaatgttctacaagaaatttgcttgtttgtgaagcacatgaaggaggtttaat

SEQ ID NO: 13067 - DNA, 394 bp, Glycine max
tcaacattcaatttcgagcgtctcgatatatgacgggactcattcagacatccgagtaaaaagttattgtcgtttgaatttgctcagagcatcaacattcaatttcgagcgtctcgatatattacgggactcaatcaaacatccgagtaaaaagttattgtcgtttgaatttgcatagagggtcaacattcaatttcgagcgtctcgttatattacgggactcaatcagacatccgagtaaaaagatattgtcgtttgaattggctgagagctccaacattcaatttcgagcgtctcgatatatgacgggactcaatcagacatccgagtaaaaagatattgtcgtttgaataggctgagagcttcaacattcaatttcgagcgtctcgatata

SEQ ID NO: 13068 - DNA, 379 bp, Glycine max
  unsure (1)..(379): unsure at all n locations
ctttatgatctgtgtgcacaataaattctctgcccaatatataatgtctccagtgctgaatacaaagcacaagggccatcaattccttctcatagacagattttgccagattcccattagataaagctttactgaagaaagcaataggttgtctctgctgcattagaacaacacctatacctctaccagccgcatcacactcaacttcaaaaggtaaatcaaaatttggaagaattagcacagggggagaagtcatgatcctcttcatctcctcaaaggccttgacagcttctattccccaagaaanattgtctttcttagtcaattcggtgagagggtttgctattttaccataatccctgataaactttctataata

SEQ ID NO: 13069 - DNA, 436 bp, Glycine max
  unsure (1)..(436): unsure at all n locations
tcgacgaggtactgaggaatgcttggatgtttcttgcctacggttacttcatagggagtgagccctattgctaagtgaacggatgtgttatacgaccactctgcccacacgaggaacttgccccatgatgaaggtcgttgatgaatgaaggacctgaggtattgttagatgaccctgttcagtacttcggtctgtccgtccgattgggggtgatacgctgagctcatgcggagcttcgtgcctgaaagtctaaataactcttgccaaaaacaacttacgaataagggatcatggtccaataccaaactgtgtggcatgccatggattttccccacgatatccataaagaggtgtgctacggtggaagctatgtatttggattgaagcatgtcgaagtggacccctctngaaaaatggtcaacaaccaccaagatga

SEQ ID NO: 13070 - DNA, 336 bp, Glycine max
agctatatttggcttccaagatttaatctacattgtgagaatggggtataagtactaagagacaatgctcctgatgcacaaaaggctagattcaaagaattaaagaagcaggattgcaaagcattggtgattcttcatcagtgtgttgatgatacccactttgagaagatcgcaggtgcaaatattgcgaaagaagcctgtgacacgttgaacaaagcttatgctggtgcagataaagtcaagaaagtgcgcttacaaaccctgaagagacagtttgaactgttgcagatggaagagagtgaacgtattagagatttcttcggtagattacaagtt

SEQ ID NO: 13071 - DNA, 371 bp, Glycine max
  unsure (1)..(371): unsure at all n locations
cgctaacccatggaagctcctaatatatcccacactntnntgggtgggccattcttggatagccttgattttctcagggtccacttggnaccccattttaccaactacaaaccctaagaaaactatattatctacacaaaaggtacacttctctatatttgcgtagagggtgtttttcctaaggactaaaagaactagcctgagatgtcctaagtgatcatctaggctcctactgtacactaaaatatcatcaaaataaacaactacaaatctacctatgaaatcccttaagacatgatgcataagcctcataaaggtgcttggtgtattagtgagcccaanagcatcactaaccatcatagaaactaaac

SEQ ID NO: 13072 - DNA, 486 bp, Glycine max
  unsure (1)..(486): unsure at all n locations
tgagttcgatggccncaatgacatctattccccacatggaataaggccaaggggcggacataacattcataggatgtggtggaacattgacattgtccgcgtatgcctgacatttatgacatttccttacatgggcacaactatcgctttccatagtaagccagtaataaccgactctaaggatcttcctggccatagcatgcccattggcatgtgtcccacatgaacccacgtggatttcctcaatcatgaagttcgcctctttggcatctacgcatcgtaggagggtcatgtcgtggtttcgtttgtacaggatggtaccactcacaaagaaaccagtagccaatctccttaacgttcttttgtcattgtcagaaatccccggtggatattctttgttctcaacatattgtttgatgtcgaagtaccatggtttcccatcccactcctcctctatcacacaataatgtgctggctggccttgag

SEQ ID NO: 13073 - DNA, 454 bp, Glycine max
  unsure (1)..(454): unsure at all n locations
tggcttgcagatctagtgtggaagaaatgtaacccggggagtttttgatggcttcaagttcattatgtgacaaatttgcactataaccattcatgacgttggtgtatgtataaatcagcttagaggaagcagtgttgagaatattatcattggttgtaacatgagtattttctagtgcagaagaaagggttgacagataccaattgtgtttggtggagaatagtttgggcatggatgatgagtccatgtggatgatataattctcagattgagccattctggagacaaggtgatggactatgatggagaagcaaagacatagacgaatcatggtagccatgatttgatgaatgttatatccaatgtggactgctaattggctntatcagacaccaatatataactggtgtttaaatagtggataactactgaatgggaaatgataatcggaaca

SEQ ID NO: 13074 - DNA, 392 bp, Glycine max
  unsure (1)..(392): unsure at all n locations
cgatgcacctttcttctgttcttctgtaatgtagntgaatttcttccggaaaggacttaaatcactagaggctgttgagccacatgttatgatgattgctgtgcgacaacatattgattaccaattcatcggcctagaggatgatggtggtgaaagtgataataatgatgatggaaatgattttgacatcattgaaggtggtgagttgagttttgactacagagcaaataatcaagggccatatattgtctcacatcaccgaacacagcagaggttggcaatttgtattactcacaacttgaatggtttttaaagcctgcgtgcatattgaactttattcttaatgcttgtttgcttttttatttaaaatattgcacaagcctgtcacagtt

SEQ ID NO: 13075 - DNA, 338 bp, Glycine max
accctcagctttaatggaagtcaagagcatgatattgcgccgattccgttgactggtgagcaggtatatcagcgggttcaacacctgaatactgtatttgggaagacccacaataatgttatttgtcagacttgcatatggaagaagaggtccattttctctgatcttccgtactggtgtgatcttgatgttagacattgtattgatgttatgcatgtggagaaaaatgtttgtgacagtgtgattgtgacattccttaaaattcaatgcacgaccaatgatggctcgaatacccatcaagatctatctgatatgggtatacgatcacagttgcttcc

SEQ ID NO: 13076 - DNA, 484 bp, Glycine max
  unsure (1)..(484): unsure at all n locations
tctccattaatctagtgcttgcaacattggacaacttccgccatcaatgattagagaacaaacctttccatgcaccaaacatctagaatgaaaaatgttttccctttgtgcatcatctctatctttgcgcaagcttcccatgagtctccttaccattaaatgatctccttcttccggtggaagaaaaccatcatcctccacttcactagaggaactatgagaacttttagatggctcactgtccacctcttcattctccaacacaatcatggtccttgttgaaaaaagattacgaaactcaataaaccaagaggggggtgaattggttntcaaacaaaaccgtacttaataaaacaaagttacggaaaaanaaacttttctaaatggatcgtatcacanaaagaatatgaatcgaatgtattcaatacttaatcaatccttccttacacatgagccttcattaacttcctttctttcaaatcat

SEQ ID NO: 13077 - DNA, 437 bp, Glycine max
acagaagctcacgagaaactacaatggtcataacatgtcacacgaaagtccgattcaggtgcataatatatcgagacgctcgaaatagaacatcggaagctctctagaaattccaatggtcataacttttcacacggaagtcctattcaggcgcataatatatcgagaagctggatattgaacaacgaaagctctcgagaaactcaaatggtcataacttgtcacacggacattcgattcatgcgcataatatatcgagacgctcgaaattgaacaacgtatggtgtcgagaaattcaaatggtcataacttgttacacggaagtccgattcttgcgcataatatattcagaagcttgaaatagaacaacggaagctcttgagaaactccaatgtgtataacttgtcacacggaagtccattcaagcgcattatata

SEQ ID NO: 13078 - DNA, 461 bp, Glycine max
  unsure (1)..(461): unsure at all n locations
ggatagtataaagaagaaagataatatagaacgtcatccaagaaacaaggttgtggcgagagtagctcctgttgacttggaatggatgactaagattcgggacttcttggagatatgctcactcccaaaaaatccaacaacgacaagaaatatcaagagatatgccatctattatgtgatagagggaggagatctgtacgaaaaaggcttcacggccaccctgttgaagtgtttgacttacgaatatcctaaatacgtaatgaatgaaatgcataaagggatatgtggaatacaattaggatctcgatcaatgacaactcaagttcttagaattgggtactattggccaacaatgagaaaaaactatgtagagtatgtgaaagaaagcagagaatgccaaanatttggcaacacttatcatctgcctattaaagaatngcacaacatagtggcgcatgacc

SEQ ID NO: 13079 - DNA, 484 bp, Glycine max
  unsure (1)..(484): unsure at all n locations
cgcttctacaatctcccnncttttgatgatgacaactctgaaatcaagaaacacatacacacactttntcctagtcgatcactcacttaattttccattctccccctttgttttttaatttatgcttcacttgaaattaagttaattacttatgtgagttcttgatttaattcctatttctctccccctttggcatcaacaaaaagcccaagtgcgtaacaagtatatgacaatcatatactattaatcattcacaagacatacattgaagaatataaaccaatcatgaagcaagaaacatgaatagatcaaatataanaaccacatagtcatataacataattcataattgttcaatcaaaccatgcaaataaagaaatactaaattatccaaaatgtcataatatagccaaatacacgactagaaaacaaagtactagtaatattaaaaataatagaaaacttagatgatggtggcagcgat

SEQ ID NO: 13080 - DNA, 388 bp, Glycine max
  unsure (1)..(388): unsure at all n locations
tctgtccctgaganactggttcccagaagacaacagggagtgaagattgctgaataccctagccttgcaacaagtcctatggaagtagacacggagatggacaagaaaatccgcagtatggtgagtagcattttgaaagaagcctctgtgcctgaagctgatgaagatgttccaacatcttccaccccgaatgtttctatgcctgatgttgagaaagatgttccaacatcttccggcccanatgatgaagtactctcttcccccagcaaagagagatcaacagaggaagatgatcaagccgcagaggagacccctgcaccaagggcaccagaacctgctccaggtgacctcattgacttagaagaagtcgaatctgatgaagaaccca

SEQ ID NO: 13081 - DNA, 418 bp, Glycine max
  unsure (1)..(418): unsure at all n locations
tcngttgttcaatntcgagcatctcgatatgtgatgttcctgtatcggacctccgtgtgataacttatgaccattntaatttctcgagagcttccgttgttgaatttcgagcgtctcgatatattatgcgcctgaatcggacatccgtgtgaagggttatgaccatttcaatttcacgagagcttccgttgttcaatttcgagcgtctcgatatgtgatgttcctgaatcggacctccgtgtgataacttatgaccattngaatttctcgagagcttccgttgtntcaattcgagcatctcaatatatgatgtgcctgaatcggacatccgagtgaaaagttatgacaatttcaatttctcgagagcttccgtggttcaattcgggcgtctccatatgtgatgtgcttgaatctgaca

SEQ ID NO: 13082 - DNA, 395 bp, Glycine max
  unsure (1)..(395): unsure at all n locations
agcnttctttcanattattgcgcanaaatcagtctgtccaatgggacgatgattgtcaaatggcatttgaaaggattaaacggtgtttgatgaatcctcctgtgttcatgccaccggtgcccagaagacctcttattcgatacatgacagtattagatgagtcgatggggtatgtgttgggacaacacgacaaatccggaaaaagggaacgagccatctattacttgagcaagaagttcacagcgtgcgagatgaactactctttgctagagaggacgtgtngtgccatggtgtgggcaactcaccgtntgaggcagtatatgctgagttacattacttggttggtgtccanaatgaatcatgtcaagtgcatctttgaaaagcccgctctcact

SEQ ID NO: 13083 - DNA, 408 bp, Glycine max
  unsure (1)..(408): unsure at all n locations
gctggaatcatttatcctatctctgacaaccaatgggtgagtcccgtccaggtagtcccgaaaaagactggcctcacagtgatcagaaatgagaaggagcagctgattcctactcgggtgcagaacagttggagagtctgcattgactataggaggctgaaccaggttaccaaaaaggaccattttcccctgccattcattgaccagatgcttgaacgcctggcaggtaaatcccactactgtttccttgatggtttttctggttatatgcaaattactattgctcctgaggatcagganaagaccacattcacctgccccttcagcacttttgcctataggaggatgcctttcggcctgtgcaatgcccctggtaccttccaacggtgcatgattagtattttcagt

SEQ ID NO: 13084 - DNA, 415 bp, Glycine max
ttcaaatgtgggaggatctatttctgaaggccaaacacggaggacttgatgtcatacacacttatgtcttctgggatgtccatgaaccttctcctggcaatgtactactccggatcctcctttctttccatctatctacctcattttaaaagaaaaataataatatttttttggctctttgtgatttttctgatgctgggtcgcagtacaattttgaacgaaggtatgatctagcacggttcattaagacggtgcagaaggtggggctttatgctgatcttcggattggaccttatgtatgcgcttattggaactttgcgtacattttgcttccataatccatatctctctctctgtgtttgtttgagcgcgcgtgtaatatgtgagaatgttggattacaatccattcttaacg

SEQ ID NO: 13085 - DNA, 414 bp, Glycine max
  unsure (1)..(414): unsure at all n locations
gagtttcctaatctcttattagcactcgctatgatgatgtcatcctcatacaagagaaggtaaagaacacacactttcctttttttcaggatgtatacatagttgtcatatatgtttctaatgaagccatatctgatcaagaactcatcaaatttcatataccacattcgagggctttactttagtccatacaagaattttcagcaagcacaccttgttctccccttcttcaaaaccttcaggctggttcatgtaaatggtttccttaagatttccatggtgaaaagctgttttaacatccagttgttcaagttccaaattgtactgatttaccacaccaagtatgattctaattgaacaatgcttcataaatgtgaanaaatctcattgtaatcaattccttccacctatgta

SEQ ID NO: 13086 - DNA, 494 bp, Glycine max
  unsure (1)..(494): unsure at all n locations
agcttacttgctgagattccattatgggaaagatctcgatccagctgagttgatccattgtgatagtaccgcggctattgcaaaatttgagaaccattattacaatggtaaaaaacgacagatacgttgtaagcacagcactgttagagaattactctcaacaggagctgttagagtggatcacgtacgcactgatgatagtttagcagattctttgacgaaaggattagctagagagaaagtccataacacttctagaagaatgggactattgcccttactgcgatgatcattcatgatggtaacccaacctanatgactggagatcccaagaactaggttcaatgggtaataacaagttatgaagtgatatgagatgaacatgtnngtataagtgaaagcagcatgattcctgaagtaacaagaggatgagttatgaaaaaaaaaatcataattcttaatgagatctatactctatgttgagtggagtacct

SEQ ID NO: 13087 - DNA, 416 bp, Glycine max
  unsure (1)..(416): unsure at all n locations
agcttcaacgcagttgggcatgaagtggaactattcttatcattgatctccatgaaggcttcaatcgggtggtgtntagtaatacggaggattataatttcgtgttttttgaaggaccgtggatgtttgtgaaccactacctcattattcanagatggagatcattcttcccaatgcatgcagaagagacgaagaagatagcggtatgggtcaagattcagtgtctccttattgaattatataatgatgtgttctcgtcaagaattaggatgagtttaggcaagtttctcaagtaggataaattaacatcaatccactccaagggaaaatttgcaagaatgtgtgtggacctagattggataaacccttganatcttatatntacgtgagagggtttaagttgaacctggagtatg

SEQ ID NO: 13088 - DNA, 410 bp, Glycine max
  unsure (1)..(410): unsure at all n locations
gcttaatggcttctcgacatanactattatatcttacagtgagattntcaatgtcaattggatctgttagtttttcatcagttccaatatcagaatttgcattccttgtccatcgtttcaaaatgtagtgcgatggaagggtaagaacatttgtaacagtgaagacagtcaatatatgtcaacaaagaacgcctgagtattcaaacatctggcagctgcaattcaccttcatttcagagatatttaatgtgaccatgtatgccttgtgatcatgtacatattntgcaaccctgtatntactgatcacaccatcatcctcaacattattngcagtataagcaaaagtttccaccagttcctcctgannatttgcanaaatcttcttagtgtacatatttgctgctttgtgt

SEQ ID NO: 13089 - DNA, 437 bp, Glycine max
  unsure (1)..(437): unsure at all n locations
ntagaaggatcactatttctccgtgagagtgtcctacatgccacaaagcctcctaggcctacaccaattattgttggataggtatcatcatatttatgctaagaaaatcatgcacatcagaaagaataagttaaaatagtataccaattggtacaatagcaccatctgagccaccacaaagcatcaagtcctgcaattacttacatttttaatgttttcaataaaataactatataattacactaaacttgttttaagaaataaaagattggtaaaatatgagaaatctaccatctaataagcaaatgctgaagtgagatacttacagcttcacctctaatgatatggtttgcagcattcaatatacaaaaattactagtagcacacgctgtagagattgaataattagggcccatccacccctaaagtttcatatg

SEQ ID NO: 13090 - DNA, 374 bp, Glycine max
  unsure (1)..(374): unsure at all n locations
ctgcagccttcccttttttaaatatatgtttagttgtcctttatatataaaagattcattaatgtagtttactactttgttagatatagaattatattgaattaaaagtgaaattaaagagttaaaatgtgtatattactgaataaagttaaaagagaattcagagaataatgaagaaagaagagcgagagaagacataacatgttacatgtgtacatcgatcatagaccacaaaataccaattatatgaatttaaatnntaaattttcttaggtactctgggtganaaatataaatcttagataataatctaaaaacgacatatattntagatatgannaaattaattaagcctaatattagcatagatgata

SEQ ID NO: 13091 - DNA, 396 bp, Glycine max
  unsure (1)..(396): unsure at all n locations
agcttctatagaaggttcgttcctaatttctctacaattgcatcacctttcaatgagctggtgaagaagaatgtggcatttacctgnggtgaaaaacaagagcaagcctttgctttgctcanagaanagcttactaaggcacctgttctagctcttcctgacttttctaaaacttttgagctagaatatgatgcctctggagtgngagttggagctgtattgttacaaggtgggcaccctatngcttattntagtgaanaaattcattgtgccaccctcaactaccccacctatgataaagagctntatgccttaataagagccctccanacttgggagcattatccttgtttccaangggaattgtcattcatagtgatcatcantcacttaagt

SEQ ID NO: 13092 - DNA, 462 bp, Glycine max
  unsure (1)..(462): unsure at all n locations
accggatccttaagtcaccgcggctgcagcttataaactaaaagcatgaacacttcnttttactcctcttgaagtactntntaagaaagtatatttaaagagatataatttcttatttctgaaaaataaactcaactcaattaaatttaattaaatatcaacttttttaaagaaaataaatattaattaaagaattagattaaattcaatcccattcgaatcacttaagattattggaagatttaaagtattttccattgttatcccaccacgacaaatcaacggtggtcatcacgaatgtgttatcttgttgtggataagtcatcggtacacaaaatctagaacgattcctgatagcatgtattataataatatatacacgacaacaatgttcctaacatgtaaagctttctatataaagatatgattgtcattataataaggaatcttatatcttataat

SEQ ID NO: 13093 - DNA, 407 bp, Glycine max
  unsure (1)..(407): unsure at all n locations
ntaccgctacanaagccggggtttatcaattgactgcnttcctcgaaaatggcgattcgatgcaacaaacagtgacctatgtgccgaacgtcgcgaatgctgaaatcacgctggcagcctcgaaggatccggtgattgccgacaataacgatctcacgacactaacagcaacagtcgctgatacagagggcaatgcgatagccaacactgaggtaacatttactctgccggaagatgtgaaggcgaacttcacgctgagcgatggcggtaaagtgattactgatgctgaaggcaaagcgaaagtcacgctgaaaggtacaaaagcaggcgctcatactgttacagcatcgatgactggcggtaagagtgagcagttggtggtgaactttattgcggatacgctcact

SEQ ID NO: 13094 - DNA, 493 bp, Glycine max
  unsure (1)..(493): unsure at all n locations
agcttgtgctatcaagctatgacttanatcaatgacaactagatgcagaatggttgctntgaagttgattgcaagaccatggttgacacttttaatagttgtgctaaaggaatctctgatttttatgtcattntaaataaatgtagagcacttatttcatctatcccaaactctagaagatgctntgattaggttgcattggatgtgccgcatcacctaacaaagtcactctcccaattccccaagtgttgatcatgcctctgtcacatatatccctctgcagaatcatgtgctctagtgtttctgatatgagtgcaatcacttcattgcaccaattaccaaagagagatccanaagcctcttcttcccttggctaacatctgaagcaacanagtactggttcaagcccaagaaaacctttgtaccttcagttcaatcaccaaaacagaaactntanatagtggaatagttataagtataacattttctaaca

SEQ ID NO: 13095 - DNA, 437 bp, Glycine max
tggacagttcagcagaccacatgtttgtggttaggattcttccctcaggaacccaatgagcatatacatccttcaatgtttgaatggctttttggccttctggggtctccctgcctccaatgaggacacggtccggattgaaaagatcttggattgcagttccctcagcaaggaattcagggtttgaaaggatttggaacttgattcccttgccattgtgagtcaaaattttctctatggcctcagcagttttcacagggacagtggatttctccaccacaatcttgtcactcttggatacatcagcaatcatgcgtgctgcactctcccagtacgttaaatccgcggccttaccggctccaagaccgcgagtttttgtcggggtgttgacagagacaaacactatgtctgcctcatagacatgtttctcaacatca

SEQ ID NO: 13096 - DNA, 271 bp, Glycine max
  unsure (1)..(271): unsure at all n locations
agcttgtgccaattggtccattgttgagaagttatggtgacacaattgcaactgcaaaatcaatcggacaatactgggaagaagatctctcttgtatgagttggctcgaccaacaacctcatggttctgtcttgtatgttgcctttggtagtttcactcattntgatcaaaaccaattcaatgaactagctcttggaattgacctcaccaatagaccttttctttgggttgtgcgtcaagacaataaaagggtataccctaatgaattctt

SEQ ID NO: 13097 - DNA, 397 bp, Glycine max
tgtgctattaactaattagaatcttacctgcaccaattgcatatacatttttcaagccacccatgacctcatgggtgacaaggtcactgttgtcccaaacaataaaatgtggttgtcgtagaaactttgcaagaggttttctccatttctcatctccgcaaattcgggcattggcatactccttgttgtatatttctgaggcaatatttggaccaccaagatacagtatgttctccataggcactccagctgtcaaagtatgcattgtaaagagttgagaatgaggaaagataaaaatagatatactaccaaattaccagcttccattggtcgttatcaaacaaattctagataacaaatagcagtacctagctggtggactatcagtttatatgga

SEQ ID NO: 13098 - DNA, 454 bp, Glycine max
  unsure (1)..(454): unsure at all n locations
agcttcaagaaaaagatggcctcagcaaattccttatttccagaagggaattctatcaatagacctccaatctttaatggagagggttaccactactggaaaacccgaatgcaaatttttatcgaggcaatagatctaaatatctgggaagccattgaaatagggccttatatacccaccacagtagaaagagtttcaatagatggtagttcatcaagtgaaagcataaccatagaanaacctagagatagatggtctgaagaggatagaanacgagtacaatacaancctaaagccaaaaacataataacatctgccctaggaatggatgaatattntagagtttcanatngcaagagtgctaaggaaatgtgggacactcttcgattaacacatgaaggaactacagatgttaaaagatctanggataatgcactaactcatgagtatgaat

SEQ ID NO: 13099 - DNA, 466 bp, Glycine max
  unsure (1)..(466): unsure at all n locations
agctnntcacacggatttcgattcggngacatatcttatctagacgctcaaaatttaacaacggaagctctcgagaaatttgaatggtcgtaacatttcacacggatgctcgattcgaggacataattcatctagacgctcgaaactgttcaacggaagctctcgagaaattcgaatggccataacatttcactcggatgtttgattcagggacataactcatctagacgctcaaaatttaacaacggaagctgtcgagaaattcgaatggtcataagttttaacacggatgttcgattcgcgacataatatatcaagacgctcgaatatgaacagcggaagctctcgagaaattcgaatggtcataactnttcacacggatgttcgattcggggacataactcatctagacgctcaaaattgaacaacggaagctctcgagaaatctaatgtcataactttcaca

SEQ ID NO: 13100 - DNA, 366 bp, Glycine max
gtctcacgattgtcacgtgctcatgcatcttttgttagtcgtggctatacgagacatcttgccaaacaaagtcaagttagccataactcacctgtgctttttcttccatgctatatgtagcaaagtcattgatccctgtcagtatgatgagttggaaaatgacgccgcaattatatagtgtcagttggagatgtatttcccccctgctttctatgacatcatgattcacttgattgagcatctggtcatacaaatcaaatgctgtggtcctgtttatctatagtggatgtacccggttaagcgatacatgaagattctataaggggttacatagaatctatatcatccagaagcatctattgttga

SEQ ID NO: 13101 - DNA, 386 bp, Glycine max
  unsure (1)..(386): unsure at all n locations
agcttctcgatatattatgcacatgaatcggactctttagtgacaagttatgggccattgaatgtttcgagagcttccgctgctcaatttcgagcgtctcgatatattatactcctgaatcggacctccgagtgaaaagttaagaccatttgaatttctcgagagcttccgttgttcaattttgagcgtctcgatatattatgcgcctgagtcggaccttcgagtggcgagttatgaacatctgaatttctcgagagcttccgttgctcaatttcgaccgtttcgatatattatactcctgaatcggacctccgagtgaacagttatgaccatttgaatntctcgagatcttccgttgttcaatttcgagcgtctctatatgtgat

SEQ ID NO: 13102 - DNA, 377 bp, Glycine max
ataactcggatgtccgattcaggcgcataatatattgtttcacttgatattgaataacagaagctctcgagaaattcgaatggtcataacttttcacacggatgtccgattcgggcgcataatatgtcgagacgctcgaaattgaacaacggaagctctcgagaaattctaatggtcataacttttcactcggaggaccgattcaggcgcataatatatcgagacgctcgaaattgaacaacggaagctctcgagaaattcaaatggtcataacttttaactcagaggtccgattcaggcgcataatatatcgagacgctcgaaatggaacatcgaaagctctctagaaattcaaatggtcataacttttcacttgg

SEQ ID NO: 13103 - DNA, 331 bp, Glycine max
  unsure (1)..(331): unsure at all n locations
agcttctctatatgtgatgcacctaaatctgttttccgagttanaagttatgaaccatttgatttctcaagcggtatcttttctcaatttcgagcgtctcgatatattatgcacctgaatctgacctccgagagaaaagttatgaccattcgaattgctcaagagcttccattgttcaatttcgagcgtgtcgatatattatgcgcctgaatcggacctccgagttacaagttatgaccttctaatatctcgatagctctctcgtttaaatttcgaacgtctcgacatattatgcgcccgaatcggacatccgtgtgaaaagtatgaccat

SEQ ID NO: 13104 - DNA, 422 bp, Glycine max
  unsure (1)..(422): unsure at all n locations
ntganaatataatatcttgatttctaaaatacccattttctctccccctttggcaacataaaaaaggccaaagtgcataaaataaaacatacataaatgattctaaaacatacataaagcataatttgaatatcaccaaatttaaatacataccacttgtcatatatcatcaaaataactaagtctaagcataaaacataaacatataagtgcaaaataaaaaaaaaacatcaagttcagtcataattaactaagtaccaaatacttaaaacataaccaatgttttagagaataatgtcataaaacatagccaaatacatggcttaaacttaaaatataataataatctaaatctatgaagatggtggtggaagggtgaagcaatcaatcaagtaattcaaacatatcaaacaagaatcaca

SEQ ID NO: 13105 - DNA, 452 bp, Glycine max
  unsure (1)..(452): unsure at all n locations
nnagcttgttgaaatataatcaatgcaagacctcttgagagtattagtgaacatgtcctccagttggtcactagagttgacaaactcaatggtgattnttcctgagagcactttctctctcacaaaatgacagtcttctactgtgtttagtccattcatggaagaccggattagatacaatgtggagaacggcttgattatcgcanataagattggtggcttgagtgtctccaaattggaactgctggagaagtntccttagccatgtaatttcacttgtagttgcaggcatggcacggtattcagcttcagcactggatctagtgactatattttgtttcttgcttccncatgggatcaaatntcctcaaataagaacacaataaccaatcatggacttcgtggctgatggtgagtctgcctaatcagcatcagagtanaacaaatgatct

SEQ ID NO: 13106 - DNA, 464 bp, Glycine max
  unsure (1)..(464): unsure at all n locations
agcttggtcccacactctgttcagctctctctaatctagaggtaaatctaggatctctatcagatactatgctagatggcacaccatgtaacctgacaacctcacttatatacaaggtggtcaacttctccaaggaaaatctgatattaatgggaatgaagtgagcagacttagtcaatctgtcaacaataacccagatagaatctaaacctctaggggttctaggtagtcctaccacaaaatccatggaaatactgtcccacttccactgnggtatctctatgggttgtaacttccttgaaggtctctgatattctatcttagccttctgacagactangcatgcatacacaaactcactaacctctctcttcatgttgggccaccaaaacgtcgtcttaaatcatgatacatcttggtagcaccaggatggatgctcanantactcctatgtccttcctcta

SEQ ID NO: 13107 - DNA, 376 bp, Glycine max
  unsure (1)..(376): unsure at all n locations
agctttanattgaataacggaagctatctatatattcatattgtcataactagtcacacggaagtccgattcaggcgagtaatatatcgagaagcttgaaattgaacaacgaatactctcgagaaatgtaaatggtcatcataacttgtcacacggaagtccgattcaggcgcatactatatcgagacgctcgaaatctaaccacggacgctctcgagaaatgcaaatggtcataacttttagcacgagagcccgactcaattgcataatatatcgagacactcgaaattgaacaccgaaagctctcgagaaattcacatgatcataacttcttacacgtgagtcagatgcacacctataatatatcgagatgctc

SEQ ID NO: 13108 - DNA, 371 bp, Glycine max
  unsure (1)..(371): unsure at all n locations
ntcactcggaggcccgattcaggcgcataatatatcgatacgctcgaaattgaacaacggaagctatcgagaaattcaaatggtcaatacttcgaactcggaggtcctattaaggtgcataatatatctagacgctcaaaattttacaatggaagctctttggctatacaaatggtcataacttttcactcgaaggtccgattaaggcgcataatatatcgagacgctcaaaattgaacaatggaagctcttgagcaattcaaatggtcataacttgtcactcggaggtgcgattcaggcgcataatatatcgtgacgctcgaaattgaagaatggaagctcttgagcaattaaatgggataacttgtact
